United States Patent Application Publication US 2019/0348154 A1 - sequence listing, part 99

SEQ ID NO: 369089 - DNA, 501 bp, Salmonella enterica
atggatttgtcacagttgacgccgcgtcgtccctatctgttgcgtgctttctacgagtggttgctggataaccagttgactccgcatctggtggtggatgtgatgctgcctggcgtgcatgtccctatggaatatgcgcgcgatgggcaaatcgtcctcaatattgcgccgcgggcggtaggtaatctggagctgtctaatgatgaagtgcgttttaatgcgcgcttcggcggcgttccccgtcaggtttctgtgcctttggctgcggtgctggcgatttacgcccgtgaaaacggcgcaggcaccatgtttgagcctgaagccgcctatgatgaagacgttgtcagcttaaatgatgatgacaataccgcaggcgcggaaagcgagaccgtgatgtccgtcattgatggcgataagcccgaccacgatgacgacagtagtcctgatgacgagccgcctccgccgcgtggcggacgtccggcactgcgcgtagtaaaataa

SEQ ID NO: 369090 - DNA, 639 bp, Salmonella enterica
atggctgtcgctgccaacaaacgttcggtaatgacgctgttttctggtcctactgacatctatagccatcaggtccgcattgtgttggctgaaaagggtgttagttttgagatcgaacatgtggaaaaggacaatccacctcaggatctgattgacctcaacccgaatcaaagcgttccgacactggtggatcgtgagctgaccctgtgggaatctcgcatcattatggaatatctggatgagcgtttccctcatccgccgctgatgccggtttatccggtcgcgcgcggtgaaagccgtctgtacatgcaccgtattgaaaaagactggtatacgctgatgaacgtcatcgtaaacgggtctgcttccgaggccgactctgcgcgtaaacaactgcgtgaagagctgctggcgattgcgccggtatttggtcagaaaccgtatttcctgagcgacgaattcagcctggttgattgctacctggcgcctctcttgtggcgtttaccgcagttgggtattgaattcagcggcgcaggggcgaaagagctgaaaggctatatgacccgcgtctttgaacgtgattctttcctggcttctttaaccgaagctgaacgtgaaatgcgcctcggtcggggttaa

SEQ ID NO: 369091 - DNA, 795 bp, Salmonella enterica
gtgggattttttaactcattgtttactaagaaagagtcgttaatgctgtcgaataaatgggaattctttataacaacggtggatgaccatgttacgggtatacgtgtggatatcggcgccattcaggatgaaaaatttgatcgccttatccataccgggttcttacgtgttcattacaccaactgttatgaaaatggtttaccgcagcccgatgaaacacagcgtttaaatcgtatagaggactggcttgatgaaaaggggaagacgtttccgatctggctggtgggtgtggttacccaacaaggctggcgcgattttgtgttcatgtcggaagaggatcttaactgggaaaagacgctggataaattgctcgctggtggcccggaaatctcttttagttatagagagagtcacaatgataaaggaaacttttaccgccagttcttgtatccaacccgatacgactggaactggatacacgattcccgtgtgtgccggggattacaggaacaaggtgatgatctgacgcttccgcgcgctattgattattatgcgacattgcctacagaggtcgcagcgcgcgacttggcgcaagatattgctgcattaccgtatggcataacgctggtcagtattcgaatgaatgacccgcaacaggggtttatggcgtcttttatcagcaccgatgctccgcaacaatggcatatgacagaaatcacttgccagcttaccgatctggctgaaaaacatggcggcagttttgatggctggggcgcaccggtagtacaggcataa

SEQ ID NO: 369092 - DNA, 393 bp, Salmonella enterica
atggctgaaaatcaatactacggcactggtcgccgcaaaagttccgcagctcgcgtgttcatcaaaccgggcaacggtaaaatcgttatcaaccaacgttctctggaacagtacttcggtcgtgaaactgcccgcatggtagttcgtcagccgctggaactggtcgacatggttgagaaactggatctgtacatcactgttaaaggtggtggtatctctggtcaggctggtgcgatccgtcacggtatcacccgcgctctgatggagtacgacgagtccctgcgtggcgaactgcgtaaagctggcttcgttactcgtgacgctcgtcaggttgaacgtaagaaagtcggcctgcgtaaagcacgtcgtcgtccgcagttctccaaacgttaa

SEQ ID NO: 369093 - DNA, 429 bp, Salmonella enterica
atgaaaacttttacagctaaaccagaaaccgtaaaacgcgactggtatgttgttgacgcgaccggtaaaactctgggccgtctggctactgaactggctcgtcgcctgcgcggtaagcacaaagcggaatacactccgcacgtagatactggtgattacatcatcgttctgaacgctgacaaagttgctgtaaccggcaacaagcgtactgacaaagtgtactatcaccacaccggccacatcggtggtatcaaacaagcgacctttgaagagatgattgcccgccgtcctgagcgtgtgattgaaatcgcggttaaaggcatgctgccaaaaggcccgctgggtcgtgctatgttccgtaaactgaaagtttacgcgggcaacgagcacaaccacgcggcacagcaaccgcaagttcttgacatctaa

SEQ ID NO: 369094 - DNA, 1125 bp, Salmonella enterica
atgcaaagcctttcccctacatcgcgttatctccaggcactcaacgaaggcacccatcagcctgacgacgtacagaaagaggcggtcgaccgtctggaaaccctttatcaggcgctcaccgcgaaaaaatcgtcggctacgccacccggcggactgatagcgcgactggggaaattattaggcaaaaacgaaccggacgcgcaaataccggttcgcgggctgtatatgtgggggggcgtgggtcgcggcaaaacctggctcatggatctcttctaccacagcctgccgggtgagcgaaaattacgcctgcattttcatcggtttatgctgcgcgtgcatgaagaacttaccgcgctacagggacagatcgatccgttagacattattgccgatcggtttaaaaccgagacggacgtactgtgtttcgatgagtttttcgtcaccgatattaccgacgccatgctgctgggcggtttaatgaaagcgctgtttgcacgcggcattacgctggtcgcgacctccaatattccgccggatgaactctaccgcaacggtttgcaacgcgcccgcttcctgccggctatcgatgccattaaacagcactgcgacattatgaatgtggacgccggcgtcgattaccggctgcggacgctgacgcaggcccatttatggctaacgccgcttaatgatgaaacccggcggcaaatggataaactgtggctggcgttagcgggggccgcgcgcgagcacgctccgacgctggaaatcaatcatcgctctttatccaccctgggcgttgaaaaccaaacgctagcggtctctttcgctacgctgtgcgtcgaggcccgcagccagcatgattacattgcgctctcaaggttatttcacacggttctgctgtttgacgtgccggtcatgacgccgctgatggagaacgaagcgcgccgctttattgcgctggtggatgagttttacgagcgccacgttaagctggtggtcagcgccgccgcaccgttatatgaaatttatcagggggaacagctcaagtttgaatttcagcgctgtctgtcacgcctgcaagagatgcagagtgcggagtacctcaagcgggagcatatgccgtaa

SEQ ID NO: 369095 - DNA, 399 bp, Salmonella enterica
atgacctgggaatatgcgctaattggattagtcgtcggtatcatcattggtgccgtggccatgcgttttggtaatcgtaagttacgtcaacagcaggcattgcagtacgaactggaaaaaaacaaagctgagctggaagagtaccgtgaagagctagttagccactttgcccgcagcgcggaactgctggataccatggcgcatgattaccgccagctgtatcagcatatggcgaaaagctccagcagcctgctgccggaaatgtctgcggagtcgaatccgttccgtaaccgtctggcggagtctgaggcgagcaacgatcaggcgccagtacaaatgccacgtgattattctgaaggcgcgtctggcctgttacgtagcggcgcaaagcgcgattaa

SEQ ID NO: 369096 - DNA, 1368 bp, Salmonella enterica
atgaaaaaacacacccagctgttaagtgcattagcgttaagtgtcgggttaactctttcggcgccgtttccagcccttgcatcgataccaggccaggtgccaggccaggcgacgctgccaagccttgcccctatgctggagaaagtgctgcctgctgtcgtcagcgtaaaagtcgagggaaccgccgcccagagccaaaaagtgccggaggagtttaaaaaattctttggcgaggatctgccagaccagccgtcccagccgtttgaaggactcggttcgggggtgattatcgatgccgcgaaaggctatgtattaaccaataatcatgtgattaatcaggcacagaagatcagtattcaactgaatgacggacgcgaattcgacgcgaagctgatcggcggcgacgaccagagcgatatcgctctgttacaaattcagaatcccagcaagttaacgcaaattgccatcgccgattccgacaaactccgcgtcggcgatttcgccgtggcggtcggtaatccgtttggtctaggacaaaccgccacctccgggattatttcagcgctgggacgcagcgggcttaatctggaagggcttgagaactttattcaaaccgatgcctctattaaccgcggcaactccggcggcgcgctgcttaacctgaacggcgagctgatcgggattaataccgcgatcctcgcgccagggggcgggagcatcggcattggctttgctattccttccaatatggcgcagacgctggcgcagcagttgattcagttcggcgaaatcaaacgcggattgctgggaattaaaggcactgaaatgaccgctgatatcgctaaggcattcaaactgaacgttcagcgtggcgcttttgtcagcgaggttttacccaattcaggttcggcgaaggccggggtgaaatccggagacgtgattatcagtcttaacggtaagccgctgaatagctttgccgaactgcgttcgcgtatcgccaccaccgaaccgggcacgaaagtgaagctgggcctgctgcgcgatggtaagccgctggaggtggaagtcacgctggattccaatacctcttcttccgccagcgccgaaatgatcgccccggcgttgcaaggcgcgacgttgagcgacggccagctgaaagacgggacgaaaggcgttaaggttgatagcgtcgaaaaaagcagtcctgccgcgcaggccggtttgcaaaaagatgatgttatcatcggcgttaaccgcgatcgcatcagttctatcgccgaaatgcgcaaagtgatggcggcaaaaccgtccatcattgctcttcaggtagtacgcggcaacgagaacatttatctattgctgcgctaa

SEQ ID NO: 369097 - DNA, 1071 bp, Salmonella enterica
atgtttgtgaagctcttacgttcggtcgcaataggtttaattgtcggcgctattctgttggccgtcatgccttctttgcgcaaaattaatcctatcgccgtcccgcaattcgacagtaccgatgagacgccagccagttataattttgcggttcgccgcgccgcgcctgccgtcgtcaacgtctataaccgcagtatgaacagtaccgcgcataatcaactggagatccgcacgctaggttccggcgtgatcatggatcaacgcggttatattattaccaacaagcacgtgattaacgatgccgatcagattatcgtcgcgctacaggatggccgcgtctttgaagcgctactggttggctccgattcgcttaccgatctggcggtgctgaagatcaacgccactggcgggctgcctaccatcccgattaatacaaagcgtacaccgcatattggcgacgtcgtactggctatcggcaacccatataatctgggacagaccatcacccaggggatcatcagcgcaacgggtcgtatcggcctgaacccgacggggcgacagaattttctccagaccgacgcctcgattaaccacggtaattccggcggcgcgctggtcaactcgttaggcgaactgatggggatcaacaccctctcttttgataagagtaacgatggcgaaacgccggaaggccttggttttgcgattcccttccagctagccacgaaaattatggataagcttatccgcgacggtcgcgtgattcgcggctatatcggtattggcggacgagaaatcgcgccgctgcacgcgcagcagggtagcggcatggacccgattcagggcattgtcgttaatgaagtgacgccaaacggccccgccgcgcttgccggtattcaggttaatgatttgattatttcggtcaataataaacccgctgtgtccgcgctggagacgatggatcaggtggcggaaatccgcccgggctccgtcattccggtcgtggtaatgcgggatgataagcagctcacgttccaggtgacggtgcaggaatacccggcgtcgaactaa

SEQ ID NO: 369098 - DNA, 699 bp, Salmonella enterica
atgagtgaaatggttgcgtttcggcaaggtacatccatgccatccagagaaaccatcttgcgttatgttgttgagacggtgaatcagataactgagcttgagccagcactgcatttgctgccgtggtctggcgtcaactcagcaatatatgagcaacgttttgcacagtgttacgacgaggggctttgtgccgcacagacgtcggcaccgaatgttccgcaggggattctgccatcgaccgattgggctcagggtatcgggttactctgttttgccgcagggtatatgagcgcaggcgagcggccattaacacacaatcagttatgcgatttcgtcaaacaggcggctgttggtttatcgccgattgagggggaggcggcgagcggtttctcgacggtacgtagtattgcattacccgtattcaggcgattacaacgcgatggtcacgcgtctcggatcctgctgttacaaacgttgctgcatctggttgcctggaaaagcgcatcgcagtatgcgcgtcaacaggcgcaacgactgctctggatgggcggcattttgggggaagggggggagcatagcctgcttgtactggataaggcgctgcgtgaagaagccgtcggggagaaaagtctccccgctctgctgatcttcacgagtttcctggcgcattttccggcagggccagtctttattgactag

SEQ ID NO: 369099 - DNA, 1641 bp, Salmonella enterica
atgatttttaccaaaatcattaggggattcatcaggactcagcctgcacaggcttacgaaaaagataaaacctataaaattactatcctgcataccaacgatcaccacggtcacttctggcgcagcgaatatggcgaatatggcgaatatggtctggcagcgcaaaaaacgctggtggacagtatccgtaaagaggtggcgcaagaggggggaagcgtcctgttgttatccggcggcgacattaataccggggtgccggaatccgatctccaggatgcggagcccgatttccgcgggatgaatctgattggctacgacgctatggccgtcggtaatcatgaatttgataacccgctcaccgtattgcgccagcaggaaaagtgggcgaagtttccctttctttccgccaatatttatcaaaaaagtaccggcgagcgtctgtttaagccgtgggctatttttacacgccaggatataaaaatcgcggtaatcggcttaaccaccgatgacacggcgaaaataggcaacccggaatatttcaccgatattgagtttcgtaaacctgctgaagaagcaaaggtggtgattcaggaacttaatatgaatgaaaaaccggacgtgattatcgcgaccacgcatatgggacattatgacaacggcgatcacggttcgaacgcgccgggcgacgttgagatggcgcgtagcctgcctgccggttcgctggcgatgattgtgggcggtcactcacaagacccggtatgcatggcgtcggaaaataaaaaacaggtgaattacgtaccgggaacgccctgcgcgccggataagcaaaatggtatctggatcgtgcaggcgcatgagtggggtaaatatgtgggccgcgcggatttcgaattccgtaacggcgagatgaaaatggttaactaccagcttattccggtaaatctcaagaaaaaagtgacctgggataacgggaaaagcgagcgtgtactttacacgccggaaatcgccgaaaatccgcaaatgctcttgttattaacgccgttccagaataaaggtaaagcgcaactggaggtgaaaattggtagcgtgaatggccttcttgaaggcgatcgcagtaaggtcagatttgtccagaccaatatgggacgggtgattctggctgcgcagatcgcgcgcaccggcgccgattttggcgtgatgagcggcggcggtattcgcgactcgattgaggcgggagatattacctataaaagcgtgctcaaggtacagccgttcggcaacattgtggtgtatgccgatatgagcggcaaagaggtagttgattatctcaccgccgtagcacagatgaaaccggactccggcgcctatccacagttcgccaatgtgagctttgtcgccaaagagggcaagctcaccgagctgaaaatcaaaggcgagcctgttgatccggccaaaacctaccgcatggcgacgctgagtttcaacgccacgggcggcgatggttatccgcgcatcgataacaaaccgggatacgtgaataccgggtttattgacgcggaagtgctgaaagagtttattcagcaaaattcaccgctggatgcggcggcgtttacgccaaaaggcgaggtgagctggctgtag

SEQ ID NO: 369100 - DNA, 480 bp, Salmonella enterica
atgacacccgcagttaagttactcgaaaaaaacaagattccgtttaacattcacacctacgatcacgatccgaatgaaactaactttggcgatgaagtggtgcgtaagctcgggctaaacgccgatcaggtgtataaaacgcttttggtcgccgtgaatggcgatatgaagcaactggccgtcgccgtgacgcctgtagccggacagctggatttgaaaaaagtcgccaaagctctgggcgcgaaaaaggtcgatatggccgacccgatggtggcgcaacgcaccacgggatatctggtcggcgggatcagtccgctgggacagaagaaacggctgcccacgctgattgacgcgcctgcccgcacgtttgccactatttatgtttccggtggtaaacgcgggctggatattgaactggcggctgacgatttggccgccatactgggtgctaaattcgctgatatcgcgcgtcgggattaa

SEQ ID NO: 369101 - DNA, 795 bp, Salmonella enterica
atgaagctattaaatcaacttaaacgtttatggcgcgcgctgcgtggtaccccaaatagttggcctgctatcgatctctccctgcccggcggtcgtcatctgcatctggttggcagtattcatatggggacgcgcgatatggctcctcttccagcaaagctggtgaaaaagctacgccaggccgacgcgctggtcgttgaagcggatatttctggtaacgaaacgccattcagcaatctccccaaatgcccgccgttggtcgaacgtctcagcgccgggcagttaagcgcactggaaaaacgggtcagcgagttgggtatgccgctgatccattttgataatcaacctttatggcagatagctatggtgctacaggccacgcaggcgcaacggctgggattgcgtccggactatggcattgattatcagctattacaggctgcccgcgaaatgtcgctgccggtgcaagagctggaaggggcgaaacaccagctcgaactactatgcgatctgcccgatggcgggatggcgctgctcgacgacacgctgacgcactggcacaccaacgcacggcttttgcaggtgatgatcggctggtggcttgagcagccgccgaccagcgtcggcgcttcgctccccagaacgtttagccagccgctgtatgatgtactgatggtgaaacgcaatgaagcctggcgcgacgcgctgctggcactgccgccgggacgctacgtggtagccgtaggggcgctacatctgtacggcgaaggcaacctaccgcaaatattgaaataa

SEQ ID NO: 369102 - DNA, 828 bp, Salmonella enterica
atgtttagaaaagcagttacgcttcttttcctgctttctcccgccgtcagttatgcagggttatttgattccactccagagttaaaatgtggcaacgataatgcagtcacggcggcaaaagaatggatttacaatgaagcattaggtcgtttacagcaagactatattaaagagccctccacgcttttcttcgatatcccccagactcaatacgagcaacaactccgggctattcctgttcaattcagtgatgtaatcacgcagaaccctcaagcagaaaatgccaacttacgaacttgctcggctaccgtcgccatgggtattcctcagccattatttaaattaatgaaagacttaccaaacactctattctatatttcacaaggggatggacaggtaataaacaatacggtgacctggaaacaggttaactacaatattcagctagcagacaacaacaaagatattgttgtcacccctgtgccaaaaaccgataaattggcgcggtctatttatgtaatggcaagaatgacggtatctggtgatagcattataaagaaaaaaaataactcactgattgaaatcgcagcaaagaaatttgagagtagagatcgcgagcttaatcaggtctggaaatcgctacccgcctctgcccgaacggcattaaaacaagaacagcgagtctgggtgaccaaaaaagagcagcagtgcggcaaacttagcgatgcaaaatccgaggccatacccgctgaaaagcgcatcagtatttataaatgccagcttgaaatgaccatcgccagaacggcctatctcgacggcagcgaataa

SEQ ID NO: 369103 - DNA, 2502 bp, Salmonella enterica
atgtctcaaactatcgacctgaccctggacggtttgtcctgcggtcattgcgttaaacgcgtgaaagaaagtcttgaacaacgtccggatgttgagctggcggacgtcaccgtaaccgaagcgcacgttaccggtaccgccagtgcggacgcgttaattgaaaccatcaaacaagccgggtatggcgcgacgttaagccacccaaaggctaaaccgctgacggagtcatcaatcccgtcggaagcactggcagcggttcctcatgagcttccggtagcgacggccgatgaagaaagccaacagttgctgttaagcggcatgagctgcgccagttgtgtcacccgcgtacaacatgcgctacaaagcgtaccgggcgtcacgcaggcacgggtaaacctggcggaacgcactgcgctggtgatgggcagcgcgtccgccgctgatttagtgcaggcggtggaaaaagccggctacggcgcagaggcgattgaagatgacatcaaacgccgcgagcgccagcaggaaaccgccatcgccaccatgaaacgttttcgctggcaggccatcgttgccctggcggtcggtataccggtcatggtctgggggatgatcggcgataacatgatggtgaccggcgacaaccgcagcctgtggctggctattggcctgatcacgcttgcggtgatggtctttgcgggcggtcacttttaccgtaacgcgtggaaaagcctgctgaacggcacggcgacgatggatacgctggtggcgctcggcaccggggtcgcctggctctactccatgagcgtcaacctgtggccgcagtggttcccgatggaagcacggcacctctattacgaagccagcgcgatgattatcggtctgattaatctcggacacatgctggaagcgcgcgcccgtcagcgttcctcaaaagcgctggaaaaattactcgatctcaccccgcccaccgcacgcgtcgtgacagaagacggcgaaaaaagcgtcccgctggcggacgttcagccagggatgctgctgcggctcactaccggcgatcgcgtgccggtggatggcgaaattacccagggcgaagcgtggcttgatgaagccatgctgaccggcgaacccattccgcagcaaaaaggcgaaggcgacagcgttcatgccggcaccgtcgtccaggacggcagcgtcctgttccgcgccagcgcggtgggcagtcataccacgctgtcacgcattattcgcatggtacgccaggcgcagagcagtaaaccggaaattggccaactggccgataaaatctccgcggtattcgttcccgtcgtcgtggccattgcgctgttcagcgccgctatctggtatttcttcgggccggcgccgcaaattgtttatacgctggtcatcgccaccaccgtactgattatcgcctgcccttgcgcattaggcctggcgacgccaatgtcgattatttccggcgtaggccgcgctgccgaattcggcgtgctggtacgcgacgccgatgccctgcaacgcgccagtacgttggataccctcgtttttgataaaaccgggacgctgacggaaggcaagccgcaagtggtggcgataaaaacctttaacggcgttgaggaagctcaggcattacgtctggctgccgcgctcgaacaaggctccagccacccgctggcccatgcgattctggaaaaagccggcgatgataaactgccgcaggtgaacggtttcagaacgctgcgcggactgggcgtcagcggtgaagcggaaggtcatcaactgcttctggggaaccaggcgttgctgaacgaacagcacgtcgccacggatgacatgacggcggaaatcaccgcgcaggcctcgcaaggctcgactccggtcctgctggcgattgacggtaaagcggcggcgttactggcggtacgcgatccattgcgcagcgatagtattgccgcgcttgaacgcctgcacaacgccggataccgtctggtaatgctcaccggggataacccaacgacggctaacgcgattgccaaagaagcgggtattgacgaagtcattgcgggcgttctgccggatggcaaagccgatgcgattaaacgcctgcaaagccagggtcgtcaggttgcgatggtcggcgatggtatcaacgatgcgcccgcgctggcgcaggcggacgtcggtatcgcgatgggcggcggcagcgatgtggcgattgaaaccgcggcgattacgctgatgcgccatagtctgatgggcgtggcggatgcgctggccatttcgcgcgcgacgttgcgcaatatgaaacaaaacctgcttggcgcatttatctacaacagcattggtatcccggtggccgccggtattctgtggccgtttaccggtaccttgttaaacccggtagtagcaggcgcggcaatggcgctgtcttccattaccgtcgtcagcaatgccaaccggctattgcgttttaaaccgaaagcgtaa

SEQ ID NO: 369104 - DNA, 417 bp, Salmonella enterica
atgaatattagcgatgtggcgaaaaaaaccggtttaaccagcaaagccattcggttttatgaagagaaagggctggtgacgccgccattacgtagcgaaaatggttatcgcacctacacgcagaagcatttaaacgagctgacgttgctgcgacaggcgaggcaggtggggtttaatctggaagagtgtggcgaactggtcaatctgtttaacgatccgcgacgccatagcgcagatgtgaaaaagcggacgctggaaaaggtcgcggagatcgagcgccatatcagcgagctgcaatcaatgcgcgatcaactgctggcgctggcggagagttgtcccggcgatgacagcgccgactgcccgattattgataatctttccggctgctgtcatcacaaggcgcaaaagccacgttga

SEQ ID NO: 369105 - DNA, 453 bp, Salmonella enterica
atgatagcgatgattctggtacatccgcatatcttctggcttagcctcggcggcctgttgttggctgcggaaatgctcggcggtaacggctatttgctgtggagcggcgtggcggcagtgattaccggcttaaccgtctggctcttaccgctcggctgggaatggcagggcgtgctgtttgcggccttaacgttactggcggcctggctttggtggcgctggctggcgcgtcgcgtgcgggagcagaagccgaccgacagccgccttaaccaacgcggacaacaactggtaggccgccggtttatgcttgatgccgcgttagttaacggacggggtcatatgcgtgtcggcgacagctcgtggccggtatgcgctgacgaagacctgcgcgcaggtacgcatgtcgaagtgatcgccgtggaaggcatcaccttacgcattcgtgccgtttaa

SEQ ID NO: 369106 - DNA, 918 bp, Salmonella enterica
atgctcattcttatccctattctcattttcgtcgcgctggtgatcgtcggcgcgggcgtcaaaatcgttccgcaggggtaccagtggacggtggagcgctttggacgttacaccaaaaccctgcagccgggattaagccttgttgtaccgtttatggacagaattggccgcaagatcaatatgatggaacaagtgctggatattccgtcgcaggaggtgatctcaaaagataacgccaacgtcactatcgatgcggtctgttttattcaggttatcgatgcgccgcgcgccgcctatgaagtcagtaatctggaactggcgatcattaacctgaccatgaccaatatccgtacggtgctcggttcgatggagctggatgaaatgctctcccagcgcgacagcatcaacacgcggctgctgcatattgtcgatgaagccaccaatccgtggggaattaaagttacccgtatcgaaattcgcgatgtccgcccgcccgcggaattgatctcctcaatgaacgcccagatgaaagcggaacgtaccaaacgcgcctatatccttgaggccgaaggggtgcgtcaggcggaaatcctgaaagccgagggggaaaaacagtcgcagattctgaaagccgaaggcgaacgtcagtccgctttcctgcaggcggaagcgcgcgaacgttccgccgaagcggaagcccgcgctacgcagatggtgtctgaagccatcgccgccggggatattcaggcaataaactacttcgtggcgcagaaatacaccgaagcgttacagcaaatcggctcggcgaataacagcaaagtggtcatgatgccgctggatgccagcagtctgatgggcgctatcgccgggatcagcgagctggttaaggacagcgccagcgaacggaaaaaagcatga

SEQ ID NO: 369107 - DNA, 678 bp, Salmonella enterica
atgacagaacgtagcatgttgcttgagttaaagcaggtcggttaccggactgcgacgacaaaaatagtgaataacatcagttttacgctgcaacgcggcgaatttaagttaattaccggtccttctggctgcggaaaaagtacgttgttgaaaatggtggcctcgctaataagccctgatatcggcatgattctttttgaggggcaggatattactactctgagtccggaagcctatcgccagcaggtttcttattgcgctcagacgccagcgctatttggcgatacggtttacgataacctgatttttccctggcaaattcgccatcagcgcccgcagccgacagccttcgcagacgatctggcgcgttttgaactgccggatacgattctgcaaaaaccgattgccgcgctttccggcggggaaaaacagcgtattgctctaattcgtaatctacagtttctgccgaaaatactgttactcgacgaaataaccagcgcgctggatgaacataacaaacggaatgtgaatgatattattcatcgctatgttcgcgataagcaggtcgctgtcttgtgggtaacgcatgataaagatgaaattcaacacgcggataaggtgataacgttaacgccatctgccggagagatgcaggaggcgcgttatgaacgagcataa

SEQ ID NO: 369108 - DNA, 780 bp, Salmonella enterica
atgaacgagcataatattaccaatacctcgctggcgttatcgatgctgctggtggtggtcgcgatgctcatcagtcacaaggaaaagctggcgctggaaaaagatattctgtggagcgtatgccgggcggtgatacagctcattattgtcggctatgtactgaaatacatctttggcgttaatcatgccgccctgacgctactgatggtgctgttcatctgttttaacgccgcatggaacgcgcaaaagcgcagtaaatatatcgataaggcatttctctcctcgtttatcgccatcaccgtcggcgccgggctaacgctgacggtactggtgcttaccggttcgattgaatttgcgccgatgcaggtgattcccatcgctggcatggtcgccggtaatgcgatggtagcggtagggctgtgctacaaccaactggggctgcgttttcatagcgagcagcagcaaatccaggaaaagttaagtttgggcgcaacgccgaaaatggcctccgccgggcttatccgcgatagcatccgcgcatcgcttatcccgacgatcgactcggcaaagaccgttgggctggtgagcctgccggggatgatgtccgggctgatttttgccgggatcgatccggtaaaagcgattaaatatcaaattatggtaacgtttatgctgttgtcgacagccagcctgtctaccatcattgcctgctatttaacctaccggaagttctataattcgcgtcatcagttggtagtaatgccgctcaagaaatcatga

SEQ ID NO: 369109 - DNA, 855 bp, Salmonella enterica
atgtccgtacagaacattgtcaatattaatgaatccaacctgcagcagaccttagagcagtccatgaccacgccggtactgttctatttctggtctgaacgcagccaacactgtctgcaattaacgccagtgctggaaagtctggctgcccagtaccacggtcagtttattctggcaaagctggactgcgacgccgaacagatgatcgccgctcagtttggtctgcgcgccatcccgactgtctatctgttccagaatggccaaccggtcgatggtttccaggggccgcagccggaagaggcaatccgcgctctgctggataaagtactgccgcgtgaagaagagctaaaagcgcaacaagcgatgcagttaatgcaggagggcaactacattgacgcgctgccgttgctcaaagacgcctggcagctctcttcgcagaacggtgagattggcctgttactggcggaagcgcaaattgcgctgaaccgctctgaagaggccgaagcggtgttaaaaactataccgctacaggatcaggatacccgttatcaggggctggttgcgcagatcgaactgcttaaacaggcggcggatacgccggaaattcagcaacttcagcagcaagtcgcggagaatccgcaggatgcggctttggcaacgcaactggcgttgcagttgcaccaggtcggacgtaatgaagaagcgctggaattgctgttcagccatctgagaaaagatcttgccgccgccgagggacagacgcgcaaaaccttccaggagatccttgccgcgctcggcaccggcgatgcgctggcgtcgaaataccgccgccagttgtacgcgctactgtattaa

SEQ ID NO: 369110 - DNA, 771 bp, Salmonella enterica
atgcaaaaatcggtcttaataacaggatgttccagcggaatcggtctggacagcgcgcttgaacttaaacgccagggctttcaaatcctggcgggctgccgcaaacctgatgatgtcgcccggatgaacagtatgggatttaccggcgtgttgatcgatctcgactcccctgaaagcgtggatcgtgccgccgatgaagtgatcgccctgaccgataatcgtctgtatgggatctttaacaatgccggctacggcgtgtatggccccctttccaccatcagccgtgagcagatggagcaacagttttccagtaatttcttcggcgcgcatcagcttactatgcgcttacttcccgccatgttgccgcatggcgaaggacgcattgtgatgacctcatcggtgatggggctgatttccaccccagggcgcggcgcttatgccgccagcaaatacgcgctcgaagcctggtctgacgcgctacgtatggagctacggcacacaggcattaaagtgagcctgatagaaccggggccgattcgtacccgttttacggataacgttaaccagacgcagcgtgataaaccggtagaaaatcccggcatcgccgcacgtttcacccgcgatcctgacgcggtagtagcgaaagtacgtcatgcttttgcaagcgataaacccaggctgcgctatcccgttacgctggtcacctgggcagtgatggcgctgaaacgcctattgccgggccggatgctggataaaattttacaaagctga

SEQ ID NO: 369111 - DNA, 585 bp, Salmonella enterica
ttgcccttcctgtttttgatcctgttaactttccgtgccgccgccgcagacaccttattaattctgggcgatagcctcagcgccggttaccgtatggccgccagcgcggcatggccgtcgctccttaatgataaatggcaaaacaaaacgtcggtcgttaatgccagtataagcggagatacctcgcagcagggactggcgcgtttgccggcgctgttgcaacagcatcacccgcgctgggtagtggtggaacttggcggcaacgatggcctacgcggttttgcgcctgcgcaaaccgaacagacgctacgtaaaatcattcagacggtgaaagccgccgatgcccaaccgttactgatgcaaattcatctgcccgctaactacggtcgccgttataatgaatcctttagcgccatttatcctaagctcgccaaagagttcgatattcctctgttaccgttttttatggaagagatatatctgaaaccacagtggatgcaggatgacggcattcatcccaaccgcgacgcccagccgtttattgccgactggatggcgaagcagttgaccccttttctctcctga

SEQ ID NO: 369112 - DNA, 687 bp, Salmonella enterica
atgccagcggaaaacagtgttgaagttcatcgtctcaggaagtccgtcggtcagggtgagcatgagctttccatccttaccggaattgaactggttgtcaaacgcggcgaaaccattgcgctgattggcgaatcaggatcgggaaaatctacgctgctggcgattctcgccggactggatgacggcagtagcggagaggtcagtctggtcgggaaaccgcttcaccagatggacgaagaggcgcgggcgcagcttcgcgctcagcatgtcggttttgtttttcaatccttcatgcttattcctacgcttaacgcgctggaaaacgttgaactaccggccctgctacgcggtgaaaacagcggtcagagtaaggcgggggcgaaagcgctgctcgaacaactgggactgggaaaacggcttgaccaccttccggcacagctttccggcggcgaacagcagcgcgtagcgctggcgcgcgcgtttaacgggcgtcctgatgtgctgtttgccgatgagccgacgggcaaccttgaccgtcagaccggagataaaatcgccgacctgctattttcgcttaaccgcgagcacggcaccacgctgattctggtgacgcacgacccggcgctggcggcgcgctgcgaccggcggctgcggttggtcaacggtcagttacaggaggaggcatga

SEQ ID NO: 369113 - DNA, 2415 bp, Salmonella enterica
atgatagcccgctggttctggcgcgaatggcgctcgccgtcgctgattattgtctggctggcgttgagtctggcggtggcctgcgtactggcgctcggcagtatcagcgaccggatggaaaaagggttaagtcagcaaagccgcgagtttatggcaggcgatcggacgctgcaaagttcgcgggaggtaccgaaagcctggcttgaagaggcgcgtaaacgcggccttaacgtgggcgagcagttaacctttgcgaccatgacgtttgccggcgatacgccgcaactggccagcgtgaaggcggtagatagcgtttatccgatgtacggcgaattgcaaacccgtccaggcggagtgaaaccgcagccgggtagcgtactgctggcgccgcgtctgatggcgctgcttaatttgaaaacgggcgataccattgatgtcggcgacgtgaccttgcgtattgccggtgaagtggtgcaggaaccggattccggatttaacccttttcagatggcgccgcgtctgatgatgaatatggccgatgtggcaaaaaccggtgcgatacagccggggagccgcgtgatgtggcggtataaattcggcggaacgccgcaacagcttgctggctatgaaagctggctgttaccgcagcttaaaccggaacatcgctggtacgggctggagcaggatgacggggcattggggaaatcgctcgaacgttcgcagcagtttttgctgctttcggcgttattaacgctactgctggcggtagctgccgtcgcggtggcgatgagccattactgccgtagccgctacgatctggtggcgattttaaaaacgctgggcgcgggccgggcccagttgcgtaaacttattatcggacagtggttgatggtgctggggctttccgccgtcacgggaggcgcgattgggttactgtttgaaaacatattgctggtgctgctaaaaccggtattgcccgccgatttgccgcccgccagcctgtggccctggctgtgggcgctgggcgcgatgacggtcatctctttgctggtcggtttacggccttatcgattgttgctggcgacccagccgctacgggtgctgcgccgcgatgttgtcgctcgcgtctggccgttaaaaatttatttgcctgtcgcctgcgccgtcgtggtggcgctgctcgccggattgatgggcggaagtatgctgttgtgggcggttctggcgggtgcagtgatactggcgctgctgtgcggtctggtgggctggatgctgcttaacgtgctgcgcggcatgacgttgacgtcgctaccgctgcgtctggccgtcagccgacttctgcgtcagccgtggtcaacgttgagtcagctttcggcgttttcgctttcgtttatgctgctggcgctcttgctggtgctgcgcggcgacctccttgatcgctggcaacagcaactcccgccggaaagtccgaactatttccttatcaatattgcttcagagcaggtcgcgccgctgaaagcctttttggcggaacatcaggtgattccgcagacgttttatccgattgtgcgggcgcggttaaccaggataaacggtaatccgacggaaggtcagcaggatgagtcactcaaccgtgaactgaatttgacctggcaggatacgcgcccggcgcataacccgctggtcgccggtcactggccgccaaaaccgggcgaagtctccatggaagaggggctggcgaagcggctgaacgtcaaactcggcgatagcgtaacctttatgggcgatacccaggcgtttagcgctaaagttaccagtctgcgtcaagtggactgggaaagcctgcggcccaactttttcttcatttttccttccggggcgctggacgggcaaccacaaagctggttgaccagttttcgctgggagaatggcaacggcatgttaacgcagcttaaccgcgagtttcctaccgtcagcctgttggatatcggggcgatcctgaaacaggtgggacaggtgctggagcaggtcagtcgggcgctggaggtgatggttgtgctagtcaccctctgcggcatgttgctattactggcccaggtacaggtcgggatgcgtcagcgccatcaggagctggtggtgtggcgcacgttaggagccggaaagaaactgttgcgtaccacactctggtgcgaattcgccatgctgggattagttgccgggttggtcgccgcgattggcgcggaaacggcgctggcgatcttacaaatcaacgtttttgatttcccctgggagccggactggcgtttatggggcgcactgccgttttgcggcgcgctgctgctttccgtatgcggcggctggcttggcgttcgtttgctgaaaggcaaagcgctattccgacagtttagcggatga

SEQ ID NO: 369114 - DNA, 1134 bp, Salmonella enterica
atgacaattaaaataacagcgttggcggcatcgatcggcgcggcagtggctttcatgcctttcgccactcaggcggaaatcaccgttttaaaacaagatccccaggcgggtaatccactcagccgactcaatttcaccgttggcgggagtattcgtccgcagttccagaatatgaccggtaatgacggcgcgaacggttataaacgtaatggttttgatggcgggacgcgtttccgcttcgccgcggattattatctgtttgatgatatcagttggattagctattacgagctgggcgtcaatatccctgcggtatttgactgggataaccattatgcgaagggcgcgactgataccactcgccgtatgctgtataccggcttcaagagcgcgacgtggggaacgctgaccttcggtcaacagaacagcatttattacgatgtggtgggcgtaaaaaccgatatctgggattacgacatgataggtcaggcgccgggcaacgggattaacggcgactacgatggttcttatcgcacgcgtaagtcattgaagtataagaaaagcattggcaatgtcgatctctacgcatcttatctgttcagcgacgattataatgccaataacggcctgaattacaagcgtaaaggcggcggttctttaggcgcggattaccatctcaccgacgatctgacctgggggacggcatggaactatacccgtgcggagatgcgtggcaacggcaataaaacttacgatcaaaatattgtcggtaccgcattaagctggacgccggaaaactggactatcgccgcaggcggcggttggtatcagaactttatgacgaccaaaaaagtgtctgtgaatgattactttgccggcgatgcgtggggtctggaatattttgtcggttacgctttcccgattggtcagtatgccgtgaaagctattcaaccgtactttatgggcgaccgcattgaatatgtgaatggccgcgactatctgcgcaccgataacggcgtggggatcaccttccaactggattatggtttccgcgttgattatgaacatgttttcacctccagcactgacaatctgggcgatatgaacctggtgcgtctgcgttacgatttctaa

SEQ ID NO: 369115 - DNA, 831 bp, Salmonella enterica
atgggattgcgtcagagtttacgcattgcggccagcacgctattactggcctgcggattacagtttgcccatgccgatagttccccgcaaacgatcgtatttggcgtcgcgccagggccgtatggcgacatggtgaagcaggcgattgcgccgacattaaaagaaaaagggtataaggtcgtggtgcgcgagtttagcgactatgtccagcccaatatggcgttagctaacggcagcatcgacgccaacctctttcaacataccctctattttgacaaattcaccgctgacaaagggctgaagctcagcaaacttattgtggtaccgaccgctgggatgggcttctattcacgtaaaatcaacagtctggatgcgcttaaaaaaggggacattattactctctccaacgatccgactaacctggcgcgcggccttcgcttcctgcaatcgttggggctcatcacgattaaggacaatatcgatccgaccaaagcctctgaacgagatatcgccagcaatccaaaaggactggttttcaaaccgctggaagccgcacagctaccgcgcacgctggatggcgtgaccggcgcgctggttaacgggaactttgcggtggcggcaggactcgatctctccagcgcgattaagcaggaacacctggatgagaatctgaaaaatatcattgcggtacgcagtgaagatgccgataagccgtttgccaaagatattgtcgaggcggtgaaatcgccggcttatcgcgcggtcatcgacgatccaaagaatatttatagcgccttccagaaaccggaatggatgaccgcgacaccctga

SEQ ID NO: 369116 - DNA, 1017 bp, Salmonella enterica
atgattgaaatagaaaaagtctgcgtcgattttaccgccggtcgcggtaccctcacgcgcgcggtggatgatgtgagcctgcatatcgccgcgggcgagatttttggcattgtcggtaccagcggcgcaggaaaaagcactctgctgcgtaccctgaacgccttaacgcgtcccagccaggggcgcgtcaacgttaacggcgtggaaatttctgcgctggacggaaaagcgttacgccaggcgcggcagcgtattggtatgattttccagcattttaacttaatgcatacccggacagtggcgcaaaacgtggcgtttagcctgaaagcggctggctgggaacgcagcaaaatcgcgccacgggtggcggaaattttaacgctggtgggccttgccgataaagcgaaccgttttccggtacagctcagcggcgggcaaaaacagcgggtggggatagcccgcgccatcgctaaccatccggatgttttgctgtgtgacgaaccgacttccgctttggatctggaaacttccgccacgattctggctctgctcagacagatcaacgcacagctcgggattactattgtgctgatcacccatgaaatgaacgtgatcaaatctatttgcgatcgcgtggcggtgatgtcgggcggtaaggttgtggaatcgggcgaggtgtttgatgtgtttgcccacccgcaacacgctttcacacagcaactggtgtctcatactcttaatttgaccctgccggaacgtttacgggaacacctgcccgggcagttgctgaaaattttgtttatcggcgattcggcggagcagccggtactgtcggaggtggcgatcaagtttggcgtcgcggtcaatatcctgcatggcaagattgaatatatcggcgaacgcgcgttgggcattctggtggtgcaattaaccgcgccgcataatccaacggcggtggccgccgccgtggagcatatccgtcaacgtaccgcacaggtggaggtgatccgtggatga

SEQ ID NO: 369117 - DNA, 660 bp, Salmonella enterica
gtggatgatttattgccggatttaacgctggcgttcaatgaaactttccagatgttgagtatttcaacggtgctggcgattcttggcggtctaccgctcggttttctgatttttgtcaccgatcgtcatctgttctggcagaaccgttttatttatctcgccgcctcggttctggtgaatattatccgctcggtgccatttgttattttactggtgctgttactgccgctaacgcagcttttgctgggcaatacgataggcccgattgcggcctccgtcccgctgtcggtggccgcaatcgcgttttatgcacgcctggtagatagcgcgctccgtgaagtcgataaagggattattgaggcggcgctggcattcggcgctagtccgatgcgtattatctgtaccgtactgttgccggaagccagcgcagggctgctgcgcggcctgacgattacgttggtaagcttaatcggctactcggcgatggccgggattgtcggcggcggcggggtaggcgacctggcgattcgctatggctactaccgttacgaaaccgaagtgatggttgttaccgtggtggcgctgattgtgctggttcaggtcgttcagatgctgggcgactggctggcaaaacgtgccgacaagcgcgacagacactaa

SEQ ID NO: 369118 - DNA, 1095 bp, Salmonella enterica
atgcaagacagacaaaaagcacaggactatcgcgcgctcctccttgccgatacgcctttaattgatgtacgcgcgccgattgagtttgaacagggcgccatgccgggcgctatcaacctgccattgatgatggacgacgagcgggccgccgtcggcacctgctacaaacgtcagggcgcggatgcggcgttagcgctggggcatcggctggtttgcggcgacattcgccagcagcggcttgaggcctggaaagccgcgtatcaacgtttccccaacgggtatctgtgctgcgcgcgcggcggtcagcggtcacatatcgtacaacgttggctgcaagaaacagggattgactgcccgcttattgaaggcggctataaagcgctgcgccagacagcaattcaggcgacctggcaactggcgcaaaaaccgatacttttaattggcggctgtacgggcagcggcaaaacgcaactggtacgacaacagcccaacggcgtggatctggaaggtctcgcgcgtcatcgcggctcctcttttggccgcacgctgaacccccagctcagccaggccagttttgaaaacaaacttgccgttgaattgctgaaaattaacgcgcgtcagacgctaaaaaggtgggtactggaagatgaagggcgaacgatcggcgccaaccatctgcctgagtgtttacgcgaaagaatggcgcaggcccccattgcggtagtggaagatccgtttgcgcttcgtctggaacgactgcgtgaagagtatttcatccgtatgcatcacgacttcacccacgcctacggcgatgaagccggttggcaggcgtatagtgaatatcttcatcatggactgttcgctattcgccgccgtctggggttgcaacgctttgccgaactgacggacacgctggatagggcgctggcagagcaattatccagcggcagcaccgacggccatatggcatggctggttccgctacttaacgaatattacgacccaatgtatcgctatcaactggagaaaaaagccgcgaatatcgtttttcgcggcacatggcaagaggttgccaactggctaaaagcgcaatag

SEQ ID NO: 369119 - DNA, 927 bp, Salmonella enterica
atgtttgacccggaaacactgcgtacctttatcagcgttgccgaaacggggagtttctccaaagcggcggagcgcctgtgtaaaaccacggcaaccattagctaccgcatcaaactgctggaggaaaataccggcgtagggctgttctttcgcacaacgcgaagcgtctcgttgacggcggcgggctctcaccttctctctcaggcaaaagactggcttgcgtggttggacagcatgcctgacgagctacgccaggttaacgacggcgtagagcgtcaggtcaatattgtggtgaataacctgctctatagcccgcaagcggtcgccagtctcttatcgtggcttaatgcgcgttaccctttcactcagtttcacttttcccggcaaatttatatgggcgtctgggattcgctcctgtatgaaggtttttcgctggcgattggcgtaactggcaccgagccgttggctaatacctttatgctcgaccctttaggttccgtacaatggcgttttgtgatgtctgcggatcatcctttagctcacgtcagcgggcctctaacagaagcgcagttgcgccgtttcccggcaattaatatcgaagacagcgcgcgtacgctgaccaagcgggtagcctggcgccttccggggcagaaggaaattatcgtgcctgatatggaaaccaaaatcgccgctcatctggcaggcgtcggtatcggttttgtcccgcagccgctctgtcaaacgctgatcgacaaaaacgaactggtgagctgtaccatcccgacgatgcgtccgccctcaccgttaagcctcgcctggcataaatttggcggaggcaaagcggtagaagacattgtgaaattatttacccaacgacaacccgaaatagccggttttttatccattttcaacacggtacgctgttaa

SEQ ID NO: 369120 - DNA, 483 bp, Salmonella enterica
atgaaacttgaggtattaccgttagatcagaagacgttcagcgcttatggcgatgttattgagacgcaggaacgtgacttttttcatataaacaacgggttagttgagcgatatcacgacctggcgaaggttgaagttctggagcaggatcgcacgctgatcagtattaacagggcgcaaccggccgcgatgcctattgtggtacatgaactggaacgtcatcctttaggtacgcaggcgtttgtgccgatgaacggcgaggcttttgtcgttattgtcgcgctcggcgatgataaacccgagctctccacgctgcgggcgtttattagcaatggacggcagggcgtcaattatcaccgtaatgtatggcatcacccgctgtttgcgtggcagacggttaccgattttctgacggtggatcgcggcggcagcgataactgtgatgttgaaagtatcccgacacatgaactctgttttgcgtga

SEQ ID NO: 369121 - DNA, 819 bp, Salmonella enterica
atgacggaagtaagacgacgcggcaggccaggacaggcagagccgactgcgcagaaaggcgctcaggcgctggagaggggcatagcgatattgcaatatctcgaaagaagcggcggcagttcatcagttagcgatatttccggcagcctggatttaccgctttctacgacgtttcgcctgttaaaggtactgcaagcggctgattttgtgtaccaggatagccagcttggctggtggcatattggtttaggcgtatttaatgtgggctctgcgtatattcataatcgcgatgtcctctcggtggccggaccctttatgcaccgacttatgctgctttctggcgagacggtcaacgtagcgattcgcaacggtaatgaagcggtgttaatcggtcaaaaggagtgcaaatcgatggtcagaatgtgcgcgcccttagggagtcgtctgccgttacatgcttccggcgccggaaaagcgctgctttacccgctcaccgaagaagagctggtggggatcgtcgtcaataccggtttgcggcggtttacgccgaccactctggtggatttacctatcctgcttaaaaatctggagcaggcgcgtgaacagggctacaccgtcgaccaggaagaacatgttgtcgggctgaattgtatcgcctccgctatctatgacgatgcgggcagcgtggtcgccgctatctcaatatcgggaccggcttcccggctgacggaagatcgctttatcagccagggtgaactggtacgggataccgcgaaagacatcagtacggcgcttgggctaaaaccccctgtagcctga

SEQ ID NO: 369122 - DNA, 1782 bp, Salmonella enterica
atggcaaaaatgagagccgtggatgcggcaatgtatgtgctggaaaaagaaggtatcaccacagcattcggcgttcctggggctgcaatcaaccccttctattctgcaatgcgtaagcatggaggcattcgccatatactggcgcgtcatgtggaaggcgcttcgcatatggctgagggctacacacgtgcggcggcaggtaatattggggtctgcctgggcacttccggcccggcgggaaccgacatgatcaccgcgctctattccgcttctgccgactctatcccgattttatgcattactggtcaggcgccacgagcgcgtctgcacaaggaagatttccaggcagtcgatattgaagcgattgcaaaaccagtcagcaagatggcagtgacggttcgtgaggcggcgctggtgccgcgcgtattacagcaggcttttcatctgatgcgctcaggccgcccaggtcctgtgctggttgatttaccgtttgatgtccaggttgcggaaatcgaattcgatccggatatgtatgagccgctgccggtatataagccagccgccagccgcgtacagattgaaaaggcgctggagatgctgattcagtccgagcgtccggtaattgtcgcgggcggcggggttattaacgccgacgccgcgccactgctgcagcagtttgccgaactgaccaatgtaccggtgatccctaccctgatgggctggggctgtatcccggacgatcaccccctaatggcggggatggtcggcctgcaaacggcgcaccgctacggcaacgccactctgctggcatccgatatggtttttggcatcggtaaccgtttcgccaaccgtcatacggggtccgttgagaaatatactcaggggcgaaaaatcatccatatcgatattgaaccgacgcaaattggccgcgtgttgtgcccggatctgggcatcgtttcggacgccaaagcggcgctaacgttgctgatcgatgtcgcgcaggagatgcaaaaggcggggcgtttgccatgccggaagacctgggtggacgaatgccagcagcgtaaacggactttgctgcgtaaaacccactttgacaacgtgccagtgaagccgcagcgcgtctatgaagagatgaacaaagcctttggtcgcgatgtgtgctatgtcaccaccattggattatcgcaaatcgcggcagcgcagatgctgcatgtgtttaaagacagacactggatcaactgcggccaggcggggcctcttggctggacaatcccggcggcattaggggtttgtgctgccgatccgcaacgcaatgtggtggcgatttccggcgatttcgacttccagttcctgattgaagagttagccgtcggcgcgcagtttaacatcccgtatatccatgtgctggttaacaacgcttatcttggtctgattcgccagtcgcaacgcgcatttgacatggactactgcgtacagctcgcctttgaaaatatcaactccagcgaagtgaatggctatggcgttgaccatgtaaaagtggcagaagggttaggctgtaaagcaattcgtgtctttaaaccggaagatattgcgcctgcatttgaacaagctaaagcgctgatggcgcaatatcgcgttccggtggtggtggaagtcattctggaacgcgtaaccaatatttccatgggcagcgaactggataacgtaaccgagtttgaagaggttgcggatagtgcgaaagatgcgccaacagaaacctgttttatgaaatatgagtaa

SEQ ID NO: 369123 - DNA, 777 bp, Salmonella enterica
atgttacgtttctctgccaatctttctatgctgtttacggaatatgatttcctggaacgctttgataaagcggcgttgtcgggatttcgcggcgtggaattcatgtttccctacgataacgacatcgaagtgttaaaacgtaagctcagggataataatctggaacatacgttacataatttacctgctggcgactgggcggctggcgaacgtggaattgcctgtattcctgggcgcgaagaagagtttcgcgatggcgtagcggccgcaatccgctatgcacgtgcgttaggcaataagaaaataaattgtctggtgggtaaaacgccgtcaggattctccgcaacggagatccacgacacgttggtcgaaaacctgcgctatgcggcaaatatgctggcgaaagaagacattttattacttatcgaacctattaatcactttgatatgccgggattccatctcaccggcactcaacaggcgttagcattaattaaggatatcggcagtgataatatcaaaattcagtatgatatttatcacatgcaacgcatggaaggggaattaacgcaaaccatgacggcatgggccgataaaataggccatttacagattgctgataacccgcgtcgcggcgagccggggaccggggaaattaattatgactttatttttaatgtcattaaacagtctggttatgatggctgggttggctgtgaatataaaccactgactaccacggaagcgggattatcgtggattaatcagtaccgttaa

SEQ ID NO: 369124 - DNA, 879 bp, Salmonella enterica
atgaaactgggatttattggcctgggaattatgggctcgccaatggctatcaatttggcacgcgccggtcatcaattacacgttacgactattggtccggtcgcggacgaactgctctcgctgggggcggtaaatgttgagactgcacgtcaggtaactgaatttgcagacattatcttcataatggtgccggatacgccgcaggttgaagaggtgttatttggcgaacacggttgcgccaaaacatcgcttcagggaaaaaccatcgtcgatatgagttctatttctcctatcgaaaccaaacgttttgcccagcgcgttaatgaaatgggcgctgattacctggatgccccggtttccgggggagaaatcggggcgcgtgaaggcactctgtcgattatggtcggcggcgagcagaaagtctttgaccgcgttaaaccgctctttgacatcctgggaaaaaatatcaccctggtgggcggcaatggggatgggcaaacctgtaaggtggctaaccaaattattgttgcgctgaatattgaagcggtttctgaagccttagtgtttgcttcaaaagcaggcgccgatccggtacgcgtgcgccaggcgttaatgggcgggttcgcctcttcacgcattctggaagttcacggcgagcggatgatcaaccggacgttcgagcctggtttcaaaatcgcgcttcatcagaaagaccttaatcttgcattgcaaagcgcaaaagcgctggcgctgaatttaccgaatacggcgacctgccaggaattattcaatacctgtgcggcaaatggcgggagccagcttgatcattcggcaatggtacaggcgctggaattaatggccaatcataaattgtcctaa

SEQ ID NO: 369125 - DNA, 1248 bp, Salmonella enterica
atgagtgaaactaaaaaatccgggattgattactggaaacaaattgttgtcgtaatgagcctgggctgggtagcgatttggatctatcgcaccgtgcttacgccaatttatccagaaattcaggcatctttagacaatgtaagtaatgcagaaataggcgccattgcaagtttttacttttttgcttactgcagtatgcaaatcccttgcggaatattggtcgataaattcggtcaaaaaatcatgctgatggccggatttacgctttttattattggtacactctgtatcgcgaaagccaatggcctgaccatgatctatatagggtcgctaatggcaggtggcggatgcgcttctttctttagctcggcttattcactctcttcggcaaacgtgccgcaggcccgtcgggcattagccaacgcgattatcaacagcgggtcggctatagggatggggattggcttaatcggttccagcgtattagtaaaaaacatgagcatggcctggcaaaatgtactgtatatcgtggccgcgatattagtaatcatgctgtgcgtctttacgctgatcattcgcggtaaagccaaaagcgactctgcgcaagcggaaaagcaaacccaaaccgttacggaagatgagaaacgtgcgcctttattctctggtttattgtgtagcgtttacttcctctatttctgtacctgctacggttattatttgatagtgacctggctgccctcttatctacagactgaaagaggatttgatggcggagctatcgggctggcatcagcgctggtggcggtggttggcgtaccgggggcgttattttttagccatctgtcagataaattccgtaacagtaaagttaaggttattctcggtctggaaattgtggcggcagcaatgttggcgtttacggttttgtccccgaataccacgatgctgatggtcagcctgacgctatacggcttgctggggaaaatggcggtagacccgatcctgatctcctttgtatctgaacaggcttcggcaaaaagtctgggaagagctttcagcctttttaatttctttggcatgagctcggcggttgtcgccccaacgttgaccggatttatttcggatgtaacggggtcgaaggagatcagttttgtgatttcagcatgtttagtggtcaccggaacgctgatctttgctgtcgtcactttatataaaaagaaagcaacgcaacgtattgcttcagcttaa

SEQ ID NO: 369126 - DNA, 1455 bp, Salmonella enterica
atggaacatcaaagagagctataccagcagcgcggttatagcgaagacttattacctaaaacagaaacccaacgaaactggaaggcatttaactatttcaccttatggatgggatctgtacataacgtgccaaattacgttatggtcggcggtttttttatactgggcctatcaacatttaatatcatgttggccattattatcagcgcattatttattgcggcggcgatggtaatgaatggcgcggcaggcagcaaatatggcgttccttttgctatgatattgcgaggttcttacggcgtccgcggcgcgctattccctggattattgcgagggggaatcgcggcaattatgtggttcggcttacagtgttacgcgggatcgctggcatttcttattttgattgggaagatctggccaggatttctgacattaggcggagatttcaagctgctgggtctttcactgccaggactaattacttttctaattttttggattattaacgttggcatcggttttggcggtggtaaagtattaaataaatttaccgctatcctcaatccatgtatttacattgtctttggcggcatggctatttgggcaatatcgctggtcggcattggcccgattctggactatctgccttcaggcgtgcaaaaagcagagcacagcggctttctgttcttggtggtgattaacgccgtagtcgccgtctgggcagcgccagcggtgagcgcgtccgatttcacgcaaaacgcgcattcatttcgcgctcaggcattgggacaaacgctggggcttatcgtagcgtatatattattcgccgtagccagcgtgtgcattattgccggagccagtattcattatggtatggatacctggaacgtgctggatattgtgcagcgctgggacagcctgtttgcttcattctttgcggtgttggtgattctgatgacgacaatttcaaccaacgccaccggtaatattatacctgcggggtatcaaattgcggcgcttgccccgacaaagcttaactataaaaatggcgtaatgattgccagtattatcagtctactgatttgtccatggaaattaatggagaatcaggacagtatttatctgttcctcgatattatcggcggtatgcttggcccggtaatcggcgtaatgttagctcattattttgtggtaatgcgtggaaaaattaatcttgatgagctgtacaccgccagcggtgattacaaatattatgataatggatttaacctgactgcattttcagtcaccctggtcgcagttattctgtcattaggcggcaagtttataccatttttggagcctttatcccgcgtgtcctggtttgtaggcgtaatagttgcgttcgttacttatgcgctattgaagaaacgcacgggttttgaaaatacaggagagaaaaaactcgcaggttaa

SEQ ID NO: 369127 - DNA, 1362 bp, Salmonella enterica
atgtcttttgatttaattattaagaacggtactgtcatcttagaaaacgaagcgagagttatcgatatcgccgtccagggcggaaaaatcgccgcgattggcgagaacctgggggaagcgaaaaatgtgctggatgcgacgggattgatcgtttcgccgggcatggttgacgcgcatacccacatttctgaaccgggccgtacccactgggaaggctatgaaaccggtacccgcgcggcggcgaaaggcggtattaccacgatgattgagatgccgctcaatcagctgccggcgacggtcgatcgtgagacgattgaactcaagtttgacgcggcaaaaggtaaattgaccatcgacgccgcgcagttgggcggtttggtttcttataacctggatcggcttcatgagctggacgaagtgggcgttgtcggcttcaagtgctttgtcgccacctgcggcgatcgtggcatcgataatgattttcgcgacgttaatgactggcagttttacaaaggcgcgcaaaaattgggggaaatggaccagacggtactggtacattgcgaaaatgctctgatttgcgatgagctgggcgaggaagctaaacgcgaaggtcgcgtaacggcgcatgattatgtcgcctcacgtccggtatttactgaagtggaagccattcgtcgcgtgctgtatctggcgaaagcggcaggttgccgtctgcacgtttgccatatcagcagcccggagggggtagaggaagtaacgcgcgcgcgtcaggaaggccaggatgtcacctgtgaatcgtgcccgcactattttgtcctcgataccgatcagttcgaagagattggcaccctggcaaaatgttctccgccaattcgcgaccaggaaaaccagaaagggatgtgggaaaaactgtttaacggcgaaatcgactgcctggtatccgaccactctccatgccctccggaaatgaaagcaggcaatatcatgcaagcatggggcggaattgccggactgcaaaactgcatggacgtcatgtttgatgaagcggtgcaaaaacgcggtatgtcgttgccgatgtttggcaaattaatggcgaccaacgccgccgatatttttggtctgaaacataaaggacgtattgcccccggcaaagatgctgacctggtctttattcagcctgacagcagctatgttctgaaaaatgaagatctggaatatcgccataaagtcagtccgtatgttggccgtactattggcgcgcgtattaccaaaacgattttgcgcggcgatgttatttatgacatcgagcatggcttccctgtgccgccaaaaggtcagtttatccttaaacatcagcagtaa

SEQ ID NO: 369128 - DNA, 1299 bp, Salmonella enterica
atgttccctgttattaaccgcgaaagtgtgttgtccggctttcagtggtttttctttattttctgtaacacggttgtggttccccctaccttgctgtccgcttttcatcttcccgctgataacttgttaatgctcacacaatacgcttttttgaccaccgcgttggcctgcctggttcaggcattttgcggccatcgccgtgccattatggaagggccgacaggactgtggtggggcgctattcttacgattacgcttggcgaggcgtctcgcggcacgccgctgaacgatatcgcctccagcctgtcggtcgggatcgcgatctccgcaatggtgacgatatttatcggcattagcggcttaggacaccgtctggctcgcctgtttacgccggcggtaatggtttttttcatgctgcttttgggcgcgcagctgacctcaatattttttaaaggcatgctggggctgccttttggcattgccgataccagcgccagaatcaaattggccccctttgggctggcggtcgcggtgatgtgttttatcctcgcgatgattattttcctgcagcagcgtatctcccgttacgcgttactggtagggaccgtggtcgggtgggggctatggcggttatgctttccttcatcacacttaccgccgggtgaattaagctggcgatggtttccgctgggcagccacggcacgctgatgccgggtattattgtgacggcggtgatgacggggttagtcaacatcagcaacacttacggcgccatccgcggtaccgatatcttttatctgcatcaagggtcgggcagttctcgttatcgccgaagctttatgatttccggactgatgacgttagtgacggtgcctttcgcggtcgtgcctttttcgccttttgtgtcttccattggtttattaacgcaaaccggcgacagttctcgcaaatcctttatctgtggtagcgcgctgtgtctgctggttgccattataacgccgttaacccgcttattttgcgctattccactggcgatcagcagcgccgttatgctggtctcttatttacctttactttattccggtttggtttttagccagcaaattacgtttaccgcgcggaatatttatcgcctggcgttaccgctttttgtcggcatttttttgatggggcttcctccggtctatttacaggatcttccactgatgattcgtcctctgcttagcaacggattactggtgggaatcttactggcagtgcttatggaaaatcttattccgtgggaacgcattaaataa

SEQ ID NO: 369129 - DNA, 1149 bp, Salmonella enterica
atgaagattgtaattgcgccagattcatttaaagagagcttaagcgctgataaatgctgtcaggctattaaagcgggattttcaaccgtatttcctgatgcgcgctatgtttgtttaccgatcgccgatggcggagaaggaaccgtggacgcaatggtggctgcgaccggcgggaaacgggtttctgtggacgttagcgggccgatgggggaaaaagtaaacggattttatggcctgaccggcgacggcaaaacggcgattattgaaatggcggcggcgagcggattgatgctggtggcgccagaggcgcgtaatccgctgctggcatccagtttcggcaccggcgaattgattcgtcacgccctggacgcggggattcgccatattattctgggtatcggcggcagcgccacggtggatggcggaatgggagtagcgcaggcgctcggtgtgcgttttctggacgcgcaaggaatgctgcttggcgccggagggggcaatttatcgcgcctggcgagcattgacctgcaggggtgcgatccgcgtatttcagagtgtcgtattgaggtcgcctgtgatgttgataacccgttggtggggccacgcggcgcggcggcggtattcggtccgcagaaaggggcgacgcctgaaatggtcgagacgctggaaaatggattacgtaattatgcccgtgttttacatgccctgaccggacgcgacatgtctcaaataccgggcggtggagcggccggaggaatggggattgctgctatcgtcttcctggaagcggaaatgaagcccggtattgagattgttatgcaggcggtgaagttggaggaggcggtaaaagaggcctcgctggtgattaccggagaagggcgaatcgactcgcaaacggcgggaggaaaagcgccgataggcgttgcgtcagtggcgaaacggcatcacgtcccggttatcggcattgccggcgtactgggcgacggcgtggaagtggtccatcgccacggtattgatgccgtattcagtattttgccgcggctggcgcctttgccggaggttctggcgaacggtgaacaaaatctctaccacagcgcctgtaatattgcccgcgtcatcaaacttggccaggatatcgggactcgttaa

SEQ ID NO: 369130 - DNA, 786 bp, Salmonella enterica
atgggatatctgaataacgtcacgggttaccgcgatgatttactggcgaaccgcgccattgtgaaacacggtaactatgcgctcttaacgccggacggtctggtgaaaaatattattcctggctttgaaaactgtgacgtcacaatcctttcgacgccgaagctgggtgcttctttcgtcgattatctggtcaccttacatcagaatggcggcaaccagcagggctttggcggcgaggggattgaaacttttctctatgtcattacgggaaatattgaagctaaagcagaaggaaaaacattctctttaactcagggcggatacctctattgtccaccgggcgagatgatgacctttagcaacgctcaaacggaagacagccagctatttttatataaacgccgctatactcctgtcgaggggcatgccccgtggttggtttccggcaatgccagccagctggagcgtattcattatgaaggcatggaagatgttattctgctggatttcctgcctaaagagctgggcttcgatatgaatatgcatattctgtcgttcgaaccgggcgccagccacggctatattgaaacccacgtccaggaacatggcgcttatatcctttccggccagggggtttataacctcgacaacaactgggtgccggtgaaaaaaggcgactacatcttcatgggcgcttattccctgcaggccggatacggtgtaggtcgtggcgaagcattcagctacatctactccaaagactgtaaccgcgacgttatgatttaa

SEQ ID NO: 369131 - DNA, 1236 bp, Salmonella enterica
atgataaagcattttcgccacgcgatagaagaaacattgccctggctctcttccattggagccgatcctacgggtggaatgacgcgtttactttattcgcctgagtggctggaaacacagcagcagtttaaaaagcgaatggcagaaagcggtctggagacacgctttgatgacgtcggaaatttatatggccgcctttgcggcacacaatttccggagcaggtgattttaagcggttcgcatattgatacggtcgtcaacggcggcaatctggacgggcaattcggcgcgcttgccgcctggctggcgatcgactggctaaaagcgacctacggcgcgccgctgcgcaccgtcgaggtagtgtcaatggcagaggaagaaggcagccgtttcccttacgttttttggggcagcaagaacatttttggcctggcgaatcctgaagaggtacgccatatccaggacgccaaaggcacaggctttgtcgacgctatgcaggcgtgcggatttacccttcccgccgcgccactcgctgcgcgaaccgatatccgcgcctttgttgaattgcatattgagcaaggctgcgttctggagagcaacggacagtcgattggcgtcgtcaacgccatcgtcgggcaacgtcgctacacggtgacgctcaacggcgagtccaaccatgcaggcacaacgccaatgggctatcgtcgcgatacggtgcacgccttcagtcgtatttgcagtcagtccattgaaaaagccaaacagcatggcgatcccctggtattaacgttcggcaaagttgagccgcagccgaatacggtcaatgtagtccctagaaaaaccacatttacaatcgattgccggcatacggacgccgcggtacttcgcgaatttaccgaacagttggaaaacgatatgcgcgccatctgcgatgaaatggatatcagcatcgatatcgatttgtggatggacgaagcgccggtgccgatgaacgccgaactggtcgcggccctcaccaggctgtgtgaaaccgaacaactgaactatcgcataatgcatagcggcgcaggtcatgacgcgcaaattttcgcgccgcgcgtccctacctgtatgattttcgtccccagcattaatggtatcagccataacccggcggaacgtaccaacattaatgaccttgctgaaggggtcaaaactctggcattaatgctgcatcaacttgcctggcaaaaataa

SEQ ID NO: 369132 - DNA, 1050 bp, Salmonella enterica
atgaaaatcagtcgggaaacactccatcagcttatcgaaaataagctttataaagccggactaaaacgtgagcacgccgccaccgtcgccgacgtactggtttatgcagatgccagaggtattcactcacatggcgccgtacgcgttgaatattatgccgaacgaatttcaaaaggcggcaccaaccgggagccgacgttccgcattgagaataccggtccctgtacggcgatactgcatgccgataatgctgccggacaggtcgcagccaaaatgggaatggagcatgctattgaaatagccaaaaaaaatggcgtcgcggttgtcggcattagcagaatgggccatagcggcgccatctcttatttcgtccgccaggctgctcgcgaaggcctgattggtctgtctatctgtcagtccgatcctatggtcgtgccgtttggcggggcggatatttactatggcactaatccgctggcctttgccgcgccgggcgaaggcgatgacatcattacctttgatatggccaccaccgtgcaggcctggggaaaagtcctcgatgcacggtctcgcaatgagtccattccggagagttgggccgtcgataaaaacggcgcgccgacacatgatccttttgccgtcaatgcgttattacccgccgcaggcccgaaaggttacggcctgatgatgatgatcgatattttgtccggcattctgctggggctgccgtttggccgccaggtcagttcgatgtatgaagatttacacgccggacgcaatttaggacaacttcatctggtcattaatccggcgttcttttcttcctgtgaattattccgcaaacatattagtcagactatgcaggaactcaattccgtgaagcccgctcccggttttaaacaggtttattatcctggacaggatcaggatattaaacagaaaaatgccgatatgaatggtatcgatattgttgatgatatttatcaatatctgatttccgatgccctctatctcaagtcatacgaaacaaaaaatccctttgcccaataa

SEQ ID NO: 369133 - DNA, 1665 bp, Salmonella enterica
atgatccacgcctttattaaaaaagggtgttttcaggactctgtcagcttaatgattatttctcgaaagctgagtgagtccgaaaatgttgatgatgtatcggtaatgatgggaacgcctgcgaataagtcgctgctggaaactaccggtttctggcatgacgattttcatggcgctacgcccaatgacatttgcgtggcgattcgtaccgaagcggtagatgacggcattacgcaggtgattgtgcaacagctcgaagaagcattgcagcagttggcgcagggaagcagcggcagccagtcgttaatccaggtcagacgctgggaaagcgcctgtcagaaactgccagaggcgaatctggcgctggtatcggtggccggcgaatatgcggcggaactggcagagcaggcgctggatcgttcgttgaacgtgatgatcttctccgataatgtcacgctggacgatgaaatcagactaaaacgccgggcgcgtgataaaggactgctggtcatggggccggattgcggcaccgctatgatcgccaatacgccgctggctttcgctaacgtcatgccagagggcaacatcggggtgattggcgcttccggcaccggtattcaggagctctgttcacagattgcgctggcgggggaagggattacccatgccatcgggcttggcggacgcgatttgagcgccgaggtcggcgggatcagcgcgctaacggcactggagatactcagcgcggatgaaaagagccaggtgctggcctttgtctccaaaccgcctgccgatgcggttcgtcagcatattatcgcggcgatgaaagccaccgggaaacccgttgtagcgctgttcttagggttttcctctcccgttgcgcgtgagggaaacgtctggtttgcctcgacgctggatgaagccgcccgcctggcatgtttattgtctcgcgtgacgtcgcagcgtaaagaaatggtttcaacaggcggcgtgattcgtggcctctataccggcggaacgctggcggcggaagcggcggggctgctggccggctatctgggcgtcgcggcggatacggaacatcaccatggcatgatgcttgacgctgacggccaccagattatcgatctgggcgatgacttttataccgttgggcgaccacatccgatgatcgacccggcgttacgtaatcagcttatcgccgggcttggcgcgcagccgcaggtacgcgtgttattagtggacgtcgttattggttttggcgcgaccgccgatcccgccgcatcgctgattcaggcctggcagaaggcatgcgccgcacgcgccagcgatcagccgctgttcgccatcgcaaccgtcaccggaacggaacgcgatcctcagtgccgctcgcaacaaatcgccgcgctcgaagatgccggcatcacggtagtggattctcttcccgaagccactctgttggccgcggaactgattcgacccactctctcttccactcatccatcagctccccggttactggaagcggtagcggtgattaatgccgggttacgtagcttcgcgctggatttacaggctgccggtatgcccgtggtgcactaccagtgggcgcctgtcgctggcggtaataaaaaactggctcgtctgttagaacgtttgcaataa

SEQ ID NO: 369134 - DNA, 1260 bp, Salmonella enterica
atgtttacatcagtggcgcaagccaacgctgcagtcatcgaacaaattcgtcgcgcacgtccgcactggctggatgtgaagccagcttcttcattaattagcgtgctcaatcaagggaaaacgcttcttcatgccggcccgccgatgcgctggcaagagatgaccggcccgatgaaaggcgcctgtatcggcgcatgcctgtttgaaggatgggccaaagatgaaatgagcgcgctcgcgctgttagagcagggaaaggtcaactttattccctgccatcacgttaacgccgtggggccgatgggcggtattacctcagccagtatgccgatgctggtcgtggaaaatatcaccgacggcaatcgcgcgtactgcaatctcaacgaagggatcggcaaagtgatgcgtttcggcgcctatggcgaggatgttcagcaacgtttgcgctggatgcgtgatgtgctgatgccggtattaagcgcggcgctgggacgtctggagcgggggctcgacctgaccgcaatgatggcgcagggcattacgatgggagatgaattccaccagcgcaatatcgcctcttccgcattgctgatgcgcacgttggcgccgcatatcgcccgtctggaacacgataagcagcagatagcggaagtgatggattttctgagcgtcaccgatcaattcttccttaatctggcgatggcctactgtaaagccgccatggacgcgggcgcgcagattcgcgccggcagtattgtgacggcgatgacccgtaatggcgatatgtttggcattcgggttagcggtctgggcgaccgttggttcaccgcgcctgttaatacgccgcaggggctattttttaccggtttttcgcaggatcaggccaacccggacatgggcgacagcgccattactgaaacgtttggtattggcggcgctgcgatgattgccgcgcctggcgtaacgcgttttgtcggtgccgggggaatggaagcggcgaaatctgtttctgaagagatggctgaaatttatctcgaacgcaacatgcagctacaaatccccggctgggattttcagggggcctgtctgggactggatatccgccgcgtggtcgagaccggaattacgccgctgattaacacgggtatcgcgcataaagaggcggggattggacagattggcgcgggaaccgtccgtgcgccgctggcctgtttcgagcaggcgctggaagcgctggcggaaagcatgggcgtaagttaa

SEQ ID NO: 369135 - DNA, 810 bp, Salmonella enterica
atgaaacgtatccatcctcttatggcaagccgacaatcggcggattatcggcaaccctggcagatgtcaggggtatggcgtcgctctattaattttgtggcgaaaagcggtgagttattaacgcttcaccgtcgggggagcggcttcagtccgggagggtggatactgcgcggcggcgattttgacgccttgcgcgatgtgctcaccgatggcgaaaaaccgcagtcaaccgctgccggtattcagattggcgagtttcttttatgcgagccggagaggcgctgttcgctgcgggttccgcgctatcttgcgtcgccgcgtcttaacgcgacgtacatgcagcgtagtgaggagacgggactgtttgggccgttaaccgtcgccgcagcccagcctctatgtccggaacttcgccagttttgtcactgctttcagtcggcgcttgcaggtgctgcgactgactggcggctatggctgggtaaagggccgggcttaacgcccagtcatgacgacacgctgacgggaatgttgctggcggcctggtattttggcgccatagatgaacgcgtcgggcgtaatttttttgcccaatccggcagccttgatcgggcgacgacgctcgtgagcgtcagctatttacgctatgcggctatgggttatttcgcgtcgcctttactccactttattcatgcgctgcgacgagatgctcgcacagaaacggcgattgacggactgctggcgctggggcacacctctggcgcggatacgctgctggggttctggcttggacaacaaatagtaaaaggatag

SEQ ID NO: 369136 - DNA, 894 bp, Salmonella enterica
atgaaaacgttggtagttgctcttggcggcaacgcattattgcagcgcggagaagcgctaacggcagagaatcaatatcgcaatattgctgacgcggtgcccgcgctggcgcgacttgcccgctcgtatcggctggcgatagtacatggcaacggccctcaggtcggcctgttggctttacagaaccttgcctggaaagccgttgagccttatccgctggatgtgctggtagcggaaagtcagggcatgatcggctatatgctggcgcagcgtctggcgcttgaacccgatatgccgccggtgactacggtattaacgcggataaaggtatcggcggacgatcctgcttttcttgaaccggaaaagtttatcggtcccgtttattcgccagaagagcaaatggcgctggaagcgacttatggctggcatatgaaacgtgatggaaaatatctgcgccgtgtcgtcgcttccccggcgccgcgtcagattatcgaaagcgccgctattgagttattgctaaaagagggccatgtggtgatttgcagcggcggtggcggggtacctgttgccggcgaaggcgaaggggtcgaggcggtgatagataaagacctggcggcggcattgctggcggagcagatagcggccgatggtctgatcattttgacggatgcggatgcggtgtatgaacattggggaacgccgcagcagcgcgctattcgtcaggcttcgcccgatgagctggcgccgtttgccaaagccgatggcgcgatggggccgaaggtgaccgcggtaagcgggtatgtgaagcggtgcggaaagccggcatggattggcgcattatcgcgtattgacgataccctggcgggcagggcgggaacctgcatccgtctgtga

SEQ ID NO: 369137 - DNA, 1068 bp, Salmonella enterica
atgaagcaagtttgcgttctcggcaacggacaactgggccgaatgctgcgccaggcgggcgaaccgctgggtatcgccgtctggccggttggtctggatgcagagcctaccgccgtgccggtacagcagagcgtcattaccgcagagattgagcgctggccggaaaccgcgcttacccgcgagctggcgcgccacccggccttcgtcaatcgcgatgtatttccgatcatcgccgaccgtctgacacaaaaacagcttttcgataaactgggactcgcgaccgcgccgtggcagctgctgaccagcaccgacgagtggtccggcatctttgaccgtctgggcgaactggcgattattaagcgtcgcgttggcggctacgacggtcgcgggcagtggcgtctacgcgcggacgaaaccgggcaactgccggatgactgctatggcgaatgtattgttgagcgcggtatccatttttccggcgaagtgtcgttagtcggcgcgcgcgctcatgacggcagtaccgtgttttacccgctaacgcacaatttgcatcaggacggcatcttgcggaccagcgtcgcgttcccacaggcgaacgccgaacagcaggagcaggcggaatcgatgctgtcagcaattatgcaggcgttgaactacgtcggcgtaatggcgatggaatgttttatcacgccggaaggcctgttaatcaatgaactggcgccgcgcgtgcataacagcggacactggacgcaaaatggcgccagcatcagtcagtttgaattgcatttgcgcgcgattaccggcctgccgttgcccgcgccggtgattaacgccccgtcggtgatgatcaatctgatcggcagcgagctgaattacgactggctgaagctgccgctggtacatctgcactggtatgataaagcggtacgtccggggcgaaaagtcggccatctgaatctgaccgacagcgatacgtcacgtcttagcgccaccctggaagcgctctctccgctcctgccgggcgaatacgccagcggcattatctgggcgcaaagtaagcttaaataa

SEQ ID NO: 369138 - DNA, 510 bp, Salmonella enterica
atgtcttcccgcaataatccggcgcgtgtcgccatcgtgatggggtccaaaagcgactgggctaccatgcaattcgccgccgaaatttttgaaattctggatgtcccgcaccatgtagaagtggtttccgcccatcgcacccccgataaactgttcagcttcgccgaaacggcggaagagaacggatatcaagtgattattgccggcgcgggcggcgcggcgcacctgccgggaatgattgcggcaaaaacgctggtcccggtactcggcgtgccggtacaaagcgctgcgctaagcggcgtggatagcctctactccattgtgcagatgccgcgcggcattccggtgggtacgctggcgatcggtaaagccggtgccgctaacgccgccctgctcgccgcgcagattctggcgcaacacgacgcggaactgcatcagcgcattgccgactggcgcaaagcgcaaaccgatgaagtactggaaaatcccgatccgcgggggacgctatga

SEQ ID NO: 369139 - DNA, 723 bp, Salmonella enterica
gtggcgacactgtttattgcagacttgcatctgcaaacggaagaaccggcgatcgtcgccggttttctgcgttttttagccgtagaagcccgccaggccgacgcgctgtatattcttggcgatctcttcgaggcctggattggcgacgacgaccccaacccgctacatcgtgaaatggccgttgccattaaatcgctggttgattccggcgtcccctgcttctttattcatggtaatcgcgacttcctgattggcaaacgctttgcccgcgaaagcggcatgacgctactgccgcaggaaaaagtgctcgacctgtatggccgcaatgtgttgattatgcacggcgatacgctctgtaccgatgatgccggatatcaggcgtttcgcgccaaagtccataatccgtgggttcaacggctgttccttaccctgccgctgtttatccgccgccgtatcgccgccagaatgcgcgccggcagtaaagccgccaacagcagcaaatcgctggatattatggacgtcaatgcgcagaccgtcgtcgccgaaatggaaaaacaccgcgtacagtggctgattcacggtcacacccaccgcccggcggtgcatgaactttccgccaacgaccagcccgcgttccgcgtggtgttaggcgcatggcatcatgaaggttcaatggtaaaagtcacgccggacaacgttgagttaatcgccttccctctgtaa

SEQ ID NO: 369140 - DNA, 495 bp, Salmonella enterica
atggttactttccacactaatcacggcgatatcgtaatcaaaacctttgatgataaagcgcctgaaacagttaaaaacttcctggactactgccgcgaaggtttttacaacaacaccattttccaccgtgtgattaacggttttatgattcagggcggcggctttgagccgggcatgaaacagaaagccaccaaagaggcgatcaaaaacgaagccaacaatggtctgaaaaatacccgtggtacgttggcaatggcacgtactcaggcgccacattcggctaccgcgcaattcttcatcaacgtggcagacaacgacttcctgaacttctccggcgaaagtctgcagggctggggctactgcgtctttgcggaagttgtagaaggtatggacgtggtagataaaatcaaaggcgtcgccactggccgtagcggtatgcaccaggacgtaccaaaagaagacgtcatcattgaaaacgtgaccgtcagcgagtaa

SEQ ID NO: 369141 - DNA, 1386 bp, Salmonella enterica
atgttaaaaatttttaatacactgacgcgccaaaaagaggaattcaaacccattcatgccggggaagtcggcatgtacgtgtgtggtatcaccgtttacgatctctgccacattggccacggacgcacgtttgtcgcttttgacgttgtcgcgcgctatttgcgttttctcggttataagctgaagtatgtgcgtaacattaccgatatcgacgataaaattattaaacgcgccaatgaaaacggcgaaagttttgtcgcgctggtcgacagaatgattgcggaaatgcatcaggacttcgacgcgctgaatattctgcgtccggacagcgagccgcgtgcgacgcaccatattcaggaaattatcgagctcacccgcaccttaatcgagaaaggacacgcctatgtggcggataacggcgatgtgatgttcgatgtaccgaccgatccgacttatgggcagctttcccgtcaggatcttgagcagcttcaggcgggcgcgcgcgtagatgtcgttgacgtgaagcgtaacccgatggacttcgtgctgtggaaaatgtcgaaagagggcgagccgagctggccgtcgccgtggggcgaagggcgtccgggctggcacattgaatgttcggcgatgaactgcaagcagttgggcaaccattttgatattcacggcggcggttccgatctgatgttcccgcaccatgaaaacgagattgcccagtctacctgcgcgcatgacggcgaatacgtcaactactggatgcactccggtatggtgatggtggatcgcgagaagatgtccaaatcgctgggcaacttctttaccgtgcgcgacgtgctgaaatactacgatgcggaaaccgtgcgctacttcctgatgtccgggcattaccgtagccaactgaactacagcgaagagaacctcaagcaggcgcgcgcttcgctggagcggctatacaccgcattgcgtggaacggataaatcagcggccccggcgggcggcgaggcgtttgaagcgcgtttcgtggaggcgatgaatgacgatttcaatacgccggaagcctactccgtcctgtttgacatggcgcgtgaagtcaaccgtctgaagggcgaggatatgaccgccgcgaatgcgatggcgtctcatctgcggaagatttccggcgtgctgggactgctggagcaggagccggatgttttcctgcaaagcggcgcgcaggcggatgacggtgaagttgcggaaattgaagccttgattcaacagcgtctggatgcccgtaaagcgaaagactgggcggcggcggacgcggcgcgcgatcgtctcgctgaaatgggtattattctggaagatggcccgcagggcaccacctggcggcgtaagtaa

SEQ ID NO: 369142 - DNA, 825 bp, Salmonella enterica
atgaagcggttcgcgtttgccctgtggctcagcgcaatctcgctcaacgcttatgcagacagtgctaactgtcaccaaaaagcaaacacgccggagagcatcgcagcgacaatggatcaggcgctacagctcaaacaacagcttaacagtcaatccgatccggtcgtcattctggttcgccaggggcaagatatgtcgagccgacatttaacctggtcacatgctggctatgccatgcgccagccaaacggagactggcgggtttaccataatctgaatacttgcggaaccgctgaatcagcgctctatatacaaggtctgtatgagtttctggctgatgacctggtgaatcagagcattgccgttttgcgcccgcgttcagatatcgcgacggcattacaaacgctcttacatagcgctatcaaactcaatctcttccacagtccccgctataacctgattgcgtggcctttttccggcccttatcagaattcgaatggctggcttctcgaagtgtttgcgcgagcaaacgatgcgcagatttggtcacgtaatgatgcccgccgctggttgcagcttcagggttatcaaccctctatcgttagtgctggcacttttgaacgattaggcgcaaaactgttcacccctaacgttttcaccgacgatcagccagcagaattgctgcgaaaaggaaatgtggggctaaacagcggcgacagcgtcatccgctttattgcccattacagccgggcaatgcccgggtgtgaacatcagaatctgggggagtcggtgtgtgtttatctttcgcccggtgcgaaaaaataa

SEQ ID NO: 369143 - DNA, 438 bp, Salmonella enterica
atgaataaaatgacattcgccgccgcggtcatctgtttctcattttcccacgccagctatagcgaagaaatgtctgccactggctggtatgcggcatcgtctgcggttgtcagcgtgggcagttccgcactggttagcggaattatactctcccccgtactgctgccgctcaacctgagcattggatctgttgtcgaaaataaaaagcaaaaaaccgcgctgttaaccactaagtcccccgataacaaagacattaaaatgcaagttcctctaaatgtcgtcaaagaaggcaacctcaaagcaggtgataaagtcactctggaaaaaacgcaggaaggcaccggcgcttatttgaaaaaagagggcaaggtccttgcccatatggtaaatcaggacgacgcaggactttccagcaaccagacggtaccggccaaatga

SEQ ID NO: 369144 - DNA, 546 bp, Salmonella enterica
atgcctaccgttatcacccacgccgccgttcctctgtgtcttggcgcaggcttaggcctgaaagttatccctcctcgcctgctgtttgccggtgttgtgctggcgatgctccccgatgccgacgtgctggcctttaaatttggcgtcgcctacggcaacgtgttcggccatcgtggatttacccattctttacttttcgcattcgtcctccccctgttgtgcgtactcgcgggacgacgatggtttcgagcggggcaggtgcgctgctggctgtttttaaccgtttcattgctgtcgcacagcctgctggattcgataaccacgggtgggaaaggcgtcggctggctgtggccgtggtcggatgaacgtttctttgcgccctggcaggtgattaaagtcgcgccgtttgcgctttcaagctacatcacgccgtatggacaccaggtcattctctcagaattgctgtgggtgtggttgccgggaagtattttagtgttatttctatgggtacttaaaacgcatattaaaaggaatcaatatgaataa

SEQ ID NO: 369145 - DNA, 213 bp, Salmonella enterica
atggcgacattctctttaggcaagcacccgcacgtcgagctgtgcgatctgctcaagctggaaggctggagcgaaagcggcgcgcaggcgaaaatcgccattgccgacgggttggtgaaggttgatggcgtggttgaaacgcgtaaacgctgcaaaattgtcgccgggcaaaccgttagctttgaaggccaaagtgtgaacgtcgtggcctga

SEQ ID NO: 369146 - DNA, 867 bp, Salmonella enterica
atggcagcaaagattattgacggtaaaacgattgcgcagcaggtgcgatctgaggttgctcaaaaagttcaggcacgcgtcgcagcaggacttcgcgctcccggcctggctgtggtgttggtcggcagcaatccggcctcacagatttatgtcgcaagcaaacgtaaagcgtgcgacgaagtggggttcgtctcccgctcctatgacctgccagaaaccaccagcgaagccgaactgctggcgcttatcgatactctgaatgcagataacacgattgacggtattctggtgcagttgcctttaccggcaggtatcgacaacgttaaagtgctggagcgtatcgcgccagataaagacgtagacggtttccatccttataatgtcggtcgtctgtgtcagcgtgcgccacgcctgcgtccctgtacgccccgcggtattgtgacgctgcttgagcgttacaatattgatacctacggcctgaatgcggtggtcattggcgcgtccaatatcgttggacgcccgatgagcatggagctgctgctggctggctgtacgactaccgttacgcaccgctttaccaaagatctgcgtcaccatgtcgagcatgctgatttgctcattgtcgccgtaggtaaaccgggctttattcccggcgaatggattaaagaaggcgcaattgtgattgatgtcggtattaaccgtctggaaaatggcaagatcgttggcgacgtcgtgtttgacgaagccgcggcgcgcgcgtcatacatcacgccagtaccgggcggcgtcggcccgatgacggtcgccacgcttatcgaaaacacgctgcaggcgtgcattgaatatcacgatccacaaggaaaataa

SEQ ID NO: 369147 - DNA, 558 bp, Salmonella enterica
atgaaacataaattaatgacctctactattgcgagtctgatgtttgtcgctggcgcagcggttgcggctgatcctactccggtgagcgtgagtggcggtactattcatttcgaaggtaaactggttaatgcagcctgtgccgttagcactaaatccgccgatcaaacggtgacgctgggtcaataccgtaccgccagctttacggcgattggtaatacgactgcgcaggtgcctttctccatcgtcctgaatgactgcgatccgaaagtggcggccaccgctgccgtggctttctctggtcaggcagataacaccaaccctaatttgctggctgtctcctctgcggacaatagcaccaccgcaaccggcgtcgggattgagattcttgataatacctcttcaccgttgaagccggacggcgcgaccttctcggcgaagcaggcgctggttgaaggcaccaatacgctgcgttttaccgcacgctataaggcaaccgccaccgccacgacgccaggccaggctaatgccgacgccacctttatcatgaaatacgaataa

SEQ ID NO: 369148 - DNA, 534 bp, Salmonella enterica
atgataaggaaaggcgcggcgctagtggggcttgttttgatgtcgcccgttattgcgcagccggtaatggtagagagcgggcgtgttcacctgcgcggacaactggtcaatggcggctgcgctgtcgccacagaaagccaggatttgcgcgtactgatgggacagtaccgcacgaatgcgtttaccggtcctggcagcttcgctcccgtcagcgttccattttcgttacggttaatctcctgtagcgcggaggtctggcgtcatgtcggcattgcgtttgctggcgttacgcctgcggaagatccccatgtttttctggccagcggcgaaggtatcggtaatgccggaatcggcctggcgttatttgatgaccagcagcggcaaatcatacctaacacgttaccgcttcattacacgcccattttaacgtcagaaatgactttgcattttaccgcccgctatcgggcaatttcagaaaatatgacgccgggacgaattcattcagaagtgtggtttacgctggtttacccatga

SEQ ID NO: 369149 - DNA, 693 bp, Salmonella enterica
atgctgaatagtataaaattaggctttattgttcttctcacgttatttacttcgctgaacgtacaggcggcgggggggattgcattaggcgccacgcgagttatttatccctcggcggcgaagcagacttctctggcaatcagtaatagcgatactcaagaacgttacctcgtcaattcatggatcgaaaatagcgccgggcagaaagaaaaaacgtttatcgttacgccgcctttattcgtcagcgagcccaaaagcgaaaacacgctgcgtattatctacgccgggcaaccgctacccggggatcgggagtcgttattctggatgaacgtgaaagccatcccgtcggtcgataaaagtcatattgaaggaaaaaacgttctgcaactggcgattctgtcgcgcatcaaactgttcgtgcgtccggcgaatttgccgcagacgccggaagacgcgccgaccttgctgaaattttcccgtgtcggcaaccatctcaagataaccaacccatctgcttattacctcacgctggtcaatatcagcgtgggcgcgaaaaagattgataacgtgatgatcgcgccaaaaagcgacatgcaaattcccttaccgactggcgcgcagggcagcgtgacatttcagaccgtcaatgattacggcgcattgacgtcggcgacaacggccagtctcggttaa

SEQ ID NO: 369150 - DNA, 2613 bp, Salmonella enterica
atgaagaagacaacctggtttgcagggcgatttcccggctatgtatcaccgttaagcggcgtggcgctgtcggtgctggcggcgctgtgtccgctgacgagccgcggcgaaagttatttcaaccctgcgtttttgtcggcggataccgcgtccgtggcggatttatctcgctttgaaaaaggtaatcatcagccgcctggtatttaccgggtggatatctggcgtaacgacgaattcgtagcgacgcaggatattcgttttgaggcgggcgccgtgggcgccggcgataaatccggcggcctgatgccttgttttacaccggagtggattaaacggctgggcgtgaataccgcggtgttccctgtctcagataaaggcgtcgataccacgtgtattcaccttcctgagaaaatcccgggcgcggaggtcgcgttcgatttcgcgtcgatgcgcttaaacattagcttgccgcaggcgtcattgctcaacagcgcgcgtggctatatcccgccggaagagtgggatgaagggatacccgccgcactcattaattacagttttaccggtagccgcggaacagacagcgatagctattttttgagtctgctgagcgggttgaactatggcccctggcggctgcgtaataacggagcctggagctattcgaaaggggacggctatcattcgcaacgctggaacaacattggcacctgggtacagcgcgccatcattccgctaaaaagcgaactggtcatgggggacagcaataccgggaacgatgttttcgacagcgtcggctttcgcggagcgcggctgtactcttctgacaatatgtatcccgatagcctgcagggctacgcccccacggtcagagggatcgcccggacggcggcaaagctgacgatacgacagaacgggtatgttatctaccaaagctatgtgtcgccgggcgcgtttgcgattaccgatcttaatcctacctcttccagcggcgaccttgaggtgacggtagatgaaaaagacggtagccaacaacgttacacggtgccttactctaccgttccgctattgcagcgtgagggtagggtgaagtatgacctggtggccggggattttcgcagcggcaatagtcagcagtcttcgccattctttttccagggaacggtgattgccggcctgcctgcggggctgacggcttacggcggtacgcaacttgccgatcgttaccgtgccgtggtggtcggggcggggcgaaatttgggcgactggggagccgtgtcggtcgatgtcacacatgcgcgtagccaactggcagatgacagcacccatcaggggcaatcgttgcgttttctgtacgccaaatcgctgaataattacgggactaattttcaattgctgggttaccgctattccacgcgcggattttacaccctggatgatgtggcataccgcagtatggaagggtacgactacgaatacgatagcgacggacgccgccataaagtgccggtggcgcagagctaccacaatctccgctacagcaaaaaaggccgctttcaggtcaatatttcgcaaaacctgggggattacgggtcactgtatctttccggcagtcaacaaaattactggaatacggcggataccaatacctggtatcaactgggatacgccagtggatggcaaggcataagttattcgctgtcatggtcgtggaacgagtcggtggggatctcaggcgccgatcgcattctggcattcaatatgtccgttccgtttagcgttctgaccggacggcgctatgcgcgcgacactattcttgatcgtacttatgccacgtttaacgccaaccgcaaccgcgacggcgacaatagctggcagaccggcgtgggcggcacgcttctggaaggacgtaatctgagctacagcgtgacgcaagggcgtagcagtagcaatggttatagcggcagcgccagcgctagctggcaggcgacgtatggcacgctgggcgtgggatataactacgatcgcgatcagcatgactataactggcaactttccggcggcgtggtcggtcatgcggatggtattacgtttagccaaccgttgggcgataccaatgtcttgattaaagcgccgggagcgaaaggcgtgcgcatcgaaaaccagaccggcgtgaaaacggactggcggggttatgcggtaatgccctacgccacggtatatcgctataaccgcgtcgcgttagataccaacacgatggacaaccataccgatgtcgaaaataacgtcagcagcgtagtgccgacagagggcgctctggtgcgggccgcttttgatacgcggataggcgtaagggcaatcattaccgcgaggcttggcggacgtccgttaccgtttggcgcgatagtacgagaaaccgccagcggtattaccagtatggtcggcgatgacgggcaaatttatctgagcggcttgccgctaaaaggtgaactgttcatccagtggggagaggggaaaaacgcgcgttgtatcgccccttacgccctggcggaggatagcctgaagcaggcgattacgatagccagcgcgacctgtatccgtccgtcgtcataa

SEQ ID NO: 369151 - DNA, 1008 bp, Salmonella enterica
atgaaaatatactcagcgctattgctggcggggaccgcgctctttttcacccatcccgcgctggcgacggtttgccgtaattcaaacgggacggcgaccgatatcttttacgacctgtcagatgttttcaccagtggcaataatcagccgggacaggtggttacgctgccggaaaaatctggttgggtcggcgtaaacgcgacgtgcccggcggggacaacggtaaattatacctaccgaagctatgtatcagaattaccggtacaaagcaccgaaggaaattttaaatacctcaagctgaatgactaccttctgggcgcgatgagcatcaccgatagtgtcgctggcgtattttatccgccccgtaactatattcgcatgggcgtcgactctaacgtgtcgcagcaaatgccgtttggcgtgcaggactcaaagctggtttttaaattaaaagtgatacggccttttattaatatggtgacgatccctcgccagacaatgtttactgtctatgtgacgacctctaccggcgacgcgttgagcacgccggtatataccattagctacagcggcaaagtggaagtgccgcaaaactgcgaagtgaatgccggacaggtcgtggagtttgatttcggcgatatcggcgcgtcgttatttagtcaggcgggggcgggtaatcgtccgcaaggcgtcacgccgcaaacgaaaactatcgctattaaatgtaccaacgtcgcggcgcaggcctatttatctatgcggcttgaagccgaaaaggcctcagggcaggcgatggtgtccgataatccggatttaggctttgtggttgctaatagcaacggtacgccgctcacacccaataatttgtcgagtaaaattccgtttcatcttgatgataacgccgccgctcgcgtaggtattcgcgcctggccgatcagcgtgacggggaataaaccggcggaagggccgtttactgcgcgcggctatctacgagtcgattatgattaa

SEQ ID NO: 369152 - DNA, 519 bp, Salmonella enterica
atgatctttcggcgcgttttcatcgctatcggttgtgttttgttcagcccgctgagtcaggccaactcatctctgggcgaagtgaatattgaactgcgcggtaacgtggtggattttacctgcgccgtggtggcgggcgacagtaacaaatcggttaacctcggcacctggccgacaaaacagcttcacgccgccggtgacgccacgcaaccggtagcctttagcctaaaacttgaaggctgcccgccggggtcggcgtctataacgttttccgggacgccagcgcccggcacggcattactggcgcttgctgatacggcaatggcgcaaaaactggcgattgaaattcgcgatggcgatcaacgtcgattgccacttgaacaggccagcaaggccgtcgatattgacaacaacggcaatgctaccctgaaattctatgcgaactatatcgccttagccgatggcgtgcagcccggacttgctaacgcggatgcgaccttcctgatcaattacaattag

SEQ ID NO: 369153 - DNA, 633 bp, Salmonella enterica
atgaaacctgcatctgttatcattatggacgaacaccctattgtaagaatgtcgatcgaagttttactcggtaaaaatagcaatattcaggttgtcctgaaaacggatgatagccgaacagcgatagagtatctgcgcacttatcctgttgaccttgtcattctggatattgaattaccgggcaccgacggctttaccttacttaaacgaatcaaatctatccaggaacatacccggatactttttttatcgtcgaaatcagaggctttttatgccggaagagcaataagagcgggcgcaaacggatttgtaagtaaacgcaaagacctcaatgatatttataatgcggtaaaaatgattttatccggctattcttttttcccatctgagacgcttaatttcatcagtaatacccgtacccccaaaggcgggcaccatgatatgccactatctaaccgcgaagttaccgtgctgcgctatctggccaatggaatgtctaacaaagaaattgccgagcaacttttattgagtaacaagactatcagcgcgcataaggccaatatattttctaaacttggccttcactctatcgttgagcttatcgattacgccaaatcacacgaattattgtaa

SEQ ID NO: 369154 - DNA, 723 bp, Salmonella enterica
atgcgcagcgtaccacgcagggaaagacaccgccgtttaagaaatgccaaagactgcgcctgccgttatcactctccaacgccgcagatatttgatcgccttgagttactggaccaacagcttaattatgccttgccggttggtatcatttcccaggcaataattacaactgataactacctcggctattcattgagtcactacttattttccggaaaacctaccgctgcattccgctcattagatgacatttctttgtggattgaaaaggggtcgctcagacaactgattgtagatatggaggcgctacctgtctcctgtattgaggcgcttaaccagctacgcgcgctcagttggcaacaaagcgatatccagatttacctgctggtatcagataaaacccccgctataacacagtttatccgtatggctgggcgtttttttgttctgtcgcgacgacaaaatctggcctctgtacgcgaagccttgttatcagccgccaaacctcgcttatcggaaagctttagccgtactgactggttgatgattgaaactttagcgcaaggtgcctctttaaaagaaatagcacgtcagcaaagcgtaccttatcatcgtgtagtttaccggcttaaacaacttatcaccctccttaaccttccccacagacaaagctttcttcggctgatccagcagttaaacgttactttccacgacattttttaa

SEQ ID NO: 369155 - DNA, 597 bp, Salmonella enterica
atgctgcgtatcgctattaaggaacaaaacagtcactttgagcatggtttgaaaatcatcatgacgcgtctggcgaatcaatggcagcagaaaattgactttctgccgccagaagagatagataatgccgatatcgctttcctggccctggatgatgattggttcagcgcaggctgttaccagatacctatgcatacccaacatcagctacgggtgattatttgtaataaatgcgataaagaaaagctcatgttcagaccatgtctgtatatgctgccgcatatttatcggaaagatgatgttgaagaaattacccggaaaatgatattgatcttacataagcgagcgcttcgacatagcgtcccttctggcatttgccactactgcacgactcgtcatttttcagtaacagaacgtcacctgttaaaactgatcgccagcggttatcatttaagcgaaacgggtgctttactttcactttctgaagagcagacaaagtcactccgccggagcattatgcgcaaattacatgttaaaacggagcagcagtttttaaagtatattagagttaaccttcatttcttactcagtaagtaa

SEQ ID NO: 369156 - DNA, 273 bp, Salmonella enterica
atgagccgtcgtggcaactgtcatgacaatgcggttgcagaaagctttttccagctactgaagcgtgaacggataaaggaaaagatctacggaacgagagacgaagccagaagcgatatttttgattacatagaaatgttttataacagtagacgccggcatggttcgagcgagcagatgccaccggctgaatatgaaaacctatatcatcaacgactcagaagtgtccaggttatccgtggtgattcacagatatgctcaccttgcgcctaa

SEQ ID NO: 369157 - DNA, 219 bp, Salmonella enterica
atgagcggtaaacgttatcccgaagagtttaaaattgaagcggtaagacaggttgttgagcgtggccattctgtttccagcgtcgcaacacatctcgatattactacccacagtctttacgccaggataaagaagtacgggtcgaactcctccaccaataaagaaataaagagcagtcagatgatcagaccgaaatccgccgactcccgaaagagttga

SEQ ID NO: 369158 - DNA, 159 bp, Salmonella enterica
atgggctttgggcacatgcgtatccttgcgtgtattggtcagttgccggagtctggattaatgcactatggctccgttgggttcttttttgggactgatggtgcattgcgacttcttgctaagaaacctgatggggcatttgtgacatacgatatgtag

SEQ ID NO: 369159 - DNA, 1641 bp, Salmonella enterica
atggttaacaatagattaaaaatggtaattgctatccttatagttttctcgttggtgtattcaataggatttatcacaccaatgaactctgatgactatacttatgccctaagagagctttcgctttctagcgtaaaaatgcactatttgggatggagcggaagggttgtgtcagatacgatcagcacatctctattaaagtttttctccccgcatatttacaatgcaataaactcagcagcgctaacattaatggtgttgtgctggacaatgatcccagctacattaacaaagtcgtcaccgtccccatatgtgatgattttcttatttttcttatacttcattgcaaatccagccctcggtcaaactaacttctggcttgttgggtcagcaaattacttatggaccaacatgttcattgccatttatatactaatttctatatatttaagcaatggtaaaaaatccaatttaatactctttgtatatgccatatcatcgatatttgcaggttgctcaaatgaaaatacatctcttgtagttgtattaatttctgtagcatatttctttataatgaatagaaataaatatttactgattggcgtattcggatctgcaataggcgcgggggttctcctgctggctccgggaaacctatcccgtgcgtctacaatacaagactggtacaatcaaccacttgcatggagggttcttgagcacttttcagaaaggctgccatcagcaatgggggcatattggcaggtctatattgcatttataatactactaatctctgtagtgttatcaaggaatagtagcagcaaacttatgtttggaagctttttattcatactgggtgcaattgctgcaaatgttgcgttccttgcatctcctgcaatgcccagcagggctctcaatggagcactctgctttatgattctttcgatttcctttgttgctcattctgcatttacgaaatttaacaaggcttccatttatttatctgttactacatatgcaatggcttttttatatttcattccatcatacatcctctattactcatcaattaaatcaataagcaaacaaacggagattagggaagaaataatagacagggcgaaacataacaaacaagatcaagcgataattcctgattattactttccaccggtactgcatgcaggcccaagtcttgatacgtttaacagtgaagcaatgtctagatactacgggattgatttgaaaataactgctccaggatttttcgactattcacgagcctttaatttcaagcctcttaatattaacgcaaaaatatgtaacaacgtttatataaaatcattatggatatataaacagcaaatggacattaaaacctttgtaatatttgagtttaataagaatcctgctgattctcttgatgagaagacagcgatgttcattagctttaaaacaaaggatggaaaaattataaatgcagatgtcgacaagaagacattccaaatagacggaagatggctttccgggcgggcgattaacgacatagattcaaatgaattagaatcaattacatctgggacatgggacgttagaacaggggcgaggacaaatgagaatattacggaaataattaaataa

SEQ ID NO: 369160 - DNA, 927 bp, Salmonella enterica
atgaaaatctcgttagtcgttccggtcttcaatgaagaagccacgatacctattttctataaaacggttcgcgagtttgaagagctaaaaccgtatgaagttgagattgttttcatcaacgacggaagcaaagatgcgactgaatcaataattaacaaaatagctgcatctgatccgctcgttattccgctttcgtttacgcgaaacttcggtaaagaacctgctcttttcgcgggtctcgaccatgcaaccggggatacggtcattcctattgatgtcgatttacaggatccgatagaagttatcccccatctcattgagaagtggcaggctggcgcggatatggtgctggctaagcgctcagaccgctcaactgacgggcgcatgaagcgtaagacagctgaatggttttataagctgcataataaaatcagcaatccgaaaattgaagagaacgttggcgactttcggttaatgagtcgtgaggttgtcgaaaatattaaacagatgccagaacgtaatctgtttatgaaaggcgttctgtcatgggtgggcggcaagactgatatagttgaatacgcccgcgctgaacgtgttgccggcgattcaaaattcaatggctggaaattatggaatctggcgctggaaggaataacttctttctcaacatttccgctccgcatatggacttatattggattgtttattgcaggtatgtcattcctttacggtgcatggatgattattgataaattaatatttggaaataatgttcctggctacccgtcacttcttgtttctgtacttttcctgggtggcgttcaattgataggaataggtattcttggagaatatattggtagaatttacatagaaaccaaaaaaagacctaagtacataattaagaatgagaagaaaaatggttaa

SEQ ID NO: 369161 - DNA, 363 bp, Salmonella enterica
atgttgaagttattcgctaagtacacatcgatcggtgttcttaacacgcttattcattggggcgtatttgctttttgtgtgtatgggatgcatacgcatcaggcgttggcgaacttttccggttttgttatcgccgtatcgttcagcttctatgccaatgcgcgcttcacctttaacgccagcaccaccacgcttcgctacatgatgtacgtgggatttatgggaacactgagcgccgttgttggctggatggctgacaaatgttccctgccgccactccttactcttgtcaccttttcagctatcagcctgatatgcggattcatttattcaaagttcattgtctttagggatgcgaaatga

SEQ ID NO: 369162 - DNA, 246 bp, Salmonella enterica
atggaatctcgccaattatccgccacggcgcatgagatgatgaataacggtgacgccttcgcgcatcagcaaatggctcagacacagaaaaccagcgccccggctactgtggaaaatgcgacatccttttctgaaatggacggctatgaaaaagcaatggtcatccatcaatcgatgaataatgcccattctttctcccacgagatccaggctgaggagcaccataaacagattaaacgcaattag

SEQ ID NO: 369163 - DNA, 330 bp, Salmonella enterica
atgctacgcagagcgatcagtaatttactctctaatacgatgcgctatacgccgccgggtaaaaccattactcttcggataaaagaagcggacgaccagatacatattattgttgaaaaccccggtacgccaatcgcgccggaacatttgccgcgccttttcgatcgtttttatcacgttactccctcccgccagcgtaaaggggaaggccgcggtataggcctggcaattgtaaaatccatcgtcactgcgcatcagggaaaagtttctgtcacctccgatacgcgcgctactcgttttattttgacattacccaaatacctccgttga

SEQ ID NO: 369164 - DNA, 855 bp, Salmonella enterica
atggatgcgcttagtcggctattgacgcttaacgcccctcagggctcaatcgacaagaattgcccgttaggcggcgactggcagttaccgcacgccgctggcgagctatcggtgattcgctggcataccgttacgcagggcgaagcgcaactggaaatgcctaccggcgacgccatgacgcttacgccgggaaaggtggtgattctgccgcaaaactccgcccaccgtttgcgccagtctggcgaagcaccgacacatatcgtgtgcggtagtctacgtctgcacacgacgtcacgttatttccttaccgcgttgccggaagtgttatgtcttgccccgccgctgcatagccccgccagtatctggcttaacgccgccattttgctgttacagcaggagtcagaacgccatttacctggcgctgacgtcttatacagtcagcagtgcgccacgctgtttaccctcgccgttcgcgactggctatcgcaggccggcaccgcgaaaagtgtgctcaatttattgctgcatccccggctgggccgcgtgatccttcacatgctggaaacaccggcgcatccctggacggtcgaaacgctggcgcaacgggtacacatgtcgcgggcgagcttcgcccagctatttcgcgacgtgtccgctacgacgcccttagccgtgttaacaacgctgcgcctgcaaatcgccgcccagaccctgtcgcgtgaagcgctgccggtgatggtgattgccgagtcggtaggttatgcgagcgaatcttcttttcacaaagcttttgtccgtgaattcggttgtacaccaggcgagtaccgcaaacgggtcagcgcgctcgaacgataa

SEQ ID NO: 369165 - DNA, 1326 bp, Salmonella enterica
atgacacagtatcaggcgctcattattggttttggcaaggcaggaaaaacgttggcggcaactctggcgaagacgggatggcgcgtggcgattatcgaacagtccgccagtatgttcggcggaacctgcatcaacattggctgcattccaacgaaaacgctggttcatgacgcggaacgtgagggcgatttttctgtcgccatgcaacgcaaagcggcggtcgtaaattttttacgcgacaaaaattttcataatcttgccgacctggacaatgtcgatgtgattgagggaagggcggagtttattgataaccataccttacgggtatttcaggcggacggcgagcgggtgttacggggagaaaagatcttcattaatactggcgcagagtcggtgatcccggctattacgggcttaacaacgacggcaggggtgttcgatagcaccgggctactcagcctgagccagcgtccggcgcggctggggattttaggcggcggttatattggccttgaatttgcctcaatgttcgccaacttcggtacgaaggtcactatctttgaagcagcgccgcaattcctgcctcgtgaagatcaggatatcgcgcaggcaattacccacattttacaggaaaagggcgtcgagctgattttaaacgccaacgtacaggccgtatcctcaaaggagggcgcggtacaagttgaaacgccggaaggcgcgcatcttgtggatgccctgctggtggcgtcggggcgaaaaccggcgacggctggcttacagttgcagaacgccggcgtggcggtgaacgaacgcggcgggatcatcgtggatgattacctgcgtaccacggcggacaatatctgggcgatgggcgatgttaccggagggttgcagtttacctatatttcactggatgattttcgtattgtacgcgacgggttattgggagatggcaaacgcagtacccgcgatcgccagaacgtcccgtattccgtctttatgacgccgccgctctctcgtgtcgggctgacggaagaacaagcgcgggcaagcggcgcaacggtgcaggtggtgacattaccggtggcggcgatccctcgcgcccgtgttatgaacgatacccgtggcgtactaaaagcggtagtggacgtgaatacgcagcgtattgtaggggtgtcattgttatgcgtcgattctcatgaaatgattaatatcgttaaaaccgttatggatgcagatttaccttatacggtgttacgcgaccagatatttacccatcctacaatgagtgagtctttaaacgatctcttctctctcattaagtaa

SEQ ID NO: 369166 - DNA, 237 bp, Salmonella enterica
atgttaaaagttaccacacttattgcttcattattggctgcgccgctggcgttttccgtctccgcccagccgctaactgacgttgaatatatcagcgtttctgcggtgtcagcaacgccgtcaatgcttgaagacgctattgccagactggcgcaaagtaaacaggcgtcgtcatggaaaattacgtcaatgcgtattgataatacgggttacgccactgcgatattatataaataa

SEQ ID NO: 369167 - DNA, 561 bp, Salmonella enterica
atggataaatatcttcgtctgttaagtcagggggatcggcttggattaacattaattcgcctgagtatcgccatcgtttttatctggattggactactaaaatttgtgccctatgaggcagacagtattaccccgtttgtggcgaacagcccgtttatgtcttttttctatgaacatcctgaagaatatcgtcagcatctgacgcatgagggcgaactaaaaccggaggaacgcgcctggcaaacggccaataatacgtatgcgttttcggatggtctgggcgtggtggaattgattatcgcggtgctggtactggctaaccctgtcagccgctggttagggctggcgggcggcgtgctggcattcctgacgccatttgtcacgctgtcgtttttaatcaccacgccggaggcctgggttatgccgctgggcgatgcgcattatggtttcccgtatttatcgggcgctgggcggctggtattaaaagatacgttaatgctggcaggggcggtgatgatcatggcggactccgcccgttcgttacttttacagcgacagtag

SEQ ID NO: 369168 - DNA, 1176 bp, Salmonella enterica
atgaataagatcatcaaacgtttagagatcatcaaaagcgccatcgaacttgaggacgaagagattatccgtcagcagctcatctacctgaaaaatgagccgcaggatgccgtaatcagcgcgattgcccaggcgattgaagctcgtcgattcagtgacgccatgcaagagatcgccgcctggctacaggctcaacgggcgctctcgacgtggcaagatccctctattgccgccagtaaactggagctgaaagcgcttgaagcccaacttcgcgatctgattgacaaacgaaatgcgcgggtacaaatcctcgacgatttcaacgacctctatcatctgcgtctcgggccgttgatgagccgtattctggagttgcgtaaacagctcgcggtgagtatgcagcgtaagcaagaagccgaaataaaacgccgggaaaaggattatcaatcctgcctgcaatttatttcccaggccgtggatcaactggcaacgctaaaacagcagtggacaggattgaatgccgcctcgcgcgaagcggtgggcatccgtcagcgaatccagcagcagacggaattaattaccgcgttgctggcggaaattcgcgagctggaagcggatttttcccatcaggacgacagcgcattccgccaggcgcaggaaaatgcggaacaggactatcaccagtaccgggagcagcagcaggaagcgcaattccgctacgctcgcgatcaacgtttgtcggctgacgaacgcaatgaattaaaacgtttgtggcgtcaggccagccgcctgtgtcacccggatgtggtcgccgatgaattaaaagaaaaagcgcaccagatgatggtacaacttaatcaggcgcggcagaatgccgatctggcggcaattcgcgcgttattgacgcagctgcaaagcggtctggaaccgatgatggcaagcgacaggctcaataacctggaacatctgcgccataaaatacgccagctccgcacgcaaatcgacgcgctgttgaaagagataacgcagctggaaacggaaaacgcctggcggctcgcctcttccgttgcggataaggaagcctatttctccgagcaggaacgggcgctaaccgaaattcgcaatacgctggaggcgcaggttcaacaggtggaacaggaacttctgtcagggtag

SEQ ID NO: 369169 - DNA, 1395 bp, Salmonella enterica
gtgaaaaacgcgtcaactgcatccggcgccagcgtgtcggatgccgcgtcgaagaatgaaccgacgcttcagcgggggttgcaaaaccgccatattcagctaattgcgctgggcggtgccattggcaccggactgtttctgggcatcggcccggcgattcaaatggcggggccggctgttttgttgggctatggcgttgccgggattatcgcttttctcattatgcgccagttgggtgaaatggtcgtggaagagccggtttccggatcgtttgcccacttcgcctggaaatattgggggccgtttgcgggctttttgtcgggctggaactattgggtcatgtttgtgctggtcgggatggcggagttgaccgcggcgggcatctatatgcagtactggctgcctgacgtaccaacatgggtatgggcggcggcgttttttattatcattaatgccgtgaatctggtgaacgttcgtctgtatggcgaaacggaattctggttcgcgctgattaaagtgctggcgattatcggcatgataggttttggtctgtggctgctgttctccggccacggcggcgaacatgccagcattgataacctctggcgttataacggtttcttcgctaccggttggcatggtttgcttctgtcgctggcggtgattatgttttcttttggcggactggagctgatcggcattactgcggcggaagcgcgcgatccgcaaaaaagcatcccgaaagcggtgaatcaggtggtataccgtattttgctgttctacatcggttcgctggtggtgttgctggcgctctatccgtgggtagaggtgaaatccaatagcagcccttttgtgatgatcttccataacctggacagtaatgtggtggcttcggcgctgaatttcgttattctggtcgcgtcgctttcggtatataacagcggcgtttattcgaatagccgaatgctgttcggcctgtccgtacaaggcaacgcgccgaaatttttaacccgcgtcagccatcgcggcgtaccggtgaactcgctgatactttccggagcgattacctcgctggtggtgctgatcaactatctgttgccgcaaaaagcgtttagcctgttgatggcgctggttgtcgcgacgctattgctaaactggataatgatctgtctcgcgcatttacgttttcgcgcggcgatgcgtcgtaaagggcgcgagacgcaatttaaggcgctgttctatcccgccggaaactatttgtgcattgcgtttctggcgctgattctggtgttaatgtgtacgatggacgatatgcgattgtcggcgattttgctgccggtatggattgtattcctgtttatcgcgtttacagttttgcgccgtaaggctcattaa

SEQ ID NO: 369170 - DNA, 1248 bp, Salmonella enterica
atgcaggaattgatatcccaggtagaagatttagcgggaattgaaatgaatcacaccacgtcgctggtggtgatatttggtattatttttctgacagcagttgtcgtgcatattattttgcactggatagtactgcgcgctttcgaaaaacgcgccagcgccagttcccgcctgtggctgcaaattattacccagaataaattattccatcgtctggcttttacgctacaaggcatcattgtcaatattcaggccgcgctctggctacaaaaaggcagtgaggctgcggatatcctgacgacctgcgcgcagttatggattatgacctacgccctgctgtcgttattttctctgctggacgtgattttcaatctatcgcaaaaatggcccgccgcctctcagttaccgctaaaaggaatatttcagggcattaagctcatcggcgcaattatcgtcggcattctgatgatctcactgctgattggccagtcaccagcaattttaatcagcgggcttggcgcgatggccgcggtattaatgctggtctttaaagacccgattcttggcctggttgctggtatacagctttccgccaacgatatgctcaaactgggcgactggctggagatgccaaaatatggcgcagatggcgcggtcattgatattggtttaaccacggtaaaagtacgcaactgggataataccatcaccaccattcccacctggtcgctggtttccgactcgttcaaaaactggagcggcatgtctgcgtccggcggacgccggattaaacgcagcattaatattgacgcgaccagtatccattttctggatgatgatgaaaaacagcggctattaaccgcgcaactgttaaagccgtaccttaccagccgtcatcaggaaatcgatgaatggaataaacaactggatgcgccggaatcagccttaaatcaccgccgaatgaccaatatcgggacatttcgcgcctatctgaacgaatatttacgccaccatccgcgcatccgtaaagacatgacgctgatggtacgccaactggcgcctgacgatcatggtttgccgatagagatctacgcctttaccaataccgtcgtgtggctggaatatgagagcatccaggccgatattttcgaccatatttttgccgtggtggaagagttcggcttgcgtattcatcagacgccgaccggcagcgatattcgtgctctgtcagggacattgcggcattaa

SEQ ID NO: 369171 - DNA, 1971 bp, Salmonella enterica
atgacccaaaagcgtaccctgctaaaatacggcatactctcgctggcgctggccgcgccattatctgcctgtgcgtttgactctcttacggtaattggcgatagccttagcgataccggaaataacggtcgctggacctgggatagtggtcaaaataagctctacgacgaacagttggccgaactatatgggctggcattaagcccttccagcaatggcggttctaattatgccgccggcggcgcgacggcgaccccggaattaaacccgcaggataataccgcagatcaggtacggcagtggcttgccaaaacggggggaaaagccgaccacaacggtttgtatattcactgggtcggcggaaacgatctggcggcggccatcgcgcgacctgccatggcacagcaaatagccggtaatagcgccactagcgcggcggcgcaggtagggctgttactggatgccggcgccgggctggtcgtggtgccaaacgtaccggatattagtgcgacgccaatgcttctggaggcggtaatcaccgccgggctgggcgcagcggctcccccggcgctaaaagcggcgttagaggcgctggcggagggagctacgcccgatttcgccagtcggcaacaggcgatccgcaaggcgttgctggcggcggctgcaacggtaagcagcaatccgtttattcagcaactgctcgttgagcaactgctggcgggctatgaagcggcggcagggcaggcgtcagctctgaccgatgattataatcggatggaagagaaggggctggagcaacacggcggcaatatagcccgtgccgatatcaacggcctctttaaggaaattcttgcccacccgcaggcgtttggtctgacaaataccgtaggtatggcctgcccgccgggcgtatccgcttcggcgtgctcctcggcaatgcctggatttaatgcgtcgcaggactatctgtttgccgatcatttacatcccggtccgcaggtccataccattattgcgcaatatatccagtcgatcattgccgcgccggtacaggcgacatatctgaaccaaagcgttcagtcgatggcgcaaggtagtcgtaccacgcttgacagccgttatcagcagcttcgccagggggaaacccctgtcggttcgctgggcatgttcggcggatacagcgggggatatcaacgttatgataataatgaggccgacgggaacggtaatcataataatctgacggttggcgtcgattatcagcttaacgagcaggtactgctgggagggctgatagctggttctctggataagcaacatcctgacgataattatcgttatgacgcccgtggttttcaggccaccgtattcagccatttgcgcgccggtcaggcgtggctggatggcgatttacactatctgtccgctaaattcagtaacattcagcgcagtatcacgctcggtgcgctaagacgggtggaagagggcgaaaccaacggtcggctgtggggcgcgaggttaaccagtggttatgattttgtcatgatgccgtggttaacgaccggaccgatgctgcaatatgcatgggattacagccacgttaatggctatagcgagaagctcaataccagtacatcaatgcgttttggcgaccaaaacgcccattcgcaggtgggtagcgctggctggcgtctggatctccgccacagcatcattcactcctgggcgcagattaattatcgccgtcagtttggcgatgatacgtatgtggcgaatggcggccttaaatcgaccgcgctgacgtttagccgcgacggaaaagcgcaggataaaaactgggttgatatcgcgattggcgcagattttccgctgtcggcaacggtgtccgctttcgccgggctggcgcaaacggcagggttaagcgatggcaatcaaacccgttataacgttgggtttagcgcccgattttga

SEQ ID NO: 369172 - DNA, 654 bp, Salmonella enterica
atggatatcgtttctgtcgccttacagcgctactccactaaggcgttcgatcccagcaaaaaactgaccgccgaagaagcggataaaataaaaacactactacagtacagcccctccagcaccaattcccagccgtggcactttattgtcgccagtacggaagaaggcaaagcgcgcgtagcaaaatccgctgccggaaactacacgttcaacgaacgcaaaatgctggacgcctcccatgtggtggtcttctgcgccaaaaccgcaatggatgacgcatggcttgagcgcgtcgtcgatcaggaagatgctgatggccgtttcgctacgccggaagctaaagcggaaaatgataaaggtcgccgctttttcgccgatatgcaccgcgtctcgctgaaagatgaccaccagtggatggcgaagcaggtttatctgaacgtcggcaactttctgctgggcgtcgccgcgatgggtctcgacgccgtccccattgaaggtttcgacgccgaggtgctcgacgctgaatttggtctgaaagaaaaaggctataccagtctggtcgtggtgccggtcggccatcatagcgtcgaggatttcaacgccgggctgccgaaatcacgtctgccgcttgaaaccacactgacggaagtttaa

SEQ ID NO: 369173 - DNA, 369 bp, Salmonella enterica
atggacggtcaaacactgcacgcctgtgcaaaacgctttgcgctggaactgccttttaccgaacactgctggcctttcggcccacagtacgatgtgtttaaagtcggcggcaaaatattcatgctgttcactgaacatcactgtcgcccagtggtaaacctgaagtcggatccccaaaaatccctggtaaatcaacaaatttaccccagcattgcgccaggctatcacatgaataagaaacactggatttcagtctatgcgggcgaggatatcaccgtctcgctactcaacgatttgataaatgactcatggaatctggtcgtagacgggctgcctaaaagagagcaactgcgcctgcgaccgcgctga

SEQ ID NO: 369174 - DNA, 582 bp, Salmonella enterica
gtggctcgtccgaagagtgaagacaaaaaacaagcattactggaagcggcaacccaggcgatagcgcaatccggtatcgccgcctcaacggcggtgattgcgcgtaacgcaggtgttgcagaaggaacattgtttcgctatttcgcgaccaaagatgagctgattaacacgttgtatttgcatttaaagcaggatctctgccagtcaatgataatggagctggatcgatccattaccgatgccaaaacgatgacccgctttatctggaacagttacatcagttggggtctgaaccatcccgcgcgccaccgggcgatccgtcaactggccgtcagcgaaaagctcaccaaagagacggaacaacgggccgacgatatgttccccgaattgcgcgatttatgtcatcgttccgttttgatggtgtttatgtcggatgagtaccgcgccttcggcgacggcctttttctggcgctggctgaaacaacaatggatttcgccgcgcgcgatcccgctcgcgctggcgaatatattgcgctgggattcgaagcgatgtggcgcgcgctgactcgcgaggagcaataa

SEQ ID NO: 369175 - DNA, 342 bp, Salmonella enterica
atgaccatttccgctcaggttatcgacacgattgtcgagtggattgatgataatttgaatcagccgttacgtattgatgatattgcccgtcatgcggggtattccaagtggcacctgcagcgcctttttatgcagtacaaaggggagagtctggggcgctacgtgcgtgaacggaagctaaaactggcggcgcgcgacctgcgcgacaccgaccagaaggtgtatgatatttgtctcaagtatggttttgattcgcagcaaacctttacgcgcatttttacccgcacgttcaacctgccgccaggcgcttatcgtaaagaaaagcatggtcgtacgcattga

SEQ ID NO: 369176 - DNA, 249 bp, Salmonella enterica
atgaaacacccgcttgaatcattgatgaccgctgccggtattttgctgatggcgttgctctccagcctgctgctgcccgccccttcgctcggccttgcgctggcgcaaaaactggtcgggatctttcatcttatggatctcaaccagctttatactttgttgttttgtttatggtttctgttgctcggcgcgctggaatattatgtcattcgctttatctggcggcgctggttttcgctggccgattaa

SEQ ID NO: 369177 - DNA, 1119 bp, Salmonella enterica
atggcgctgaatgattttcacgtttctgaaccttatacgcttggtattgagctggagatgcaggtgatcaatccacctggctacgatttaagtcaggactcttctacgctgatcgacgccgttaagccccaacttactgcgggagaaattaagcacgatatcaccgaaagtatgctggagatggccacgggcgtctgccgcgatattgaccaggcggcggcccaactttctgccatgcagcacgttattttacaggcggcgtcggaacaccatctcggcatttgcggcggcggtacgcacccttttcaaaaatggcagcgtcaggaggtctgtgataatgagcgctatcaacgcacgctggaaaatttcggctacttaattcaacaggcgacggttttcggccagcatgtccacgtcggctgcgcgaatggcgacgatgcgatttatcttttacacgggctgtcgcattttgtgccgcactttattgcgctctccgccgcgtctccctatatgcaaggatctgacacccgttttgcctgcgcgcgcctgaatattttttccgcttttcccgataacggtcccatgccgtgggtcagtaactggcaagagtttgccggactatttcgccgtctgtcttacaccacgatgatcgacagcatcaaagatttgcactgggatatccgccccaacccggcctttggcacggtagaagttcgggtgatggatacgccgctcacccttgatcatgccatcaatatggcagggttgattcaggcgaccgcgcactggctgctgaccgagcgtccctttaaaccgcaggaacaagactatctgttatataaattcaaccgttttcaggcttgccgctatggtctggagggcgtgataaccgatgcctataccggcgaccgccgtcgcctggcagatgatacgctgcgtctgctggacaacgttaccccctctgcgcgcaagctgggcgccgacagcgccattgacgcgctacgtctgcaggtgaaaaaaggcggtaacgaagcgcaatatatgcgggagtttattgccgacggcggatcgctgataggtctggtacaaaaacattgtgaaatctgggcgggacaatag

SEQ ID NO: 369178 - DNA, 705 bp, Salmonella enterica
atgctgacatctcattttccccttccctttgccggacacaggctgcatatcgtcgactttgatgcgagcagctttcgcgaacacgacctgctatggctacctcatcacgatcggctccggtctgccggacgcaagcgtaaagctgaacatctggcaggccgcattgccgccgttcatgcgctacgcgaggtgggcgtcaggacagtgcccggtatgggcgacaagcgacagccgctatggccggacggcctatttggcagcatcagccactgtgcgacaacggcgctggccgtcatatcccaacagcgtatcggcattgatatagaaaaaatcatgagtcaacacacggcgacagagctggcgccgtccattattgatagcgatgagcgccaaattctccaggcgagctcgctcccttttccgcttgccctgacgctggctttctccgccaaagagagcgtttataaagccttttcagaccgcgtcacgctcccgggattcgatagcgcaaaagttacctcgcttaccgccacgcacatctcgttacatctgctgccagcctttgccgccatgatggctgaacgtaccgtccgtacagaatggtttcaacgtagcaatagcgttattactcttgtttctgcaataacgcgctttccccacgacaggagcgctcccgcttctatacttagcgcaatcccccgataa

SEQ ID NO: 369179 - DNA, 2256 bp, Salmonella enterica
atgaacaagaagattcattccctgaccttactggtcaatttagggatttacggggccgctctgcccgtgatggcggaagacaaaaccgatagcgctgcgctcaccaatgaagacaccatcgtggtgaccgctgcccagcaaaacctacaggcgccaggcgtatccaccatcaccgccgatgagatccgcaaaaatccgcccgcgcgcgacgtgtcagaaatcatccgcaccatgccgggcgtgaacctgaccggcaactccaccagcggtcagcgcgggaataaccgccaaatcgatattcgcggcatggggccggaaaacacccttatcctgatagacggtaaacccgtcaccagccgtaactcggtgcgcctgggctggcgcggcgaacgcgatacccgtggcgataccgcgtgggtgccgccggagatgatcgaacgcattgaagtgctgcgtggccctgccgctgcacgctacggtaacggcgcggcgggtggcgtggtcaatatcattaccaaaaaaggcggtagcgagtggcacggctcctggaatacctatttcaacgcgccggaacataaagacgaaggcgcgaccaaacgcactaactttagcctgaacggcccgctgggcggggatttcagcttccgtctgtatggcaacctcgacaaaacgcaggcggatgcgcgtaatattaaccaggggcatcagtctgaacgtaccgggagttacgccgacacgttaccagccggacgcgagggggtcattaacaaagatatcaacggcgtggttcgttgggattttgctccgcttcagtctctggagctggaggccggttacagtcgccagggcaacctctatgccggcgatactcagaacaccaatacgaaccaactggtgaaagataattacggaaaagagacaaaccgcctctatcggcagaactactctctgacctggaacggcggctggaataatggcgtaaccaccagtaactgggtgcaatacgaacatacccgtaactcccggatgccggaaggcctggcaggcggcaccgaaggaattttcgatcccaaagcatcgcaaaaatatgccgatgccgatttgaatgacgtcaccctacacagcgaagtgagccttcctttcgatctgctggtaaatcaaaacctgacgctgggtaccgaatgggcccaacagcgtatgaaagacgagctctccaactcgcaaacctttatggggggaaatatcccgggttacagcagtaccaatcgtagcccctattcaaaagcggaaattttctctctgtttgctgaaaacaacatggaactgaccgacagcactatgctgacgccggggctacgtttcgatcatcacagtattgtgggggataactggagcccgtcgctgaacctgtcgcaaggtctgggggatgactttactctgaaaatggggatcgcccgcgcttataaagccccgagtctgtaccagactaacccaaactatattttgtacagtaaaggtcagggttgctacgcgactggcgcgggtaccggcatcggctgctatatgatgggtaacgatgatctgaaagccgaaaccagcatcaataaagagatcggtctggaatttaaacgcgatggctggctggccggcatcacctggttccgcaatgattaccgcaataagattgaagcgggtacggtgccgttgcagcgtatcaacaacggcaaaacggatgtttatcagtgggagaacgtgccgaaagcggtcgttgaaggtctggaaggcacgttaaacgtaccggttagcgacaccgtcaactggacgaataacgttacgtatatgctgcagagtaaaaacaaagagaccggcgaacgcctgtcgattattccacagtacacgcttaactcaaccctgagctggcaggtacgtcaggacgtttctctgcaatcaaccttcacctggtacggcaaacaagagccgaagaaatatgattatcagggtaaccccgttaccggaacagataagcaagcggtcagcccatacagtattgttggcctgagcgcgacctgggacgtgaccaaaaatgtcagcctgaccggtggcgtggataacctctttgacaaacgtctgtggcgtgaaggtaacgcgcaaaccgtcagggatactcaaactggcgcttatatggcgggcgctggcgcgtacacctataacgaaccaggacgtacgtggtatatgagcattaatacccatttctga

SEQ ID NO: 369180 - DNA, 1215 bp, Salmonella enterica
atgaaagaggcgctggcaacgggaagtaaggcctggtggaggacgaaaaccgggccggaatggatacgggaaaaagacggaaattatcgggtcactttttggtggcgcgacccgcagggaaacgaaacacactccccgatacggcgtgtctgggtctacatcactggcgtaaccgatcatcatcaaaacgcgcagcctcagacgatggcgcgtattgccggaacggatgtctggcgctggagtacggcgcttagcgctaactggcgcggcagctactgttttattcctaccgaacgcgatgacgtttttgccgcttttgcgccgggcgaaacgcccgatcggaacgcactgcgtgaaggctggcgacagctattaccgcaggcgattgccgacccgcttaattcgcaaagctggcggggaggacgtggtcatgcggtttcagcgctggaaatgccggatgcgccccttcagccgggatgggatcgtcctgaaacgccgtactcgccgcctttgatgatgcagtggcatagcgcacgtctgggtaactcccgccgcgtatggatattgacgaccggagacgaggcgccggaggaaagaccgttggctattctgctggacggtcaattctgggcggaaaatatgcccgtctggcccgcgcttgcctcgctgactcatcaacgcctgcttcccggtgccgtctatctgctgattgacgcgattgatactcaccaccgcagccaggagttgacctgcaatgccgacttctggctggcagtgcagcaggaactgttgccgcaagtcagagccgtgacgccttttagcgatgatgccgggcgaacggtggtcgccggacagagctttggcggcctgtcggcgctgtatgccggcctgaactggccgacgcgttttggctgtgtactaagccagtcaggatcgttctggtggcctcatcgcatcaccccgccggagggggaagtcattacccggctgaaaaccggcgcattatgtgcgcgcggactgcgtatcgtactggaagccggcgtgcgtgagccgatcgtgtttcaggcgaatcaggcgctttatgcccaactgaatacttcgcagcagtccattttctggcgtcaggttgacggcggacacgatgcgctttgctggcgcggcgggctaacgcaagggctgatgctgctttggcagccgcttatcgacacgctttaa

SEQ ID NO: 369181 - DNA, 219 bp, Salmonella enterica
atggaattcagtaatcccttcgataatccgcagggacagttttacatcctgcaaaatgcgcagcgtcaattcagcctttggccagcggcgtgcacgcttcccgcaggctgggacgtggtatgcgaaccgcaatcgcaggacgcgtgccagcagtggcttaatacgcgctggacaacactgaatccggcgcattatgccgataagcaggaggcgaaatga

SEQ ID NO: 369182 - DNA, 3885 bp, Salmonella enterica
atgacgcagcgtttaccgttagtcgccgctcagccggggatctggatggcggaaaaactctctgatttaccctccgcctggagcgtggcgcactatgtggaactgaatggcgagctggatgccgccttgctggcaaaagcggtagcggtagggatgcaacaggcggatacgctacggatgcgttttaccgaagagaacggcgaggtctggcaatggatagatcctgagcacaccttcggcgagcccccgattgccgatttacgcgaccatcccgatccgcatcacgcggcgctggcgttaatgcaggcggatttacggcaaaacctgcgcgcagatagcggtaagccgctggcgtttcaccagttaatccgcattgatgatacccgctggtattggtatcagcgctatcaccatttgctggtggatggctttagcttcccggcgataactcgccagattgcggcgatttatcgcgcctggcagagcgacgctcctacgccggagtcgccttttaccccctttgcggatgtggtcgaggaatatcagcgctatcgccagagcgaggcctggcagcgtgacggcgccttctgggcgcagcagcgccgcgagctgccgccgccggcgtcaatgtctgccgcgccgttgccggggcggtcggcgagcgcggatattctacgtatgaaattgaacgcgccggcgggggcgtttcgccaactggcggcgcacatgcctgagataccgcgagcggatcttgccctggcgctggtgacgttgtggctgggacgattatgcgggcgtatggattatgccgccggatttatctttatgcggcggatgggttcggcggcgttaacggcgaccgggcctgtccttaacgtgttgccgctggcgattaaccttcatgcgacggaagatctgccaacgctggcgaagcgtcttgcggcgcagttaaagaagatgcgccgccaccagcgttacgacgccgaacagattgtacgcgatagcgggcgagccgcaggggagacgccgctatttggcccggtgctcaatataaaagtgtttgattatcatctggatcttcctggcatacaggcgcaaacccataccctggcgacggggccggttaacgatcttgaactggcgctttttccggatgaaaacggcggtctggatattgaattgctggcgaatgcacagcgttacgatgatgccacgctctcccgccatgccttacgattgatggcgcttatcacgcagtttgcggataacccggcgctgcgctgcggcgatgcgcaaatgctgctggcggaagaacaaacgcaattagcacaccttaataatacggcggtaacgattcccgccgccacgcttagcgatttggtggcgcagcaggcgcaaaaaacgccagaggcttccgcgttggcagatgcgcattatcactttacctaccgtgaaatgcgcgaacaggttgtggcgctggcgtacgcgctgcgggaacgcggcgttcagcctggtgatagcgtggcggtggcgttgccgcggtcggttttcctgaccttagcgctgcatggcattgtcgaggcgggcgccgcctggctgccgctggataccggttatcctgacgatcggctgcgaatgatgctggaagatgcgcagccgaaactattaattacgactcaggcgcagctggcgcgctttcacgatattccggggatggaatatttgtgttatagccaaccgctaccggtcagtgacgccactccgctggggctgtcgttaccgcatcataccgcttacatcattttcacctctggctcgacgggcaggccgaaaggggtgatggtgggacaaacggcgatagtcaaccggctgctgtggatgcaggctcactatccgttgacggcggatgatgtagtagcgcaaaaaacgccgtgcagttttgacgtctcagtatgggagtttttctggccgtttatcgccggggcgaaactggtgatggccgagccggaagcgcaccgcgacccgctcgcgatgcagcggttctttgcgcaatacggcgtcacgaccactcattttgtgccgtcgatgctggcggcctttattgcctcgctcacgccagcgtcggcggggaaaagctgcgcttccttaacgcgcgttttctgtagcggcgaggccctgccgacggcgctgtgccgcgaatgggagacgttaaccaacgcgccgctacacaatctgtacgggccaacggaggccgcggtggatgtgagctggtatccggcctgtggcgatgagctggcggctgttgacggcaacagcatcccgattggttatcccgtctggaataccggtttacgtattctcgatgcgcatatgcagccggtgccgccgggcgtggctggcgatctctatcttaccggtatccaactggcgcagggctatctggggcgtccggatcttaccgccagccgttttatcgccgatccttttgcgccaggcgaacggatgtaccgtaccggagatgtggcgcgctggctggattccggcgcggtggagtacctggggcgcagcgacgatcagctcaaaattcgggggcaacgtattgaactgggcgagattgaccgcgtcatgcaaacgctgccggatgttgaacaggcggtagcacatgcctgcgtctttaatcaggcggcggcgacgggcggggatgcccggcaactggtcggctatctggtgtcgcactccggtttgccgctggatttaccggcgctgcaggaaaaattacgccaaaaacttcccgcgcatatggtgccggttgtgttgttgcaacttgccggtttgccgcttagcgctaatggcaagctggatcgcaaagccctgccgctgccggacctgacgccgcgcgtgaaagggcgtgcgccgcagtccgcaacggagattgctgtcgccgcggcgttttcccgcctgctgggctgtgagattaacgacgttgaaagtgatttctttgcgctgggcggacactcgctgctggcgatgaaactggccgcgcagctaagccagacgtttaaccgccaggtgacgccggggcaggtgatggtggcgtctgacgtggcgcagttaagtaagctgctcgatactgacgatgacgaacgctcgcgcaatctggggttcgggccgctgttgccgctgcgtgaaagcgatggtccaacgttattttgtttccatccggcgtcggggttcgcctggcaatttagcgtattatcacgctatctcagcccgtcgtggtcgattatggggattcagtcgccgcgccccgctggccctatgcaaaccgcaaccacccttgatgaggtatgtgaacatcatctggcgactttgctcgcccggcagccgcatggcccttattatttattaggctattcgctgggcgggacgctggcgcaagggatcgccgcccggttgtgcgcgcgcggcgaaaccgtggcgtttttggggttactggacacctggccgccggaaacgcaaaactggcgggaaaaagaggcgaatggcctcaatccggacgtattggcggaaattgaacgtgaacgcgctgcgtttgtcgccgcgcagcagggaaatgcctccgacgccttatttaccgccattgaaggcaattatgcggatgccgtccgtttgctgacgacggcgcatagcgtaccgtttgatggacatgctacgctctttgtggcggataaaacggtgccggaaggcgtatcgcctgaacagagctggtcgccgtggatagcgtcgttggctatttatcgccagccgtgcgcgcatgtagatattatttctccctccgcttttgaaactatcgggcccatcatcagcgaacttattaataaataa

SEQ ID NO: 369183 - DNA, 1137 bp, Salmonella enterica
atgccatctcttaatgtaaaacaagaaaaaaatcagtcacttgcaggttattcactgccgcccaccaacagtcatgaaatcgatttgtttagccttatagaggtgttatggcaggcgaaacgtcgtattcttgctaccgttttcgcctttgcgtgcgtggggttgcttctgtcctttctgctgccgcaaaaatggactagccaggcgattgtcacaccggcggagtcggtacagtggcaggggctggagagaacgttgaccgcgctgcgcgtgttggatatggaggtaagcgttgatcggggcagcgtatttaatctgtttattaaaaagtttagctcgccctcgctgctggaagaatatcttcgttcttctccgtatgtcatggatcaattaaaaggcgcgcaaatagacgagcaggatcttcaccgggcgattgtcctgctgagcgaaaaaatgaaagcggtggacagtaatgtcggcaagaaaaatgaaacgtcgttattcacgtcgtggacgctgagttttaccgcgccgacgcgggaagaagcgcaaaaagtgctggctggctatattcagtacatctccgatatcgtcgtgaaagagacgctggaaaatattcgtaaccagctggaaatcaaaacccgctatgagcaggaaaagctggcgatggatcgggtgcgtctcaaaaatcagcttgatgccaatattcaacgtcttcattattcgctggaaatcgccaacgccgccggtattaagagaccggtttacagcaatggtcaggcggtaaaagatgatccggatttttctatttctctcggcgcggatggtatttcccgcaaactggaaattgaaaaaggggtaacggacgtggctgagatcgacggtgatttgcgtaaccgtcaataccatgttgaacaactggcggcaatgaatgtgagtgacgtgaagtttaccccgtttaaatatcaactgtcgccgtctctgccagtgaaaaaagatggcccgggtaaagcggtcattattatcctggcggcgttgattggcggtatgatggcctgcggcggcgtattactgcgtcacgcgatggtctcacgtaaaatggaaaacgcgctggcgatagatgaacggttagtctga

SEQ ID NO: 369184 - DNA, 795 bp, Salmonella enterica
atgaccgaatccgtagcccgtttgcgcggcgaccagttaacgctgggttatggcagctataccgtcgcaaaaaaccttaatgtttcgattccggacggccattttaccgccatcatcggccctaacggctgcggcaagtcaacgttgctacgcacgctaagccgtctgatgacgcctgttgacggccatgtctggctggatggcgaacaaatacagcgttacgccagtaaagaggtggcgcggcgcatcggattgctggcgcaaaacgctaccacgccgggcgatatcaccgtacaagagctggtcgccagagggcggtatccgcatcagccgttatttacccgctggcgtaaggaagatgccgatgccgtcgccagtgccatgcgtgcaacaggtatcacctcactagcggcgcaaagtgtagacactctgtccggcggccaacgtcagcgggcgtggatagccatggtgctggcgcaggaaacatccatcatgctgctggatgagccgacaacgtggctggatattagccatcaaattgatttgctggagttgttaagcgatctcaaccgcgaaaaaggttatacgctcgccgccgtcctgcacgacctgaatcaggcctgccgatacgccacgcatttgattgcattacgcgaaggtaatattgtcgcacagggcgcgccgaaagagattgttaccgcagagcttatcgaaaaaatctatgggctgcgctgtatgattatcgacgatccggttgccggtacgccgctggtggtaccgttggggcggcgatag

SEQ ID NO: 369185 - DNA, 990 bp, Salmonella enterica
atgtttctttctcgtcggcttatcgtaagttgcctgcttctggcggctggctgcttcgccattggcttatggagtctgcaaagcggcgccgtgcctcttgagaccgggcagattattgccgcgctgctgggcgacgcgccgcgtaacatcacccttgtcgtaaccgaatggcgactaccgcgcgtattaatggcgctgctgattggcgctgcgcttggcgtcagtggcgcgatttttcagtcgttgatgcgtaacccgctaggcagccctgatgtgatgggctttaataccggcgcctggagcggcgtactggtcgcaatggtcctgtttggccagcatcttaccgcgatcgcgctggcggcaatggcgggcggtatcgtcacgtcattgattgtctggctgctcgcctggcgtaacgggattgaaactttccggctgattatcatcggtatcggcatccgcgcgatgttagtcgcctttaatacctggcttctgttgcaggcgtcgctggaaacggcgctcaccgccggcttatggaacgccgggtcgctcaacggtctgacatgggcaaaaacctggccttcagcgccgctgattattgtaatgctgacaggcgccgcgctactggtgcgtcgtatgcggctgctggagatgggcgatgacagcgcctgcgcgctgggtgttagcgtggagcggtcacgcctgatgctgatgctggtggcggtgtcgctcaccgctgcggcaacggcactggcaggccccatctcgtttattgcccttgtcgcgccgcacatcgcccgccgtcttagcggcacagcgcgctggggattaacccagtcggcgctgtgcggcgcattattactactggccgccgatgcgtgcgcgcagcaactgtttatgccttatcagcttccagtgggcgtggtcaccgtcagcctcggcggtatttaccttatcgtcttgttaattcaggagtcccgcaaaaaatga

SEQ ID NO: 369186 - DNA, 1008 bp, Salmonella enterica
atgtcatgctcgttttccgtgacgcgcgcgtttgccgtgcccggattgttgttattactgagtctcgccgcggttttaagcctggtcattggcgcgaaaccgctgcccgccgccgtcgtgctggaggcgttcaccggcgtgtgccaaagcgccgattgcaccatcgtcctggatgcgcgtttgccgcgtacgctggccggattactggcaggcggcgcgttgggcctcgccggggcgctcatgcaaacacttactcgcaacccgctcgccgacccggggattctgggcgttaacaacggcgccagcttcgccattgtactgggcgcggcgctgtttggtttctccacgccgctggagcagcttttcatggcatttagcggcgcgcttatcgcatcgctgattgtcgccttcaccggtagtcagggcggcggccagttaagcccggtccgcctgacactggcgggcgtggcgcttggcgcggtactggaaggattgaccagcggcatcgcgctgttaaatccagaggtctatgatcagcttcgcttctggcaggcgggatcgctggacattcgtagcctgcaaacgttgaaagtcgcgctcgcgcccgtggttatcgctgggatcgtggcgctatttctgagccgagcgctgaacagcctgagcctcggcagcgataccgcgacggcgctggggagtaaagtggcgcgcacccaacttatcggtttactggcgattaccgtcttgtgcggcagcgcaacggcgctggtcggccctatcgcctttattggtctgatgatgccgcatatggcgcgttggctggtgggcgcagaccaccgctggtcgctgccagtgacgctactggccacccctgctctgctgctttttgccgatattattggtcgtctgttggtgccgggcgaactccgggtatcggtcgtcagtgcgtttatcggcgcgccggtacttatctttctggtacgccgtaaatcgaacggaggcggcctgtga

SEQ ID NO: 369187 - DNA, 1245 bp, Salmonella enterica
atgaatcgacaatcctggctgctcaatctcagcctgttgaagacgcaccctgcatttcgcgcagtatttctggcccgttttatctctattgtctcgctggggctgcttggcgtggcggttccggtacagatccaaatgatgacgcactccacctggcaggtagggctgtcggtaacgttaaccggcggcgccatgtttattggcttaatggtgggcggtgtgctggccgatcgctacgaacgcaaaaaggtgattctgctggcgcgcggtacttgcggtattggctttattggcctgtgcgtgaacgcgctgttgccggaaccgtcattgctggcgatatatctccttggcctgtgggacggctttttcgcgtctctgggcgtgaccgcgttactggcggcgacgccagcgctggtcggaagagaaaatctgatgcaggccggcgcgattaccatgctgacggtacgtctgggatcggttatttccccgatgttggggggcatattgcttgccagcggcggcgtagcctggaactatgggctggcggccgccgggacgtttattacgctattgccgttactgacgctgccgcgactgcctgttcctccgcagccgcgggaaaatccttttatcgcgttactggcggcatttcgttttttgctcgccagtccgcttatcggcggtattgcgctgcttggcggtctggtgacgatggcaagcgcggtacgcgtcctctatccggcgctggcgatgagctggcagatgtcggcggcgcaaatcggtttgctgtatgcggcaattccgctgggggcggccattggcgcgctgaccagcggacaactggcgcatagcgttcgtccggggctcattatgctggtttcgacagtcggttcttttctggcggtggggctgttcgccatcatgccggtctggatcgcaggtgttatctgtctggcgctgtttggctggcttagcgccatcagttcgttattacaatacaccctgctgcaaacccagacgccggaaaatatgctggggcgaatgaatggcctgtggaccgcgcaaaacgtcacgggagacgctatcggcgcggcgctgttaggcggtcttggcgcaatgatgacgccggtcgcttccgcgagcgtgagtggattcgggctggtgattatcggtttgctgctgctgttagtgctgggcgagctacgccgttttcgccagacgccgccggttagcgatgctggctga

SEQ ID NO: 369188 - DNA, 957 bp, Salmonella enterica
gtgagactccccgccttttatcgttggctgcttttagtggttggtatatcaatttcaggaatatccttagcccaggacgccggttggccccggcaaatccaggacagccgcggcgttcatactctggaccacaaacccgcgcgtatcgtctctaccagcgtgacgttgacaggctcgctgctggcgattgatgcgcccgtcgtcgccagcggagccactacgccgaataaccgctttgccgacgatcaagggtttatgcgccagtggagcgacgtagcaaaggctcgccatgtcgcccggctgtacatcggcgaaccgaatgccgaaacggtcgccgcgcaaatgccggatctcattttgattagcgccaccggcggcgactccgcgctggcgctttacgatcagctctccgctatcgcgccgacactcgtcatcaattatgacgataaaagctggcagagtttgctcacgcaacttggcgagatcaccggtcaggagaaacaggccgccgcgcgaatagcggaatttgaggcgcaactgacgacggttaaacagcgaatcgccctgccgccgcagccggttagcgcgctggtgtatacccctgccgcgcatagcgccaatctgtggacgccagaatcagcacaaggcaagctattgacacagttaggctttacgctggcgacattgccccgagggctgcaaaccagcaaaagccagggtaagcgccacgatatcattcagcttggcggtgaaaatctggccgccgggttaaacggtgaatctcttttcctgtttgccggcgacaacaacgatgttgcggccctttacgccaatccgctgctggcgcacctgccagcggtgcaaaataagcgcgtctatgccctgggtacggagacgttccgtctggattattacagcgcaacattgttgcttaaccggcttgccgccctgttttag

SEQ ID NO: 369189 - DNA, 1176 bp, Salmonella enterica
atggatatgtcactggccgaggacgctcaggagacaatggcaacgcttgctcccgatcgctttttcttcatgtcgccgtatcgcagttttaccacttccgggtgcttcgcccgttataccgagcctgcggttgccggagattcgccggatagccctttccagcagaaattgcgccagcagtttgccgaggccaaatcgcagggcatcgccaaccctatcctggtgggggcgattccctttgatacccgccagccgtcgtcgctatttatcccgatggcgtggcagtccttttcccgccagcaaaagcagcgcacggcgcgttattttactgaccatcagtcgctgacggtgacggcgcgaaaggcgattccggagcaggatgcttttgaagcgatggtcgcacgcgcggctatgctgaccgccacgccagacgtcgataaagtggtgctttcccggctggtagatatcaccactgatgtagcggtggatagcggagcattgctggagcggctggttgcgcagaatccagttagttacaacttccatgtgccactggcggatggcggcgttctgctgggcgccagccccgaattgctgctacgcaaagagggcgagcggtttagttcgctgccgttagcaggctcggcacgccgacagcccgatgacgttctggatcgcgaggcgggaaaccgactgctggcttcacaaaaagatcgccatgaacatgagctggtgacgcaggcgatgaagcagatcctgcgcgatcgcagcacggaactgcaattaccttcctctccgcagttgatcaccacgccgacgctatggcatctcggtacgccgtttgagggcaaggccaacgccggagaaaacgcgctgacgctggcctgtctgctgcatccaacgcctgcgttaagcggtttccctcatcaggtcgcgaaaaagctgattgctgaactggaaccgttcgatcgtgaactgtttggcggcattgtcggctggtgcgatgccgaaggaaacggcgagtgggtagtgacgattcgttgtgcgaaattgcacggtaatcaggtgcgcctgttcgccggcgccgggattgtccctgcctcttcgccagtcggcgagtggcgggaaaccggcgtcaagctctctacgatgttgaacgtttttggactgcattaa

SEQ ID NO: 369190 - DNA, 1611 bp, Salmonella enterica
atgcgtatacctttcacccgttggccggatgaatttgcccgccgttatcgtgaaaaaggctactggcaagacgtgccgttgaccgatattctgacccgccacgctggcagcgacaagacggcggtcattgaaggcgagcgcgcattcagctatcgccagctcaaccaggccgcagataatctggcctgcagtttacgccgtcagggcatcaaacctggcgaaaccgctctggtacaactggggaatgtaccggaactgtatatcacctttttcgccctgttgaagcttggcgtagcgcccgttctggcgctgtttagccatcaacgtaccgaacttaacgcctatgcgatgcagatcgcgccgacgctggtgattgccgatcgccaacatacgctgttcgccggggaggactttctcaacacgtttgtggctgaacaccgctctgtgcgggtggtgttattgcgcaacgacgacggcgatcacagcctggacgcggcgatgcggcaggcggcggaagatttcaccgccacgccatcacctgctgacgaagtggcctactttcagctttccggcggtactaccggcacgccaaagcttattccccgtacccataacgactattactacagcgtgcgccgtagcaatgagatttgcggttttaacgaggagacgcgttttctgtgcgcgattcccgccgcgcataactacgccatgagttcgccgggcgcgctgggcgtctttcttgccaaaggaacggtagtgctggcgaccgatcccagcgccacgctctgtttcccgctgatcgaaaaacaccagattaatgccacggcgctggtgcctcccgcggtcagtctatggctacaggctatccaggagtggggcggtaatgcgccgctggcgtcattaaggttattgcaggttggcggcgcgcggctttctgcgacgctggccgcccgtattccggctgaaattggctgtcagttgcagcaggtcttcggcatggcggaagggttagtgaactatacccggctggacgatagtccggaacggattatcaatacccagggaagacccatgtgtccggacgacgaagtgtgggtggcggatgccgacgggaatccactgccgccgggcgagattggtcgtctgatgacgcgcggcccctatacttttcgcggctatttcaacagtccgctacacaatgccagcgcctttgacgccaacggtttttactgttccggcgatctgatctccattgatcaagacggttacatcaccgttcacgggcgtgaaaaagatcagatcaatcggggcggcgagaagatagccgccgaagagatagaaaacctgttactgcgccacccagcggtgatccatgtggcgctggtcagcatggaagatgaactgctgggagaaaaaagttgcgcatatctggtggtaaaagagccgctgcgagcggtacaggtacgccgtttcctgcgagagcagggcgtggcggaatttaaattaccggatcgcgtagagtgcgttgcgtcactgccgctgacgccggttggtaaagtcgataaaaaacaattacgccagcggttggcgtcacgttcaccgctctga

SEQ ID NO: 369191 - DNA, 858 bp, Salmonella enterica
atggcaatcccgaaactacagtcttacgcgctgcccaccgcactggatatcccgaccaacaaagtgaactgggcatttgagccggagcgcgctgcgctgctcatccacgatatgcaggattactttgtcagcttttggggccgcaactgcccaatgatggaccaggtgattgctaatatcgccgccctgcgccagtactgtaaggaacatcatatcccggtctattacaccgctcagccgaaagagcaaagcgatgaagatcgcgcgttactcaatgatatgtgggggccgggactgacgcgctctccggaacagcagaaggtggtagaagccttaacgccggatgaggcggatacggtgctggtgaagtggcgctatagcgcgtttcaccgctcgccgctggaacagatgttaaaagataccggacgcaatcagctcatcattaccggcgtgtatgcgcatattggctgtatgaccaccgctaccgatgcgtttatgcgcgacattaagccgtttatggtggcggatgcgctggcggatttcagccgggaagagcatctgatggcgctgaactatgtggcggggcgttccggtcgcgtcgtcatgaccgagtcgctgctgccgacgccggttcctgccagtaaagcggcgctgcgggcgttgattctgccgttgctggatgagaccgacgagccgctggatgatgaaaacctgattgattatggcctggattcagtacgcatgatggggctggcagcgcgctggcgtaaagtacacggcgatatcgacttcgtgatgctggcgaaaaacccgaccattgacgcctggtgggcgctgctttctcgcggggtagagtaa

SEQ ID NO: 369192 - DNA, 756 bp, Salmonella enterica
atggcctgtattgatttttcagacaaaacggtatgggtgaccggggcggggaaagggatcggttacgcgacggcgctggcgtttgtcgacgccggggcgcgggtgatcggcttcgatcgcgaatttacgcaagagaattatccctttgctaccgaagtcatggatgtggcggatgccgcacaggttgcgcaggtgtgccagcgtgtgttgcaaaaaacgccgcggctggatgtgctggtcaacgccgccggtattttgcgtatgggagcgaccgacgcgcttagcgtcgacgactggcagcagacatttgcggtcaatgtgggcggggcatttaacctgttttcgcagacgatggcgcagtttcgccgtcagcagggaggggcgattgtcaccgtagcctcagatgcggcgcatacgccgcgtatcggtatgagcgcttacggcgcctctaaagcggcgctgaaaagcctggcgctaaccgtagggctggagctggcgggctgcggggtgcgctgtaatgtggtgtcgcctggttcgactgacaccgatatgcagcgcacgttatgggtgagcgaagatgccgaacagcagcgtattcgcggtttcggcgaacagtttaagctcggcataccgctcggtaaaatcgcccgtccgcaggagatagccaataccattttgtttcttgcctccgatctggccagccacattaccttgcaggatatcgtggtggacggcggttcaacattgggagcctga

SEQ ID NO: 369193 - DNA, 414 bp, Salmonella enterica
atgatctggaaacggcatttaacgctggatgaattgaacgctaccagtcagaacacgctggtggcgcatctgggcattgtttacacccgtctgggcgatgaagtgctggaggcggaaatgcccgtcgatgcccgcactcatcaaccgtttggtctgctacacggcggcgcatcggcagcgctggcggagacgttaggatcaatggcgggttatctgatgacccgcgacgggcagtgcgtggtcgggaccgagttaaacgccacccaccaccgcgccgtctcgcaggggaaagtacgcggcgtttgcctgccgctgcatctggggcggcagaatcaaagctgggaaattacgctctttgacgagcaggggaggcgctgctgcacctgtcgcctgggaacggcggtaatgggatag

SEQ ID NO: 369194 - DNA, 2106 bp, Salmonella enterica
atgaataaatcagggaaatacctcgtctggacagcgctctcagtattgggtgcgtttgccctgggctatattgcgttaaatcgtggggaacagatcaacgcgctatggatcgtggtggcgtcggtctgtgtctatcttattgcgtatcgtttttatgggctctatatcgccaaaaaagtgctggcggttgacccaacgcgtatgacgcccgcggtacgtcataatgatggtctggattatgtcccgaccgataaaaaagtgctgttcggtcaccattttgcggccattgctggcgcaggtccgctggtcgggccggtactggcggcgcagatgggctatctgccggggatgatctggctgctggcgggcgtcgtgctggcgggagcggtgcaggactttatggtgctgttcgtctcgacccggcgcgatgggcgttcgcttggcgagctggttaaagaggagatgggcgcgacggcaggggtgatcgcgctggtggcctgctttatgatcatggtgatcattctggccgtcctggcgatgatcgtggtgaaagcgctgacccatagcccgtggggaacgtacactgtcgcgttcactattccactggcgatttttatgggcatctacttgcgttatttgcgtccggggcgcatcggcgaggtgtcggtcattgggctggtatttcttattttcgctattatttccggcggatgggtggcggcaagcccaacctgggcgccgtactttgattttactggcgtgcagcttacctggatgctggtgggttatggttttgtcgcggcggtactgccggtctggctgctgctcgcgccgcgtgattacctctctaccttcctgaaaattggtacgattgtcggtctggcggtcgggattctgattatgcgtccgacgctgactatgccggcgctgaccaaatttgttgatggtaccggaccggtctggacgggcgacctgttcccgttcctgtttattaccatcgcctgcggcgcggtctccggtttccatgcgctcatctcctccggcacgacgccgaagatgttggccaacgaaggccaggcctgctttatcggctacggcgggatgttaatggaatctttcgtcgccattatggcgctggtctccgcctgtattatcgatccgggtgtttactttgcgatgaatagcccgatggcggtactggcgccagcggggacagcggatgtcgtagcttctgccgcgcaggtggtcagtagttggggtttcgctatcacgccggatacgttacaccagattgccaatgaagtcggcgaacaatccattatctcccgcgcaggcggagcgccaacgctggcggtagggatggcctacattttacatggcgcgttgggcggcatgatggatgtggcgttctggtatcacttcgccattctgtttgaagcgctgtttattctgacggcggtggatgcgggcacccgtgcggcgcgctttatgttgcaggatttgttgggcgtagtgtcgccagggctgaaacgtaccgattcgttgccagcgaacctgcttgctacggcattgtgcgtgctggcgtgggggtatttcctccatcagggcgtggtcgatccgttgggcggtattaacaccctgtggccgctgtttggcatcgctaaccagatgctggcgggtatggcgctgatgctttgcgccgtggtactgttcaaaatgaagcgtcagcgttatgcgtgggtcgcgctggtgccgacggcctggctgctgatttgtacgctgacggcgggctggcagaaagcgtttagtccggatgcgaaaatcggcttcctggccattgccaataagttccaggcgatgatcgacagcggcaatattccgccgcagtacaccgaatcgcaactcgcgcagttggtattcaataaccgtctggatgccgggctaaccatcttctttatggtggtggtcgtggtgctggcggtcttctctattaagacggcgctggccgctctgaagattgataaaccgacggcgaatgaaacgccgtatgagccgatgccggaaaatgtggatgagatcgtgacgcaggcgaaaggcgcgcactaa

SEQ ID NO: 369195 - DNA, 198 bp, Salmonella enterica
atgttcgatacgctttcgaaagccggaaaatatctgggacaggccgcaaaaatgatgattggcgtgccagactacgacaactatgttgagcatatgcgcataacgcatccggatcagacgccgatgacctatgaagaatttttccgcgagcggcaggatgcgcgctatggtggaaaaggcggcgcgcgttgctgctga

SEQ ID NO: 369196 - DNA, 1089 bp, Salmonella enterica
atgaaccacactgagatccgcgtcgttaccggcccggcgaattatttttcccatgcaggaagcctcgaaagactgaccgactttttcacgccggaacagctttcccacgccgtttgggtgtacggcgaacgcgcgattgccgccgcccggccttacctgccggaagcgtttgaacgtgctggcgcaaagcatctgccgtttaccggccattgtagcgaacgccatgttgcccaactggcgcacgcctgcaacgacgatcgtcaggtggtgataggcgtcggcggcggcgcgctgctcgataccgccaaagcgctcgcccgccgtctggcgctgccgtttgtcgctatcccgacaatcgcggcaacctgcgccgcctggacaccgctttccgtctggtataacgacgcgggacaggcgttacagttcgaaatttttgatgatgccaattttctggtgctggtcgaaccgcgcattattctgcaggcgcccgatgactatctgttagctggcattggcgatacgctggcgaaatggtatgaagccgttgtgcttgcgccgcagcctgaaacgttgccattgaccgtaagactgggcattaacagcgcgtgcgctattcgcgatctcctgctgaccagcagcgaacaagcattagcggataaacagcagcgtcggctgacccaggcattttgcgacgtggtggatgcgattatcgctggcggcggtatggtcggcggcctcggggaacgctatacccgtgtcgccgccgcccatgcggtacacaacggtctgaccgttctgccgcaaacggaaaaattcctgcacggaacgaaagtggcttatggcattctggtgcaaagcgcgctactgggacaagatgacgtgctggcgcaattgattacagcgtaccggcgatttcatctgccggcccggcttagcgaactggacgtggatattcataacaccgccgagatcgatagggtcatcgcgcataccctgcgcccggtcgaatccatccactatttaccggtgacgttaacgccagacaccctgcgtgcggcgtttgaaaaagttgaatttttcagaatatag

SEQ ID NO: 369197 - DNA, 1161 bp, Salmonella enterica
atgagaaataacccactgattccaaaaagcaaattgccaaatcttggtaccacgatttttacgcaaatgagcgcgctggcgcagaaacatcaggcaataaatttatcgcaaggcttccctgattttgatggtcctcgttatttgcacgagcggttggcttatcatgtcgcgcagggcgcgaatcaatatgcgccgatgacgggggcgcaggcgctgcgggaggccattgccgataaaacggcggaaatatatggttatcgacccgatgacgtcagtgatatcaccgtcacagcgggcgcgacagaagcgctgtatgcggcgattaccgcgctggtgcgggcaggggatgaggttatctgtttcgatcccagttacgacagctatgccccggccgtggcgctctccggcggagtgttaaaacgcatagcgcttacgccgccgcattttcgcgtcgactggcaggcgttttcggcgttgcttagcgagcgcacgcgactggtgatcctcaatacgccgcataatcccaccgctaccgtctggcgccaggcggatatcgaggcgctgtggcaggctatcggcgagcgggaaatttatgtattaagcgatgaagtgtacgaacatatttgttttgccgccgaaggtcatgccagcgtactggcgcaccctcagttacgagagcgggcggttgccgtttcatcgtttggtaaaacctttcatatgacaggatggaagattggttactgcgttgcgcctgcggccattagcgccgaaatacgcaaagttcatcagtacctgacgttttgcgtcaatacgccggcgcaactggcgctggcggatatgctgcgcgccgcgccggaacactatcgcgcgttacccgatttttaccggaaaaaacgcgatgtgttggttaacgcgctggcgcaaagccgattaaaagtgctgccctgtgaaggtacctattttctgttaatcgattacagcgcagtgtcgacgctaaatgacgttgagttttgtcagtggctaaccgaagaagtcggtgtcgccgctattccgctctctgtcttttgcgccgcccctttcccgcatcagcttatacgtttatgtttcgctaaacaggaatcaacgctgccggccgccgcagagcgcctgtgtaaactgtag

SEQ ID NO: 369198 - DNA, 618 bp, Salmonella enterica
atgcaacaccgactcacaaccgaaataactcactttctctctgaactgcctgaagaggagaggatcgccgccattaatgaatttagaatggcgatacatagcgttagtccttttcgcgatgagcctgtcgattgtgtcctgtgggtgaaaaacgatcatatttcacctaatgactacaacccgaataacgttgcgccgccggagaaaaaactgctgcttaaatcgattgaacaagatgggtttactcagccgatcgtggtggtaaaggccaatacggaggagtacgagattgtagacggttttcaccgtcatgagctgggcaaaggaaaagcggccctgaaaaggcgtctgaaaggctacctgccgataacgtgtctggacagagaacgtcacgaacgcatggcggcaaccattcggcataaccgcgcgcgcgggcgccaccagatccacgccatgtcagaaatcgtgcgcgaactttctctgctaggctgggacgagagcaaaatcggccaggagttaggtatggacgccgatgaagtcctgcgcctgaaacagatcaacggcctgcaggagctttttgcagaccgtcgattctccagagcgtggacggttaaataa

SEQ ID NO: 369199 - DNA, 1236 bp, Salmonella enterica
atgtcggtttataaagttccgctcgagcaaaatgttctggaagcggctcaagagcgtataatgtggaccctggaaaccttaccccgggtctgcgtctcattttctggtggtaaagattcaggacttatgttgcacctgacggcaacgttggcgcgcaaaatgaataaaaagatccatgttctcttcattgactgggaagcgcaattctcctgtaccatcgcctatattgaatcgttacgtgaatactacgcggacgttattgagcgtttttattgggtcgcattacccttaaccacacaaaattccctttcacaataccagccggagtggcagtgttggcagccgggtaccgactgggtacgacaaccgccagaagatgcgattaccgatccggcctttttttccttttatcaacacggcatgacctttgaacagttcgttcgcgattttgccgactggttttcagaaaaacgtcctgccgctatgctggtcggtattcgttccgacgaatcctataaccgatttgccgctatcgctaactcgcataagcagcgctttgccgacgataagccctggaccacgttagcccctaaagggcacacctggtatatctatcccatctatgactggaaaaccgcagatatctggacctggttcgccaaaacaggtaaaccatgtaaccctttgtataatttgatgtatcaggctggagtaccgccccgttacatgcgtatttgcgaaccgttcggcccggaacaacgacaggggttatggctgtatcatgttatcgaacctgagcgctgggcggccatgtgcgccagagtcagcggcgcactcagcggaggaatatacgccggacaagacagccatttttacggccaccggaaaattttaaaacccgatcaccttaactgggaagagtacgcgctgctcctgctacacagtatgcctgaagtcactgccgaacattaccgtaataaaatcgccgtttatttgcagtggtataagaaaaaaggcatgcacaccatttcacaaacgcagcatggcgatatcggatcgcgcgatattccgtcgtggcgacggatctgcaaagtattactgaacaatgattactggtgccgggcgctgtcattcagtccgacaaaacctaagaattaccagcgttataacgaacgtatgaaagctaaacgccaggaatgggggatcttatgcaacaccgactcacaaccgaaataa

SEQ ID NO: 369200 - DNA, 903 bp, Salmonella enterica
atggctaacctttacgaccttaaaaaattcgatcttaacctgttggttatatttgaatgtatctatcaacatttaagcattagcaaagcagcagaaacactctatattacaccttctgccgtaagccagtcattgcaacgcctgcgcacgcaattcaacgaccctctatttattcgttcaggcaaaggaattacgcctaccgtaacaggcattaatttacattatcatttagaaaataatcttaacagcctggaacaaactattaatataatgaatcagtccagcctgaagaaaaaatttattatctacagcccacagctgttgatcacccaatatgtgatgaaattagttaaatatatccgcaaagatccacaggttgaaattgaacatcacgacattttgaccactgacgaactgcctgaagatctgcttgcctaccgcaaagcagatattgtggtttcaatggccccactgaataatcgttctattgtttgtactcactttaataggctagaatgcatcctggtttgcagtgaaaaccatccccgactaggcgacaccgccactatcgacgaaattctacaagagtcatttacgcaactcgtctcccgggcaaccggtatgaaagaatatcattcacttatggatgatgtgctgggggaaagaataattggtttcagaagcaaatcgctgatgaccatcgccaactctatcagctccacggagcttattggttttttaccacaaacattttttgactattactcttcctctatcaaacttaaaaaagtcaccataccttttaccattgctcccatacaattctatcttatgtataatagggcttcgctgaataatagcggatttgctgagctcattgagcacatcacaaaaaaacattaa

SEQ ID NO: 369201 - DNA, 747 bp, Salmonella enterica
atgattaaacgtacattgctgcttgctatgctgcccattctcgcccacgcggaagaactgcctgcgccggttaaagccattgaaaaacagggtataactatcctgaaatccttcgaggcgccggggggcatgaagggctatctcggaaagtatcaggatatgggcgtcacgatttacctgacgccggacggtaaacacgcgatttccggctatatgtataatgaaaaaggcgaaaatcttagcaacgccctgatagaaaaagagatctatgcaccggccggacgtgaaatgtggcagaaaatggaaaaagcgtcatggatactcgacggtaaaaaagacgcgccggtggtgctgtatgtcttcgccgaccctttctgcccctattgtaagcagttttggcaacaagctcgtccgtgggtcgaatccggcaaggtacaattacgcacattactggtcggcgtgattaaaccggaaagcccggccacagccgcagcgattttagccgcgaaagacccggcgaaaacctggcatgactatgaagcctccgcaggaaagatgaagctggaggttccggcgtccatccccccggcgcagatgaaagtcattaatcagaatcagcagctaatggacgatcttggcgctaacgcgacgccagcaatttattacatgaataaagataagattttgcaacaggttgtgggtttaccggaaaaagcgcaactggacgccatgatggggcagccttaa

SEQ ID NO: 369202 - DNA, 564 bp, Salmonella enterica
atgtccttaattaacaccaaaatcaaacctttcaaaaaccaggcgttcaaaaacggtgaattcattgaagtcaccgagaaagataccgaaggccgctggagcgtcttcttcttctacccggccgattttacctttgtttgcccgactgaactgggtgacgttgccgaccattacgaagaactgcagaagctgggcgtagacgtttattccgtctcaaccgatactcacttcacgcacaaagcatggcacagcagctctgaaactatcgcaaaaatcaaatatgcgatgatcggcgacccgactggcgccctgacccgtaacttcgacaacatgcgtgaagacgaaggtttggcagaccgtgcaacctttgttgttgacccgcagggtatcatccaggcgatcgaagttaccgctgaaggtatcggccgtgacgcgtctgacctgctgcgtaaaattaaagcagcacagtacgttgccgctcacccaggcgaagtatgcccggcgaaatggaaagaaggcgaagcgactctggctccatctttagacctggtcggtaaaatctaa

SEQ ID NO: 369203 - DNA, 1566 bp, Salmonella enterica
atgctcgacacaaatatgaaaacccagctcagggcttaccttgagaaactgaccaaacctgttgagctgattgccacgctggatgacagcgctaaatcggcggaaatcaaggaactgctggctgaaatcgccgagctgtccgacaaagtcacgtttaaagaagacaatactctgccggtgcgcaagccgtctttcctgattacgaatccaggttctcagcaagggccgcgctttgccggttctccgctgggccacgaatttacctcgctggttttggcgctgctgtggaccggcggtcatccgtcaaaagaagcgcagtcgctgctggagcagattcgcgatattgacggcgattttgaattcgaaacttattattcactctcctgccataactgcccggacgtagtgcaggcgctgaacctgatggcggtgctgaacccgcgtattaaacatacggcaattgatggcggcaccttccagaacgaaatcaccgaacgtaacgtgatgggcgttccggcggtgtttgtcaacggtaaagagttcggccagggacgtatgactctgaccgagattgtcgctaaagtggatactggcgcagaaaaacgtgcggcggaagcgctgaacaaacgcgatgcgtatgacgtgctgattgtcggctccggcccggcgggcgcggcggcggcggtctactcggcgcgcaaaggcatccgtaccggtctgatgggcgagcgcttcggcggtcaggtgctggataccgtggatatcgaaaactatatctcggtgccgaaaaccgaaggccagaaactggcgggcgcgctgaaagcgcatgtcagcgattacgacgttgacgttatcgacagccagagcgcaagtaaactggttccggcagcggcagaaggcggcctgcatcagattgaaacggcgtccggcgcagtcttgaaagcgcgcagtatcatcatcgccaccggcgcgaaatggcgcaatatgaatgtgccgggcgaggatcagtatcgcaccaaaggcgtcacctattgtccgcactgcgacggtccgttatttaaagggaagcgtgtggcggtcatcggcggcggcaactctggcgttgaagcggctatcgatctggcaggtattgtagaacacgttacgttgctggagttcgcgccggagatgaaggcggatcaggtgctacaggacaaagtgcgtagcctgaaaaatgtcgatatcattttgaatgcgcaaacgacagaagtgaagggcgacggttcgaaagtggtggggctggagtatcgtgaccgtgtcagcggcgatattcatagcgtcgcgctggcagggatttttgtgcagattggtctgttgccgaatacccactggctggaaggcgcgcttgagcgtaaccgcatgggcgagatcattattgacgccaaatgtgaaaccagcgttaagggcgtcttcgctgcaggcgattgcaccaccgttccttacaaacagattatcatcgccacaggcgaaggggcgaaagcctcgttgagcgcctttgattatctgattcgtaccaaaatcgcataa

SEQ ID NO: 369204 - DNA, 561 bp, Salmonella enterica
atggattcaatctatgaatcactgacggaattagaaaaaacagggcttacattgcgtgatttttttaattctcatgatagtcattcactgaaatctgcctacgtgagattaaatccctctgctgcggtaaaccttaccgaccgggcgtggctggaagcggagtatgactttaatgcgctattcgtcggtcctggcaagctgctggctgcgcctttcgcttcagtgtatctggaggacgatgcgctggtgatgggaaaggcgacgctggagatacgggagtttatggcagcgttgggattatcggttaatcaggagagcaatattcctgacgatcatatttcctgcgtgctggagttgaccacactattactggctaatacccggcaaacgtcaccataccgatctactctcactcaatatatcaataactatttaacaaagtgggtgccattatatatcgaaaaaataaaaactcatgcacaaacgaccacgttatatacggtggcggacatcttattttattggcttgatgaattaaaacgagagtatcaatatgagtaa

SEQ ID NO: 369205 - DNA, 2280 bp, Salmonella enterica
atgagtaatgagacaggacatctgaacagacgttcttttttaaaggggatagtggcactgggcgccgttgcggctttacccggaggattactgacctcccgatgcgcgcttgcgcagccgcctgttccctttaaccctaaaacgtacaaaatttatcgtaacgcgtgtccgcgtaactgctatgacacctgtagcctcaagacatgggtaaaggacggggtcattactttcgtggaaggcgcgccggaatcaacatttactcacggtaccccttgcgtcaaagggttaagctatccgcgccgggtttatagccccgatcgtattaaatatcccatggcgcaggacgttcgcggtagcggcaactggcgtcgcatctcatgggaagaggcgatgcagcgcattgccgccaaaatgctggagattaagaaaaaagacggttctatgctcggtctggcgctgaccaaatattccggtaagtttggcgtgctgaactatgccgttgaagggatgatgtcctcgcttggctacaccacccgttttgccggtacgccgtgctggcctgccggtatcgacgcgcaaaactacgacatgggcgacatgtggtgtaacgacccggaagatatggtgaaagcgaaatacatcattatctggggcgccaacccggcctggtgctcaatgcacagcatgaagtacatctatcaggcgcgcgagaaaggggcgaaggtcgtggttatcgacccgctgctgtcgcagactgccgccaaagccgatctctacctgcgcgtacggcctggctcagacggcgctctggcgctggggatggcgcgtcatctggtggataaaggcctggtggatcaggactttgtcaacaacgatgctcatggctatccggaatttgaagcctatctgcgtaataacgtcaccgtggagtgggcggcagaaatctgcggcctgtctgcggatgtcattcgccaactggcggaagagtttacggcggttaagccggccacggtctggattggttacgggatgcagcgtcatgtcaacggcggcgccaacgttcgcgctatcgatgcctttgtcgctatgtccggcaacatcggtgtcgaaggcggcggcgcgcgttatggccatctgcatacctggggctttaactataacgccatgctgcagaagccgccggtgggcgctattggcataccgggagcggcgggcaccaccagtgaattcggggctgccgctggcagcgacgccgtgcagtactccgatcgctctctgaatatcaaccagacggcgcaggggattctggaggccaacgatccgccggttcgtatgctgtgggtcgcctgtaaaaacccgtttgcccaggatttcgatcgcagcaagatgaaaaaagcgtttgaaaaactggaaatggtggtctgcgccgatcagttcttcaacgaaacggtgcaacacgctgatatcgtgctgcccgttaccaccgcgtttgaagagtggaacgtggatgcttcttactggcactactggctttccattaatcagccggcgattaagccgatgtatgaagcaaaatgcgaccttgaaatcgctaccatgctgtcgcgcaccattaataagatggcgccgggttcctgtaccttcccgcaagagttcgatcacaagcgctggctggatcaggagttcaacgacggtatggcgaaaatgtttggcatctcttcctgggacgatctgctggacgggccgaaaaaagcgatcctgccaagttctgccgcctggtacgaccgcaagttcaaaacgccgtcaggcaagtatgaatttaaatctgaactggcggagaaaaacggccataccgcgctgccggaatacaaaccggaagccgagagcaaactgcctttccatctgtttacgccgcacgtgcagtttggcctgcactcgcagtttatcaacctggactggatgcaggtgttctacccggaaccgttcgtttatatccatccttcttccgcacagaaaaaaggcatcagcgagaacgatctggtcaaagttttcaatggcaccggtgaagttgagctgcgggcaaaagtcaccaccaacgtgccggaagattttctggtgatgtatgaagcgtggttcccgaaacggcagtacaacgtgcaaaacgtcgtggccgatacgcctgctgatatggggctgatgaaaactggcgcgccgggcgccgctatccacagtcagtttgctgacgttgtattgatcggtaaaggggagtccgtagcatga

SEQ ID NO: 369206 - DNA, 558 bp, Salmonella enterica
atgagacgtgcgtttttagtgaatagcgataagtgcatcggctgccgtggctgtgctatggcgtgtaaaagctttaaccaactggagccggatcgcttctggcgctacgtttatccgttggataaagacatctatccacatgaagagcgggcgttttactcgctggcctgtaaccactgcgaacatccggcctgcgtcgccgcctgtccggtcgaagcctataccaaacgtgaagatggcgtggtggtgcataaccctgagcgctgcattggctgcaaaaactgtattcgtaactgtccttatggcgcgccgcgttttaatgaagagacgcgtaaagcggaaaaatgcagtatgtgctacgagcgtcttgatatcggtatgaatccggcgtgcgtaaacgcctgcccggtgggcgccttgtcgattatcgatttggattccgatcctgtgcccgataatgcggtgcagtatccgccagggttcccgcatatgccacagctcaatccaggaacgcgctttattctggcgcgccagcctaagcagccggaggacaagtaa

SEQ ID NO: 369207 - DNA, 768 bp, Salmonella enterica
atggaaaaatatgaactgccgctggtgttttttacggtattaagccagatgtctgtcgggatggctttggtactgacatggcgtacgctgcgtggtgaagtggaaggccagcgtttctattggttggccaccgggctggtgctggcattggcgtctattgccgcgattctgcatctggcgcatcccgatcgcgcttatgatgcgctgattaacctgcgacatgcctggttaagtcgggaaatccttggcgccacgttgtttggcgcagcggtcggcgtaactttcctggcaaagggacataaagcgatggctcttatcgcctccgtgttcggcgtgttactggtggcggtgcaggggatgacctacgccgcgccagcgatggtagctatcgctaatggatttaccatgctgttattttttattacggtatgggtcatgggttgcgcggcgattccgctgttaagactcaggcctgccgttcctgcgttacgccagggaattgtggtgtgtaccgcggtacttatcgcggcgccgctggtgtggttaagcgggggaacggtcatgcagatgacggcgcgttcatggctggcttccccgttttatctggcaagcctggtttgccttgcgctcgcttttgtcgccagccgtcacggtgattcgcgcccgaaactcctgttcgtcttgttattcgttggcgtatttctgagccggctggtcttttttggcgacacggtgagtactattgtgaatatcgggcatttgtattaa

SEQ ID NO: 369208 - DNA, 429 bp, Salmonella enterica
atgtataagacaatcattatgccggttgatgtttttgaaatggaacttagcgataaagccattcgccacgctgagtttctggcgcaacaggatggcgtcattcatctgttgcatgtactgcctgggtccgcgagcatgagtctgcatcgctttgccgccgacgtgcgtcgctttgaagaacatttacagcatgaggcggaaacgcgtctgcaaacgatggtgggacacttcagtatcgatccttcacgaattaaaacgcatgttcgctttggtagcgtgcgcgatgtcgtcaatgagatgggcgaagaactggatgcggatgtcgtggtaatcggttcgcgtaatccgtctatcacgacacacctgttgggatctaacgcctcaagcgtggtgcgccatgcgacgctgccggtattggttgtgcgttaa

SEQ ID NO: 369209 - DNA, 1239 bp, Salmonella enterica
atgaaagcattgacgtatcacggtccacatcacgtaaaggttgaaaacgtacccgatcccggcattgagcagcctgacgatatcattttgcgtgttaccgccaccgcgatttgcggatctgatttgcatctctatcgcggcaagatcccacaggtaaaacatggcgatattttcggccatgagtttatgggcgaggtggtggaaaccggacatgatgtgaagaatattcgaaaaggggatcgggtcgttatcccgtttgtcattgcctgtggtgactgctttttctgtcggctacagcaatattcagcgtgtgaaaacactaacgacggacacggcgcgacgatgaataaaaaacagatcccaccgccggcggcgctgtttgggtatagccatctgtatggcggcgttcccggcggacaggccgaatatgttcgcgtgccaaaaggtaatgtcggtccatttaaggtgccgccgctgttatctgacgataaagcgctgtttctttctgatattttgcctaccgcctggcaggcggcaaaaaatgcccagattcagcaaggttccagcgtggcggtttttggcgcagggccggtaggattactgactatcgcctgtgcgcgactgctgggcgcggagcagatcttcgtcgttgatcaccacgcctggcgcctgcgtttcgccgaagaacgttacggcgcgataccgatcaacttcgatgatgagaacgatccggcggaaaaaatcatcgagcagacggcaggacaccgcggcgtggacgcggtaattgatgccgtaggctttgaagcgaaaggcagcttgacggagacggttctgacgaaccttaaactggaaggcagcagcggcaaagcgctgcgacaatgtatcgcggcggtcagacgcggcggcgtggtcagcgtgcccggcgtgtatgccggttttattcacggctttttattcggcgacgcctttgataaggggctaacttttaaaatgggtcaaacccatgttcacgcgtggctgggagaattattaccgcttattgaaaaagggttgctgaagccggaggagattgtcacgcactatatgccgtttgaagaggcggcgcgcggctacgaaattttcgaaaaacgcgaagaagagtgccgaaaggttatcctggtgccgggagcgacgtcggcacaagcggcgcagaaacaggcgacgggagtaatcaacccgatgccaggcggcgttgtctga

SEQ ID NO: 369210 - DNA, 411 bp, Salmonella enterica
atgtccagacccactattatcattaacgaccttgacgccgaacgtattgatcgtcttctggaacagcctgcgtatgcggatctgccgattgccgacgcgctcaacgccgaactggatcgcgcgcaaatgtgttcgccacaagagatgccgaacgatgtcgtcaccatgaacagccgcgttaaattccgcaatttgagcgatggtgaaacacgcgtgcggacgctggtgtaccccgccaatatgacggatagcagtacccagctttcggtaatggcgcccgtcggcgcggcgttgctgggactgcgcgtcggcgacaccattcactgggaactgccgggcggcgcctccacccatctcgaagtgctggaactcgaatatcagcctgaagccgcgggcgacttcctgcgttaa

SEQ ID NO: 369211 - DNA, 807 bp, Salmonella enterica
atgaacacaatatggcattacagtccgctgctggctgccctcttaaccccgatttttgccgccaacgccgacgaacttcaggcgcaacagtacggtgatttcactgactatgtgctggcgctttcctggcaaaccggtttttgtcaaagccagcatgaacgccgccatcgggagcccgatgagtgccgtctgcaaaaagagccagccaacaaagcagactttctgaccgtccacggcctgtggccaggattacccaaatctatcgccgcacgcggtgttgaccagagacgctggcagcgctttggttgtgcgacgcggccaatcccgaatctgcctgaagtcaaggccagccggaaatgctcagcccccacccccggactttcgcctgacatcgcgacagcgcttaaggaagtgatgcccggcgcgggggggaattcctgtctggagcgctacgaatatgccaaacatggcgcctgtttcgggtttgatcccaatgcctatttcggcaccatgatacggctggataaggcgataaaagacagcgcgctggggcagtttctgacggataattacggcaaaaccgttagccgcgctgagtttgatagcgtcgtcgcacaaatgtggggccaggataatgtcaaagccgttaaagtaaactgccatggcaatcccgcctatttaacagagattcagttttcattaaaggcgtcgatgattaacgccccgctctcctctgcctcattccagccgcagccgcatcccggcaactgcgggaaacagtttattatcgataaagccggttattga

SEQ ID NO: 369212 - DNA, 1464 bp, Salmonella enterica
atgtctttatccaaagataatatatggaagttgttggccccattagtggtgatgggcgtcatgttgctaattcctgttccagatggtatgccgccgcaggcctggcactattttgcggttttcgtcgcgatgattgtcggtatgatcctggagccgatcccggcgacagcgatcagttttatcgccgtaaccatttgcgttatcggcagcaattacctgctatttgacgcttcggaactggccgatccggcgtttaacgccagtaaacaggcgctgaaatgggggcttgccggtttctccagcaccacggtctggctggttttcggcgcgtttattttcgcgctgggctacgaagtgaccgggctggggcgccgcattgcgctgtttctggtaaaattcatgggtaaacgcacgctgacgctcggctatgcgattgtcattatcgatattttgctggcgccgtttactccctccaatacggctcgtaccggcgggactgtcttcccggtcatcaagaacctgccgccgctgtttaaatcgtttccaaacgatccttccgcacgccgcatcggcggttatttgatgtggatgatggtgatcagtaccagcctgagctcttcgatgtttgtcactggcgcggccccgaacgtattaggtctggagttcgtcagcaagatcgctggcgtccagattagctggctgcagtggtttctcagctttctgccggtagggattattttactgatcgttgcgccgtggctctcctatgtactttataaacctgaagtgacccacagtgcggaagtcgcggcctgggctggcggcgagttaaaaaacatggggcgtctgtcccgcaaagagtggacgctgattggcctggtgctgcttagcttaggattgtgggtttttggtggaaaaatcatcaacgccactgccgtgggtctgctggccgtctcgctgatgctggcgttgcatgttgtgccgtggaaagatattacgcgctacaacagcgcctggaacaccctggtgaacctcgctacgctggtggtcatggccaatggcttaacccgctccggctttattgactggttcgccaataccatgagtacgcatctggaaggtttctcgccggatgcaaccgtgattgtactggtactggtgttctatttcgcgcactatctgttcgccagtctttccgctcacaccgcgaccatgctgccggtcattctggcggtgggtaaaggcattccgggcgttccgatggaacaactgtgtattctgctggtgctgtctatcggtatcatgggctgtctgacgccgtatgccaccggccctggtgtgattatctacggctgcggttacgtgaaatccagagactactggcggcttggcgcaatctttggcgttatctatatcgcgatgctgttgctggtgggctggccgattctggcaatgtggaattaa

SEQ ID NO: 369213 - DNA, 897 bp, Salmonella enterica
atgatgccgattcccgccaacccgactaacgcctccattcagcctcagtcgctgtatgacgcctgggccgatttggcctggcgcgccatgctgaccgaggtaaatttatcgccaaaacccggtctggtagaccgactaaactgcggcgcgcacaaagatatggcgctggcggattttcaccgcagcgcggaggcgattcgacactggctgccgcgctttatggaatatggcgccagctgcacgcgcctgccgccagagtcagttctggcgggcctgcgtccattggggatggcctgtgaagcagcgatgtttcgcgcaacggcgggcgtcaatacccataaaggcagcattttctcgctggggttactgtgcgccgccattggccgcctgtatcagctacgccagccgatcgctgcagaaacactctgcgctaccgccgccgatttttgccgcggcctgaccacgcgcgaactgcgccagaacaacctacagctcaccgcaggtcagcggctgtatcagcaactgggattaactggcgcgcgcggcgaagcggaagcgggctatccgctggtcatccgccacgcgttaccgcactaccgcgcattgctggcgcaggggcgcgatccggaactggcgctgcttgataccttactgctgctgatgtcgcttaacggcgataccaacgtcgcgtcgcgcggcggggcggacggtctgcgctggttacagcagcaggcggcggtcttattacatcagggcggcatacggacgcctgacgatctcgtttatctccaccggttcgatcagcaatgcattgaacgcaatctcagcccaggcggtagcgccgatctgctgatcgtgacctggtttttagcgcaaatttcgcaagttaatcattaa

SEQ ID NO: 369214 - DNA, 552 bp, Salmonella enterica
atgcgcctgtttcctgaactcgccacctgtcacgacgtttctattcctgagctgctcgccagccgggatgagagacaagcaagacagcgcgcctggctaacgcgccacgccactccactggtctcctttaccgtggtggcgccaggcccgataaaagacagcgcgttaacccgccggatctttaatcacggcgtgactgccctgcacacgctggcagaagagtatggctggactatccgggagcaggctgcactggcttccgccagcgggccggaagggctgctagcgattgacgcgcccgctcaggcgctcaaacaggcgaccatcgcacttgaacagcgttatccactggggcgcctgtgggatatcgatgtcctgacggcggaaggcgaaatactctcccgccgccatttcgcgcttcccgcccgccgctgtctgctgtgcgggcaaagcgcggctgaatgcgcgcggggtaaaacccacgcgctgactgatttactgattcatatggaggcgctgctgcatgatgccgattcccgccaacccgactaa

SEQ ID NO: 369215 - DNA, 1530 bp, Salmonella enterica
atgacgcagaaaaatgaatctcaacgccaggatcgcgtagcagcctggagccgtcacgctgaaagcgaactgagcgcttaccaaagtgcggcaaaattggatctacaagcgcaaaaaccgcgcgaccacaaactgtgcgccagcctggaagaggccatccgccgttccggtttacgcgacggcatgacgctctcttttcaccacgcgtttcgcggcggcgatctgacgattaacctggtgatggaaaccatcgcgaagatgggcttcaaaaatctgaccctggcctccagctcgctgagcgactgccacgcgccgctggttgaacacattcgtaacggggtggtcagccgcatctacacgtcaggcctgcgcggcccgctggcggaagaaatttctcgcggcctgctggctgagccggttcagattcactcccacggcggtcgtgtacatctggtacaaagcggcgaactcaacattgatgttgcgtttcttggcgtgccctcctgcgatgaattcggtaatgctaatggttataccggcaaggcctgttgcggttcactgggctacgcgatggtggatgccgacagcgcgaagcaggtcgtgatgctgacggagcaactgctgccgtatccgcataacccggcaagcatcgctcaggatcaggttgatctgatcgtgcaaatcgaagaagtcggtgatgcaaacaaaatcggcgctggcgcgacccgcatgaccactaatccgcgtgaactgctgatcgcccgcagcgcggcggaagtcattgctcactccggctacttcaacgaaggtttctccctgcaaaccggcaccggcggcgcatcgctggcggtcacccgcttcctggaagacaaaatgcgtagccgcaacattgtggctaatttcgcgctgggcggtatcaccgccaccatggtcgacctgcatgaaaagggcttaatccgcaaactgcttgacgtgcagagcttcgatcgtaacgctgcgcaatctttggcccgcaacccgaaccatatcgaaatcagcgctaaccagtacgccaactggggctctaaaggtgcttccgtcgaccgtctggacgtggtggtgctgagcgcgctggaagtagacacccacttcaatgttaacgtgctgaccggctccgacggcgttctacgcggcgcgtccggcggccactgcgataccgccgtcgcggcggcgctgtccatcatcgtcgcgccgctggtgcgcggtcgcatcccaacgctggttgataacgtcaccacctgcgtcacaccaggctccagcgtcgacattctggtcaccgatcacggtatcgccgtcaacccggcgcgtccggagctggctgaacgactgcaagcagcgggaatgaaagtggtatcgattgagtggctgcgcgaacgcgcgcaactgcttaccggtcagccccgccctatcgaattcaccgaccgcgtgattgctgtcgtgcgttatcgcgacggttcagtgatcgatgtggtgcatcaggtgaaggaataa

SEQ ID NO: 369216 - DNA, 909 bp, Salmonella enterica
atgatttccgcctctctgcaacaacgtaaaacccgcacccgccgcagtatgttattcgtaccgggcgccaacgcggcgatggtgagcaattcgtttatctacccggccgacgcgctgatgttcgacctggaagactccgttgcattacgcgaaaaagatgcggcgcgccgtctggtatatcacgcgctgcaacacccgctttaccgtgacgtcgaaaccattgtccgcgtgaatgcgctggattccgaatggggcgtcaacgatctggaagcggtcgtgcgcggcggcgcggacgtggtgcgtttaccgaaaaccgacaccgcgcaggacgtcattgatatcgaaaacgaaattctgcgcattgaaaacgcctgcggtcgcgaaccgggcagtaccggcctgttagctgccgtggaatcgccgctgggtattacccgcgcggtagaaatcgcccacgcctctgaacggttgatcgggattgcgctgggcgcggaagactatgttcgcaacctgcgcaccgaacgctctccggaaggcaccgaactgctgttcgcccgctgcgccattttgcaggccgcgcgttccgccggcattcaggccttcgataccgtctattccgacgccaacaacgaagccggtttcctgcaagaagccgcccacattaaacagttgggctttgacggtaagtcactgatcaacccccgccagatcgaactgctgcacaacctttatgcgccgacgcgtaaagaggtcgcccatgcgcgtctggtcgttgaagccgcagaagccgccgcccgcgaaggtctcggcgtcgtttcccttaacggcaagatggtcgacagcccggtgattgaacgcgcccgtctggtgctctcccgtgcagaactttccggtattcgcgaagaataa

SEQ ID NO: 369217 - DNA, 297 bp, Salmonella enterica
atgaaaataaaccagctagccgtcgcaggcacgcttgagtccggcgatgtgatgatacgcattgcgccgctcgatacgcaggatattgacctgcaaatcaacagtagcgttgaaaaacagtttggcgaggccattcgcgccaccatcctggaggtgctttctcgctacgacgtgcgcggcgtacaactgaacgtcgatgataaaggcgctctggactgcattttgcgcgcccgactggaaacgctactggcgcgcgccagcggtattgccgctctgccctgggaggatcgccaatga

SEQ ID NO: 369218 - DNA, 1077 bp, Salmonella enterica
atgtttggcaataatgtattcactcgggtaaaacgctctgaaaataaaaaaatggcggagatcgctcactttctcaaagagaatgatttaagcgtcgataccactgtagaagtgtttattaccgtcagccgtgatgaccgtcttattgcctgcggcggtattgccggaaatatcattaaatgcgtggccattagcgaatcagtacgcggcgaaggcttagcgttaacgctggcgacggaattgattaatctcgcctgggagcggcactgcacccatctttttatttataccaaaacggaatacgaagcgctgtttaaacagtgcagcttttcgacgatagccagcgtccctggcgtaatggtcttaatggaaaatagcgcgacccggttgaaacggtatgcggaatcgctggcgacattgcgtcatgagggaaagaaaattggctgtattgtgatgaacgccaatcctttcacgcacggccatcgctatctgatccaacaggcggcggcacagtgcgactggctgcatctgttcctggtcaaagaagatacatcacgctttccctatgaagaccgactcgatctggttcttaaagggaccaccgatatcccgcgcttaaccgttcaccgcggctccgaatacattatttctcgggcgacgttcccctgctatttcattaaagagcagagcgtcattaatcactgttataccgaaatcgacctgaagatttttcgccagtatctggcgcccgcgcttggcatcacacaccgctttgtcggtacggaaccgttttgcaccgttaccgcccagtacaaccttgatatgcgtttctggctggagacgccaacgcttcccgccccacccattacgctggtggaaatagagcggctttgcttccaggagacgccgatatccgcctcctgggtacgcaagctgctggttaaacacgatctcacggctatcgcgccgctggttcccgacgccaccctgcgctatttgcagggcatggtcgaacgccatccgggcagcgcggcagcccgtcaaaagtcccccgtcttagcaacaggtgaaaaatga

SEQ ID NO: 369219 - DNA, 1662 bp, Salmonella enterica
atgtcctatcagaaaaataaaaagctgtttcctttttttcggcaactcgcgtttccgttacgtatttttctgctcattctggtggtttctgttttcatcgtggcagcgttagcacaatatttgtctgccagtttcgaagattatctggcgtcccatgttcgtgatatggcgatgaatcaggcaaaaattattgcttctaacgacagcattatcgctgccgtaaaaaaccgggactataaacgcctggcgataattgcgaataaactgcagcgcgggacggattttgactatgtggtgataggcgatcgccactcgatccggctttaccatccgaatccggaaaaaatcggctatcccatgcagtttacgaaacccggcgcgctggaaagaggagaaagttatttcattaccggtaagggctcaatagggatggcgatgcgcgccaaaacgcctatctttgacaacaaaggcaacgtgatcggcgttgtttcaattggctatctggtcagtaaaatcgactcctggcggctggacttcttattaccgatggcgggggtttttgtcctgttgctggtggtattaatgctgctttcctggtttttcgccgcgcatatccgccgacaaatgctgggcatggagccgaaacagattgcgcgcgtggtacgccagcaggaggcgttgtttagctcggtttatgaagggctgatcgccgttgatccggagggacatattaccgcgattaaccgcagtgcgagaaaaatgttggggctgccgtcgccggggcgtcagtggctgggcaagctgatcgcggaagtcgtcaatccggcagacttttttacctgccagatcgcagaaagacgccaggacgtgatggccaacttcaatggcctgagcgtcatcgccaatcgtgaggctatccgttccggcgaggagctgctgggcgctattattagttttcgcagcaaagatgaaatcgcgacgttgaacgcgcagctaacccagattaaacagtatgttgagagcctgcgcacgctacgccatgagcacctgaactggatgtcgactctgaacggcctgctgcaaatgaaagagtatgatcgggtcagagagatggtgcagggcgaatcgcaggcgcagcagcaacttattgatagtttacgcggcgccttcgccgatcgtcaggtggccggtttgctgtttggcaaagttcagcgcgcgcgtgaactggggctcaagatggtgattgttcccggcagccagctacatcaactgccggaggggctggatagcacggagttcgccgccatcgtcgggaatctgctggataacgcgtttgaggcgagtttgcgtacacaggaaggcgacaataccatcgaacttttcctgagcgacgagggcgacgaggtggtgatagaggtcgccgaccagggctgcggcgttcctgaagcgctgcgggaaaaaatttttgaacagggcgtaagtacccgaaccgacgaacccggtgagcatggtatcgggttatatctgattgcaagttatgtggggcgctgtggcggggtcattacgctggaagacaatgatccttgtggcaccttattttctttattccttccgaaagtgaaaaaaaacgatgacagaaccattaaccctattgatcgttga

SEQ ID NO: 369220 - DNA, 681 bp, Salmonella enterica
atgacagaaccattaaccctattgatcgttgaggatgaaacgctgctggcggagatgcacgcagaatatatccgccatattcctggctttaaccagatatggctggcgggcaatctggcgcaggcgagaatgatgattgaccggttcaaacctggattaattctgttagataattatctgccggatgggaaggggattacgctgctgcatgaattaatgcagtcgcgctatcccggcggcgtcgtgtttacgaccgccgccagtgacatggagacggtagcggaagcggtacgtagcggtgcgtttgattatctggtcaaacctattgcttatgagcgtttggggcagacgctgacccgctatcaacagcgcagacgtatgctggcgagcgcggatagcgcaagtcagaagcagatagatgaaatgttcaacgcctatgcgcgcggcgaaccgaaaggggatttgccgaccggtattgatgccttaacccttaatgcggtgatgaagctgtttgccgatccaaccgtacgccatacggctgaaacggtcgcgcaggccttaacgataagccgcaccacatcccgacgctacctggaatattgcgcgagtcggcacctgattgtcgcagagattattcatggcaaagtgggcaggccgcagcgtatttaccacggcggctaa

SEQ ID NO: 369221 - DNA, 1386 bp, Salmonella enterica
atgctaacagttatagagctccttatcggagtcgtcgttattgtgggtgtagcacgctacatcattaagggatattccgccactggcgttttatttgtcggcggtctggttctgcttattatcagcgcgctgatggggcataaggtattacctgccagcgaaaccagtaccggctataccgcaacagatattgttgaatacatcaaaattttgcttatgagtcgcggcggcgatcttggcatgatgatcatgatgctatgcggctttgccgcctatatgacgcatatcggcgcgaatgatatggtcgtgaagctggcgtcgaaacctttacagtacataaactcgccctacctgttgatgattgccgcctattttgtcgcctgcctgatgtcgctggccgtctcttccgcgacggggcttggcgtactgctcatggctactctcttcccggtgatggtcaacgtcggcattagccgcggcgcggcggcggctatttgcgcctctccggccgccatcatcctctcgccaacgtctggcgatgtggttttagccgcaaaagcggcggagatgccattaatcgatttcgcgttcaaaaccacgctgccgatttccatcgccgccattatcggtatggcgattgcgcattttttctggcaacgctatctggataaaaaagagaacatttcacatgagatgctggacgtggcggagattaccaccacggccccggcgttttatgcccttttgccgttcacgcccattatcggcgtactgatttttgacggtaaatgggggccgcagttgcacattattaccattctggtgatctgtatgctgctggccgccgtgctggaattcgtgcgcggcttcaacacgcaaaatgtgttttccggcctggaagtggcttatcgcggcatggcggatgcgtttgccggcgtcgtgatgctgctggtcgcggcgggcgttttcgcccaggggctgagcaccattggctttatccaaagcctgatctcgattgccacttcttttggttccgccagcattattctgatgctggtattagtgattttaaccatgctggccgcgatgaccaccggttcaggcaatgcgcctttttacgcctttgttgagatgatccctaaactggcgcactcctccggcatcaacccagcctatttatctatcccaatgctgcaagcctcaaacctggggcgcacgatttcgccggtctccggcgtcgtggtcgctgtcgccgggatggctaaaatatcaccgtttgaagtggtgaagcgcacgtccgttccggtcatcgtcggtctgttgatcgtcattatcgccacggaaattatggtgccaggcgcctcttccgccgttactggcggctga

SEQ ID NO: 369222 - DNA, 573 bp, Salmonella enterica
atgtatgttgcgatgatcatcagaaagtattttcttattattgctctccttgttatgccatggctggctattccttcagtctctgcggcggataaagggtggtttaacacgtttaccgataacgtcgcagaaacgtggcgacagcctgagcattatgatttgtatgtccccgccattacctggcatgcgcgctttgcctacgataaagagaaaacggatcgctataacgagcggccgtggggcgttggttttggtcagtcgcgctgggacgataaaggcaactggcatggcctctatatgatggcctttaaagattcatttaacaaatgggaacccataggcggttatggctgggaaaaaacctggcgaccgctggaagacgataattttcgtctgggactgggctttaccgcaggcgttaccgcgcgcgacaactggaattatattcccatccctgtgctgttgcctttagcatcgataggctatggtcccgctacctttcagatgacctacattccgggttcgtataacaacggaaacgtctattttgcctggatgcgtttccagttttga

SEQ ID NO: 369223 - DNA, 210 bp, Salmonella enterica
atgtctaagattaaaggtaacgttaagtggtttaatgaatccaaaggattcggtttcattactccggaagatggcagcaaagacgtgttcgtacacttctctgcaatccagaccaatggttttaaaactctggctgaaggtcagcgcgtagagttcgaaatcactaacggtgccaaaggcccttccgctgcaaacgtaactgctctgtaa

SEQ ID NO: 369224 - DNA, 384 bp, Salmonella enterica
gtgttacagcttcttttagcagtttttattggcggtggaacggggagcgtagcccggtggatgctcagtatgcgttttaatccgcttcatcaggcgattcccatcggtacgctaacagcaaatttgcttggcgcgtttattatcggcatggggttcgcctggtttaaccgcatgacacatatcgatccgatgtggaaagtgctcattacgaccggcttttgcggcggcctgacgaccttttctactttttctgccgaagtggtattcttgctgcaagaggggcgctttggctgggcgctgctgaatgtgctgattaacctgttgggttcgtttgccatgacggcgctggcattctggctattttccgccgcagcggcgcgttaa

SEQ ID NO: 369225 - DNA, 789 bp, Salmonella enterica
atgttcgttgcagccgggcagtttgtggtgagttctgtatgggaagagaatgcgcaagtttgcgtttcgttaatggctcaggcggcgggccgcggcgtatcgcttctggtgttgcctgaggggatattagcgcgaaatgacatcgaccttgacctgccgattcgcgccgcgcagccgctggatggcgcgtttatgacgcggcttctggaagaaagcgctcataataatatgacgacgatattcactatccttgtcccgtcaacgcctggacgggcggttaatatgctggtggcgctacgggcgggtcacattgtcgcgcgttacgcgaagctgcatctctatgatgcgttttcgatgcaagaatcccaaagtattgatgccggaaccgttatcgcgcctgtgctggacgtggagggggttaaggtggggcttatgacctgttatgacctgcgctttcctgacatggcgttagcgctggctttacagggggctgacgtattggcgctgccgacgggctgggttcgcggcccgttgaaagagcagcagtggtcgacgctgctggcggcgagagcgctggataccacctgctatatgattgcggccggggagtgtggtaatcgtaatattggtcaaagtcgtattatcgatccgttgggggtaacgatagccgcggcagccgatcgtccggcgctgatcgtcgcggaaatattcagagaacgaatagatcaggtgcgggagcaacttcctcttttgcagcaacgacgatttgcgccaccgcaattattatga

SEQ ID NO: 369226 - DNA, 204 bp, Salmonella enterica
atgggtgagattagtattaccaaactgctggtggttgccgcactggttgttctgctgtttggtaccaagaagttacgtacgctgggcggagacctgggcacggcgattaaaggattcaagaaagcaatgaacgatgaagacgcgggcgttaagaaagacgtcgacggtagcgttcaggctgaaaaactctcgcacaaagagtaa

SEQ ID NO: 369227 - DNA, 966 bp, Salmonella enterica
atgagtaaacccattgtgatggaacgcggtgtaaaataccgcgatgccgataagatggctcttatcccggttaaaaatgtggtcacagagcgcgacgctctactacgtaaaccggaatggatgaaaataaaacttccggcggattctacccgtatccagggcatcaaagccgcaatgcgcaaaaatggcctgcattctgtctgcgaggaagcgtcttgcccaaacctggctgaatgtttcaaccacggtaccgctacgtttatgatccttggcgccatttgcactcgccgctgtccgttctgtgatgtcgcccatggccgccccgttgcgccggatgcggaagagccgcagaaactggcgcaaacgatcgccgacatggcgctacgctatgtggtcatcacctctgtcgaccgtgacgatctgcgtgacggcggtgcccagcattttgctgactgcatcactgccatccgtgccaaaagcccggagataaaaatagagacgctggtgccagacttccgtggacgtatggatcgcgcgctggatatccttaacgcgacgccgccggatgtgtttaaccacaacctggaaaacgtgccgcgtatttaccgccaggttcgtccgggcgccgattacaactggtcgctgaaattactggaacgcttcaaagaagcgcacccggaaattccgacaaaatcgggtctgatggtgggcttaggcgaaaccaatgcggaaatcattgaggttatgcgcgacttacgccgtcacggcgttaccatgctgacgcttggtcagtatctacagccaagccgccatcacctgccggtacagcgttatgtcagcccggaagagtttgacgagatgaaagcggaagctctggcgatgggctttacccatgccgcctgtggcccctttgtacgttcttcgtaccatgctgatctccaggccaaaggcatggaagtgaaatga

SEQ ID NO: 369228 - DNA, 954 bp, Salmonella enterica
gtgagtgataataatcaggcagaaagacaaccggccgatcaacacctacaagacaaaccgcaaattttcagaacactgagaaatattgacctcaatctgttgacgattttcgaggccgtatatgtccataaagggatcgtcaatgcagcgaaaattcttaacctgacgccgtcagccatcagccagtccattcaaaaattacggactatatttcccgatccgctgtttattcgcaaaggccagggcgtaacgcccacgacgtatgctacgcatctgcacgaatacatcagccaggggctggaatctattcttggcgccctggatcttacgggcagctatgataagcaacgcaccattacaattggcacgacgccttcggtcggcgcgctagtgatgccggttatttaccaggccatcaggccgcgttatcctcagcttttgctgcgcaacattccggtagacgatgccgaaagccagcttagtcagtttcagaccgatctcattatcaatacccatagctataacaaccggagcatccagcatcacgtcctgtttagcgatacgcttgagattgtctgccgccagcatcacccgtgtctggcgaacgccattactgaagagagactgaacagcgcggatcacacctttctgatgctggagggacaacatctttccctgctgcgccagcgactgcaggagacatttcccgatcagcaaatcagttttagcagctacaatatttttaccattgcctcgctgatcgccagcagcgatctgctgggactgatgcccacccgcttctacgacttatttagccgttgctggccgcttgaacgccttccctacgcgccggtgaatagtgaacaggtcgagttctcgctgcattacaataaactgagtctgcgcgatccggtgctggagaacgtcattgatatcatccgtgaggcgttctga

SEQ ID NO: 369229 - DNA, 642 bp, Salmonella enterica
ttgtatcaggataaaatccttgtccgccagctcggccttcagccctatgaagctatctctcaggccatgcataactttaccgatatgcgcgatgaaaacagccatgatgaaatctggttggttgagcattacccggtgtttacccagggccaggccggtaaagcggaacatatattgatgcctggcgatattcccgttgtgcagagcgatcgtggaggacaggtgacctatcatggtccgggccaacaggtaatgtacgttttacttaacctgaaacgacgtaaactgggcgtgcgtgatttagtcaccctacttgaacagaccgtggtgaatacgctggctgaaattggtattgaggcgcatccgcgcgccgatgcgccgggcgtctacgtgggtgaaaagaaaatctgctcgctgggtttacgtatccgtcgcggctgctcattccacggtttagcgctaaacgttaacatggatctttctcctttcctgcgtatcaacccgtgtggttatgccggcatggaaatggctaaaataacgcagtggaaggaagacgctaccacggataatattgcgccccgcttgctggcgaatattttagctctgctaaataatccaccgtatgaatatattgctgcttaa

SEQ ID NO: 369230 - DNA, 264 bp, Salmonella enterica
atgaaaaccaaacttaacgaactgcttgaattccctacgccatttacttacaaagtaatggggcaggcgttacctgagctggttgatcaggtggttgaagtggtacagcgccatgcgcctggtgattactctccgacggtaaaaccgagcagcaaaggcaactaccactcggtctctatcaccattaatgccacccatattgaacaggttgaaacgctgtacgaagaactgggcaatattgatatcgtgcgaatggtattgtaa

SEQ ID NO: 369231 - DNA, 1212 bp, Salmonella enterica
atgaagaccactttttccgctcgttttatgcagcgcatggcgctcaccacggcgctttgtgccgcgtttatctcaaccgcacatgccgatgacctgaatatcaaaactatgatcccgggcgttccgcagatcgatgcggaatcctacatcctgatcgactacaactccggcaaagttctggcggaacaaaacgccgacgaacgtcgcgacccggctagtctgacgaagatgatgaccagttacgtcatcggacaggcaatgaaagcgggtaaatttaaagaaaccgacctggttaccgtcggtaatgacgcctgggccaccggcaatccggtatttaaaggttcctcgctgatgttcctcaagccgggaatgcaggtaccggtctctcagttgatacgcggcatcaatctgcaatccggcaatgacgcctgtgtggcgatggctgatttcgccgccggtagccaggatgctttcgtcgggctgatgaacagctatgtgaacgcgttggggctgaaaaatacccacttccagaccgtacacggcctggacgccgacggacaatacagttcagctcgcgatatggcgctgattggtcaggcgttaattcgcgatgtgccgaacgaatatgccgtttataaagaaaaagagttcacctttaacggcattcgccagctaaaccgtaacggtctgctgtgggataacagcctgaatgtggacggcatcaaaaccggccataccagcaaagcgggctataatctggtcgcttccgcaaccgaaggtcagatgcgattgatttccgccgtgatgggcggacggacctataaaggccgtgaaacagaaagcaaaaaactgctgacgtggggcttccgtttctttgaaaccgttaatccgctgaaggctggtaaagagttcgcctctgaacccgcctggtttggtaataccgatcgcgcctcgctgggcgttgataaagacgtttacctgacgatccctcgcggtcgcatgaaagatttgaaagcgagctatgtactgaataccgcagaactgcacgcgccgctgcagaaaaaccaggtggttggcactatcaacttccagctggacggtaaaaccatcgagcagcgtccgctggtcgtactgcaagagatcccggaagggaacttcttcggtaaaatcattgattacattaaattaatgttccatcactggtttggataa

SEQ ID NO: 369232 - DNA, 1134 bp, Salmonella enterica
atgcgtaagcagttgcctgtaatctgcgtcgcggcagggatagtactactcgcggcatgtactaatgacggcggtcagcagcaaaccaccgtcgcgccgcaacctgcggtatgtaatggtccgactgtggaaatcagcggagcggaaccgcgttatgaacctctgaatccgaccgcaaaccaggattatcaacgtgacggtaaaagttataaaatcgttcaggacccgtcccgctttagccaggctggcctggccgctatttatgatgcggaacccggcagtaatttaaccgcctccggggagatgttcgatccgatgcagcttaccgccgcccatccgacactgcctatccccagctatgcgcgaatcaccaacctggccaacggtcgcatgatcgtcgtgcgtattaacgatcgcggcccctatggcaccgatcgggtcatctccctgtcccgcgcggcggcggatcgtctgaatacctcgaataatactaaagtacggattgaccctattatcgtggcgccggatggttcgctctccggcccggggatggcctgtacgacggtggcgaaacagacctacgctctgcccccgcgccctgatttaagcggcggaatgggaagcgcctcttcagcgcctgcgcaaccgcaaggcgacgttcttccggtcagtaattccacgttgaaaagtgacgataccaccggtgcgccggtgagcagtagcggcttcctcggcgcgccgactacgctggcgcctggcgtgctggagagtaatgaaccgacgccgacaccacagacagcgccggtttccgcgccggtgacggctccagcgactgcgacgccggtaagcgcgcctgctgccgcggccccggtatctgccccggtgagtgcgccagccgccgcggcgagcggtcgtttcgtcgtccaggtcggcgccgtcagcgatcaaacgcgcgcgcagcagtaccaacagcgtttaagccagcagttcagcgtaccagggcgcgtaatacaaaacggcgcggtctggcgtattcaactggggccttttgccagtaaagccgaagccagcgcgttacagcaacgtttgcaaacagaagcacaattacagtcctttatcgccagcgcgcagtaa

SEQ ID NO: 369233 - DNA, 1113 bp, Salmonella enterica
atgacggataatccgaacaaaaaaaccttctgggataaaattcatatcgatcccacgatgctactcattctgctggcgttactggtttacagcgcgttggtcatctggagcgccagcggccaggacatcggcatgatggagcgtaaaatcggtcagattgcgatggggctggtggtcatggtggtgatggcgcagatcccgccgcgcgtgtatgaaggctgggcgccctatctttatatcatttgtatcattttgctggtcgccgttgatgccttcggcgcaatatccaaaggcgcgcagcgctggctcgatctgggaatcgttcgctttcagccttcggaaatagccaaaatcgccgtgccgctgatggtcgcccgctttattaaccgtgacgtctgcccgccctcgctgaaaaataccgccatcgccctggtattaatctttatgcctaccctgctggtcgccgcccagccggacctggggacgtctattctggtcgccctttccggtctctttgtcctatttttgtctggcctgagctggcgcttaattggggtcgccattgtattgatcgctgcgtttattcctattttgtggtttttcctgatgcacgattaccaacgccagcgcgtcatgatgctccttgatccggagaccgatccgctgggcgcgggctatcatattattcagtctaaaatcgccattggctcaggcggcctgcgcggtaaaggctggctccacggcacccagtcgcagctggagtttttacccgaacgccataccgactttattttcgcggtactggcggaagagctcggtctggtgggcatcctgattctgctcgcgctctatattttgctaataatgcgcggtctgtggattgccgccagagcgcaaactacatttggtcgcgtgatggctggcggattaatgttaatattattcgtttatgtcttcgtaaatattggtatggtgagcggtattctgcctgtggttggagtacctttacccctggtcagctacgggggctccgcactgattgtgctgatggccgggttcgggattgtgatgtcgatccacacccacagaaaaatgttgtcgaaaagcgtataa

SEQ ID NO: 369234 - DNA, 1902 bp, Salmonella enterica
atgaaacgacaaaattcttttcgtgactatacggctgagtccgcactgtttgtgcgtcgggcgctggtcgcctttttgggtattttgctgctgaccggcgtactgatcgccaatttgtataatctgcaaatccttcgttttaccgattaccagacccgctcgaacgaaaaccgtatcaagctggtgccaattgcgccaagccgcgggataatctacgaccgtaacggcattccccttgcgctgaaccgcactatctatcagattgaaatgatgccggaaaaggtggataacgttcagcaaacgctggatgcgctacgcagtgtggtcgatttaaacgacgacgatatcgccgcctttaaaaaagagcgcgcccgatcccatcgctttacttctattccggtgaaaacaaacctgacggaagttcaggtcgcgcgctttgccgtcaaccagtaccgttttccgggcgtcgaagtcaaaggctataaacgccgctattatccatacggatcggcgctgacccacgttatcggctacgtatcgaaaatcaatgataaagacgtcgagcgtctcgacagagaaaacaaactggcgaactacgccgccacccatgacatcggcaagctgggcattgagcgctactatgaagatattctgcatgggcaaaccggttatgaagaggttgaagtcaacaaccgcggtcgcgttattcgccaactcaaagaggtgccgccgcaggccggacacgatatctacctgacgctggatctcaagctccagcagtatattgaaacgctgctggcaggcagtcgcgcggcggtgattgtcaccgatccgcgtaccggcggcgtgctatcgctggtctccatgccaagttacgaccctaaccttttcgtggatggcatctccagcaaagattattccgggcttcttaacgacccgaacacgccattagtgaaccgcgcgactcagggtgtctacccacctgcttctaccgttaagccttacgtcgccgtatcggcgttaagcgctggcgtcatcacccgtaacaccagtcttttcgaccctggctggtggcagttgccggggtctgagaaacgttatcgcgactggaaaaaatggggccacgggcatctgaatatcaccaaatcccttgaagagtcggcggataccttcttctatcaggttgcctatgatatggggatcgatcgcctgtcagaatggatgggtaagttcggctatggtcactacaccggaattgatctcgcagaagagcgctctggtaatatgccgacccgcgagtggaaacagaaacgctttaaaaaaccgtggtatcagggcgatacgattccggtgggcatcggccagggttactggacagcgacgccgattcagatgagtaaggcgctgatgatccttattaacgacggtgtagttaaagtcccgcacctgttaatgagcaccgcggaaaacggtaaacaggtgccgtgggtacagccgcatgagccgccggtgggcgatattcactccggctactgggaaattgcgaaagatggcatgtatggcgtcgccaaccgccctaacggcacagcgcataaatattttgccagcgcgccctataaaatcgcggcgaagtcgggcaccgcgcaggtctttggcctgaaggccaacgaaacgtacaatgcgcataaaatcgccgagcgcctgcgcgaccataaattaatgaccgcctttgcgccgtataacaatccccaggtcgccgtcgcgatcatccttgaaaacggcggtgcaggcccggcagtaggcacaatcatgcgccaaatccttgatcacatcatgctgggcgacaacaacacccatttgcctgcggaaaacccggtggttgcagcggcggaggaccaataa

SEQ ID NO: 369235 - DNA, 468 bp, Salmonella enterica
gtgaagctgcaacttgtcgctgtcggcacgaagatgcccgactgggttcaaacgggatttacggaatatctgcgtcgttttccgaaagatatgccctttgagctgatcgaaatccctgcgggcaaacgcggcaagaacgcggatatcaaacgcattctcgacaaagagggcgagcagatgctggccgccgccggtaagaatcgcattgttaccctggatattccaggcaagccgtgggatacgccgcagttagccaatgagctggagcgctggaaacaggacgggcgcgacgtcagtttgctgattggcggcccggaaggattatctcccgcctgcaaagcggcagcggaacagagctggtcgctctcggcgttaacgctccctcacccgctggttcgagttctggttgcggagagtttgtaccgggcgtggagcatcacaaccaaccacccttatcaccgtgagtga

SEQ ID NO: 369236 - DNA, 318 bp, Salmonella enterica
ttgcagggtaaagcactccaggattttgttatcgacaaaattgatgacctgaaaggtcaggacatcatcgccttagatgttcagggtaaatccagtatcaccgactgtatgattatttgtaccggcacctccagccgtcacgttatgtctattgccgaccacgtggtgcagtcgtcgcgcgcggccggtatgctgccattgggcgtcgaaggcgaaaatgcggctgactggattgtcgtcgatttgggcgatgtgattgtgcatgtcatgcaggaagaaagtcgccgcctgtatgaactggaaaaactctggagttaa

SEQ ID NO: 369237 - DNA, 609 bp, Salmonella enterica
atgcgattgtggctggtgcgtcatggcgaaaccgaggccaatgtcgccgggttgtatagcggacatgctcccacgccgttaacggaaaaagggattggccaggcgaaaacgctacatactttattgcgccacgcgccatttgaccgggtgttatgcagcgagctggagcgcgcgcgccataccgcccggctcgtactggagggccgggatgtgccgcaacacatcttacctgagcttaatgagatgtactttggcgactgggaaatgcgccatcaccgcgacctcacccatgaagatgccgaaagctatgccgcctggtgtacggactggcagaatgcggttccgaccaatggcgagggttttcaggcttttacccggcgcgtagagcgctttatctcgcgactcgacgcgtttagcgattgccagaacctgctgatcgtcagccatcagggcgtactcagcctgttgattgcccgtctgctcgcaatgcccgccgcctcgctatggcatttccgggtagaacagggatgctggagcgcaatcgacatatgcgaagggttcgccaccctgaaagtattaaatagtcgtgccgtctggcggcctgagtga

SEQ ID NO: 369238 - DNA, 1095 bp, Salmonella enterica
atggcgttattcaacagcgcgcatggcggtaatattcgggaagccgcgacggtgttgggcatctcgcctgaccagttactggattttagcgcaaacattaatccgctgggtatgcctgtcagcgtgaaacgcgcgcttatcgacaatctggactgcattgagcgctacccggacgccgattattttcatttgcaccaggcgctggcgcgtcatcatcaggtgccggcatcgtggatactggcgggaaatggcgagacggagtcaatctttaccgtggcgagcggtcttaaaccgcgtcgtgcaatgattgtcacgccaggtttcgcggagtatggccgggcgctggcgcaaagtggctgtgaaattcgtcgctggtctctacgcgaagcggatggctggcagcttaccgatgccattcttgaggcgttgacgcccgatctggactgcctgtttctgtgtacgcccaataatcctaccggcctgctgccggagcggcagttattacaggccattgccgatcgctgcaaatcgctgaacattaacctgatcctggatgaagcgtttatcgattttattccgcatgaggcgggctttattcctgctcttaaagataatccgcatatctgggtgctgcgttcgctgaccaaattttatgccattcccggcctgcggttgggatatctcgtcaatagcgatgacgcggcggtagcgcggatgcgtcgccaacaaatgccgtggtcgattaacgcgctggcggcgcttgccggtgaggtagcgttacaggatagcgcctggcaacaggcgacctggcattggttacgggaggagggcgcccggttttatcaggcgctttgtcagctccccctgctgacggtttatcccgggcgggcaaactatctgttgttacgctgtgagcgagaggatattgatctgcagcgacggttgctgacgcagcggattttaatccgtagctgcgctaactacccggggctggacagccgctattatcgtgtggcgatacgcagcgctgcgcaaaacgagcgtctgctggcggcgctgcgcaatgtgcttaccggtatagcccctgctgattga

SEQ ID NO: 369239 - DNA, 651 bp, Salmonella enterica
atgggtgatatgaaatcgttacaggctttattcggcggcacctttgatccggtgcattatggacatcttaaacctgttgaaacgctggcgaatctgatcggcttatcgcgggtgattattatgcctaacaatgtgccgccgcatcgcccccagccggaagcctccagcgcgcagcgtaaatatatgctggagctggctatcgacgataagccgctttttacgctggatgaacgcgagctacagcgaaacgcgccctcttacactgcgcaaacgctgaaagcatggcgcgaagaacaggggcccgaagcgccgctggcgtttattatcggccaggactcgctacttaacttccccacctggcatgattacgacaccatccttgataacactcacctgatcgtttgtcgtcgtccgggctatccccttgaaatgacgcaggcgcaacaccagcagtggctggaacagcatctgacccatacgccggacgatctgcaccagttgccagccggtaaaatttacctggcggaaacgccctggcttaatatctccgcaaccctcatccgcgaacggctggaaaaaggcgaatcctgcgacgatctgttgccggaaaacgtgctgaactacatcaatcagcaggggctataccggtaa

SEQ ID NO: 369240 - DNA, 1032 bp, Salmonella enterica
atgatcaggttgtatcctgaacaactccgcgcgcagctcaacgaagggctgcgcgcggcatatctgctattgggcaacgatccgctgctgctgcaggaaagtcaggacgctattcgtctggcggctgcgtcgcaaggcttcgaagagcaccacgcttttactctcgatcccagtaccgactggggatcgcttttctcactctgccaggcgatgagcctgttcgccagccgtcaaacgctggtgctgcaactgccggaaaacgggcctaacgcggcaatgaatgagcaactcgccaccctgagcgagctgctgcatgacgacctgttattaatagtacgcggaaacaagctcaccaaagcgcaggaaaacgccgcctggtataccgcgctggcagaccgtagcgttcaggtcagttgtcagacgccggagcaggcgcagcttccccgctgggtggccgccagagcgaaagcacagaatttgcaactggatgacgccgcgaaccaactgctgtgctattgctatgagggcaatctgttggcgctggcgcaggcgctggaacggctgtcgctgctttggcctgacggtaagttaacgcttcctcgcgtggagcaggccgtcaatgacgccacccactttacccctttccactgggtggatgcgttactgatggggaaaagcaaacgcgcgctgcatatcctgcaacagctacgccttgaaggcagcgaaccggttattctgctgcgcaccctccagcgagagctgctgctactggtaaatctcaaacgtcagtccgcgcatacgccgttacgcgcgctgtttgataaacaccgggtctggcaaaaccgtcgccccatgatcggcgacgcgttgctgcgtctccatcctgcacagcttcgccaggccgtgcagttactgacgcgtacagaaattacgctcaaacaggattatggtcagtcggtatgggcagaccttgaagggctgtcgctcctgctctgccataaggcgctggcagacgtatttattgatgggtga

SEQ ID NO: 369241 - DNA, 591 bp, Salmonella enterica
gtgcgatatctggtaacactgttgttatctctggctgtgctggtcaccgccggatgcggctggcatctgcgtagcactacgcaggttccggcttcaatgaaaacgatgatcctcgattccggcgatccgaacggtccgctaagtcgtgcggtacgtaatcagttacggctgaataacgtaaacttgcttgataaagacacaacgcgcaaagacgttccgtctctgcggcttggaacggtgactatttcgcaggatacggcgtcagtgttccaggacggccagacggcggaatatcagatggtgatgaccgtcaatgcctcggtattgattccgggccatgacatctatcctatcagcacgaaagtgtaccgttcgttcttcgataacccgcagatggcgttggcgaaggataacgagcaggccatgatcgttcaggagatgtacgacaaagccgctgaacagctgattcgtaagctgaccagcgtccgcgcggcggatattcaggcgacgaaagaggaggctaccgccgacaatgagacggcggcgcccgcctctacgccagcacgcgtctccactacgctgagtaactaa

SEQ ID NO: 369242 - DNA, 2583 bp, Salmonella enterica
atgcaagagcaataccgcccggaagagatagaatccaaagtacagcttcactgggatgagaagcgcacatttgaagtgaccgaagacgagagcaaagagaagtattactgcctgtcgatgcttccctatccttctggccgactacacatgggccacgtacgtaactacaccatcggcgacgtggttgcccgctaccagcgtatgctgggcaaaaacgtgctgcagccaatcggctgggacgccttcggcctgccggcagaaggcgcggcggtgaagaacaacaccgcgccggcgccgtggacgtacgacaacatcgcgtacatgaaaaaccagctcaaaacgctgggttttggctatgactggagccgtgaaatcgcgacctgcaccccggaatactaccgctgggaacagaaattcttcaccgagctgtataaaaaaggcctggtgtacaagaagacttctgccgttaactggtgcccgaacgatcagaccgttctcgccaacgaacaggtgatcgacggctgctgctggcgctgcgacaccaaagttgagcgtaaagagatcccacagtggtttatcaaaatcaccgcttacgcagacgaactgttgcgcgatctggataagctggaccactggcctgataccgtaaaaacgatgcagcgcaactggattggccgctctgaaggcgtggaaatcaccttcgatgtgaagggttacgataacacgctgaccgtctataccacccgtccggatacctttatgggcgccacttacctggcggtggccgccggtcatccgctggcgcaaaaagcggcggcgaacaacgccgagctggcggcgttcatcgacgaatgccgtaacaccaaagtggccgaagccgaaatggcgaccatggagaaaaaaggcgtcgacaccggctttaaagcgactcatccgttaactggcgaagagatcccggtctgggcggcaaactttgtcctgatggagtacggcactggcgcggtgatggccgttccgggtcacgatcagcgcgactacgaatttgcctccaaatacggtttgaccatcaagccggtgattctggccgccgacggttccgagccggatctttccgaacaggcgctgaccgaaaaaggcgtgctgtttaactccggcgagttcgacggtctggcctttgaagcggcgtttaacgccattgccgataaactggcggaaaaaggcgtcggcgaacgtaaagtgaactatcgtctgcgtgactggggcgtttcccgtcagcgttactggggcgcgccgatcccgatggtcaccctggaagacggcaccgtgctgccgacgccggaagatcaactgccggttattttgccggaagacgtcgtcatggacggcatcaccagcccgatcaaggccgatcctgagtgggcgaaaaccaccgttaacgggatgccggcgctgcgtgaaaccgacaccttcgacacctttatggaatcgtcatggtactacgcgcgttacacctgcccgcagtatcaggaaggaatgctggattcgaaagcggcaaactactggctgccagtcgacatctacatcggcggtattgaacatgccatcatgcacctgctctacttccgcttcttccataagctgatgcgcgatgcgggcatggtcacctctgacgagccggctaagcagttgctgtgtcagggcatggtgctggcggatgcgttctattatgtcggcgagaacggcgaacgtaactgggtttcgccagttgacgctatcgtcgagcgcgatgaaaaaggccgcatcgtcaaagcaaaagacgcagcgggtcatgagctggtctacactggcatgagtaaaatgtccaagtcgaaaaataacggtatcgacccgcaggtaatggttgaacgttatggcgcggacacggtacgcctgtttatgatgttcgcttctccggcggatatgactctggaatggcaggagtccggcgtagaaggcgcaaaccgctttattaaacgcgtctggaagctggtttacgaacacaccgctaaaggtcctgtcgcggcgctgaacgtcgatgcgctgagcgaagatcaaaaagcgctgcgtcgcgatgtgcataaaaccattgccaaagtgaccgatgatatcggccgccgtcagacgttcaacaccgccattgcggcgatcatggagttgatgaacaaactggcgaaagccccgcaggaaggcgaacaagaccgcgcactgcttcaggaagcgctgcaggccgtcgtgcgtatgcttaacccgttcaccccgcacgtctgctttaccttgtggcaggaactgggcggcgaaggtgatatcgacaacgcgccgtggccggttgccgacgagcaggcaatggtggaaaacaccacgctggttgtcgtgcaggttaacggtaaagttcgcggtaagatcaccgttgcggtggatgccaccgaagaacaggtgcgtgaacgtgcaggccaggaacatctggtggcaaaatatcttgatggcgttaccgtgcgtaaagtgatttacgttccgggtaaactcctcaatctggttgttggctaa

SEQ ID NO: 369243 - DNA, 291 bp, Salmonella enterica
gtgaaaaaaaatgcagtggtgattcaccctcaggattgcgtcgcgacggctattacggcgctcaaggccggcgaaaccgccacaatgttcattggcgaacgcgagataagcgttgtgttacatcaggatgtgccatttggccacaaattcgccatctgcgatgtgccttttcatggcgaagtttataaatatggcgaatccattggccgtgccactcaggaaataaaaagtggcgactatgtgcacgtccacaatgtggaaagcgaacgcggacgtggtgactggaaataa

SEQ ID NO: 369244 - DNA, 1251 bp, Salmonella enterica
gtggcgactatgtgcacgtccacaatgtggaaagcgaacgcggacgtggtgactggaaataatataaaacaagggaaaatgattatgagcaatgagacttttttggggttccgccgccctgacggccgttttggcatccgtaattatgtactgattttacctaccagcgtttgtgcgaataaagttgcccaggatattgcccggcaggtaaaaggcgcgacatgggtgaataacgattttggctgctgccaggtggcaggcgatgcgcgtctgacggaaaagacattgattaatgtggcgaataatcccaacgtcggcgctattgtggttgtgggcttaggctgtgaaggcgcggagccgctgcgcatcgcagaagagattaccgcatttggcaaaccgacctcctgcattaccattcaggaagagggcggcacgcttaaatgtcaggctcgggggatttcgctggcccgcgactatgcgcaacaactctccatgcaaaaaccgcagcaagcaccggttagcgagctgctgctggcgatggagtgcggcgggtcagatacgacatcggggctggcgtctaacccttcctgcggggtcgcctcggataagctgatacgctgcggcggaagctcaattctttctgaaacgacggaatttattggcgccgagcatgtgatggcgaaacgcgcggtgacgccggaggttggtcaacagcttattgatttagtggtcggctgcgaggcgcgagcaaaagcgctgggcgaggatattcgcgggggacagccgacgccgggcaatattaaaggcgggttgactaccattgaagaaaaatcgttaggctgtatgcataaagcaggtcatgcgccgttacagggcgtcctggaatatgccgatagtccaacgcatccgggcctgtggattatggataccccggggcaggatattgaatctatttccggcatggtggcgggtggagcgcagatcgttatttttactaccggtcgcggaacgcctgccggtaacccaatagcgccggtaataaaaattacgggtaataaagcaacgtgggaaatgatgcaggacaatattgatattgatgtgtccgccattatgtctggcgaggcttctattacgcaaatgggcgaggaaatttatcaggaaattttacgcgtcgcgaatgggaaaacgactaaatcagaagatttaggtcataacgaattctctatttataagatcgcgccgacgttctga

SEQ ID NO: 369245 - DNA, 954 bp, Salmonella enterica
atgaaaattaaaaaaacactggaacgttttcctggtggtatgatggttgtaccgctaatcatcggcgcattgtttaaaacttttgcgccggaggcgctggaaataggcggttttgtcacctctatttcgcatggcgcaatggcgattttaggcatgtttttagtctgtatgggcgcggatatccagtttaaagccgcgccgaaagcgttgaaaaaaggcgctgcgatcacctttgcgaaatttgccagcggcgtgattattggcattctggtcgggaaattttgcggcccggatgggttattaggtctgtcggctttagcgattatttcggcgatgaccaactcgaacagtgggttatatgccgcgttggtgggggagtacggcgatgaaaccgacggcggcgcgattgcggtaatatcgttgaacgatggtccctttttcaccatgctggcgttagggtcggcaggcatggtgtcgataccctttatgaatctggtggcggttattattcccattatcattggcatgattttgggtaatctggatgaggacatgcgcaagtttcttaaacagggcagcgtggtaacgattcccttttttgcctttgggttaggatacggtattgatttcgcaagacttatcacggcaggttcttcaggcattttactgggactcatgacggtggcgattggcggattttttaatattttcgccgatcgtgtgacgggaggcagtggcgtggcaggcgcggcggtatccaccacctctggcaacgccgtcgcgacgccagcggcaatcgcgctgctcgatccgcattttaccgacctggcgtcgacggcggcggcacaggtggcggcctcgacgattattaccgctctgtgcgcccccttcctgaccgtatggataaaaaaacgctacgatcgtaaactgaacccagccgccgcaggcggttag

SEQ ID NO: 369246 - DNA, 1929 bp, Salmonella enterica
atgaataagacgaaagatatagccgcatctcctctctgttttgtctctccttacccgcaactggcaaaggctgccgaggcgctggtcgcgcagttggattacgccgtcactattcatcaaacgacgcttaatcgtatcctggatgagctacctttattagagtcccgtgggcaccaggtactgattagtcgtggcggatgtgcggaaatattaaaaaagcacagtaaattaccggtagtcgaaattaaaatgtccggctacgacattcttgatgcgcttatcccttttaaaggacaaaaaggcactgtcggtattgtcggcttttccagtgtgatcaaaggatgcgcgcgcgtagcggaacagttaaatattaactataaaatttttaccttacagggaaatgataaagaaacgatttcttgcctgaagcggcaattagcgtccacgccattagattgcattgttggcgataccgtttgtcaggattatttttcaccgctgggctcgcaattccgtttacttgattccagccccgcctcaataaccgaagctctggaagaagcccgctcattatatctggcttttcgcagccaattactcgagcgtcatcatctgcagctgattctcgatcagtttgataaagctgttatcacgcttgatgataccggcgcgttactgcattacaataaatatgcgagccaactttttaaaattaacgcctccggtgagatttatgacgcatctttcctgaaacaggtattgcaccaggagcggcatacattacgtgagggaaaaaccgtcagcgcgaaagtcgtcgatacgccgcaaggcgcgatggtggttaatctgtatccggtatttgcggccagacagttaagccgggtagtgttgacgatgcaaaccgtctccagtttacagggggcagaacatcatgttcgccgccaggaactgtctcgccgcggcttgagcgcccgctatcatttcgacgatctgcttaccgaaaacccggaaatgctgcgtcgtctggcgatcattaaaaattatgccggtacggacgcgactatcttaattaatggcgaaagcgggacggggaaagaggtgctggcgcaaagtattcataatgccagccaacgcgtcaacggcccgtttgtcgccattaactgcggcgcgatggcccctcagattctggagagcgaactctttggctatgtcgccggcgcatttaccggcgcgtcgccgaaaggcaaaataggcctgtttgaattagcgcaccacggtaccatttttctggatgagattagcgagctggataaaccgctacagacgcgcttattacgggtattgcaggagcggcagattatgcggctgggctcagaccagatgatacctgttgatattcgcgtgattgcggcgaccaatcagacgttaacgaagctcattgcggacgggacatttcgcgaagatctttactatcggcttaacgtattaaaagtgaccaccatcccgctacgcaaacgtccggaggatatcaaagccatcggcctgtcgctgcttactagtttcagccagcattataaacgcccggcactaacgttaaccccggcgctgtggcaagagcttcagcgcttcgcctggcccggaaacgtcaggcagttaagcaatattatcgaacggctggtactctctattgatcactccccggcaacgctggatgagggtcgcctcttgctggacgatctggaagaggggagccgacgcgagccaactacctgccacgactgccagatgctggctggcgattataaaacgattcgcctgcgtattttgagaaaattattagaggcggaaagggataataaatcgttagtggcgaaacggttaaatgtcgatcgtacctcgctgacgcgctggatacgtgagtcggcctga

SEQ ID NO: 369247 - DNA, 474 bp, Salmonella enterica
atgaacaaggttgctcaatattaccgtgaactggtggcctcattaagcgagcgtttacgcaatggcgagcgcgacattgatgcgctggtggagcaggcgcgccagcgcgtgatgcaaacaggggagttaacgcgaaccgaggtggacgaactgacgcgcgctgtcagacgcgatctggaagagttcgccatgagctacgaagagagccaggacgatagcgtcttcttgcgggtgattaaagagagtctctggcaggaactggcggacattaccgacaaaacccagctggaatggcgcgaggtattccaggatttgaatcaccacggcgtgtatcacagtggcgaagtggtgggattggggaatctggtgtgcgagaaatgccactatcatctggcggtttacacgccggatgtgttgccgctctgcccgaagtgtggccacgatcagttccagcgcaggccgtttgagccgtaa

SEQ ID NO: 369248 - DNA, 996 bp, Salmonella enterica
atgaatcattccataaccagtcatccctgcgacaacgtatctttagcacaattaaccgaactggcgcagtcaggaaatagtgaagctcaatatatattaggccgtttatataatgacgaatgtatagatggcagcgaagaggataagctctctttttattggttgcagcaggcagctgaacaaggacactgcgaggcacaatattggctcggcttacgatacaaagacacgcctaccgacatgaaagataatacgctggctttattctggtcagaaaaagccgcacagcaaggacaccgccacgctttcaacacattaggctgggttcaggaaggagaaaccgggatggcgccagattatgcccaggccgttgcctggtatcgcaaaggagcagaacagagccacaaccttgcgcaatataatctcgggagaatgtatcattcaggaactggcgtagagcaaaatgatacacaggcactctactggtttaaacaggcagcattacaaggccattgcgccagccaggaaagactggcgtatatgtatggcaatgggaaaggatgtcggaaaaatttatcccttgccgccctttggtacaagaagagcgcgctacaagagagcagctactcgcaatatcagatgggctattgttattacatcggaaaaggtatcaaacaagattaccagcaggcaatatactggtttcgaaaagcggcagaccagggtgacaatgatgcctataacagtatcggctggatgtacaaatgcggtcatggcgtcgagcaaaattattcgctagcactggaatggttccacaaatcagcagaatgtaacaattcatcgggctggtacaacctcggatgcatgtacagagatggacacggtaccgcacaagacctacaacaagcgctctactggttcaaaaaagcacagcccacgggcaaatggaacgtcgatgaagagatccgcaaactggaagcccaactgcacgcttaa

SEQ ID NO: 369249 - DNA, 708 bp, Salmonella enterica
atggataaagaatcacaatatttactctttgcactttcctcgccgatggaagtattgaacgaggactgtttaccttcacattcgtcaccgaaaatgtatttaggtgtaaaacgtttcgatcttgaatcgtcgtggggtattgaaaatcgcgatgaactgcttcagaccatttcccgcatgacggatgacggtcatgccacgcaactggaatggctatatcgccgctggtttaggtatgcgccgcaggagtggcaggagtataccgacgcgctggacgagggagatcgcatttatgcccgattcgtcgctgataccgccgtgtgttgcggcgaaggtggtattcgcagttgggattatgtgcggatgggatttctctgccgcatgggcgtgctcaatgaatggctgacggaagaggagagcctgtggctgcagtcgcggatacagcttcgcgcgctcagctattattccggctggttgccgtatttcagcgcttattacaccgggcgtttgtactggcagttacggaatggcgataacctaccgttgctacgcgagacattcgcccgtaaggagtttgatgacgcggggcgacgtatgatgaataagctgatcgcagggaaggacagtttttacgccacgctgccgtggcgctacctgccccattaccctgaatgcccggacacgcttcaggaggtgagcgatctatga

SEQ ID NO: 369250 - DNA, 1434 bp, Salmonella enterica
atgaaaacctgttggcaagtccttggcattgaggccaccacggataccgacgccattcgtcaggcttatctggcgctgcttccgtcatttcatccggaaaccgatccgcagggttttaagcaattgcgagaagcctatgagaatgcattgcaggggacaacatcgcccgccattacggtggttgatgaggatcccgataccccgtgggtgaattatctcagggagatattcggtgatttgctggcggatggcgaacggcgctttcagccgcaggcatggcaggagtttatccaacagatcaataaattatcgattttacaggtcgaaaaatcgcgctggtggctgtgcgctatcgcgatgaagacctttcctatttcttactcgtgtctgaaactgctgtcagatcgcctggcttgggaacaggggagtgataatcgagatgtcgatgccgaggaggtggaggatcttttgtttgaaatccgccgtggcgacctgtttgattattcgctattgctgcatttgccagtggcggtacaaaaccagaccattgctttttatgatgccctggacaacacctttttcgagcatcctctctatttcgcccaacttatggcccagcacggcccgtggattatcccggacaatctacgctttcaacgacgtctgttacgctggttcagcaccttgcactggggtattgcggagctgctgcctgtcgccctggcatggcaggaagccgaacccgataacgcaacgccgggttattactacttagcccagcgcgtattttgcggtgaaggcgatagcctgctgccagaactttacgcgcagtggtgggcgcatccttctacccagcttgacgatctgttgctgcgctggtgccgtcagcatcgaccggactttttcccgctgctggtgatggcggttgaggggcgtgagcaggtggatattaacgctgaacagctgctgtatattcccggctcaagcgctcgttcctgcttgctgtgggccgaggcgctgcacagcggcgcattatcgccgctaagcgaaagttttattgcgcggcgtttgaattatggcgcgccagcggtgagtgaggcgcatagccagcatccatactggctgttgtatcaggtggcggatagcctggcgtgcgccgaggagccgtcagcggcattgttacagagtctggtaacgaagcttgatgcgccggatatctgcccgttggaagcgctggttattcgcgggttgctggggcgggctgcggctgtcgccacaccgtgtgaagctgtagtcgcagatgaagaaccggtgacgacggtgacttcgccgagtacggaggaatctggcggcggctttggcctctggcaggtgattaaaatcattttatttattggcgttgtcggccatgtattacgccagtttatgcattag

SEQ ID NO: 369251 - DNA, 696 bp, Salmonella enterica
atggacaaggaagaacaatatttactttttgcgctctccacgccgatggaggtgctatatatcggcaatgagccttcgcatacctctccagcaatgtataccggaattcctgctgtcgatctctccgattcatgggggattgataaccgtgaagatcttattcaaaccatctatcggatgacggacgatggtcatgcggcagatttggctcccttttatatccgctggtttacgctatctcctcgtcaatggcgcgaatttaccgcgcagtttggcgagcagggccagatttatgcgcgatttgttgccgaaaccgcactatgctgcgggcgcggaggcattaaagcctgggactatgtgcgtatggggtttttatgccggatgggggtgttgaatcaatggctgacggaagaggaaagcctgtggctgcaatcgcgtatctatgcgcgggcgtactatttttacgacggttggacgcaatattttgccgcctattcgttgggtcggctgtactggcaggctaaaggggacaccatacaggcatatttcgctcacctaaagtacgacgcttcaggcgcgcggatgtttaatgaactggcctctacgacagagagttattatgcgcagctaccgtggcgtccgctcaacgaacaaccgacatgcccggaaacgcttaaaggagtgagcgatttatga

SEQ ID NO: 369252 - DNA, 1473 bp, Salmonella enterica
atgaatatctgttgggaaatcttgggcattgaacctaccaccgatctggaatgtatccgtcaggcttatcttgccctgttgccctcattccaccctgagagcgatccgcagggttttaagcgattgcgccaggcctatgaagaagcgcagcactgggccgcctcgcctgcggaggacgcaaaaacggaagaggtgggcgacgaacatgaaatactggtggcgttcagggaattgctggcatcagagcgcgatcgctttcagccctcggcatggcagaaatttattcagcaattgaaccagtgttcaatggatgagatagataagctgcgctggcagttgtgcgacatcgccatgaaaacagaaacgatctcgctgtcttgcctggcattgttggcgcagcgtctgaactggcagccgcaggaagcagaagatgatgctgatggagaagagctggaagcatttctggagaccgtaaagcggggcgatgcgtttgatctgctaagtctggccaaattgcctcttgttgttcaagaccaaactgacgcctacttttttaagcttgagcgtatctggcgcttttatcccgaacattttgccgacgctctgcaggttcagggagcctggataattcccgatgataaacagctgcatcgtaaactattacactggtttagcgccgagcagtggggcatggcggaactggtcgatattgctcgtcgctggcaggccgcggagccggataacgaagatgcgcactattacctgtgcaaacagcgtttgctctgcggtgaaggggaaagcctgttggccgacctttgcgatttctggcagcgttatccctccacgcaggcggacgacctgttgctgggctggtgccgccagcatcggcctgatttcttcccgctggcggtgatggcggtcgaagcgcgctgtatggcggatgccgaatatgtccccggtgaaagcgcgcgcacgcgtttactgtgggccgacattttgcacagcggtaggttatcaccgctggggcgttcatttgttgactccctgttttataagcgaaaagcgatggcgtgggcaaattcacggctgagtacccagggggaacccgaaacgccgctgttggatctgtaccggacggcggagcaggtggtgctggaagcgtttcccaaagaaaagcccttttttcgcctgctgatccggctggaggaggggcaatcctgtccgctggaggcgctgataacgcaggcattgtcatctaaaatcgccatgaagccaggcgatattcgtgacaaaaaggagctggcggaagagctcaggctggcggctgagaaagaagagacaaaattgtcttctgaagcgaaaaccgaagcaccccgtcaggcggaatctggcggggtgatgaaaatcatgaagattgtcggtttgatcgcgttgattgtctgcgcgttaaatcgattcttccattttttctga

SEQ ID NO: 369253 - DNA, 1680 bp, Salmonella enterica
atggataatgcaacgttagcgattggtatcgatctcggcaccactaatagtttaatcgccgtctggcaagacggagccgcacaattaatacctaataaatttggtgaatatttaacaccatccataattagtatggatgaaaataagcaaattctggtgggaaaacctgccgcagctcgtaaaacatctcatccagataaaaccgctgccttatttaaacgcgcaatgggcagtaatactcactggcatttgggtgaagagtcgtttaatgcgccggaattatcttcgctggttttacgctcgctgaaagaagatgcggaagactaccttcagcagccaatcaaggatgtcgtgatctcggttccggcttatttcagcgatgagcagcgtaagcatacacgccttgccgctgagcttgcggggttaaacgccgtgcgcttgatcaatgaacccacggcggcggcaatggcttatggcctgcatacgcagcaaaatagccgttcgctggttttcgatctggggggcggaacctttgatgtgaccgttctggaatacgctacgccgattatcgaagttcacgcctccgctggcgataactacctcggcggcgaagatttcacgcatttgttgcttgatgaagtgctgaaacgctggaacctcgataaatcagcgctgacggatagcgatctggctgcgctgtatgcctgtgttgaagccgcaaaatgcgccagcagctccccgctgcgcatgagctggctttatcaggagagcgttctggaaagcacgttttatgacgatgagctggaagccctgtggctaccgttgctcaaccggctgcgcacgcccattgagcaggcgctgcgcgactcccgactcaaaccggagcaaattgacagcctggtgctggtcggcggcgcgtcacagatgccgctggtgcaacgcatcgcggtgcgcttattcggtaaattgccctatcaaagttacgatcccagcaccatcgtggcgcttggcgccgcaactcaggccgcctgtcgcctgcgccatgaagacgttgaagaggtgatcctcacggatatctgcccctactcgctgggcgtggaagtcaaccgacagggagtgcctggtattttctcgcccatcattgaacgcaataccaccgttccggtgtcaaaagtggaaacgtactccaccatgcaccctgagcaggactctatttgcgtcagggtataccagggcgaaagccataaggtgaaaaataatatcctgattgattcttttgacgtcatgctgaagccgaacgggcacattcaggccattgatattcgttttagctacgatattaatggtctgctggaagttgacgtgctgctggaagacggcaagagtgaatccagaatcatcagtcacaatgccacctcactgacgacgcagcaaatcgacgccagccgcgagcggctgctggcgctgaaaatttatccccgcgatatgctgattaaccggacgtttaaagcacagttagaggagcagtggtcacgcgcgttaggcgatgagcgcgaaatgctgggggagattattaccgatttcgacgcggccctgctgtctaatgatatgcagcgtgtcgatgacgtacgccgtcgcgcctgtgaatatctgggtattgacgagccgaaagcgccgtaa

SEQ ID NO: 369254 - DNA, 648 bp, Salmonella enterica
atgaatgacacctggctttgcgtcctgcttgatggtcaccataaagccaccgccgccgcgctggaaggccggcccgtgaagacctgggtcatcagccagccggtggcgatgacatgctacgagacgcgacagcaatacctgcgattttatgacggcgagcgcctggaagaagcccagtttcagcgccgcatccccctgaaaatacagtacgaaaaactaccgccatccctttgggaggattactttactcgccatgacgaacgttatacccgcgtcaactggccgaacgcattggctaactgcgcggcgaattatcccaatcttgcggcctgcacagacattattgccgcaggcgatctgagcgaggccggcctcaacaaaatcatggcgcaagggatcaccgaagagggatttcccgccgtattgttacgcgcgctgttttatacccattcccccttgttgattgattttgtccgttttctgactcgcacccccgattatgcttgccactacccgctggcgtttcgtttactggcccagaaacgcacgccacaggccgatgcttttttcctcgatttcgccatcaatgatgacggcgagcgcccggagttgacgaacattatggatgaatactttcgccaggcgtga

SEQ ID NO: 369255 - DNA, 516 bp, Salmonella enterica
atgttttggcgtaacaatagacctgaaatcagcctgctacagcacgatgtagcccatataacgttttcagtacgtaacggaaaagcattgcttcgtccctgcgttatccacgctcccgactctgacgccggtattcatacgctctcctggcatggctcgccgctgattcgtttttacactgaagcctggtgcccaacctgcgcagaatttgtttatgccggttttagcaatgatgatgaaggcgccgcgcagtttttatcctcacttgccgagtggaatcagacaggagtcgggttgaacgaagcatttaccgccctgacgccgctgttttcactctttgccgatggctattaccggctggaagaacgcgaactttatccgacggatggcaacgggcattttttctgggcggtgggtaacgaaaaacaaccgaatcccgcgaccacagggcagtggattgctgacgtggactatcactatcagtccggcgaaccctgttttttactgccaggctag

SEQ ID NO: 369256 - DNA, 936 bp, Salmonella enterica
atggcactgcccattattattgattgcgatccgggtcatgatgacgcgatcgccctcgttctcgccctcgcctcccctgaactggaagtgaaagcgatcacctcttccgccggtaaccagacgccggagaagaccctgcgcaacgtgctgcggatgctgacactgctcaaacgcccggatattccggtggcgggcggcgcggtgaaacctctcatgcgcgaactgattatcgccgataacgttcacggcgaaagcggcctcaacggcccggcgctgcccgagccgtcattcgccccgcaaagcggcactgccgttgagctgatggcaaaaacgctgcgcgagagcgcacaaccggtcaccatcgtctccactggcccacagaccaacgtggcgctgctgctgaatagccatccggaactgcatacgaaaatcgcccgcattgtgatcatgggcggcgcgatggcgctgggtaactggacgcccgctgcggaatttaatatttacgtcgacccggaagcggcagaaattgtcttccagtcaggcattccggtggtgatggccgggctggacgtcactcataaggcacagattcacgccgccgatatcgaacgctttcgcgccatcggtaacccgatttccaccatcgtcgccgaactgctggacttctttatggagtaccacaaagacgaaaaatggggatttgtcggcgcaccgctgcacgacccgtgcaccatcgcctggctgctcaagcccgagattttcaccaccgttgagcgttgggtcggcgtggaaaccaaggggaaatacacccaggggatgacggtggtggattattatttcctgacggggaataagccgaatgcgacggtgatggtggatgtagaccgccagggatttgtcgatttgctggcggagcggctgcaatactacgcataa

SEQ ID NO: 369257 - DNA, 726 bp, Salmonella enterica
atgattaccctgaaaaatgtttcaaaatggtatggtcactttcaggtgctgaccgattgttcaacagaagtgaaaaaaggtgaggtggtggtagtctgcgggccatcgggttccggtaaatccacgctaattaagaccgtcaacggtctggaaccggtgcaaaaaggcgaaattaccgttaacggcattattgtgaacgacaaaaaaaccgatctggcgaaactgcgttcccgcgtgggcatggtattccagcacttcgagctgtttccccacctgtcgatcatcgaaaacctgacgctggcgcaggtgaaagtgctgaaacgcgataaggccgccgcccgcgataaaggcctgaagctgctggagcgcgttggcctgtctgcgcatgccaacaagttcccggcgcagctttccggcggtcagcagcagcgcgtggcgatcgcccgcgcgctatgtatggaccccattgccatgttattcgatgaaccgacttccgcgctcgatccggaaatgatcaacgaggtactggacgtgatggtcgagctggcgaacgaagggatgaccatgatggtggtgacgcacgaaatgggctttgcccgtaaagtggctaaccgggtgatctttatggatgaaggtaaaatcgtcgaagattcgccaaaagaggagttcttcgctaaccccagttccgatcgcgcaaaagacttccttgcgaaaatcctgcactaa

SEQ ID NO: 369258 - DNA, 675 bp, Salmonella enterica
atgtacgaatttgactggagttcgattatcccctcactgccttacctgctggccgggttggtcatcacgctgaagatcaccgtcaccgccgttgtcgtggggatagtctggggaaccattctggccgtcatgcgcctctcaagctttgctcctatcgcctggtttgctaaagcgtatgttaacgttttccgttccatcccgttggtcatggtcttgctgtggttctatctgattgtacccggctttctgcaaaacgtgctgggactatcgccgaaaaccgatatccgcctgatctccgcgatggtggcattctccatgtttgaagcggcctactattccgagattattcgcgccggtattcaaagtatttcccgcgggcagtccagcgccgcgctggcgctggggatgacccactggcagtcgatgaagctcattattctgccgcaggcgtttcgggcgatggtgccgctgttgcttacgcagggcatcgtgctatttcaggacacctctttagtttatgtactcagcctggcggacttcttccgcaccgcgtcgactatcggcgagcgtgacggtactcaggtcgaaatgattctgttcgccggcgccgtttattttgttatcagcctgagcgcgtcgttgctggtcagctatttgaagaaaaggacagtttaa

SEQ ID NO: 369259 - DNA, 741 bp, Salmonella enterica
atgtcaatagactggaactggggtatttttttacaggaagcccccttcggcaataccacctatctcggctggctatggagtggttttcaggtcaccgtagccctttcgattaccgcctggattatcgctttcctggtaggatctattttcggcattttacgtaccgttcccaaccgtttcctctccggactgggcacgttgtacgtagaactgttccgtaacgtgccgctgatcgtgcaattcttcacctggtacctggtggtgcctgaactgttgccggaagatcttggcatgtggtttaaggcggaactcgatcccaatattcagtttttcctctcctcaatgatctgtctgggactgtttaccgccgcccgcgtttgcgaacaggtgcgcgccgcgattcagtctctgcctcgcgggcagaagaacgcggcgttggcgatggggctaacgctgccgcaggcttatcgctatgtcctgctcccgaatgcctatcgcgttatcgtgccgccaatgacgtcagagatgatgaacctggtgaaaaactcggctattgcctcaaccatcggcctggtggatatggcggcgcaggcaggcaaactgttggattactcggcgcacgcctgggaatccttcaccgccattacgctggcctatgtgctgattaacgccgttatcatgctggtcatgagcctggttgaacgcaaagtccgcctgccgggcaacgtggggagcaaataa

SEQ ID NO: 369260 - DNA, 909 bp, Salmonella enterica
atgcaattacgtaagctaaccacagcaatgctggtcatgggactgtctgcgggccttgcgcacgcagaagatggcgcgcctgccgctggtagcaccctggacaggatcgctaaaaatggcgtgatcgtcgtcgggcatcgcgaatcttctgtgcccttttcttattacgacaaccagcagaaagtggtcggctattcccaggactactccaacgccattgtggaagcggtaaaaaagaaacttaacaagcccgatctgcaggtgaagctgatcccgatcacctcgcaaaaccgtattccgctgttgcaaaacggaaccttcgattttgaatgtggttcaacgactaacaaccttgagcgccagaaacaggccgctttctccgatacgattttcgtcgtcgggacgcgactgctgactaaaaaaggcggcgatattaaagatttcccggatctgaaaggcaaagcggtcgtcgtcacctccgggacgacctctgaaattctgctgcataagcttaacgaagagcaaaagatggggatgcgtattattagcgcgaaagaccacggtgactcgttccgcaccctggaaagcggtcgcgccgtcgcctttatgatggatgacgcgctgctggccggcgagcgcgccaaagccaagaaaccggataactgggagattgtcggtaaaccgcagtcccaggaagcctacggctgtatgctgcgtaaaaacgaccctgagtttaaaaagctgatggacgataccatcgctcaggcgcaaacctccggcgaagcggaaaagtggtttgataagtggtttaaaaatccgatcccaccgaaaaacctgaacatgaatttcgagttgtctgacgagatgaaagccctgttcaaagcaccgaatgataaagcgcttaactaa

SEQ ID NO: 369261 - DNA, 1590 bp, Salmonella enterica
atgactcgccccagccaaaactggacgaataacagcaatagtggactaaaaatggcatttgcctcgttaattgaacgccagcgtattcgcctgctgctggcgttattattcggcgcctgcggaacactggctttctctccgtatgacgtctggcccgcagcgatagtgtcgcttatcgggctgcaggccttaacgtttaatcgccgcccgctccagtctgccgccatcggctattgctggggactcggacttttcggtagcgggattaactgggtttatgtcagtatcgcgcagtttggcggcatgccgggcccggttaacgtttttctggtggtgctgcttgcagcttatctctcgctgtataccggactgtttgccgggattttgtcgcgcctgtggccaaaaaccaactggctgcgcgtcgctatcgccgcgcctgcaatatggcaaatcaccgaatttttacgcggctgggtgctgaccggcttcccctggctgcaatttggctatagtcaggtcgacggcccgctaaaaggcctggcgccggtaatgggcgtcgaagcgatcaacttcctgctgatgatggtcagcggcctgttagcgctggcactggcgacgcggaactggcgtccgctggctgtcgccgtgattctgtttgctttgccctttccgctacgttatatccagtggtttacgctggaaccggccaaagcgacccaggtatcgctggtgcagggcgatattccgcagtcgctgaagtgggacgaaaaccagctactgaatacgctaaaaatttatctcaacgaaacccgcccagagttaggcaaatcacagattattatctggcctgagtcggcgattccggatctcgaaatcaatcagcagcccttccttcgttcgctggacgagatgttacgcgaaaaaaatagcacgctgatcaccggtattgtcgatgcgcgtctcaataaacagaatcgatacgacacctacaatacgattattacgttgggcaaggataatccatacagttatgactcgcccaatcgctacaataaaaatcaccttgtaccctttggcgagttcgttccgctggagtctatcctgcgtccgctggcgccgttcttcgatctgcccatgtcctcctttagccgcggcccttatatccagccgcagttacatgcgcacgactataagctgacggcggcaatctgttatgaaattattcttggcgaacaggtgcgggataacttccgcccggacaccgactatctgctgacgatttctaacgacgcctggtttggtaagtccattggcccgtggcaacatttccagatggcgcggatgcgttcgctggagctggcgcgtccgttgctgcgcagtactaataacggtattacggcggtgattggccctcagggcgagattcaggcgatgatcccgcagttcacacgccaggtactgaccaccaatgtcacgccaaccacggggttaactccctatgcccgtaccggcaactggccgctatgggtactgaccgcgctgtttgcttttggcgcggtagtgatgagtctgcgacaacgacggaaataa

SEQ ID NO: 369262 - DNA, 879 bp, Salmonella enterica
atgagcgacgacaattcacacagtagtgacacagtaaacagtaaaaagggatttttttccctgctactcagccagcttttccacggtgaacctaaaaaccgtgatgagttgctggcgctgatccgtgattccgggcagaacgagcttatcgatgaagatacgcgcgatatgctcgaaggcgtaatggacatcgccgaccagcgcgttcgcgatattatgatcccgcgctcccagatgattaccctgaaacgcaaccagacgctggacgaatgtctcgatgttatcatcgagtccgcccactcgcgttttccggtgatcagcgaagataaagatcacattgaagggattctgatggccaaagatttgctgccgtttatgcgcagcgatgccgaagccttcagcatggacaaagtgttacgcaccgcggttgtcgtaccggaaagcaaacgggttgaccgtatgctcaaggaattccgctcccagcgctaccatatggccatcgttatcgatgagtttggcggcgtttccggccttgtgactatcgaagacatcctcgaactgattgtcggtgaaattgaagatgagtatgacgaagaagacgatatcgacttccgtcagcttagccgccatacctggacgattcgcgcgctggcgtcgattgaagacttcaatgacgctttcggcacccacttcagcgatgaagaggtcgataccatcggcgggctggtgatgcaggcgttcggccatttaccggcccgcggcgaaaccattgacattgatggttaccagttcaaagtggcgatggccgatagtcgtcgtattattcaggtgcatgtcaggatcccggatgactcgccccagccaaaactggacgaataa

SEQ ID NO: 369263 - DNA, 474 bp, Salmonella enterica
atgagccaggtgatcctcgatttacagttggcctgtgaaaaccacgcgggcctgccggatgaagctcagtttcaacgctggctggacggcgttattccgcagtttcaggaagaggcggaagtcacaatccgtctggtggatgagaccgaaagccacgaccttaatctgacgtaccgcgggaaagataaacccactaatgttctctccttcccgtttgaagcgccccccggtattgaaatgccgctactgggcgatctgattatttgccgtcaggtcgtggagcaggaagcgcaggaacagagcaagccgctggaagcgcactgggcgcacatggtcgtgcacggtagcctgcatttgctgggttacgatcatatcgacgatgacgaagcggaagagatggagtctctcgaaacggagattatgcttgctatgggctatgaggatccgtacattgccgagaagattgcagaatag

SEQ ID NO: 369264 - DNA, 1047 bp, Salmonella enterica
ttgaatatagacactcgcgaaattacccttgagcccgcagacaacgcccgtctgttgagcctttgcgggccgtttgatgacaatattaaacagctcgaacgtcgtctcggtattgaaatcaaccgccgtgacaatcactttaaactgaccggtcgtccgatttgcgtgaccgcggcgacagatattttgcgaagtctgtatgtcgataccgcaccgatgcgcggccagactcaggatatcgaaccggaacaaattcatctggcgatcaaagaagcgcgggtgctggaacagagcgcggaaagcgtgcctgactatggcaaagcgatcaatatcaaaaccaagcgcggcgtgattaaaccgcgtaccccgaaccaggcgcagtacatcgccaatattctcgatcatgatattacctttggcgtcggcccggcgggtaccggtaaaacgtatcttgcggtcgccgctgcggtagacgccctggagcgccaggagattcgccgtattctactgacccgtccggcggtggaagcgggcgaaaaactcggctttctgccaggcgatttaagtcagaaggtggacccgtacctgcgtccgctgtatgacgcgctgttcgaaatgctcggctttgaaaaagtcgagaagctgattgaacgcaatgtgattgaagtcgcgccgctggcctatatgcgcggacgcacattaaacgacgcctttatcattctggatgaaagccagaacaccactatcgaacagatgaagatgttcctgacacgtatcggctttaactcgaaagcggtgatcaccggcgacgtgacgcagattgacctgccacgcaacaccaaatccggcttgcgtcatgctattgaagtgctggcggaagtcgatgaaatcagctttaacttcttccacagcgaagacgtggtgcgccatccggtcgttgcccgcattgtgaacgcctatgaagcctgggaagaggcagaacaaaaacgcaaagcggcgttggcggcggagcgtaagcgtgaagcccaggagcaggaacagaaatga

SEQ ID NO: 369265 - DNA, 1425 bp, Salmonella enterica
atgactaaaaaactccatattaaaacctggggctgtcagatgaacgagtacgattcatcgaagatggccgatctgctggacgccacccacggctatcaactgaccgacgtggcggaagaggcggatgtgctgctgttgaatacctgctcaatccgcgagaaggctcaggaaaaagtcttccatcaattaggtcgctggagactgttaaaagagaaaaatcccgatctgattattggcgtcggcggctgcgtggcttcccaggaaggcgagcacattcgtcaacgcgcccattacgtggacattatttttggcccgcaaaccttacaccgcctgccggagatgattaactccgtgcgtggcgaccgcagcccggtggtcgatatcagcttcccggaaatcgagaagttcgaccgtttgccggaaccgcgcgcagaaggcccgaccgctttcgtttctatcatggaaggctgcaataaatattgtacttactgtgtggtaccgtatacccgcggtgaagaagtcagccgtccctcagacgatatcctgttcgaaatcgcccagttagcggcgcagggcgtgcgtgaggtcaacctgctgggccagaacgttaacgcctggcgcggagaaaactacgacggcaccaccggtacctttgccgatctgctgcgtctggttgccgccatcgacggcattgaccgtattcgctttaccaccagccatccgattgagttcaccgacgatattatcgaggtgtaccgcgatacgccggagctggtcagtttcctgcatctgccggtacagagcggttccgatcgcgtgttgaatctgatggggcgcacccacactgcgctggaatataaagcaatcatccgtaaactgcgcgcggctcggccggacattcagataagctctgactttatcgtcggtttccctggcgaaactaacgatgatttcgaaaaaaccatgaagcttatcgctgacgtcaactttgatatgagctacagctttatcttctctgcgcgtccgggaacgccggctgccgatatggttgatgacgtaccggaagaagagaagaagcagcgtctgtatattctgcaagagcgtatcaatcagcaggcgatggcatggagccgccgtatgctcggcacgacacagcgcattctggtggaaggcacgtcacgtaaaaacattatggaactgtctggccgtaccgaaaacaatcgggtggtgaactttgaaggcacgccggagatgattggtaagtttgtcgatgtggaaattactgacgtctatccgaactccctgcgcggaaaagtggtgcgtaccgaagatgaaatgggtctgcgcgtcgccgaaacaccggagtccgtcattgcccgtacccgtaaagaaaatgagctgggcgtaggattctaccagccttaa

SEQ ID NO: 369266 - DNA, 1176 bp, Salmonella enterica
atgacaaatcaaccaacggaaattgccattgtcggcgggggaatggtcggcggcgcgctggcgctgggtctggcgcagcaagggtttacggtgatggtaatagaacatgccgcgcctgcgccgtttgtggctgacagccagcctgacgtgcggatttcggccattagcgcggcatccgtggcgctgctcaaggggctgggcgtttgggaggcggtgcagggaatgcgtagccatccttatcggcgactggagacctgggagtgggaaaacgcccatgtggtgttcgacgccgctgaactcaagctgccgctgttaggctatatggtagagaacaacgtcctgcaacaggcgctgtggcaggcgctggaagcgcaccccggcgtgacgctgcgcgttccggcttcactggcggcattgcaccgccgccacgatggttatgcgctggaactggccgacggcgaatgggtaacgccgaagttagtgattggcgccgacggcgcgaattcgcaggttcggcaaatggcgggaattggcattcatgcctggcaatatgcgcagtcgtgtatgcttatcaccgtcaagtgtgaaaatgcgccaggcgacagcacctggcagcagtttacgccaacggggccgcgcgcttttttgccgctgttcgacgattgggcgtcgctggtgtggtatgacgctccggcacgtattcgccagctacagagtttatcgatgacgcaattgcaggtggaaattaaccagcactttccggcgcgtctgggggcggtgatgcctgtcgcggcgggcgcgtttccgctaacccgtcgtcacgcgttgcagtatgcgcaaccggggctggcgctggtaggcgacgcggcgcataccattcatccgctggccgggcagggcgtcaacctggggtatcgggatgttgatgcgttgattgatgtgctggcgagtgcccgtagctatggcgagtcctgggccagtcattcggtgttgaaacgctatcagacgcggcgcatggcagataattttatgatgcaaagtggaatggatctgttttatgccgggttcagcaatgaactgccgccactgcgtattttacgcaatatggggctgatggcggcgcagcgcgcaggcgtgctaaaacgtcaggcgctgaagtatgcgttgggattgtaa

SEQ ID NO: 369267 - DNA, 525 bp, Salmonella enterica
atggtcgtcttgctctgcgctttcaccttcattgatatcacggccagcgccgcctggttgattattttgggtctggtttaccccgtggcagtgtcaatgaggctacatatactgcaccagaaaaaggcggtcatgctacgccagaatagtgcggaatggatagtgtatctgccagggatccctgtgcaagaaaaacaaagcgcgctgattaatgtcgcgttttcctcgaaaagggcgctgcgtggattctatattcgcgctctgtccagcaaagtcattcttcacatcatcactttttatattctgtggtttgatgtccaacatgcaacactgacgtggtatcggattctcgccgcattaatcaccctggcgattctggtaaaatcaatgagttccacattactgatgctacataaagtagtacgttgccaatacaacgtatgcacaattgaaatggcatcaccttggtatgaaattgatttcaaagggaaattaggtttatgtgctttatttgcagtaaagtaa

SEQ ID NO: 369268 - DNA, 1665 bp, Salmonella enterica
atgtgttctattttcggcgtattcgatatcaaaacagatgcagcggaactgcgtaaaaaagcccttgaactgtcacgcctgatgcgccatcgcggcccggactggtccggcatctacgcttgcgataacgcgattctcgcacatgaacgcttgtcgattgttgatgttaacgctggcgcccagcccctgtataacgccagaaaaacccacgtactggcggtgaacggtgaaatttataaccatcagacgttacgcgcggagtatggcgatcgttacgcgttccagacaggctccgactgcgaagttattctcgcgctgtatcaggaaaaagggccggatttccttgacgatttacaggggatgttcgccttcgccctgtatgacagcgaaaaagacgcttatctgattggtcgtgaccatatcggtattattccgctctatatgggctatgacgaattcggcaacttctacgtagcgtcagaaatgaaagcgctgaccccggtctgccgcaccattaaagagttcccggcgggcagctacctgtggagcaaagacggcgaaattcgtcagtactatcagcgcgactggttcgattacgatgcggtaaaagacaacgtcaccggcaaaaacgcgctgcgccaggcgctggaagaatccgtgaaaagccacctgatgtccgacgtgccctatggcgtgctgctctccggcggtctggactcgtcggttatttcggcaatcaccaaaaaattcgccgcccgtcgcgtcgaagatcaggagcgctccgaagcctggtggccacagttgcactcttttgcggtcggtctggaaggttcgcctgacctgaaggcggcccaggaagtggctaaccacctcggcaccgtgcaccatgaaattcacttcaccgtgcaggaaggccttgatgccattcgtgatgttatctatcacattgaaacctatgacgtgaccactatccgcgcctcaacgccgatgtatctgatgtcgcgtaagatcaaagcgatgggcatcaaaatggtgctctccggcgaaggttccgatgaggtgtttggcggctacctgtacttccataaagcgccgaacgccaaagagttacatgaagagacggtccgtaagctacaggcgctgcatatgtatgactgcgcccgcgccaacaaagcgatgtccgcctggggcgtggaagcgcgcgtaccgttcctggataaaaaattcctcgacgtggcgatgcgtatcaacccacaggataaaatgtgcggcaacggcaagatggaaaaacacgtgctgcgcgagtgcttcgagtcttatctgccagcaagcgtcgcgtggcgtcagaaagagcagttctctgacggcgtaggctacagctggatcgatacgctgaaagaagtgacggcgaaacagatttccgatcaacaactggaaaccgcccgcttccgctttccatacaacacgccgtcgtctaaagaggcgtacttgtaccgggaaatttttgaagaattgttcccggtgccgagcgcggcggaatgcgtacccggcggcccgtccgtggcctgttcttccgccaaagccattgagtgggatgaagcattcaaaacgatggatgacccgtcaggccgcgcggtcggcgtgcatcagtcggcgtaccagtaa

SEQ ID NO: 369269 - DNA, 753 bp, Salmonella enterica
atgaccatcaagaatgtaatctgcgatatcgacggcgtgctgatgcacgacaacgtagccgtacccggtgcggcggaatttctgacggggattctggaaaaaggtctgccgctggtgctgctgaccaattacccgtcgcaaaccggccaggatctggcgaaccgttttgctaccgctggcgttaacgtgccggacagcgtgttttatacgtcagcaatggcgacagccgattttctgcgccgtcaggaaggtaaaaaagcgtatgtcgtgggcgaaggcgcgcttattcacgagctctataaagcgggttttaccattaccgatgtgaaccctgattttgtcatcgttggagaaacccgctcctacaactgggacatgatgcataaagcagcatttttcgtcgccaatggcgcacgctttatcgctaccaacccggatactcacggtcgcggcttttatccggcctgcggcgcgctgtgcgcaggcattgaaaaaatttccggccggaagccgttttatgtcggcaaacccagcccgtggatcatccgcgcggcgttaaacaaaatgcaggcgcactcggaagagaccgttatcgtcggcgacaacctgcgcaccgacattctggcggggttccaggccggtctggagaccattctggtgctttcaggcgtatcaacaatcaatgatattgacagtatgccgttccgcccaagctggatttacccttccgtcgccgagatagacgttatctaa

SEQ ID NO: 369270 - DNA, 1221 bp, Salmonella enterica
atgacaccaggcggacaagctcagataggtaacgttgatctcgtaaaacagcttaacagcgcggccgtttaccgcctgattgaccagcatggtcctatctcgcgcatacaaattgccgagcaaagccagcttgctcccgccagcgtaacgaaaattacgcgtcaactcattgaacgcgggctgatcaaagaagtcgatcagcaggcctctaccggaggccgccgcgctatctctatcgtcacggaaacccgtaacttccacgccattggcgttcgcctgggccgtcatgacaccactttaacgctctacgatctgagcagtaaagtggtcgctgaggagcattatccgctaccggagcgcacccaggagacgctggaacatgcgctgctcaacaccatcgccgtctttattgatagctgtcagcgtaaaattcgtgaattgatcgctatctcggtgatcctgccagggcttgtcgatccggaaagcggcgtgattcgttacatgccgcacattcaggttgaaaactggggactggtcgaagcgctggaaaaacggtttcacgttacctgtttcgtgggacacgatatccgtagcctggcgctggcggaacactacttcggcgccagtcaggattgcgaggactcgattctggtgcgcgttcatcgtggtacaggcgccgggattatctccaacggacgcatcttcattggccgtaacggcaacgtcggtgaaattgggcatattcaggtggagccgctgggcgagcgctgccactgcggtaatttcggctgtctggaaaccattgccgccaatgcggcgattgaacaacgggtgctgaatttgcttaaacaagggtatcaaagccgtgttccgcttgacgactgcacgattaaaaccatctgtaaggcggcaaaccggggcgacagcctggcctcggaagtcattgagcatgttggtcgccatttgggcaaaacgatcgccattgctatcaacctgtttaacccgcaaaaaatcgtcattgccggcgagatcattgaagccgataaagtcctgttgcccgctatcgaaagctgtatcaatacgcaggcgttaaaggcatttcgcaaaaatttgccggtggtacgctccacgctggatcaccgttctgctatcggcgcatttgccttagttaaacgcgccatgctcaacggaacattgctgcaacgtttgctggaaagttga

SEQ ID NO: 369271 - DNA, 1215 bp, Salmonella enterica
atgttgtctccgccccgccagtcaatgcggggcggtaaatttttgatatcgggggtcggaatgtatgctttaacccagggccggatctttaccggtcacgaaattcttgatgaccatgcgcttgttgtcgctaatggcctgattgaccgcgtttgtccgatggccgaactgccgccgggaatagaacaacgctcattgaatggggccattctctcccccggttttattgatgtgcagctaaacggctgcggcggcgtgcagtttaacgataccgcagaagccgtcagcgttgaaacgctggaaattatgcagaaagccaatgaaaaatcgggctgtactaactttctgccaacgcttatcactaccagcgacgaattgatgaaacagggcattcgcgtcatgcgcgaatacctggaaaaacatccgcaccaggcgctgggtctccacctggaaggcccctggcttaatctggtaaaaaaaggcacccataatcctgatttcgtgcgtaaaccagacgctgcgctggtcgatttcttatgcgataatgccgacgtcatcaccaaagtcactctcgcgccggaaatggtgcctgctgacgtaatcgctaaactggcgaatgcgggcattgtggtttccgcaggtcactccaacgcgacgttaaaagaggcgaaagcaggcttccgcgccgggattacttttgcgactcacctgtttaacgcgatgccgtacattacagggcgtgagccgggccttgctggcgctgttctggacgaagcggatatttattgcggcgttatcgccgatggtctgcatgtcgactacgccaacattcgcaatgccaaacgccttaaaggcgacaaactttgtctggtgacagacgccaccgcaccggcgggggccaatattgagcagttcattttcgcaggtaaaacaatatactaccgcaatggactgtgtgtggatgaaaacggtacgttgagcggttcgtccttaaccatgattgaaggcgtacgcaacctggtcgcgcattgcggcatcgcgctggatgaagtgctgcgcatggcaacgctctatccggcacgcgctatcggcgttgataagcatctcggtagcattgcgccgggtaaagtcgccaacctgaccgcgttcacccacgattttaaaattatcaagaccatcgttaatggtgacgaggtcgttgacttgagtaagtga

SEQ ID NO: 369272 - DNA, 801 bp, Salmonella enterica
atgagactgatccccctgagtaccgcagaacaggttggcaaatgggccgctcgccatatcgttaaccgtattaatgcgttcaaaccgaccgccgatcgtccgtttgtccttggactgcctaccggcggcacgccgctaacggcgtacaaagcgctggttgagatgcacaaagcgggcgaggtcagctttaagcatgtggtcacctttaatatggacgaatatgttggcctgccgaaagagcacccggaaagctaccacagctttatgcatcgtaactttttcgatcacgttgatattccagcagaaaacatcaatcttctcaacggtaacgcaccggatatcgatgcggaatgccgtcaatatgaagaaaaaattcgttcttacggtaaaatccatctgtttatgggcggcgtcggcaacgacggtcacatcgcctttaacgaaccggcgtcttccctggcttcccgtacccgtatcaaaacgttaacccatgatactcgcgtagcgaactcccgcttctttgacggtgacgtaaaccaggtgccgaaatacgcgctgacggtaggcgtaggcacgctgctggatgcggaagaagtgatgattctggtgctgggccatcagaaagcccaggcgctgcaggcggcggttgaaggcaacgtcaaccacatgtggaccattagctgcctgcaactccatccgaaagcggttgtggtatgcgatgagccgtccacaatggaacttaaagttaaaacattgaaatatttcaatgaattagaagcagaaaatattaaaggtctgtaa

SEQ ID NO: 369273 - DNA, 1953 bp, Salmonella enterica
atgaatattttaggttttttccagcggctgggtagggcgttgcagctccctatcgccgtgttgccggtggcagcgttgttgctgcgattcggccaaccagatttgctgaatatgccgtttatcgcgcaagcgggcgggtctattttcgataacctggcgctggttttcgctatcggcgtggcctccagttggtctaaagatagcgcgggcgcggcagcactggcgggagccgtgggttacttcgtcatgaccaaagcgatggtgacgattaacccggaaatcaacatgggcgtgctggcggggattattaccggtctggtcggcggcgcggtttataatcgttggtctggtatcaaactgcctgattttctcagtttcttcggtggaaaacgttttgtgccgatcgcaacgggctttttctgtctggtgctggccgctattttcggttacgtctggccgccggtacagcatggcatccatgcgggcggtgaatggatcgtttccgcaggcgcgctgggttccggtatctttggcttcatcaaccgtctgctgatccccaccggtctgcatcaggtactgaacaccatcgcctggttccagattggcgaattcaccaatgccgcaggcactgtattccacggcgacatcaaccgcttctatgctggcgacggcacggcggggatgtttatgtccggcttcttcccgatcatgatgtttggtctgccgggcgccgctctggcgatgtatttcgccgcgccgaaagaacgtcgtccgatggtgggcggtatgctgctgtctgtcgcgatcaccgcgtttctgaccggcgtaaccgagccgctggaattcctgtttatgttcctggcgccgctgctgtacctcctgcacgccattttgactggtatcagcctgttcgtcgcgacgttgctgggtatccatgcgggcttctctttctcggcaggcgcgatcgactatgttctgatgtataacctgccagcggccagcaataacgtctggatgttgctggtgatgggcgttgtattctttatcatctacttcctgctgttcagcgcggttattcgtatgtttaacctgaaaacgccgggccgcgaagataaagttgatgagatggtaacggaagaagccaacagcaacaccgaagaagggttaacgcaactggcgaccagctatattgctgcggttggcggtacggacaacctgaaagcgatcgatgcgtgtattacccgtctgcgcctgaccgtgaatgactctgctcgcgttaacgatgcggcctgcaaacgcctcggcgcttccggggtggttaaactgaacaaacagaccattcaggttattgtcggcgcgaaagcagaatcgattggcgatgaaatgaagaaagtggtggcgcgggggccggtcgcggcagcgtctgctgatgcggctcacgttgcaacacctgctccggcggccaaaccccaggcggtgccgaatgcggtgactatcgctgaactggtctctccgattaccggtgaggtagtggcgctggatcaggtaccggatgaagctttcgccagcaaagcggtcggcgacggcgtggcggtgaaacccaccgataaaaccgtggtttctccggcggcgggtactatcgtgaaaatcttcaacactaaccacgcgttctgtctggaaaccgaaaaaggcgcggagatcgttgtccatatgggtatcgataccgtcgcgctgaacggtcagggctttaagcgtctggtagaagagggtgcggaagtcacggcgggtcagccggtgctggaactggatctggacttcctgaatgccaatgcgcgttccatgataagcccggttgtttgcagcaacagcgatgacttcagcgctctggtcatcaaagcggatggtcacgtggtggcgggtcaaacgccactgtacgagatcaagagcaaataa

SEQ ID NO: 369274 - DNA, 1668 bp, Salmonella enterica
atgagtgaggctgaagcccgcccgactaactttattcgtcagattattgatgaagatctggcgagtggtaaacataccactgtccatacccgttttccgccggagccgaatggctatctgcacatcggccacgcgaaatctatctgcctgaactttggcatcgcgcaagattatcagggccagtgcaacctgcgtttcgatgacaccaacccggtaaaagaagatatcgagtacgttgattcgatcaaaaacgacgtcgagtggttaggctttcactggtctggcgatattcgctactcctccgattactttgaccaactgcacgcctatgcggtcgagctaatcaataaaggcctggcctacgttgatgagctgacgccggagcagatccgtgaataccgcggtacgctgaccgcgccgggtaaaaacagcccgttccgcgatcgcagcgtggaagagaacctcgcgctatttgaaaaaatgcgtaccggcggttttgaagagggtaaagcctgtctgcgcgctaaaatcgacatggcgtcgccgtttatcgtgatgcgcgatccggtgctgtaccgcattaaatttgctgaacaccaccagaccggcaacaagtggtgcatctacccgatgtacgactttactcactgcatcagcgatgcgctggaaggcattactcattctctgtgtacgctggagttccaggataaccgtcgtctgtacgactgggtgctggacaacatcaccattccggttcacccgcgccagtacgaattctcgcgcctgaatctggaatacaccgtgatgtccaagcgtaagctgaacctgctggtgaccgacaaacacgtcgaaggttgggacgatccgcgtatgccgactatttccggtctgcgccgtcgcggctataccgcagcttctattcgtgagttctgcaaacgcatcggcgtcaccaagcaggacaacaccattgagatggcgtcgctggaatcctgcattcgcgaagatctgaacgaaaacgcgccgcgcgcgatggcggtaatcgatccggtaaaactggttatcgaaaactacccgcagggcgagagcgaaatggttaccatgcctaaccatccgaataaaccggagatgggcagccgtgaagtgccgtttagcggtgagatctggatcgatcgcgcagatttccgcgaagaagcgaacaagcagtacaagcgtctggtgatgggcaaagaagtgcgtctgcgtaatgcctacgtcattaaagcggagcgcgtagagaaggatgccgaagggaatatcaccaccatcttctgtacctatgatgccgatacgctgagtaaagatccggctgacgggcgtaaagtgaaaggcgtaatccactgggttagcgcagcacatgcgttgccgattgaaattcgtctctacgaccgtctgttcagcgtgccgaatccaggtgccgcggaggacttcctgtctgttatcaaccccgaatcattagtgattaagcagggttatggtgagccgtcgctgaaagcggcggtagcaggaaaagctttccagtttgaacgtgaaggctacttctgcctcgacagccgctatgcaacggccgataagctggtctttaaccgcaccgtgggcctgcgtgatacctgggcgaaagcgggcgagtaa

SEQ ID NO: 369275 - DNA, 1416 bp, Salmonella enterica
atgaaaatcaaaactcgcttcgcgcctagcccgacaggttatctgcacgtcggcggcgcgcgtactgctctttattcctggcttttcgcacgtcaccacggcggtgaattcgtgctgcgtattgaagacaccgatcttgagcgttccacgccggaagccattgaagccatcatggatggtatgaactggctgaacctggaatgggacgaaggcccatatttccagaccaaacgttttgatcgctataacgcggtgattgacgagatgctggaggcgggaacagcctataaatgctactgctctaaagagcgtctggagcaactgcgtgaagagcagatggcgaaaggcgagaagccgcgttatgacgggcgttgccgtcacagttacgaacatcatgccgacgatgagccatgcgtggtgcgctttgctaacccgcaggacggttccgttatttttgatgatcagatccgtggcccgatcgaattcagcaatcaggaactggacgatctgatcattcgtcgtaccgacggttcgccgacctacaacttctgtgtggtggtggacgactgggatatggaaattacccatgtgattcgtggcgaagaccatatcaacaatactccgcgccagattaacattttgaaagcgttaaacgcgccggtgccgatgtacgcgcatgtgtcgatgattaacggcgacgacggtaaaaagctgtctaaacgtcacggtgcggtgagcgtgatgcagtatcgcgatgacggttatctgccggaagcgttgctgaactatctggtgcgtctgggctggtccagcggcgatcaggaaatcttcactcgcgaagagatgatcaagctgttctccctcggtgcggtgagcaagtctgcgagcgcgttcaacaccgataaactgctgtggctgaaccaccactatatcaatacgctggcgccggaatatgtggcgacgcatttgcagtggcatattgagcaggaaaatatcgacacccgtaacggcccgcagcttgctgaactggtgaagttgctgggcgagcgctgcaagactctgaaagagatggcgcagagctgccgctacttctatgaagacttcagcgagtttgacgccgatgcggcgaaaaaacacctccgcccggtagcgcgtcagccgctggaagtggtgcgcgacaagctgtcggcgattacggactggtcagcagaaaacgtccaccacgcgattcaggccacggcggatgagctggaagtggggatgggtaaagtggggatgccgctgcgtgtggctgtgaccggtgccgggcagtcgcctgcgctggatgtcaccgtacatgcgattggtaaaacccgcagcattgagcgcatcaacaaagcgctgggctttatcgccgagcgtgaaagccagcagtaa

SEQ ID NO: 369276 - DNA, 372 bp, Salmonella enterica
atgaccactgaagagctggctgaatgcctcggcgtggccagacaaaccgtcaatcgctggatcagagaacaacactggaaaaccgaaaaatttcccggcgtcaaaggcggacgcgcaagactcatccatattgatgccagcgtgcgggagtttattctcaatattccggcttttcgcaaactgcctgcgttttatcaggcggaagaggctttcgcagaatatgcgaacgcggcgcacagtcacgcttatcgacaaattattgatgccgttgaaaatatgtctgctcaggaacaggaaaaactggcgctgtttttatcgcgggaaggtattcgcggatttctgacgcgtttaggtatcaatgaggcggactaa

SEQ ID NO: 369277 - DNA, 363 bp, Salmonella enterica
atgttcaaggaacggatgacgccagaagaactcgctaatctcaccggttacagccgacaaaccatcaataaatgggtacggaaagaaggctgggcaacatcgcccaaacctggcgtccagggcggtaaagcccgtctggttcatgtaaacgaacaggttcgtgaatatatccgcagcgctgaacgttcagttgaccatcacgcagacacattcacgcctgccagcaacgcatcgcttgaagcgctgctcatgacgctcgccaaagagatgacctcatccgagcagaaacagtttacctctctcctcgttcgtgaagggattaccggtttgttacaacgcttagggatacgcgatagcaaataa

SEQ ID NO: 369278 - DNA, 2190 bp, Salmonella enterica
atgccggataagtgtaacgtattaaaaaatataaaaatatttttactggccttctgcctgaccgttccggctattctgctatctcgtctcatttctccccgcgccacaattgattccagctatatctttctggcctggctaccgctctgcgtcatgttttccgtgctgtttttatttggccgccgtggcgtcgcgccgatggtaggcggaatgatgttgactaatgaatggaattttcatttacctctgccacaggcgatggtgctgctattttgccagacgtttcccgtgttgctggtttgcgctatcgtacgctggcagctgggcgcgcgctggcgctacggaatacccaaccaaggcatctggctacgcgttttctggttagggttaatgacgccgtttggcataaaaatcagtatgcatctggcggggcactacctggctttcccggtgacaatctctaccttctttggcaccggcaccgctattttctcgattgttgatttattgagtctgatttctgccgcgcttatttttaccctctttttctattatccgctgcggatgatagtcagcccgcactatattcgtattttctggcggagggatgtcgctccttatctcgccaaagaaaaacgcctgtttacgcttctctggtttgccactctggcgacgctattagcggtgctgtgtacgcctttcgagacaaagtatattgctggctatctggtgccagttctgttcattggatttaccatcggcgtggggaaaatcagctatccgctgttgaattttagttgggctctcactgcgctattcctgcttagctataaccgcaattttctgcagggcgtgggctcagaatattcgctggcatttatcctttcagttctcatttcttttagtatttgtttgttgtacatggcgcggattaatcagcgtagcgaatggttgaatcgacagtggcactcgcaggcattaaccgatccgttgacgcaactgcctaacctgcgtgcgctggagcagtttcttttacaggatgccgggcaaagcgtgtgttatctacgcatggaaaacctggaatttctgagccgtcattacggtatgcagatgcgcgtgcattgcgaacgcgaggtgtttcgcgtgttgcagccgctgctgctggaaaaggagaaaattttccatctgccgggcagtgagttattgctggtattgacgggaccggagacggaagcccgcctgcaatatatgctcaatgtgcttaataaccgcaaaatttactggaacaataccggtctggacatggaatacggcgcatcgtggggaacattcgatggtcgccaggaaaccttgcaaccgctgttggggcaattaagctggctggcggagcaatcctgttcgcaccgtcgggtgcttgcactgacccagagtattgaagccgcttccgggcagacgacggaacgggtgctgcggttgcagaaaatccgtcaggcgctggagcgcggcgcgctggttttgtatgcgcaacccattcgcgactcgcagggaaaagggtatgacgagattctgacgcggcttcggtgcgacgacggtatcatgatgcccaatcagttcattccgcttatcgcccagtttaacctgagcgtacggtttgatatgcaggtgatggaagcgctcctgcaatggttgtccgcgcatccttcggcggagcagggggcgcgtttctcggttaatttgatgccgctgacgctgctgcaaaaagagacggcgtcgcgcattatgcagctttttaaacgctatggcgtcccgcctgcttcggtcatcatcgaaattactgaagaacaggccttctctcattccgaaatcagtatgcacaatatcaaccagctgcgtaagtttggcctaaaaatcgccattgatgatttcggcaccggctatgcaaactatgaacggctaaaacgcctcaaggcggacatcattaaaatcgacggttgtttcgtaaaagatattctgacggactccctggatgcgatgatcgtgaaatccatcactgatttagcgaaagcgaaatcgttgagcgtcgtggctgagtttgttgaaacgcctgcgcagcgcgatctgctattgcagcttggcgtacacagtttgcagggatatctgattggccgcccgcgcccgttaggtaaataa

SEQ ID NO: 369279 - DNA, 1203 bp, Salmonella enterica
atggaccgcgtccttcattttgtcctggcgcttgccgttgttgcggtactcgcactgctggttagcagcgaccgtaaaaaaattcgcattcgttacgtcattcagttacttgttatcgaagtattactggcctggttcttcctgaactcggatgttggccttggcttcgtaaaaggtttctccgagatgtttgaaaaactgctcggatttgccaacgaagggacaaacttcgtcttcggcagtatgaacgatcaaggtttggcgttcttcttcctgaaagtattgtgcccgatcgtctttatttccgcgttgatcggtattctccagcatatccgcgttctgccagtggtcatccgcgctattggtttcctgttgtccaaagtaaacggtatgggcaaactggagtcttttaacgccgtcagctcgctgatcctcggccagtctgagaactttatcgcttataaagatatcctcggcaaaatgtcccgtaaccgcatgtacaccatggcggcgaccgcaatgtctaccgtttccatgtctatcgtgggcgcgtatatgaccatgctggaccctaaatatgtggtcgcagcgctggttctgaacatgttcagcacctttatcgttctgtcgctgatcaacccctatgtcgttgatgccagcgaagaaaatattcagatgtcgaacctgcatgaaggccaaagtttcttcgaaatgctgggcgagtacattctggcaggttttaaagtggcgattatcgtcgcggcgatgctgatcggcttcatcgcgctgatcgcggcgctgaacgcgctgttcgcaacagttaccggttggttcggctacagcatctctttccagggcattctgggttacatcttctacccggtcgcatgggtaatgggcgtaccgtccagtgaagcgctgcaggtaggaagtatcatggcgaccaaactggtttccaacgaattcgtggcgatgatggatctgcagaaaatcgccgctaccctctctccacgcgctgaaggcattatctccgtcttcctggtgtccttcgcgaacttctcttccatcggtattattgcgggcgcgattaaaggcctgaacgaagagcaaggcaacgtggtttcccgttttggtctgaaactggtttacggttctacgctggtgagcgtactgtccgcctctatcgcggcgctggtactgtaa

SEQ ID NO: 369280 - DNA, 1242 bp, Salmonella enterica
atgactgacaatcgcgtagagaatagcagcggacgggcggcgcgcaagctaaggctcgcattaatgggacctgcgttcattgccgcgattggttatatcgatcctggtaacttcgcgaccaatattcaggccggcgccagctttggctaccagctactctgggtggtggtctgggcgaacctgatggcgatgctgattcaaatcctctcggcaaaactcggaatcgccacgggcaagaacctggcggagcaaattcgcgaccattatccgcgcccggtagtctggttttactgggtacaggcggaaatcatcgcgatggccaccgatttagctgaatttatcggcgcggcaataggttttaagctgatcctgggcgtctctttattacagggcgcggtattgaccggtatcgcgacgtttctgattttaatgttacaacgccgcggtcaaaaaccgcttgaaaaagtcatcggcggtttactgctttttgtcgccgctgcttacattgtggagctgtttttctctcagcctgatatggcgcagcttggcaaaggaatggttatcccggcgctaccgaacccggaagccgtattcttagccgccggcgtgcttggcgcgacgattatgccgcacgtgatttatctgcactcgtcattaacacagcatctgcacggcggaacgcggcaacaacggtactcagcaacgaaatgggatgtcgctattgccatgacgattgccggttttgtcaatctggcaatgatggcgaccgccgcggcggcgtttcattttagcggccacactggcatcgccgacctcgatcaggcatacctgacgctggaaccgttactaagccatgcggcggcaacggtgtttggtcttagtctggtagcggcagggctttcctccaccgtggtagggactctggcggggcaggtggtgatgcaagggtttgtccgttttcacattccgctgtgggtacggcgcagcattaccatgctgccctcatttattgtgattttgatggggctggaccctacccgaattctggtgatgagccaggtgctgctgagttttggtattgcgctggcgctggtgccgctcctgattttcaccagtaacgctacgctaatgggcgagctggtgaacacgcggcgagtaaaacagattggctggataattgtcgtgctggtcgtcgccctgaatatctggttgctggttggaacggtgatgggattgtcataa

SEQ ID NO: 369281 - DNA, 327 bp, Salmonella enterica
atgttcaggtcactgattctggcggcagccttgctggcttttacaccgcttgccgcgaatgcgggcgaaatcaccctgttgccctcaataaaattacagattggcgatcgcgatgattacggtaactactgggacggtggtcgctggcgcgaccgggattactggcacaaccattatgaatggcgtaaaaatcgctggtggcgccatgacaacggctatcatcgcggctgggataagcgtaaagcgtatgaacgcggttatcgggaaggctggcgcgatcgcgacgatcatcgcgggcgaggccggggtcacaaacatcatcactaa

SEQ ID NO: 369282 - DNA, 999 bp, Salmonella enterica
atgatttatcagcccgatgagaatcgttatcacacaatggagtatcgtcgctgcggacgcagcggcgtcaaacttcccgctatttcgctggggttatggcacaacttcggcgatacgacacgggtagaaaatagccgggcgctgctgcaacgcgcgttcgatctgggcattacccactttgatctcgccaataattatgggccgccgccgggctccgcagaatgcaattttggccgcattctgcaggaagattttttaccgtggcgtgatgaattgatcatctccaccaaagcgggctacaccatgtgggatggcccttatggcgactggggttcacggaaataccttatcgccagcctcgatcaaagcctgaaacgtatggggctggagtatgtcgatatcttttatcaccatcgtcccgatcccgaaacgccgcttaaagagacgatgaaagcgttagatcaccttgtgcgccacggcaaagcgttgtacgtggggatctctaactatcctgccgatctggccagacaagctatcgatattctggaggatctcggcacgccttgcctgattcatcagcctaaatattcgctttttgagcgttgggtagaggacgggctgctggcgctgttgcaggaaaaaggcgtcggcagtattgccttctcgccgctggcgggcgggcagctcactgaccgttatctgaatggcattccggaagattcccgcgcggcgagcggaagccgtttccttaaaccagaacagattaccgccgacaaactggaaaaagttcgccggttgaatgaactggccgcgcgacggggccaaaaattgtctcagatggcgctcgcctgggtgctgcgtaacgataacgttacctcggtactgattggcgccagcaaaccgtcgcaaatcgaagacgccgtaggaatgctggccaatcgccgtttttcggcggcggaatgtgcagaaattgacgctattctggagggccggttttag

SEQ ID NO: 369283 - DNA, 1653 bp, Salmonella enterica
atgcaaaacccctataccgtggccgactatttgctggacagactggcaggatgcggcattggccatctttttggcgtaccgggcgattataacttgcagtttcttgaccatgtgattgaccacccgaccctgcgttgggtgggatgcgccaatgagctgaacgccgcttatgccgcggacggctatgcgcgcatgtcgggcgctggagcgctactcaccacctttggcgtgggagaacttagcgctattaacggtatcgcgggcagttacgcggaatatgtcccggtcttgcatatcgtcggcgcgccctgtagcgctgcgcagcagcgtggcgaattgatgcaccataccctcggtgacggcgattttcgtcatttttatcgcatgagtcaggcgatatccgctgccagcgcaatattagatgaacagaacgcctgtttcgagattgaccgcgtgttgggtgaaatgcttgccgcacgcaggccaggatacatcatgttgcccgccgatgtggcgaaaaaaacggccatcccacctacgcaggcgctggcgttgcccgtgcatgaagcgcaaagcggcgtggagacggcttttcgttaccacgcccgtcagtgcctgatgaacagtcggcgtattgcgctattggccgactttcttgccgggcgttttggtttacgaccactgttgcagcgctggatggcggaaacgcccatcgctcatgcgacactactgatggggaaggggctttttgatgaacagcacccgaacttcgttggcacctatagcgctggcgccagcagcaaagaagtgcgtcaggccatagaggacgccgatagggttatctgcgtcggcacccgttttgtcgatacccttacggccggatttacccaacaattaccgacggaacgcacgctggagattcagccttacgcgtcgcgcatcggcgaaacctggttcaacctcccgatggcgcaggcggtgtctacgctgcgcgaactgtgcctggaatgcgcttttgcgccgccgccgacgcgttccgccggacagccagtgcggattgataagggagaactgacccaggaaagcttctggcaaaccttacagcagtatctcaaacccggcgatattatccttgtcgaccaggggaccgccgcctttggcgctgccgcgctgtcgcttcctgacggcgcggaagttgtggtacagccgctgtgggggtctatcggctattccttgcccgccgcgtttggcgcgcaaaccgcctgtcccgatcggcgggtgattctgattatcggcgatggcgcggcgcagctcacgattcaggagatgggctcgatgttacgcgacgggcaggcgccggtcatcctgctgctcaacaatgacggctataccgtagagcgcgccattcacggcgcggcccagcggtataacgacatcgcgagctggaactggacgcagataccaccggcgctaaacgcggcgcaacaggcggagtgctggcgggtgacgcaggctatccaactggcagaggtcctcgaacgtctggcgcgcccacaacgtctgtcatttattgaagtgatgttgccaaaagccgatctgccggaattactgcgtaccgtgacccgggcgctggaagcccgcaacgggggataa

SEQ ID NO: 369284 - DNA, 1236 bp, Salmonella enterica
atgttccacccgcgtgcccgaacgatgctgctgctgtcgctccccgcgctgattattggcgtagcgtcaagcctggttttaatcgctgcgatgaaagtcgcgtcggtttttcagcaatttctttggcaacgactgcccaccagcatcggcatcgcttatgattcgccgttctggatagtgggtatgctcacgctaaccgggatcgtggtgggtttgattatccgttacagtcccggacacgctggccccgatccggccatcgaaccgttaatcagtatgccggtctcgccatctgcgctacccgggctgcttctcgccttaatcatcggccttgctggtggggtaagtttggggccagagcatccgataatgacaataaatatcgcgctggcggcggctttcggctcccgcctgtttccgcgtatcacggcgttagactggacgattctggcctcagcgggcaccatcggcgcgctgttcggcacgcccgtcgccgcagcgctgattttttcgcaaacacttagcggctctaacgatattcccatgtgggatcgcctgtttgcgccgttaatggcggcagcggcggggtcactcaccaccagtctgttctttcatccgcatttttcgttacccatcgcccattacacgcagatgcggctggtggacattgccagcggagcgatcgtcgcggcgatcgccattgccgccgggatggtcgccgtctggtgccttccgcgtctgcatgagttgctgcaccgcctgaaaaatccggtcctgattctcggcattggcggttttatactgggcatcctgggcgtcattggcgggccgcttaccctgtttaaaggcctggacgaaatgcaacaaatggcgtttagccagacgttgggcgcgggagattattttaccttagccgtcgtcaaactcgccgcgctggtcatcgcggcggcgagcggctttcgcggcgggcgcatttttccggctgtgtttatcggcgcggcgctggggctcatgctccatgcccatgttgaggccgtacccgcggcgattaccgtctcctgcgcgattcttggcttagtgctggtagtgacgcgcgacggctggctcagtctgtttatggcggcagtcgtcgtaccggataccaatctgctgccgctgctctgcattgtgatgctccccgcctggctattgctggcgggaaaaccgttgctggccgccaaccgtcacgaaccctaa

SEQ ID NO: 369285 - DNA, 966 bp, Salmonella enterica
atgacaaagtatgctttagtaggagatgtaggcggcacgaatgcgcgtcttgccctgtgtgatatcgccagtggagaaatctcgcaggccaaaacgtattccggcctggattatcccagtcttgaggccgtggtgcgcgtttatctcgatgagcatagcgtcagcgtggaagatggttgtatcgccatagcctgcccgattaccggtgactgggtagcgatgactaaccatacctgggctttttctattgcggaaatgaaaaaaaatctcggctttagccatctggaaatcatcaacgatttcaccgccgtgtcgatggcgatcccgatgctgaaaaaagagcatttaattcagttcggcggcggcgaaccggtagacggcaaacctattgcggtgtatggcgcgggaaccggcttgggcgtggcacatctggtgcatgtggataagcgttggattagccttccgggcgaaggcgggcatgtcgattttgcgcctaatagcgaagaagaagctatgattctggaaatattgcgcgccgaaattggccacgtttccgccgagcgcgtgctgtctggcccggggctggtgaatctttaccgggcgattgttaagtccgacaaccgtctgccggaaaatctgcgcccgaaagatattaccgaacgcgccctggcggatagctgtatcgattgtcgccgcgcgttgtcgctcttttgcgtcatcatggggcgatttggcggcgatctggcgttaaccatggggacatttggcggcgtttatatcgctggcggtattgtcccgcgcttcctggaattttttaaagcgtccggcttccgtggtggctttgaagataaaggccgctttaaagattatgtacacggtattccggtctatctgattgtccatgataaccctggcttgttaggctccggcgcgcatctgcgccagacattaggccatattctataa

SEQ ID NO: 369286 - DNA, 1239 bp, Salmonella enterica
atggctgacttccgccctgaacgtcgctttacgcgtatcgatcgccttccgccctatgtttttaacatcaccgctgaactcaaaatggctgcgcgtcggcgcggtgaagatattattgatttcagtatgggtaatcctgatggcgcaacccctccccacattgtcgaaaaactttgcaccgtcgcgcagcgtccggatacgcacggttattccacgtcccgcggcataccgcgtttacgccgcgcgatttctcactggtatcaggaacgttatgatgtcgatatcgatccggaaaccgaagcgattgtgaccatcggttccaaagagggactggcgcatttaatgctggcgacgctggatcatggcgatacggtactggtgccgaaccccagttacccgattcatatctatggcgccgttatcgccggggcgcaggtgcgttcggttccattggtagagggagtggatttcttcaacgagctggagcgcgctattcgcgaaagttatccgaaaccgaaaatgatgattttgggttttccgtctaaccctacggcccagtgcgtcgaactggaattttttgaaaaagtggtcgctctggctaaacgttatgatgtgctggtggtgcacgatctggcgtatgccgatatcgtgtacgacggctggaaagcgccatccattatgcaggtgcccggcgcgcgcgacgtggcggttgaatttttcacgctgtcgaaaagctataatatggcgggctggcgtattgggtttatggtgggcaataaaaccctggtcagcgcgctggcgcgcattaaaagttatcacgattatggcacctttaccccgcttcaggtggcggctatcgccgctctggaaggcgatcagcagtgcgtgcgcgatatcgccgagcagtataaacgtcgtcgcgatgtgctggtgaaggggctgcatgaggcgggctggatggttgaaatgccgaaagcctcaatgtacgtctgggcgaaaatcccggagcaatatgcggcgatgggatcgcttgagtttgccaagaagctgctgaatgaggcgaaggtttgcgtttctccagggataggctttggtgattatggcgacacccatgtacgctttgcattaatagagaatcgcgaccgcattcgccaggccgtcagagggattaaagcgatgttccgcgccgatggcgtgctgccgtcacatccaaaacccgttgaagcgagcacggagtag

SEQ ID NO: 369287 - DNA, 921 bp, Salmonella enterica
atgtttcctcaaagcaaattttcacgcgcgtttttgcacccgcgctactggctgacgtggtttggcgttggcgtcctctggttactggtgcagcttccctacccggttttgcgttttctgggcacccgcaccggtaaactggcgcgccccttcctgaagcgacgtgagtcaatcgcccagaaaaatattgaactctgttttccgaccctctcccgggaagaaagggaaaaactgatcgccgagaatttccactctcttggcatggcgctgcttgaaacgggcatggcctggttctggcctgataaccgggttcgcaaatggtttgatgtggacgggctggacaaccttacccgtgcgcaggagcaaaatcgcggcgtaatggtcgttggcgtgcattttatgtcgctggaattgggaggccgggtaatgggtctctgccagccgatgatggcgacctatcgtccgcataacaatccgctcatggagtgggtgcagacgcgcggtcgtatgcgctcaaataaagcgatgatcggcagaaacaatctgcgcggcattgtgggcgcgctaaaaaaaggggaagccgtttggtttgctcccgaccaggactacggccctaaaggcagctcctttgcgccatttttcgcggttgaaaacgtcgccaccaccaacggcacctatgtactgtccaggctgtctggcgccgccatgttgaccgttacaatggtaaggaaatccgataactcgggttatcgtctgtatattacccctgaaatggaaggttacccggcagatgaaaatcaagccgctgcctatatgaataaaattattgagaaagagatcatgcgcgccccggagcaatatctctggatccatcgccgtttcaagactcgcccgttgggggaagcgtcactctacatctga

SEQ ID NO: 369288 - DNA, 243 bp, Salmonella enterica
atgatctatttatggacatttcttgcaataagtatacttgccgtgagtggctatatcggtcaggtgatgggggctttttctgcggtttcttcttttacgggaatggttatccttgccgcgctgatttatttactcaatgtatggttgcaggatggcgatgacatcgttagcggattattgctttttctcgcaccggcatgtgggttaattattcgctttatggtgggatacggtaagcgttag

SEQ ID NO: 369289 - DNA, 1392 bp, Salmonella enterica
atgttaacaatattaaaaacagggcaatcggcgcataaagtcccaccggaaaaagtccaggccacatatggtcgatatcgtatacaggcattgttaagcgtatttctgggatatctcgcttactatatagtcagaaacaatttcacattatcgacgccttatttaaaagagcaattggatctcagcgctacgcaaatcggcctgctgagtagctgtatgcttattgcttacggaatcagtaaaggcgtaatgagcagtctggcggataaagccagcccaaaagtcttcatggcgtgcggtctggtactctgcgcgattgttaacgttgggctgggattcagtagcgcattctggatatttgccgctctggtggtcttcaatggcctttttcagggcatgggcgtcggcccctcgtttattactattgcaaactggttccctcgtcgggaacgcggacgcgtaggcgccttctggaatatctcgcataacgttggcggcgggatcgtcgcgcctatcgtcggtgcggcttttgcgatattgggcaacgaacactggcaaagcgccagttatatcgttccggcctgcgtcgccgtcatttttgccttaattgttctggtcttgggaaaaggttcgccacgcgaagaaggtcttccctcactggaacagatgatgccggaagaaaaagtcgtactgaaaacgaagaatacggcaaaagcgccggaaaatatgagcgcatggcaaatcttctgtacttatgtgctgcgcaataaaaatgcctggtatatttcgctggtggatgtcttcgtctatatggtgcggtttggcatgattagctggttgcctatctatctgttgacagtaaaacacttttcaaaagaacagatgagcgtcgcgtttctctttttcgagtgggcggcgattccctccacgctactggcaggctggctgtcagataaactgtttaagggccgcagaatgccgttagccatgatttgcatggcgctgatttttgtctgtctgatcggatactggaaaagtgaatctttgctgatggtaacgattttcgccgccattgtaggttgtctgatttacgtcccgcagttcctcgcgtccgtacagacaatggagatagtccccagctttgccgtaggttccgccgtcggtttacgtgggttcatgagctatattttcggcgcctcgttgggcaccagcctgtttggtgtaatggtggataaacttggctggtacggcggattttatcttctgatgggcggcatcgtgtgctgcattctattctgttacctctcccatcgcggcgcgctggaactggaacgccagcgccagaatgcgttacataatcaggactcactgcagcttgcggacgcgcaataa

SEQ ID NO: 369290 - DNA, 1275 bp, Salmonella enterica
atgaacgggatcacaaatcgacttttctcatgctgtagtcgtttcgccagagtgggcgcttttacgctatggctggcggcaatgttcggttcttgccaggcgtacagccgcgagctggtgatggcaacgaccttttcacccagcgcgaccgcctggattatccagcgctggcagacggagccgggttccgtcatgattcgtacgctcaaccgtaccagcggttctttagagcaattacttgatacggcgaatgcggaaaatgtcgatctgatcctgacgtcatcccccatgctgttgcaacaccttcaggagcaccaaaagctggcgctattagatagcgcgcctgccgccagccagaagctggtgccgcgttctatccgctcaacttcagtggcggtagcggtatccggatttgggctattgatcaaccgttcagcgctcgctgcgcgccatcttccgccgcctgctgactggcaggatatgggcctgcccagttaccagggcgctctattaatgagcagtccgtcacgttcagacacgaatcatttgatggtggagtcgctgttgcagcaaaaaggctggacggcaggatgggcgacgctgctggcaatctcgggtaatttggtcacgatttcctctcgcagtttcggcgtagcggataaaatcaaaagcgggcttggcgttgccgggccggtcattgataactatgctaatttgctacttaacgatcctaatcttgcttttacctatttcccgtattctgcggtgtcgcccacttacgtcgcggtgttgaaaaacagccgtcatgcagacgaagcgcgtgcttttattcattacttattaagtccgaaagggcaaaggatactggctgacgcgaataccggtaagtatcccgtcgcaccgcttagcgccgataatcctcgcgccgcgcaacaacagcgtttgatggcccagccgccgttgaactatcgtctgatcctgaagcgtcagcaactggtacaacgcatgtttgataccgcgatcagttttcgtctcgcgcagcttaaagatgcatggcgagcgttgcatagcgcagaaacgcggcttaaacgccccttacctgaaatcagagccttattgaccagcgtcccggtggatgcggcaagcagcgaggatgaaacctggctggcgcagtttgataataaaagctttgccgaacaaaaaatgatggagtggcagatctggtttctgaacaatcagcggctagcgattcacaaactggaagagctgaaatga

SEQ ID NO: 369291 - DNA, 2007 bp, Salmonella enterica
atgaaggggagattattgcaacggcttcgtcagctcagtatcagcaacagtttacggggtgcatttttaacgggcgcattactgacgctgattgtcagtatggtcagcctttattcctggcatgagcaaagttcgcaggttcgctattcgcttgatgaatattttcctcgcatccactccgcttttttaattgaggggaacctgaatctggctgtggatcaactcaatgaatttttgctggcgccgaacacgacggtacgtttgcagttacgtacgcagattattcagcatctggataagattgagcgtctcagccaggggcttcagcttgctgagcgccggcaactggccgtcattttacaggatagccggaccttgctggcggagctggacaacgccctctacaacatgtttttggtgcgggagaaagtcagtgagctttccgctcgcatcgactggctccatgatgatttcaccacggagctaaattcgctggtacaggattttacctggcagcaagggacgctactcgatcaaattgaggcgaatcagggcgatgcagcgcagtatttgcaacgttcgcgcgaggtgcagaacgagcagcagcaggtatataccctggcgcgaattgaaaatcagattgttgatgacctgcgcgacagattgaatgagctcaagtccggcaataatgacgggatgctggtggagacccatattcgctatctggaaaacctaaaaaaaacggcggatgagaatattcgtgcgctggatgactggcccagtacgatcacgctgcggcaaaccatcgacgaactattggaaatcgggatggtaaaaaataagatgcccgataccatgcgcgattatgttgcggcgcaaaaagccttactggacgccagccgcgccagagaggctacgctagggcgctttcgcacgctgcttgaggcgcagttaggtagtagtcaccagcaaatgcagatgttcaatcaacgcctggaacagattgttcgcgttagcggcgggcttattttagtggcgacgctcctggcattgctgctggcctggggactcaaccactattttatccgttcccggctggtaaagcgttttaccgcgcttaatcaggctgtggtacagatagggctggggagaaccgactcgactatcccggtttacgggcgcgatgagctaggacggatagcccgtttgctacgtcatacgctgggccagctcaatatgcaacgcaggcagcttgaacaagaggtcgccgagcgcaaagagatagaagccgacctgcgcgccatgcaggatgagttgattcagacggcgaaactggcggtagtcggccagaccatgaccacgctggcgcatgaaattaaccagccgctgaatgcgctttcaatgtatttatttacggcgggacgcgcgattgaacaaggtcagagcggacaggcgagaaatacgctcaccaaagcggaagggctcattaaccggattgacgccattatccgttcgctgcggcagtttacccgccgggcggagctggaaacgccattgtatcccgttgatctgcgccaaaccttcgtggcggcatgggagttattagccatgcgtcaccaatcccggcagggagcgctttcactgccaaccgacaccgtatgggttagcggcgatgaagtgcgtattcagcaggttctggtgaatgtgctggcgaatgcgcttgacgcctgttcgcatgatgcggcgatcgcggtgacatggcagacgcagggagaggcgctggaggtttatattgcagataacggccctggctggcctgtggcgctgttgccctctttactcaagccgtttactaccagtaaagctgtcgggttgggtattgggctgtcgattagcgtgtcgctgatggcgcaaatgaagggcgacctgcgtctggcgtcgacgctgacgcgtaacgcttgcgtggtgctgcaattctctgtaacggatgtcgatgatgttgaatga

SEQ ID NO: 369292 - DNA, 1251 bp, Salmonella enterica
atgatgttgaatgatgaatgttctattttgctgattgatgatgacgttgatgtacttgacgcctacacccaaatgcttgagcaggcaggctaccgcgtgcgtggctttacccatcctttcgaggccaaagagtgggtagaagcggattgggaggggatcgttttgagcgatgtgtgtatgccggggtgttccggtatcgatcttatgacgctgtttcatcaggatgacgatcaactgccaatcttattgattaccggacatggcgatgtaccgatggcggttgatgcggtgaaaaagggcgcctgggattttctgcaaaaacccgtcgatccgggcaagctgttgatattaattgaagacgcgctacgccagcgccggtcggtcattgcacggcggcaatattgccagcagacgttacaggttgaactgattgggcgcagcgagtggatgaatcagtttcgacaacggttacaacaactggcggaaacggacattgccgtatggttttacggtgagcatggcactggacgtatgactggcgcccgttatctccatcaactggggcgtaacgcgaaagggccgtttgtacgctatgaactcacgccggagaatgccgggcagttggagacattcatcgaccaggcgcaaggaggtacgctggtgttgagtcatcccgaatatctgacacgcgaacagcagcaccatctggcgcgtttacaaagcctggagcatcggccttttcgtttggtgggcgttggcagcgcttcgctggtggagcaggcggcagctaaccagattgcggccgagctttactactgtttcgccatgacccaaatcgcctgccagtctctttctcagcgaccggatgatatcgaaccgttatttcgccattatcttcgaaaagcctgcctgcggctcaatcatccagtgccggaaatagcgggggaattactgaaaggaataatgcgacgcgcctggccaagcaatgtgcgcgaactggctaatgcggcagagctttttgctgttggcgtgctgccgctggcggaaacggtcaacccgcagttgcttcttcaggagccgaccccgcttgaccggcgcgttgaagagtatgagcgacaaattattaccgaagcattaaatattcatcagggacgaattaatgaagtggcggagtatctgcaaattccccgtaaaaaactttatctgcgcatgaaaaaatatggtctaagtaaagagcattataaattctga

SEQ ID NO: 369293 - DNA, 939 bp, Salmonella enterica
atgaaaaaacatgctattgcagtaatgatgatcgccgtattttctgagtcggtttatgcggagtctaccttatttattccggacgtctctcctgatagcgtcacgacatccctttctgtgggggtgttaaatggtaaatccagggagctggtttatgataccgacaccgggcggaagctgagtcaactggactggaaaataaaaaatgtcgccacgttgcagggggatttatcatgggaaccctattcgttcatgacgctggacgcccgcggctggacgtctttggcgtcgggatcgggtcatatggttgaccatgactggatgagcagtgagcagcctggctggaccgatcgttcaattcatccggacaccagcgccaactatgctaatgaatacgatttgaatgtgaaaggttggttattgcagggcgataactacaaggcgggcgtgacagcgggctatcaggaaacccgttttagctggacggcaagaggcgggtcttatatttatgataatggtcggtatattggtaactttcctcatggcgtgcgcggtataggttatagccagcgtttcgaaatgccctatatcgggctggcgggtgattatcgtattaatgactttgagtgtaatgtactgtttaaatacagcgactgggtaaatgcgcatgataatgacgaacactacatgcgcaaacttaccttccgtgaaaaaacggaaaattcacgatattatggcgcgtctattgacgccggatattatattaccagtaatgcaaaaatctttgctgagttcgcttacagtaaatatgaagaaggtaagggcggtacgcaaatcatagataaaaccagcggtgatacggcgtattttggtggcgatgccgcaggtatagctaataataactatacggttaccgcggggttgcagtaccgcttctag

SEQ ID NO: 369294 - DNA, 501 bp, Salmonella enterica
atggacgaaaagaaactcacagctcttgcggctgaactggctaaaggtcttaaaactgaagccgacctcagtcagttttcccatatgctgacgacattaaccgtcgaaacggcgctcaatgctgagctggctgaccatctcgggcatgagaaaaatgctcctaaaacgagctcaaactcccacaatggctactcattaaaaacggtgctgtatgatggcggcgagatagtgctgaacatgctgcgtgaccgtgaaaatacctttgaactgcagctgattaaggagcatcagacgcgtattacgagatggacagtcagatttatccctttatgccaaaggcatgacatgactacccgcgaaatcatcgccaccttcaaagagatgtacaacgctgatgtgtcgcccatgctgatacttaagatcaccgccgcagtaaaagagttggtcaaaggggcgtcaaaaaatggagtatgccgatccaggactggtcgctggcaatga

SEQ ID NO: 369295 - DNA, 1923 bp, Salmonella enterica
ttggaacacttaaaatacagacctgatatagatggattacgcgcaatagcggttttatctgtggtaatattccattatttcccatcattattgccgggtgggtttgttggagtagatatattctttgtgatatctggataccttataacatcaataatattaaaatctgcatcaaacaaatcattttcataccttgatttctataaaaggagagtgcttagaatatttccagcattatccatagttcttgtatcatgtcttattgttggctgggtttatttattccaggatgattacaaattacttggtaagcatgtttttagcggctcattctttatatcaaactttactctttggagtgagtctggctattttgattcaaagtcataccttaaacctttactacatttgtggtcactgggaattgaagagcaattttatataatatggccagtagttatattgctatgctttagaagcaaaaaccataacagaaacatagtattatcatgcgcaactatatttataattagctatgcgattagcatttttacaatggcatctgatggcggagctaattactactctcccgcatcaagattttgggagttaatggctggagcgattatatccacattgagatttataggaataaacacttcgttatcaaaattaatgtccctgttaggaattatactaatcgcattatcaataaccatgatagatgaaaagatgtcatttcctggatatatagcaataatcccagtacttggcgcctctcttataatagcatctaatggtaatgatttagttgtgtcgaaattgcttagtgttaggcctgttgttttctttggtcttattagctatcctctttatttgtggcattggcctatttattcattctatcgttcaatatttgctggttcaccagactaccatgaattaattcttcttttattatcatcgttctttttggcgatattaacttattatttaattgaaaaaccactgagaaatgccagaaataaatatatcacagcaatattattagcattatcagtatttgggacaggtttaattggcgcatttatttttcatataaatggagttaaagacagggaaatcaataaatcagcaggtgaatatgcttctgttactgacgtgtacaattattataaatatggagaactactccgtggagggatatgccactcagtacaacttactgctgccatatccaatggatgtataaaaaatggcaagcataatatatttatcattggtgattcttatgcggcggctcttttcaatggactttctcattatatagataataaaggttctgattatataataagccaaatgacagatggtaacgctcctcctctatttgttgacggtaaagatgatttacagagaagtgtcatcactctaaacaataatagaattaatgaaattaaacgtgttcagcctgaggtggttctgctgacatggtcagttcgaggaacaaatggagtacatgataaaaagttagcaattgatacgttatcattaaccataaaaaaaattaaagaggcatcccctgactcaaggattattttcattggaccagtcccggaatggaatgcaaatttagttaaaataatatctaactacctgagtgagtttaaaaaaaccccaccattgtatatgacatatggattaaatagtgaaataagcgagtgggactcttactttagtaacaatgttccaaaaatgggaattgaatatatatcagcatacaaagcattatgtaacgaaagtggatgtcttacaagagttggtaatggtcctgattttatcactgccgttgattggggacatttaacaaagcctggttctgatttcctttttaataaaatcggaaataaaataatcaaatag

SEQ ID NO: 369296 - DNA, 255 bp, Salmonella enterica
atgaaaatctctcttgtcgtcctagtttttaacgaagaagacacgataccgattttctatagaacggtacatgagtttaatgaacttgaaaaatataaagttgagattatttttattaatgacggaagtaaagatgtgacagagtcaataattaaaataatagccgtatctgatccactcgtcattccgttttcgtttacacgaaacttcgggaatgatgcaagatgcacaaccattttattaatctttttttaa

SEQ ID NO: 369297 - DNA, 312 bp, Salmonella enterica
atgtatgggatgcatacgcatcaggcgctgacgaacttttccgattttgttatcgctgtatcgttcagcttctatgctaatgcgcgcttcacctttaatgccagcactactgcaattcgctacatgatgtatatgggattcatgggagcactgagcgctgttgttggatggatggctgaccaatgttctttgccaccattggttaccctcatcactttctcggcaattagcctggtatgcggctttatctattccagattctttatcttcagggataaaaatgaaaatctctcttgtcgtcctagtttttaa

SEQ ID NO: 369298 - DNA, 942 bp, Salmonella enterica
atggatagccttaacgacgataaaattaaccggcaaagcagtgacctggaagttgaaagcgaagaaaaacaaagcggtaaagagattgaagtggatgaagatcgtcttccttcccgcgccatggcgattcatgaacatattcgccaggatggtgaaaaagagatggaacgcgatgcgatggctttgctctggtcagccattgccgcaggactttctatgggggcatcactcctggcgaaagggattttccacgtgcagcttgaaggcgttcccggcggctttttactggaaaatctcggctatacctttggttttatcattgtcatcatggcccgccagcaattatttactgaaaataccgttaccgccgtgttgccggtaatgcaaaatcccactctgagtaacgttggcctgctgatgcgcttgtggggcgtagtcttattgggcaaccttattggcaccggggttgcggcgtgggcatttgaatatatgcctatatttgatgaagagacccgcgacgcctttgtcaaaattggtatggaggtcatgaaaaatagcccaacggagatgtttgccaacgcgattatctctggctggatcatcgccacaatggtatggatgtttcctgcagcaggcggggcaaagattgtggtcattattttgatgacctggcttatcgcgctgggcgataccacccatattgtcgtcggttccgttgaaattttgtatttggttttcaacggcacgctgccctggagcgactttctctggcccttcgcccttcccacacttgccggaaatatctgcggcggcacttttattttcgcattgatgagccacgcgcagatccgcaacgatatgagcaataagcgtaaggaagaagcgaggctacgcggcgagcgcctggaacgggagcggaaaaaagcggaaaaacagcgctga

SEQ ID NO: 369299 - DNA, 756 bp, Salmonella enterica
atgaagcttcgcctgtcggcgctggcgctgggaaccacactgctggtcgggtgtgcgagttccggtacagaacagcaggggcgttcagacccatttgaagggtttaaccgcaccatgtacaacttcaactttaatgtgctggacccgtatgttgttcggccggtcgcggtcgcctggcgtgattatgttccacagcctgcgcgtaacggtttaagtaatttcaccggcaacctcgaagaaccggcgatcatggtgaactatttcctgcagggcgatccttatcagggtatggtgcatttcacccgtttcttcctgaacaccttattagggatgggcggatttattgacgtcgcgggaatggcgaatcctaagctgcagcgcgttgaaccgcatcgctttggcagtacgctgggccattatggcgtggggtatgggccttatatgcaacttccgttctacggcagcttcacgctgcgtgaagatggcggggatatggcggataccttgtatccggtgctctcgtggttgacctggccaatgtccataggaaaatggactatcgaagggatagaaacccgcgcgcagttgctggactccgatggtttgctgcgccagtcttccgatccttatattatggtgcgtgaggcgtacttccagcgtcatgactttatcgccaatggcggaaaactcaagccgcaggaaaacccgaacgcgcaggcgattcaggacgaactcaaagagatcgactcggaataa

SEQ ID NO: 369300 - DNA, 1308 bp, Salmonella enterica
atgagccagaaaaccctgtttacaaagtctgctctcgcagtcgcagtggcaatcatctccacccaggcctggtctgcaggctttcagttaaacgaattttcttcctctggccttggccgggcctattcgggtgaaggcgcaatcgcagatgatgcgggtaacgttagccgcaacccggcgttaattaccatgtttgaccgcccgacgttttcagcgggcgcggtttatattgatcctgatgttaatattagcgggacatcgccatctcgtcggacgttagatgcggataacatcgcgccgacggcctgggtgccgaacgtccattttgtcgccccgattaacgatcagtttggctggggggcttctattacctctaactatggtctggcgacagagtttaacgacacatacgccggcggctcggttggcggtacgaccgatcttgaaaccatgaacctgaatttaagcggcgcttatcgcttaaatgaggcctggagcttcggccttggctttgatgcggtatacgcgcgtgcgaaaatcgaacgttttgcgggcgatttaggccagttggtcgcggcacagaatccggcgctggcgccggtcgcgggtcagattcccagcgacaccaagattgcccacctgaacggtaatcagtggggctttggctggaatgccggtatcctttatgaactggataaaaataaccgctacgcgctgacctaccgctcggaagtcaaaattgactttaaaggcaactacagcagcgatcttcccatcgctataaaccgatttaacctgcctatcccaacggcaaccggcggcgcgacgcagtcaggctacctgacgctgaatctgccggaaatgtgggaagtgtccggttataaccgtgtggcgccacagtgggccatccactatagcctggcctataccagctggagccagttccaggaattgaaggcaaaatcgaccgccggcgatacgctctttgagaagcatgaaggctttaaagacgcttatcgcattgcgttgggtaccacctattactacgatgacaactggacgttccgtaccggtatcgccttcgatgacagcccggtaccagcgcaaaaccgttctatctctattccggaccaggaccgtttctggctgagcgccggtacgacttacgcctttaataaagatgcgtctgtcgacgttggcgtctcttatatgcatggtcagagcgtgaaaattaatgaaggcccttatcagtttgaatctgaagggaaagcctggctgttcggtactaactttaactacgcgttctaa

SEQ ID NO: 369301 - DNA, 285 bp, Salmonella enterica
atgagtaaatgcagtgctgatgaaaccccggtttgctgctgtatggatgttggaaccatcatggacaactccgattgcaccgcgtcatacagccgcgtattcgctacccgcgcagaggctgaagggacgctggcggcgttaaccgaaaaagcgcgtagcgtggagtctgagccttgccaaattacgccaacctttaccgaggaatccgaaggcgttcgtctggatattgattttgttttcgcctgcgaagcagaaacgctgatcttccagctcggcctgcgttaa

SEQ ID NO: 369302 - DNA, 1311 bp, Salmonella enterica
atgcgtcaggctttaccgttggtcacccgtcagggcgatcgcattgctattgtcagtgggttacgaacccccttcgctcgtcaggccactgcatttcatggtattcccgctgttgatctcggcaagatggtggtaggcgagctgctggcgcgcagtgaaattccagccgatgccattgagcaactggtttttggtcaggtagtacaaatgccggaagcccccaatattgcgcgcgaaattgtgctgggtacgggaatgaatgttcataccgatgcctatagcgtaagccgcgcctgcgccaccagttttcaggcggtagcgaatgtggcggaaagcctgatggccggcacgatacgcgcgggtatcgctggcggcgcagattcgtcgtcggtactgccaataggcgtgagtaaagccctggcgcgggtactggttgatgtcaataaagcccggacgacccgccaacggctgacgcttttttctcgtctgcgcttacgcgacctgctgcccgtgcctcccgccgttgctgagtattccaccggtctgcgcatgggcgataccgccgaacagatggcgaaaacgtatggtattacgcgtgaacagcaggacgcactggcgcatcgttcacatcagcgcgccgcgcaggcatgggcggagggtaaactggcggaagaagtgatgacgacctatgtgccgccgtataaaaacccctttgcagaagacaacaacattcgcggcgcctccacgctggcggactacgctaaactgcgtcccgcttttgaccgaaaacatggctccgtaaccgccgccaacagtacaccgctgaccgacggcgctgccgccgttattatgatgaccgaatcccgcgctaaagagctggggctgcgcccgcttggttatctgcgcagctacgcctttaccgctattgatgtctggcaggacatgctattggggccggcctggtcaacgccgctggcgctggagcgggccgggttgacgatggccgatctgacgctttttgacatgcatgaagcgtttgccgcccagactctggcgaacttacaactgctgggcagcgaacgatttgcccgtgaggtgcttggtcgtgcgcaggcgacaggggaggtggatgacgctaaattcaacgtgctcggcggctcaatcgcctacgggcatccttttgccgcaacgggcgcgcggatgataacccaaacgttgcatgaattacggcgtcggggcggaggttttggcctggtcacggcctgcgcggctggcggtcttggcgcggcgatggttctggaggcggaataa

SEQ ID NO: 369303 - DNA, 2148 bp, Salmonella enterica
atgactaccacatcagcttttatgcttaacgtgcgtctggataatgtcgcggttgtcgctattgatgtccctggagaaaaggtgaacaccctgaaagcggagtttgccgcgcaggtacgcgccatcctgaagcagatccgggaaaataaagcgttgcagggcgttgtttttatctcagccaaagcagataactttattgctggcgctgatatcaacatgataggtcactgccaaaacgcgcaggaagcggaaacgctggcgcgtcaggggcaacaactgatggcggagatccaggcgttgcctgttccggttatcgccgccattcatggcgcctgtctggggggcggccttgaaatggcgctggcctgccatcgacgtatctgtaccgacgacgttaaaaccgttctcggactgccggaggtacagttagggcttttaccgggatcgggcggaacgcagcgacttccacggctggtgggggtcagtaccgcgctggatatgatcctgacaggtaaacagcttcgcgccaggcaggcgcttaaagccgggctggttgatgatgtggtgccgcaaactattttactggaagcggctgtcgagctggctaaaaaagaacgcctggcgcagcggacattaccggtccgtgaacgtatcctggcggggccgctggggcgcgcgctgttatttcgcctggtgcgtaaaaagacagcgcaaaaaacgcagggtaattatccggcgacggagcggatcattgatgtgattgaaaccggactggcgcagggcagcagtagcggctatgacgcggaagcgcgcgctttcggcgagctggcgatgacgcctcaatcgcaggcgctgcgcgctgttttctttgccagtaccgaggtgaaaaaagatcccggtagcgatgcgccgcccggcccgctgaacagcgtgggcatcttaggcggcgggttaatgggcggcggtatcgcctgggttacggcctgtaaaggcggtttgccagtacgaattaaggatataaatactcaggggatcaatcatgctctgaaatacagctgggatctgcttgaaacaaaagtacgccgccgccatatcaaagccaacgaacgcgataaacagttggcattgatatcaggttcgaccgattaccgtggtttcagtcatcgtgatctggtcattgaagcggtgtttgaagatctgccgttaaaacaacagatggtggcggaagtggaacaaaattgcgctgctcacaccatttttgcctccaatacttcttccctgccgattggcgatattgcggcgaatgcggccagaccggaacaggtgattggattgcacttttttagcccggtcgaaaaaatgccgctggttgaggttattcctcatgcgtctacttccgcgcagaccatcgccacgaccgttaagctggcgaaaaaacagggtaaaaccccgatagtcgtcagtgataaagccgggttttatgttaaccgaattcttgcgccatatatcaatgaggcgattcggatgctgactgaaggcgaacgcgtcgaacatattgacgccgccctggtaaaatttggttttccggtggggccaatccaacttttggatgaggtaggaatcgacacgggcactaaaattattcctgtgcttgaggcggcgtatggagaacgttttagcgcgcctgcaaatgttgtcgcttcaattttgaatgacgatcgcaaaggtagaaaaaatggtcgcggtttctatctttatggcgaaaaagggcgtaaaagcaaaaaacaggttgaccctgctatttataagcttattggcgtgcaagggcagagtcgattgtctgcgcagcaggtggcagagcgctgtgtcatgttaatgcttaacgaagcggcgcgctgtttcgacgaaaaagtgattcgcagcgcgcgcgatggcgatatcggcgccgtgtttggtatcggttttccgccgtttctcggtggcccgttccgctatatggatgctctcgggccgggtgaaatggtggcgacattacagcgcctggccgcactttacggtcctcgttacgcgccttgtgaacaattagtgcgcatggcggagcgcagggagcatttctggacgaatggggaaactgaccagggaaattga

SEQ ID NO: 369304 - DNA, 486 bp, Salmonella enterica
atgcaagtttttatcatgcgtcacggcgacgcagccctcgatgccgccagtgattcggttcgtcccttgaccccttgtgggtgtgacgagtctcgcctgatggcgaactggctgaaaggtcaaaaagtggatatcgaacgtgttctggtgagtccgtttcttcgggccgaacagacgttagatgtggtcggcgattgtatgaatctgccggctcaggtggatgtcctgccggagctaacgccctgtggcgatgtcggtctggtcagcgcctacctccaggcgctggccaatgaagagatcggatcggtgctggtgatttctcacttacctctggtcggatacctggtatctgagctttgtccgggcgaaacgccgccgatgttcacgacgtccgcaattgccaacgttacgcttgatgaaagcggcaaggggacattcaactggcaaatgagtccctgcaatctgaaaatggcgaaagcgatttaa

SEQ ID NO: 369305 - DNA, 552 bp, Salmonella enterica
atgaaaaagaaaacatcgctcagcgaggaggaccaggcgctgttccgtcagctgatggtcggcacccgaaagattaaacaggatactatcgtccatcggccgctgcgcaagaaaatcacggaagtccctacccgaaggttaattcaggaacaggcggacgccagccactatttttccgatgagttccagccgctgctcaatacggaagggccggtaaagtatgtccgtgaagatgtcagccatttcgagctaaaaaaaatgcgtcgcggcgactattcgccagaactgtttctggatttacacggcttaacgcagcttcaggccaagcaggaactgggggcgctgattgccgcctgccgtcgggaacatattttttgcgcctgcgtcatgcatggacacggtaaacatattctgaaacagcaaacgccgttatggctggcgcagcatccgcatgtgatggcctttcatcaggcgccgaaagagtacggcggcgacgccgcgctgctggtgttgattgaagtggaagagtggcaaccgcccgaattaccctga

SEQ ID NO: 369306 - DNA, 933 bp, Salmonella enterica
gtggataaaattttcgtcgatgaagcagtaagtgaactgcataccattcaggacatgttgcgctgggcggtaagccgctttagcgcggcgaatatctggtatggacacggtaccgataacccgtgggatgaagcggtacaactggtgttgccgtctctttatctgccgctggatattccggaagatatgcggaccgcgcggctgacgtccagcgaaaaacaccgcattgtcgagcgagtgattcgtcgcattaacgagcgtatcccggtcgcctacctgaccaataaagcctggttctgcggccacgaattttatgtcgatgagcgcgtgctggtgccgcgttcgcccattggcgagctgattaataaccacttcgccggccttattagccaacagccgaaatatattctggatatgtgcaccggcagcggctgcatcgccatcgcctgtgcttatgctttcccggacgcagaggttgatgcggtcgatatttcgccggatgcgctggctgtcgccgagcataacattgaagaacacggtcttatccatcacgtgacgccaatccgttccgatctgttccgcgatctgccgaaagttcagtacgatctgattgtcactaacccgccttatgtcgatgcggaggatatgtccgatctgccgaacgaatatcgccacgaacctgagctggggctggcgtccggcactgacggcctcaaattgacccgtcgtatcctggggaatgcgccggattatctgtccgatgacggcgttctgatttgtgaagtcggaaacagcatggtacatctgatggagcagtatccggatgtgccgttcacctggctggagtttgacaacggcggcgatggcgtctttatgttgaccaaagcgcagttgctcgcggcccgtgaacatttcaacatttataaagattaa

SEQ ID NO: 369307 - DNA, 1086 bp, Salmonella enterica
atggcaggaaacacaattggacaactctttcgcgtaaccactttcggcgaatcacacgggctggcgcttgggtgtatcgtcgatggcgtgccgcccggcatcccgttgacggaggccgatctgcagcacgatctcgacagacgccgccccggcacctcgcgctatactacccagcgccgcgaaccggaccaggtaaaaattctctccggcgtgtttgatggcgtgacgaccggcaccagcattggcctgctgattgaaaacaccgatcagcgctcgcaggactacagcgcgattaaagatgtttttcgtccgggacacgcggattacacctatgagcagaaatacggcctgcgcgattaccgtggcggtggacgttcttccgcgcgtgaaaccgcgatgcgcgtagcggcaggggcgatcgccaagaaatacctggcggaaaagttcggcatcgaaatccgcggctgcctgacccagatgggcgatattccgctggagattaaagactggcgtcaggttgagcttaatccgttcttttgtcccgatgcggacaaacttgacgcgctggacgaactgatgcgcgcgctgaaaaaagagggcgactccatcggcgcgaaagtgacggtgatggcgagcggcgtgccggcagggcttggcgaaccggtttttgaccgactggatgcggacatcgcccatgcgctgatgagcatcaatgcggtgaaaggcgtggagatcggcgaaggatttaacgtggtggcgctgcgcggcagccagaatcgcgatgaaatcacggcgcagggttttcagagcaaccacgctggcggcatcctcggtggtatcagtagcgggcaacacattgtggcgcatatggcgctgaaacctacctccagcattaccgtgccgggacgtacgatcaaccggatgggtgaagaagtcgaaatgatcaccaaagggcgccacgatccgtgtgtggggattcgcgcagtgccgatcgcagaagccatgctggcgatcgtgctgatggatcacctgctgcgccatcgggcacagaatgcggatgtaaagacagagattccacgctggtaa

SEQ ID NO: 369308 - DNA, 825 bp, Salmonella enterica
atgaaaaaaaccgcgattgcgctgctggcatggtttgtcagtagcgccagcctggcggcgacgccgtggcagaaaataacccatcctgtccccggcgccgcccagtctatcggtagctttgccaacggatgcatcatcggcgccgacacgttgccggtacagtccgataattatcaggtgatgcgcaccgatcagcgccgttatttcggccacccggacttggtcatgtttatccagcggttgagtcatcaggcgcagcaacgggggctcggaaccgtcctgataggcgacatggggatgcctgccggaggccgctttaatggcggacacgccagtcatcagaccgggcttgatgtggatattttcttgcagttgccgaaaacgcgctggagccaggcgcagctattgcgcccgcaggcgttagatctggtgtcccgcgacggtaaacacgtcgtgccgtcgcgctggtcgtcggatatcgccagtctgatcaaactggcggcacaagacaatgacgtcacccgtattttcgtcaatccggctattaaacaacagctttgcctcgatgccggaaacgatcgtgactggctacgtaaagtacgcccctggttccagcatcgcgcgcatatgcacgtgcgtttacgctgccctgccgacagcctggagtgcgaagatcaacctttacccccgccgggcgatggatgcggcgctgaactgcaaagctggttcgaaccgccaaaacctggcaccacaaagcctgagaagaagacaccgccgccgctgccgccttcctgccaggcgctactggatgagcatgtactctga

SEQ ID NO: 369309 - DNA, 810 bp, Salmonella enterica
atggacaatttttatgatctgtttatggtctccccgctgctgctggtggtgctgttttttgtcgccgtactggcaggatttatcgattctatcgccgggggcggagggctgctcactatccctgcgctgatggccgccgggatgtcgccggcaaacgcgctggcgaccaataaattacaggcgtgcggcggctccctctcgtcttcgctctattttattcgccgtaaagtggtaaacctggccgagcaaaagctcaatattctgatgacgttcattggctcgatgagcggcgcgctgctggtgcagcacgtgcaggcggatattttgcgccagatcttgcctatcctggtgattttcatcggcctctattttttattgatgccgaagctgggcgaggaagatcgccagcgccgcctgtatggattaccgttcgcgctgatagccgggggatgcgtcgggttttacgacggctttttcgggcctgccgccgggtcgttttacgctctggcgtttgtcaccttatgtggctataacctggcgaaatccacggcacatgccaaagtgcttaacgctacctccaacgttggcggcctgctgttatttatcatcggcggcaaagtgatctgggcgacgggcttcgtgatgctggttggtcagtttttaggggcgcgaatggggtcgcgtctggtattgagcaaaggccaaaagcttatcagaccgatgatcgttattgtctcggcggtaatgagcgccaggttactttatgatagccacggacaggagatcctccactggttggggatgaattaa

SEQ ID NO: 369310 - DNA, 549 bp, Salmonella enterica
atgaacaatacgcaccattacgaacagttaattgagatttttaacggctgctttgccgaagaatttaatacccgtctgattaaaggcgacgacgaaccgatctatcttcctgctgacgcgcaggtaccgtaccaccgcatcgtctttgcgcatgggttttacgccagcgcgctgcatgagatttctcactggtgtatcgccggtaaggcgcgccgcgaactggttgactttggttactggtactgcccggatggacgcgacgcgcagacccaaagtcaatttgaagacgtcgaggtgaagccacaggctttcgactggttgttttgcgtggcggcggggtatccctttaacgtcagttgcgacaatctggaaggcgatattgagccggatcgcgtggcgtttcagcgccgggttcatgcgcaggtaatggcgtatctggagcagggcattcctgaacgtccggcccgcttcatcaaagcgctacagaattactatcacacgcccgaacttaaggcggaacagttcccgtggccggaagcgcttaattaa

SEQ ID NO: 369311 - DNA, 276 bp, Salmonella enterica
atgatcgcggagtttgaatcacgcattctggcattaattgacgatatggtagagcacgccagcgacgatgagctttttgccagtggatacctgcgtggccacctgacgttagccattgccgagctggagagcggtgatgaccactccgttgaggcggtctatgccaacgttagccaaagtctggagaaagcgatcggcgccggcgaactgtcgccgcgcgatcaggcgttagtcaaagcgatgtgggacaatttgttcgacaaggcaaaacaataa

SEQ ID NO: 369312 - DNA, 2001 bp, Salmonella enterica
gtgaaacaatacgccatacaacccgccacactcgaatttaacgctgagggtacacctgtttcccgagattttgatgatgtctatttttctaatgacaatggactcgaagagacacgctacgtttttcttggcggcaatcgtcttgcggagcgatttcccgtacattcacatccattatttatagtcgcggaaagcggttttggcaccggactcaacttcctgacgctgtggcaggcgtttgacagctttcgttctgcgcacccacaggcgacgctgcaaaggttacatttcatcagttttgagaaattcccgttaacgcgcgacgatctggcgctggcgcaccaacactggccggagctcgcgccctgggcagagcagctgcaggcgcaatggccgctgccgctcccggggtgccaccgcctattgctggatcggggtcgggtgacgctggatttgtggtttggcgatattaatgagctgaccgaccaactggacgccacgctgaatcaaacagtcgacgcctggttcctcgacggttttgccccggcgaaaaatccggatatgtggacgccaaacctgtttaacgcgatggcgcggctggcgcggcccggcgcaacgctggcgacgtttacctcggcgggcttcgttcgtcggggattacaggaagccggttttaccatgcaaaaacgcaaaggcttcggacgtaaacgcgagatgctttgtggagtgatggaacaacacctcatgccgaccctttccgcgccctggttttaccgcagcggaagcgaaaaacgtgaaacggcgatcattggcggcggcatcgccagcgcgctgttatcactggcgttactgcgtcgcggctggcaggtgacgctctattgcgcggacgaccagcccgcccagggcgcctccggtaatcgacagggtgcgctttatccactccttagcaaacatgacgccgccattaatcgctttttcccgaccgcattcacctttgcccgtcgcctgtatgatgccctgcccgtctcttttgatcatgactggtgcggcgtgacacagctcggatgggatgagaaaagccagcagaaaattgcccagatgctgtccctggcgctgcccgccgaactggcctcggcgctcaatgccgaagaggcggaacaggcggttggcgtgacgacacgctgcggaggaattacctatccggcaggcggctggctatgcccggaacaattaactcgcgcagtcatcgcactggcgaccgaacagggtttacaaacgcgctttcgccatacgctcacgtcgctcgttgcgcaggagtcgcgctggcaactgcgctttatgtcaggtgaaaccgccagccatgagaccgtcgtcctggcgaacggccatcagattaaccgttttgatcagacccggccgctgccggtgtatgccgtcggggggcaggtcagtcatattcccaccacccccgccctctcggcgttgcgtcaagtgttatgctacgacggctatctgacgccgcaaaatccgcataatcagcagcactgtattggcgccagctatcaccggggcgacgaaagcaccgtctggcgcgaagaagatcagcgtcagaaccgacagcgtctgcttgactgttttccggatgcgaaatgggccacagaggttgacgttagcggcaacagcgcccgttgcggcgtgcgttgcgccacccgcgaccatctgccgatggtgggcaacgtcccggattaccacgccacgctgacgcattacgccgatttagccgataacaaaacgtcggcggcgcctgcgcctgtgtatccgggtttatttgtgcttggcgcactgggatcgcgcggtttgtgctcagcgccattatgcgcagaaattctggcggcgcagatgagtaacgagccgattccactggatgccggtacgctggcggcgttaaatccaaatcggttatgggtgagaaagttattgaagggaaaagcggtgaagtaa

SEQ ID NO: 369313 - DNA, 1215 bp, Salmonella enterica
atgaaacgtgcagtgattactggcctgggcatcgtttccagcatcggtaataaccagcaggaagtcctggcatctctgcgtgaaggacgttcagggatcactttctctcaggagctgaaggacgccggcatgcgtagccaggtatggggcaacgtaaaactggataccactggcctcattgaccgcaaagtcgtgcgctttatgagcgacgcctccatctatgcttatctgtctatggagcaggcagtggccgacgccggtctggcgccggaagtctatcagaataacccgcgtgtcggcctgattgcaggttccggcggcggctccccgaaattccaggtctttggcgcagatgccatgcgtagcccgcgtggtctgaaagccgtgggcccgtatgtggtgacgaaagcaatggcatccggcgtttccgcctgcctcgctacgccgtttaaaatttatggcgtgaactactccattagttccgcttgcgcgacctccgcacactgtatcggcaatgcggttgaacagatccaactgggcaaacaggacatcgtttttgctggcggcggcgaagaggtgtgctgggaaatggcctgtgagttcgatgcgatgggcgcactgtccaccaaatataacgatacgcctgaaaaagcgtcccgtacctatgatgcgcaccgtgatgggtttgtcatcgcgggcggtggcggtatggttgttgtcgaagagctggaacacgctctggcgcgcggcgcgcatatctatgcggaaatcgtcggttacggcgcaacatccgacggcgcagacatggttgctccgtctggtgaaggcgcagtacgttgcatgcagatggcgatgcacggcgtagacacgccgatcgactacctgaactctcacggtacgtccacgccggtaggcgacgtgaaagaactcggtgcaatccgtgaagtgtttggcgataacagcccggctatctccgcgaccaaagcgatgaccggccactcgctgggtgcggctggcgtgcaggaagccatctactctctgctgatgctggagcacggttttatcgcgccgagtatcaacatcgaagagctggatgagcaggctgcgggtctgaacatcgtgaccgaaacgaccgagcgtgaactgactaccgtaatgtctaacagcttcggttttggcggcaccaacgccacgctggtgatgcgtaagttgtaa

SEQ ID NO: 369314 - DNA, 657 bp, Salmonella enterica
atgccaactaatacattagataaaattaggcatagtttgagttgtgtggctgttttatttggtttgttcggcatttttgtttttgcctcattttcgccttcctatgcctggctttatttgggaggtctggctgcgccttttatatatagtattgtttttgtctatgcgattgccgcctggagtatttattcaaagtattacccgtttttatcattgggtcgcttatcattcgtggagtgttttgttccggcgctggccctggtgtgccttaccgttctctacaatgtttttagtggcccggaaccctggatggccgagttatcaaggcaattttttcttcataaatttcttaacacgctggcgatgtgctttctggctcctgtggcggaggaaattatattcagagggtttttattaaacagcagtatcggttggggtcgatactcaagagcttccggtattattattacttcactcgcttttgcatttatgcatacacaatatctctttgcggtgacttttgtttatctgtttgttttttcatcgatattatgcgttgttcgaatgagaagtcgagggttaatgataccgataatacttcatattttaaataatgcctgggttattttcggcttactgttttcagcgacggaataa

SEQ ID NO: 369315 - DNA, 519 bp, Salmonella enterica
atgaaaacgttctcccttgtcgcgcttatcctgttgctttgtagttgctccacgcctcatcacgacagtacgcaggccgtgaagcagttctatacctcatggatgacgacgttcacgaacgatgtgaatccccctgacgacaccaccgccttaatgcaacgttacgttgccaaagaggttattcatcgcctggcgctaatacagtccctttatgaacaggagattgtgggggcagattattttatgtatgcgcaggactatgcgccagagtggattccacagttacgggttgggaaggcacaccctttcctcggcggagaaaaagtggatgttctgttggctacagagtcaacgcccatccacctggaagtttatacccgttgggaagagggacgctggaaaatttaccgcgttcgggatgctgacaggggttatgaacagccgatttatgacgcaggcgccatcacccaggctgaggcctggtcagcgaaagtcgcgccggaatataagaagcattaa

SEQ ID NO: 369316 - DNA, 369 bp, Salmonella enterica
atgagttgggataaaagagtggcggttaattatgccaaaacgcatgcaggttctcattctcaaggccggtgtgcggaatttacccgaaaggcaattcaggcgggcggtatcacgctggggcatacgtatcatgcgaaagattatggcccaatgttaagaagcgccggattcaccgctattggtacctatgaaatgccgcgcgagggtgacgtcatcattattcaaccttacgctggcggaaacccgagcggtcacatggcgatatacgatggcacagagtggtattcagattttaaacaacgcgatatgtgggccggcccgggctaccgggcagccaggccctcatataccatctacaggaagaattaa

SEQ ID NO: 369317 - DNA, 249 bp, Salmonella enterica
atggaaccaaaaagccaagactggcatcgtgcagatattaaaagtgcacttgaaaaaagaggtattacgctcagagatctttctcgtcaggccggtttatcacctgattcactgcgcaatgtctttacccgttcctggccgagagctgaacggattattgcggacgcgctgggcatcacgccgcaggagatctggccgtcgcgctatgatgatatgcaaataaaaaatgatgccgatatcgcagaataa

SEQ ID NO: 369318 - DNA, 375 bp, Salmonella enterica
atggcaaaggaatggttcacggttaaggaatgtcttggcttaccggggtttccgggaagcgagcctgcggttcgcgaacgtttatataagtacagtgaagggaaagcgggggtcaggcgtaagcgtgttaaatcaaaggccgaggagtttcatatatctgttttccctctctatgttcatcgttatctggacgacagcggagaggaaccgacgccagaacccatttccttacaggaagcggagcctgaagatatctgggagatgatgttcaggttactgacgccagaacagcgcaagcaggtgaccggacggtttaaggtgagagggatgaaagcggtctttccctttctgtttgatgacacgccgccacgttga

SEQ ID NO: 369319 - DNA, 1176 bp, Salmonella enterica
atgacagcagttagccaaaaaacaacgaccccgtctgcgaatttttcgctgttccgcatcgcctttgcggttttcctgacctatatgacggtcggcctgccgttacccgtcatcccgctttttgttcatcacgaactgggctatagcaatacgatggttgggatcgccgtgggcattcagttttttgcgacggtactgacgcgcggctatgccggacgactggcggatcaatatggcgctaaacgatcggcgttacaggggatgtttgcctgcgggctggcgggcgccgcctggctcctggccgcgctgttgccggtttccgcgccgataaaattcgcgctgcttattgtcgggcgtttgatcctcggatttggcgaaagccagctgctgaccggaaccctgacctggggactggggctggttggcccaacgcgttccggtaaggtgatgtcgtggaacgggatggcgatttacggcgcgctggcggccggtgcgccgttgggcttgctgatccatagccacggcttcgcggcgctggcggggacgacgatggttttaccgctgctggcctgggcattcaacggcaccgtgcgtaaagtgcctgcgtatacgggggagcgaccttcactgtggagcgtggtcgggcttatctggaaaccgggcctgggcctggcattgcagggcgtgggctttgccgtcatcggtacgtttatttcactttattttgtcagcaatggctggacgatggcgggattcaccctgaccgcgtttggcggtgcgtttgtactgatgcgcatattgttcggttggatgccggaccgctttggcggcgtgaaggtcgccgttgtctcattgctggttgagacggcagggttgctgctcttgtggctggcgccgacggcctggatagcgctggtaggcgcggcgctcaccggggcagggtgttcactgattttcccggcgctgggcgtggaggttgtgaaacgcgtacctgcacaggtacgcggtacggcgctcggcggctacgccgcgtttcaggatatctcctacggcgttaccggcccgctggcgggcatgctggccacgtcatgcggctatccttccgtattcctcgcgggagcgatctccgctgtggttggcatcctggtgacgatattatcgttccggcgtggttaa

SEQ ID NO: 369320 - DNA, 1002 bp, Salmonella enterica
atgcatcccatctccggcgcccctgcacagcctccaggcgaagggcgtaatcctctttccgctgcgagcgagcagccgctttccatgcaacagcgtacggtactggaaaggctgatcacgcgcctgatttcactgacccagcagcaaagcgcggaagtatgggccggaatgaaacacgatctggggataaaaaatgacgcgccgctactgtcgcgccacttccccgccgctgaacagaatcttacccagcgtctgggcgtagcgcagcaaaatcatgccaatcgtcaggtgctttcacagctaacagagctgcttggcgtcgggaataatcgtcaggccgtcagcgattttatccgtcaacaatacggtcaaaccgcgcttagccagcttacgcccgatcaactcaaaaacgtgctgacgctcctgcaacaggggcagctttccattccgcagccgcagcaacgtccggcaacggatcggccattattgcctgctgaacataatacgttgaatcagttggtgacgaagctggcagccgcgaccggcgagtcaaacaaacttatctggcaatcaatgctggaactctccggcgtgaaaagcggcgagctcattccggcaaagcagtttacccatctggcgacatggctacaggcgcggcagacgctgtcactacaacacgcgcctacgctacatacgcttcaggctgcgttaaaacaaccgcttgagccggacgaactcacagcgatcaaagagtatgcccagcacacttatcaaattcagccgcaaacggtgctgaccaccgcccaggtgcaggatttacttaaccatattttcctgcgtcgcgtagagcgggagactgatgagctggaaccgctctctattcaacccatctaccgcccgtttgcgccgatgattgaaaccgtgaaaaatctgtctgcgcggccaggcctgttgtttatcgcgctaataattgtactggcgcttttctggctggtttcttaa

SEQ ID NO: 369321 - DNA, 1137 bp, Salmonella enterica
gtgaaaattctcgttgatgaaaatatgccttacgcccgcgaattatttagccgcctgggtgaggtaaaggcagtgccgggtcgcccgatccccgttgaagaattgaaccatgccgatgcgttaatggtgcgttcggtcacgaaagtgaatgaatcgctgctgagcggcacgccgattaacttcgttggtactgctacggcaggcaccgatcatgtggatgaggcatggctgaagcaggcgggcatcggtttttcagccgcgcccggctgtaatgctatcgccgtggtggagtatgtgttttccgcgctgttgatgctggccgaacgtgacggcttttcgttacgcgatcgcactatagggattgtcggcgtgggtaacgtcggaagccggctacagaccaggcttgaagcgttgggtatccgcacgttgctgtgcgatccgccacgcgccgcacgcggggacgagggtgattttcgtacgctggatgagctggtgcaggaagcggatgtcctgactttccatacgccgctctataaagacggaccgtacaaaacgctgcatctggccgatgagacgctgatccgtcgactgaaacccggcgccattctcattaacgcctgccgcggtccggtggtggataacgccgcgttgctggcgcgacttaatgccgggcagccgctgagcgtggtgcttgatgtgtgggagggcgaaccggatcttaacgtcgcgctactggaagccgtggatatcggcacgtcgcatattgccggttatacgctggaaggcaaagcgcgcggcaccactcaggtctttgaggcgtatagcgcgtttattggccgcgagcagcatgtcgcgctggagacattactgcctgcgcctgagtttggtcgtattacgcttcatggcccgctggatcaaccgacgctgaaaagactggcgcatttggtgtatgatgtgcgccgcgacgatgcgccgctgcgtaaagtcgctggaattccgggtgaatttgataaattgcgtaaaaattatcttgagcgccgtgaatggtcgtctttatacgtgatgtgtgacgacgaaacggcagccgccttgctgtgtaagctaggttttaacgctgttcatcacccggcacattaa

SEQ ID NO: 369322 - DNA, 1014 bp, Salmonella enterica
atgtctgaaggctggaacattgccattctgggcgcaacgggcgccgtaggcgaagccctgcttgaaacactggctgaacgccagttcccggtcggtgaaatttatgcgttggcgcgtcatgaaagcgcgggcgagcacctccgttttggtggcaagtcggtcattgtccaggatgcggcggactttgactggacgcaggcgcagttggcgtttttcgttgccggcgcagaggcatcggctgcctggatagacgacgcgactaatgcaggttgcctggtgatagattccagcggtctgttcgcgctggagcctgatgtgccgctggtcgtgccggaagttaacccgtatgtactggcggattaccgtaaccgtaacgtgattgcggtcgccgatagtctgaccagtcaactgctggcggcgctcaagccgttaatcgatcaggggggactgtcgcgcatcgccgtcaccagtatgttatcagcgtccgcgcaggggaaaaaagcggtcgatgcgctggctggacagagtgcgaagctgcttaacggcataccgattgatgaagatgatttctttggccgccagttggcgttcaatatgctgccgctgctgccggatcgggaaggcagcgtgcgccaggaacgtcgtatcgtcgatgaagtgcgtaaaattttgcaggacgatggcgtgatgatctccgccagtgtcgtgcagtcaccggtgttctatggccatgcgcagatggtgagctttgaagcgctccgtccgctggcggcggaagaggcgcgcgaggcattttcccgcggtgaagatatcgtactgtcagaagagacggattacccgacgcaggtgggcgacgcttccggcaatccacagctctctattggctgtgtgcataatgattacggtatgccggaacaaattcagttctggtcagtggcggacaacgtgcgtttcggcggcgcgctgatggccgttaaaattgcggagaagctggtgcaggagtatctgtactga

SEQ ID NO: 369323 - DNA, 813 bp, Salmonella enterica
atgtccggacagcaatcatcgccggtctataaaattgcgctgggtattgagtacgacggcagcaagtattatggctggcagcgtcagaatgaagtgcgcagcgtgcaggaaaagctggaaaaagcgctctcgcaggtggcaaatgaacctattaacgtgttctgcgccgggcgcaccgatgccggcgttcacggcaccgggcaggttgtccatttcgaaacgaccgcattgcgcaaagatgcggcatggacgctgggggtaaatgcgaatttgcctggtgacattgccgtgcgctgggtgaaaactgtaccggatgattttcacgcgcgatttagcgctacggctcgccgttatcgctatatcatctacaatcatcgactgcgtcctgcggtattagcaaaaggcgtgacgcattactatgagccgctggatgcagagcggatgcatcgcgcggcgcagtgtctgcttggcgaaaatgattttacctcgtttcgcgcggtgcagtgccagtcgcgcacgccgtggcgtaatgtgatgcacatcaacgttacccgccacggcccttatgtggtggtcgatatcaaagcgaatgcctttgttcatcatatggtcaggaatattgtcggcagcctgctggaagtaggcgctcacaaccagccggagagctggatcgcagagctgttagcggccagggacagaacgctggcggcggcaacggcgaaggcggaggggctatatttggttgcggtggattaccctgaccggtttgaccttccaaaaccgccaatgggcccgctatttctggcggactaa

SEQ ID NO: 369324 - DNA, 660 bp, Salmonella enterica
atggacctgatctactttattattgattttattctgcacatcgatgtgcatctggcggagctggtcgcggagtacggcgtctgggtgtacgctattttgtttttgattctgttttgtgaaaccggcctggtcgtcacgccgttcctgccgggtgactcgctgctgtttgtcgccggggcgctggcttcgctggaaaccaacgatctcaatgtgcatgtcatggtggcgttaatgctgatcgccgcaattgtcggcgatgcggtaaattacacgattggtcgactgttcggcgaaaaactgttcagtaatccgaattcgaaaattttccgccgcagttatctggataaaacccaccagttttatgaaaaacacggcggtaaaactatcattctcgctcgcttcgtgccgatcgtcagaacctttgcgccgtttgtggcagggatggggcacatgtcctatcggcattttgccgcctataacgtcatcggcgcgctgctgtgggtgctgctctttacctacgccggttatttcttcggtacgataccgttgattcaggataaccttaagctgctgattgtggggattatcgtggtttcgatattacctggcgtcattgagattgtccggcataagcgcgctgcgtcgcgtgccgcaaaatag

SEQ ID NO: 369325 - DNA, 915 bp, Salmonella enterica
atgagctggattgaacgaattaaaagcaacattactcccacccgcaaggctagcattcctgaaggggtgtggaccaagtgtgatagctgcggtcaggttttataccgcgctgagctggaacgtaatcttgaggtctgtcctaagtgtgaccatcatatgcgcatgtcggcgcgcaatcgcctgcatagcctgttagatgaaggttcccttgtggagttgggtagcgagctggagccaaaagacgtgctcaagttccgcgactccaaaaaatataaagacagactggcgtccgcgcagaaagaaaccggcgagaaagacgcgctggtggtcatgaaagggacgcttcacggtatgccggttgtcgccgccgcgtttgaattcgcgttcatgggcggctcaatggggtctgtcgttggcgcacgcttcgttcgcgccgttgaacaggcgctggaagacaactgtccgttagtgtgtttctctgcttccggcggcgcgcgtatgcaagaagcgctgatgtcgctgatgcagatggcgaaaacctcggcggcgctggctaaaatgcaggaacgtggtctgccctacatctcggtattgaccgatccgacaatgggcggcgtttccgccagttttgcgatgttgggcgatctcaacatcgccgagccaaaagccctcattggcttcgctggcccgcgcgttatcgaacaaaccgttcgtgagaagctcccgccgggattccagcgcagtgagttcctgatcgaaaaaggcgctattgatatgatagttcgccgcccggaaatgcgcctgaagctggcgagcattctggcgaagctgatgaatctgcccgcgccgaacccggacgccccgcgtgaaggcgtggtggtgcctccggcgccggatcaggagtctgaggcctga

SEQ ID NO: 369326 - DNA, 1269 bp, Salmonella enterica
atgaaaaacaaatctatacctcaagctgcgtcgcccctggcctcgtggctttcttatctggaaaacctgcacagcaagagtatcgatttaggccttgagcgcgtaagccaggtggcagcgcgtctggacatcctcaagcctgcgccgttcgtttttaccgtggcgggaaccaacggtaaaggtacgacctgtcgaacgctggagtcggtgttaatcgcggcgggataccgtgtgggcgtctatagttcgcctcatctggtacgttacaccgagcgcgtgcgcgtgcaggggaaagaattagcggaatccgcgcataccgcgtcctttgcggaaatagaagcggcgcgcggcgatatttcattgacctattttgaatatggtacgttgtcggcattgtggctgtttaaacaggctaaccttgacgtggtgattctggaggtcgggttgggcggccgcctggacgccacgaacattgtggatgccgatgtagcggtaattaccagcatcgcgcttgaccatactgactggctggggccggatcgcgaaagtatcggccgcgagaaggccgggatttttcgcgcggaaaaacccgctatcgtcggcgaaccggaaatgccgacaaccatcgcggatgtcgcgcaggagaccggcgcgctgttgcggcgtcgcggcgttgactggcgttatgaggtgacagcgacccactgggcgtttaccgatggtgacggcacgcttgccggactgccgttgccgcaggttcctcagccgaatgccgccaccgctctggccgcgctgcgcgccagcaggttgaacattgacgagcaggcgattcgcgacggtattgcgcaggctaccttgccgggacgttttcaaatcgtgagtgagtcgccgcgcgttatctttgatgtcgcccataatccccacgcggcggaatacctgacgggtcgtctgaaaatgttgccgaaacgcgggcgcgtgcttgcggtgattggtatgctgcatgataaagatatcgccggcacgttagcctggttgaaaagcgtggttgacgactggtattgtgctccgttagaggggccgcgcggcgcgacggcggaacaacttctggaacatctggggaaagggaatgtctatgatagcgtcgcgcaggcatggcaggccgctatcgacgcggcgcagccagaagataccgtgctggtgtgcggatcattccacaccgtcgcacatgttatggaagtgatagacgcggggagaatcggtggcgagtaa

SEQ ID NO: 369327 - DNA, 675 bp, Salmonella enterica
gtggcgagtaagtttcagaatcgtttagtcggcacgattgtgttagtcgcgctgggggttattgtgcttcccggtctgctggacggacagaaaaagcattatcaggatgaatttgctgcgattccactggtaccgaagcctggcgaccgtgatgagccggatatgatgcctgccgcaacgcaggcgctgccgacacagccgccggaaggggcggctgaagaggtgcgggcgggagatgcggcagcgccatcgctggacccgtcgcgcatggcgtctaacaatgttgagcttgatccgataccggcggagacgcctaaaccgaagccggttgaaaagccgaaaccgcagcctaaaccgcaacagccggttgtcgccgcttccacgccgacgcccgcgccgcaaccagtcgccgacgataaacctgcgccgaccggcaaagcctatgtcgtacagttgggcgcgctgaaaaacgcggataaagtcaacgagatagtcggcaagcttcgttccgccgggttccgggtttatacttccccctcaacgccggtacagggtaaaataacccgtattctcgtcgggccggatgcgtcgaaagataagatgaaaggatcgcttggcgagctcaagcagatttccgggttaagcggcgtggtgatgggatatagcccgaactaa

SEQ ID NO: 369328 - DNA, 489 bp, Salmonella enterica
atggtctggattgattacgccattatcgcggtgattgctttttcctgtctggttagcctgatccgcggctttgttcgtgaagcgttatcgctggtgacgtggggttgtgctttctttgtcgccagtcactactacacttacctgtctgtctggtttacgggctttgaagacgaactggttcgtaatgggattgctatcgcggtactgtttatcgcgacgcttatcgtcggcgctatcgtgaattttgtgataggtcagctagtagagaagaccggcctgtcgggaactgaccgggtgttggggatctgtttcggcgcactgcgaggcgcgctgattgtcgccgccattctgttcttccttgatacctttaccggcttgtcgaaaagcgaagactggagcaaatcgcagctcatcccgcagttcagcttcatcatcagatggttctttgactatctgcaaagctcgtcgagtttcttgcccaggacgtaa

SEQ ID NO: 369329 - DNA, 1518 bp, Salmonella enterica
atgtgcggtattgtcggtatcgccggtgttatgccggtcaaccagtcgatttatgacgcgttaacagtgctccagcatcgtggtcaggatgctgccggtatcatcaccattgatgcgaataactgcttccgcttgcgtaaggcaaacgggctggtgaacgatatttttgaagctcgccacatgcagcgtttgcagggcaacatggggatcggccatgtgcgctaccctaccgcaggcagctccagcgcttccgaagcgcaacctttttatgttaactcgccgtatggcatcacgttggcccataatggcaatctgactaacgcgcatgagctacgtaaaaagctgtttgaagaaaagcgccgccatatcaacaccacctccgattccgaaatcctgctcaatattttcgccagcgagctcgacaacttccgtcactatccgctggaagccgacaatatttttgccgcgattgccgcgactaaccgtcaaatccgcggcgcctatgcctgcgtggcgatgattatcggccacggcatggtggcttttcgcgatccgcacggcattcgcccgttagtgctgggcaagcgtgacgttggcgatggtcgtacggagtatatggtcgcttctgaaagcgtggcgctggatacgctgggctttgagtttctgcgcgatgtcgcgccgggcgaagctatctatattaccgaaaaggggcaactgttcacgcgccagtgcgcggataacccggtcagtaatccctgcctgttcgagtacgtttattttgctcgcccggactcctttatcgacaaaatctccgtctacagcgctcgtgtgaatatgggcaccaaacttggcgaaaaaatcgctcgtgaatgggaagatctggacatcgacgtcgtgatccctatcccggaaacctcctgcgatatcgcactggaaattgcccgtattctcggcaagccgtaccgccagggatttgtcaaaaatcgttacgtgggacgtacctttatcatgccgggccaacagctacgccgtaaatccgtgcgccgtaagctcaatgctaatcgcgcggaattccgcgataagaacgtcctgctggtggatgattccatcgtacgtggcaccacatcagagcagatcatcgagatggcccgggaagccggcgcgaagaaggtttatctggcgtccgccgcgccggaaattcgtttccccaacgtctatggcattgatatgccgaccgccaatgagctgatcgcgcatggtcgcgaggtggatgagattcggcagatcatcggcgcagacgggcttatcttccaggatctgaacgatctgatcgaagccgtacgcgcggaaaacccggatatccagcagtttgaatgttcggtatttaacggggtatatgtcaccaaagacgtagaccagcaatacctcgacttcctggattcattacgtaatgacgacgccaaagcggtgctgttccagaacgaaatggaaaacctggaaatgcataacgaaggctaa

SEQ ID NO: 369330 - DNA, 1428 bp, Salmonella enterica
atggcatccaccaatcaggaactggcctcggcgctcaggatgttttcccgctttttcgatttgattcatcagccgttggccgtcattaatgagcgtggtgaatacgtttactacaatcaggaaagcgcggatctggacggctacagcattgaacgggcaatgggaaaacatatgctggatgtctatccgggcatgaaagagacgcaaagtacgatgctttcatcgttaaaaaaaggcgtggaatacattggccattatcaaatttattacaatgcgcgaggccaggccgttgactatcagcacaccaccgcaccgctctatgcaagcgatggcggcatggtcggcgttatcgaaatcggcaggaatatgtccggcgtcaggcggctccaggagcaggtggtagaactgaaccaactgctgtatgccgatcgccatgagaagcaccatgccattattaccgaaaacccggaaatgctcagtaatatcgccaaagccaaacggctggccgccagtaatattccggtgacgattgtcggggagacgggtacgggtaaggagctattttcccgcctgatacatcaatgcagcaagcgggcgaataagccatttatcgccctgaactgcggcgctctaccgcctacgcttatcgaaagtacgcttttcggcaccgtgcgcggcgcctataccggcgcggaaaatagccagggctatctggaactggcaaacgggggaacgctctttcttgatgagctgaacgccatgccgatagaaatgcaaagtaagctgctgcgattcttgcaggataaaaccttctggcggctcggcggacaacagcaactccactctgatgtcaggatcgttgccgccatgaacgaagcgcccgtcaaattaattcaacaagaacgcctgcgggcggatcttttttatcggttgagcgtcggaatgttgacgttaccgccgctgcgcgcccgcccggaagatattcccttactggcaaattattttattgataaataccgtaatgatgtgccgcaggacattcacggactaagcgagacggcgcgtgctgatctgctcaatcacgcctggccgggtaatgtcaggatgctggaaaacgcgattgtacgcagcatgatcatgcaggaaaaagacgggctgctgaaacacatcatttttgaacaggacgagttaaatttaggcgtaccggaaaccgcgccggaaaatccccttccctcgtcacccgatccgcagtatgaagggtcgctggaggtacgggttgctaactacgaaaggcatttaatagaaaccgcgctggatacgcatcaggggaatattgccgccgcggcccgcagccttaacgtatcgcgcaccacgttacagtacaaagtacaaaaatacgctattcgcttcggcgtggtgcgtaattga

SEQ ID NO: 369331 - DNA, 1398 bp, Salmonella enterica
atgactgactcgattatgcagaattacaaccagctacgtgagcaggtaatcaacggcgatcgccgtttccagcacaaagacggtcatttgtgttttgaaggggtcgatctggacgcactggcgcgccagtaccccacgccgttctatgtgttttctgagccggagattattcgtaacattcatgaaatccagcaggcatttgcggcgcataaaaataccaaaaccttctttgcgtcaaaaacctgctcggtcatgggggtattgaaagccattcgtgacgccggaatttgcgcggaggcaaactcacaatatgaggttcgcaagtgtctggagataggctttcgcggagatcagatcgtcttcaacggcgtggtgaaaaagcctgccgatctggaatatgccatcgctaacgatctgtatcttattaatgttgatagcctgtatgagctggaacatattgatgccatctctcgcaagctgaagaaagtcgccaatgtttgcgtccgcgtagaaccgaatgttccctcggcgacgcatgcggaactggttaccgctttccatgcgaagtcgggtctcgacctggaacaggcggaagaaacctgccgccgcattctggcgatgccttatgtgcatttacgcggcttgcatatgcatgtaggcgatcaggtgccggagtcagagcctttcgcaaaagcgactaaagtgctggtggatgaatcccgtcgtctggaagaggtgctcggtattaaatttgatttgattaacgtgggcggcggaattccggttccctataaatatgacgacgagaatggcgacccgttaaaagataatatgtatgccggtattaccgcccaggattttgccgatgcggtcattcgcgaagtgcataaatggcgtaccgatgtggaaatatgtattgaaccgggacgtaaagtgaccgggtcggcggcggttttactgacggaagtctcctgcgaaaaacgtaaaacaaattacgatcttaacggcaatgtggaatgccacgttgaatggaaatttgtcgacgctggttacagcgtactctctgacagccagcattttgactggttcttttatgtctataacgcctctcgcatgacggcagcgcacgacgcctgggtaaaattagccgggccgctgtgtgatggcggagattatttccacatgggggtgaaaggcgaagagtttttactgccgaaggagactcatgttggcgatattgtcgcgtttcttgatgccggggcatacaccattgaaagtcaaaccgtttataacaaccgtccgcgcacgggggtggtgatgatcgataaaaatggtgagacgcgtctgattcgtcgggaagacagttacgaagatatggtcaagtacgacatttattaa

SEQ ID NO: 369332 - DNA, 1422 bp, Salmonella enterica
atgagtaacacgaattctggcttacttggcatcaaagacattgtctttatgaatgtcatcgctattctgagtttgcggcaaatccctaacgtggcgccttacggggcatcggccatgttgttatgggtgatcgccgcattctgcttgttttttcctttagcgatggtatgcggcgagctgtcaaccggctggccgaaagatggcgggatatttgtctggattaaagaggcatttggtaaacgtattgcatggattgtcgtggtttgttttctcttttcctgcgtactgtttttcccattaatgctgcaattcggctttaccgcgttgggctatatgatcggcggcggcctggcggaaaataaagcgtttatcggtattggttccgcggtaattttctggctattaacgctgatgaatatccgcgggatggaatggacaaaaattattaatagcatcagcgcctggtgcggcgtatttattccctccgccatcctcattttgctggcggtagtatggctatgtaccggacaccagatgcagacggactacactacagcgaaaaactggattccggatctcggacactgggatacgatcgttttcttatccagcatgatgtttgcgtttgccggactggaggtcgccccgatgattgccgggcgtacccgtaatccacagcgtgattttccgcgagcgatggccgtctccgccgccgttatcgtcgggatctatatggtcggcacctgggcgctaaatacgcttttacccgccgggaaaaccgacattgtggcaggcgtcatgcaggctatgcatgctgctgcggatacgctgcatatgccgtggttaattcctgttatggccatctgtatgttttttggcgctctcgggcagattaactcctggctggtggggccgatttatatgctccaggaagcctcgcgtgaagataatctgctgggggaccgaatcggcaaattacatccggtgtggaaaacgcccgcctttgccttgactgtacaggcgattattgtcacggtcctgtgtttttcgacttttatttcgccaagcgttgcggcggcttactggatgttaacggcgctaacgaccatcacctattttattccttacctggtgatgttcccggcgttctggcgtttacgtaagactcagccggatacgccaagaagttttaaaattccgggcaaggttttaccggctattttacccgcgctgggctttctttctatcgcctttgccgttgcgctgttatttattccgccttctcaaattgatatgggcggatatttccagtacgccgggaaaattattggcggagccgtgctggcggttgtcgtcgcggagtacatttaccatcgggcgcagaaacgtaatgcccgtttaagcatggcgggaggaaaataa

SEQ ID NO: 369333 - DNA, 1104 bp, Salmonella enterica
atgtatatgccagttctggaaataaatctacgcaagctggaagaaaacgcccgcacggaaaaagctctgctggcaagcagcggtattgacgtgatggctgtcaataaagtttttgacggctgcgtggaaaccgcgcaggcggtgttcaacggcggaattaccgttatcgctgaatcacgaacctataatttgaaaaaaatacgcgagacaggatgtacgacctgcctgttacgcagcccgtgtctgagtgaaatcgaagatgtggtgcgctacgcggatattagtttaaatagcgagccggtggtattacgggcattatcgcaagaagcccaacgccaggggaaaacgcatcaggtattactgatggtggatatgggcgatttacgcgagggtatctggtttggtgaatatcaacgcattcttgagaccgtgactctgattactggtctgcccggtctggaattatatggactgggcaccaactttaattgttacggcaccgtgttgccaacggtaaaaaatggcgaggattttctggcgctggccgcccggctggaagctgacagcggtattcctgtccggcggctttctgcgggaaactgcaccagctatcacctgctggataaaggtatctggccgcagggactgaatcatctgcgcatcggcggactgcatgaattcggcattgaatatgtggacatgaaatacctgaatgaatttcaccactccgcaaaaccggtcgataaagcctgttccgatatgtatatcctggaagcggaaatcatcgaactgaacagtaaacctaccgtcccggtcggggagctgggcgtcgatgcctttttgcaaagtaaaacctttgtcgatcgtggcatacgccgacgcgcattgctggcgtttggtcgccaggatgtgccgtcggataactgtgtgccatgcgacgacgctatcactatcttaggacaaaccagcgatcatacgctggtggatattgaggattgtcgtcagtcgctaaaagtaggcgatgtggttcgctttgagctggattatacgggcctgttaatggcctgccagaccaaaggcgtcgcctggaggtttacgcgttaa

SEQ ID NO: 369334 - DNA, 1407 bp, Salmonella enterica
atggataccctgcaacaatctccgccagcagagcctgaaggcggtctgcggcgtaacctgaagaagcggcacctgctgatgatgtcgctgggcggcacgattggcaccggcttatttatcggcattgccgaaccgttaagcagcgtcgggccggcgggaaccttactggcctatctgtttgccggaaccattatgctggcgacgatgatgtgtcttggcgaattatcatgcgcttttcctcactccggttcatttcaacattacgcgctgatgtttatgccgtcaccttgctggagctataccattggctggctttactggtttagctgggtcttttccttggcagccgacctcactgccgcagggtttattgctcaccagtttttccccgcggttccggtatatatgttctgcctggcgattctgctcatcctgacggctatcaatctcacctccgcaaaaagttttggcgaatgcgaatactggctttcggccattaaggtcttcgcgatcgtgctgtttatctgcgcgggcggggtcatgatctactcgctaatgggccatagtgactggcacccgacgttaaaaatagacggaatgtggtttccccacggttgggagcaaattgtggtctgtatgacgatcgtgatttactccttccagggggtggaactggtcggaaatgcggcaggggagaccgaatcgccgcacattattttaccgaaagtgatcctggggatcggtctcagaatcattttgttttacggcctggcgattgcggtgctggcgctggtctatccgcatgaactgacgccaaatggacaaagtccctttgtatgggtattctcccacgcgggcattccgggggcggatacgctgatgacgctggtgatcttttccgccgcggtttctgccgctaactcggccatttacgccagttcgcgtatgctgtggtctatggcgggcgatcgctttgcgccagcctgctttggtaaaacgaacggcggcggcgtgccggtgtatgctattttaatcacggccttgttggcgttagtgtcgttgctgacccgctatattcccgcacagcaattttatttatatctgatcgccagtaccgggcaggtgggttgcctggcatggataaccatcggatggtgccagtatcgtttccgacaatcggtgcgtaatggaacgtacgccagcgatttgctacgctatcgatcgccgcttttcccctggacggcccgatttgtcattatcaccaattttgccattatggtcggcacctggtttagtgagcaaggggtagtgataatgttggttgagctggcttttatgatagggattcttttgtcatggtatctcttcagacccactttgagccgattacgtaacacagtgggatga

SEQ ID NO: 369335 - DNA, 570 bp, Salmonella enterica
atgaaacgactcattgtaggaattagcggcgccagcggagcgatttatggcgtgcgcttattacaaattttgcgcgatgtcgatagcgtggaaacgcatctggtgatgagccaggcggcccggcaaacgctggcgctggagacccatttttcgctgcgcgaggtgcaggcgctggccgatgtgacgcacgatgcgcgcgacattgccgccagcatttcctcgggctcttacccgacggcgggaatggttatcttgccctgttcgattaaaacgctgtcggggattgtccacagttatactgacggactgcttacccgcgcggcggatgtgatattaaaagagcggcgacctctggtgctgtgtgtgcgcgaaacgccgctgcatatcgggcatttgcgtttaatgacccaggccgctgagataggcgcggtgattatgccgccggttccggctttttatcatcttcctcagacgttagatgatgttataaatcaaacggttaaccgagtactggatcagtttgacatcccccttccgcacgatctttttgttcgctggcagggcgcatag

SEQ ID NO: 369336 - DNA, 783 bp, Salmonella enterica
atgaagaagaccgttctcgctttgtctttgctgataggtctgggcgcgacggcggccagttacgccgcgctcccgcaaacggttcgtattggaacagataccacctacgcgcctttctcatcaaaagatgccaaaggcgagtttattggctttgatatcgatctcggtaatgaaatgtgtaagcgtatgcaggtgaaatgtacctgggtcgccagcgactttgatgcgcttattccctcactaaaagcgaaaaaaattgatgccattatttcatcgctctctattaccgataaacgccagcaagaaattgcgttttccgacaaactttacgcggcggattcacgcctgattgcggcaaaagggtctcccattcagccgacgctggaatcgctgaaaggaaagcatgtcggcgtgctgcaagggtccacgcaagaggcttacgccaatgataactggcgcacaaaaggtgtggatgtggtggcttatgccaaccaggatcttatctattccgatttaaccgccggtcgtctggatgccgcattacaggatgaagtcgccgccagcgaaggtttcctgaagcagccagcgggcaaagagtatgcgtttgccggtccttccgtgaaggataaaaaatattttggcgacgggacgggggttgggctgcgcaaagacgataccgagctaaaagccgcgtttgataaagcgctgatcgaactgcgccaggacgggacttacgacaaaatggccaaaaagtacttcgattttaatgtctacggcgattga

SEQ ID NO: 369337 - DNA, 783 bp, Salmonella enterica
atgaaaaaactggcgttatccctttctctggtgctggcattttccagcgctaccgcagcatttgccgctattccacaaaagattcgtatcggtaccgatcctacatacgcaccgtttgaatccaaaaatgcacaaggtgaattggtcggctttgatatcgatctggccaaagagctgtgcaaacgtatcaacacacagtgtacgttcgtggaaaacccgctggatgcgctgattccgtctttaaaagcgaagaaaattgatgccatcatgtcctcgctgtccatcactgaaaagcgccagcaggaaatcgcgtttaccgacaagctttacgccgctgattcccgtctggtggtggcgaagaactctgatattcagccgaccgtcgcgtcgctgaaaggtaagcgcgtcggcgtgctacaggggacgacgcaggagaccttcggcaatgagcactgggcgccgaaagggattgagatcgtctcttaccaggggcaggacaacatttattccgatctgacggctggccgtattgatgcggcgttccaggacgaggtcgcggccagcgaaggtttccttaaacagcccgtcggaaaagactataaattcggcggcccggcggtgaaagatgagaagttattcggcgtaggaaccggtatggggctgcgcaaagaggataacgagctgcgcgaagcgctgaacaaagcctttgctgaaatgcgtgctgacggtacttacgaaaagctggcgaaaaagtactttgattttgatgtttatggcggttaa

SEQ ID NO: 369338 - DNA, 687 bp, Salmonella enterica
atgttgtacgggttttcaggcgtaattttacagggcgcgatcgtcacgctggaactggcgctcagttccgtggtgctggccgtgcttatcggtctcgtcggcgcgggggcgaagctttcgcaaaaccgggtaacggggcttatttttgaagggtacaccaccctgattcgcggggtgccggatctggtattaatgctgctgatattttacggattgcaaatcgcgcttaacgtggtgaccgattcgctgggtatcgaccagatagatattgatccgatggtggccggtattatcacccttggtttcatctacggcgcctattttaccgaaacctttcgcggcgcgtttatggcggtgccgaaaggccatatcgaggcggcgacggcttttggttttacccacgggcaaaccttccggcggattatgttcccggcgatgatgcgttacgccctgccggggatcggcaataactggcaggtgatactcaaagcgacggcgctggtgtcgctgctgggcctggaagatgtcgtcaaagccacgcagcttgccggtaaaagcacctgggagcctttctattttgccgtggtctgtggacttatctacctggtatttaccaccgtttccaatggtgtgctgctcttgcttgagcgtcgctattctgtgggcgtgaagagggccgatttgtga

SEQ ID NO: 369339 - DNA, 708 bp, Salmonella enterica
gtgattgagatcattcaggagtactggaaatccctgctgtggacggatggctatcgttttaccggcgtggcgattacgctgtggttgttaatttcatcggtggtgatgggcggtcttctggcggtgattctggcggtaggtcgcgtttccagtaataaattcatccgttttcccatctggctgtttacgtatatttttcgcggcacgccgctgtacgtacagctactggtgttctattcggggatgtatacgctggagatagtcaaaggcaccgatcttcttaacgcgtttttccgcagcggactgaactgtaccgtactggcgctgacgctgaatacctgcgcgtacaccacggaaattttcgcgggggcgattcgttcggtaccgcacggtgaaattgaagcggcacgggcctatggcttctcgtcatttaaaatgtatcgctgcattattttgccgtcggcattacgtatcgccttgcctgcctacagcaacgaagtgattttaatgctgcactctacggcgctggcgtttaccgcgacggtgccggatttgttgaaaatcgcccgcgatattaactcagcgacttaccagccgtttaccgcgtttggcattgccgccgtgttgtatttactcatttcgtatgtcctgataagcctgttccgtcgggcggaaagacgctggttgcagcacgtgtcctctaaataa

SEQ ID NO: 369340 - DNA, 774 bp, Salmonella enterica
atgtcagaaaataaattacacgttatcgatttgcacaaacgctacggcggtcatgaagtgctgaaaggggtatcgttgcaggcccgcgccggagatgtgattagcatcatcggctcgtccggctccggtaaaagcacttttttgcgctgtattaacttcctcgaaaaaccgagcgaaggcgcgattatcgtgaacggtcagaacattaatctggtgcgcgacaaagacgggcagctcaaagtggcggataaaaatcagctacgcttgttgcgtacccgcctgacgatggtgtttcagcactttaacctctggagccacatgacggtgctggaaaatgtgatggaagcgccgattcaggtactgggattaagcaagcacgacgcgcgcgagcgggcgttgaaatatctggcgaaggtggggattgatgagcgcgctcagggcaaatatcccgtccatctctccggcggccaacagcagcgcgtttctattgcgcgcgcgctggcgatggaacctgacgttttactgttcgatgaacccacatcggcgctcgatcctgaactggtcggcgaagtgttgcgcatcatgcaacaactggcggaagaaggcaaaacgatggtggtggtcacgcatgaaatgggcttcgcccgccatgtctcttcgcacgttatttttctgcatcaggggaaaattgaagaagagggcgatccggagcaggtgttcggcaatccgcaaagcccgcgtttacagcaattcctgaaaggctcgctgaaataa

SEQ ID NO: 369341 - DNA, 894 bp, Salmonella enterica
atgcagattctgattaccggcggtacaggcctgatagggcgtcatctcattccccggctgttaacactggggcatcaggtgacggtcgttacgcgcaatcccgataacgcgcgtcagattctcgattccagagtgacattatggaaagggctggcggaacgtgagcacctcaatgagattgatgccatcatcaatctggcgggcgaaccgattgccgacaagcgctggacctcgcaacaaaaagaacggttgtgccaaagccgctgggctatcacgcaaaagttggtggatttaattcatgccagcgctacgccgccctcggtgttgatatccggctccgccacgggctattacggcgatctgggcgacgttgtcgtcactgaagatgagccgccgcacaacgaatttacgcataaactttgcgcccgctgggaacagattgcctgtcgtgcgcagagcgaccagacccgcgtctgcctgctgcgtaccggcgttgtcctggcgccgcaaggcgggattctggggaaaatggttccgccgtttcgcctcggactcggcggtccggtgggtaatggtcgacaatatctggcctggattcacatcgacgatatggtcaacggcattctgtggctgctggataacgatcttcgcggtcccttcaatatggtctcgccgtatcccgtccataatgagcagtttgctcatgcgctgggtcgcgcgctgcgccgcccggcgattattcgcattccggcgacggcaattcgcttattgatgggagagtcgtcagtgctggtgctgggcggacagcgggcgctgccaaaacggcttgaagccgccggattcgcatttcgctggtatgatttagaagaggcgctggcggatgtgattcgctag

SEQ ID NO: 369342 - DNA, 648 bp, Salmonella enterica
atgattgacctttactacgcccccacgcccaacgggcataaaataacgctgtttctggaagaggcggagctggcgtatcgtttgctaaaagtagatatcagcaagggcaatcagtttcgccctgattttttggctatctctcccaataataaaattcctgccatcgtcgatcacgccccggcagacggcggtcaaccgcttagtctttttgaatccggcgaaattcttctctacctggcggaaaaaagcggcaaactgcttagcggggagctgcgtgaacgccataccacgctgcaatggctgttctggcaggtcggcgggttagggccgatgctgggccagaatcatcactttaaccactttgcgccgcaggccatcccctatgcaattgaacgctatcaggttgaaacgcaacgcttatacaacgtcctgaataaacgcctggaaacctccccgtggctgggcggcgaccactacagtattgcggatatcgccagttggccgtgggttaacgcacatcagcgtcagcgaatcgatcttgatacctacccggcggtgtataactggtttgaacgcattcgcacgcgtcctgcgacagcgcgcgcactgttacaagcgcaactgcactgtaacagtacgaaagcgtaa

SEQ ID NO: 369343 - DNA, 645 bp, Salmonella enterica
atgagtaagcctgttattgtgctgtggtcggatgcgaactttttctctccctacgtcttgtccgcctgggtggcattacaagaaaaagggctttcctttactctgaaaactcgcgatctggaccagggagaacatctgcaacctggctggcgaggatatgcgctgacgcagcgcgtaccggtgcttgaggccgacaattttgagctgagcgagtcgtccgctattgcggaatacctggaggagcgtttcgcgccgccgcagtgggagcgtatctacccgcacgatttacaaaaacgcgcccgcgcgcgacagattcaggcgtggctacgcagcgatttactgccgcttcgcgaagaacggcctaccgacgtggtgtttgccggggcgaaaaaagcgccgttaagcgaggctggaaaagccagcgcggcaaaactgtttgcgacggctgaagcgctattggggcaggggacgcaaaatttatttggtgaatggtgcattgccgataccgatctggcattgatgatcaatcgtctggcgctgcatggcgatgacgtgccgacatcgctggcggcatatgcgacattccagtggcagcgtgcttccgtacagcgttttattgcgctttcctcgaagcgttcaggctga

SEQ ID NO: 369344 - DNA, 552 bp, Salmonella enterica
atgaaactgatgttcgcatcggacattcatggttctttacccgccacggaacgcgtgcttgagcggttcgcgcaaagcggcgcgcgttggctggtgatattaggcgatgtccttaaccacgggccgcgaaatgcgctgcctgaaggctatgcgcccgcccaggtcgccgaacgcctgaacgcggtggcgacgcaaatcattgccgtgcgcggcaactgcgatagcgaagtggatcagatgctgctgcatttcccgatcactgcgccgtggcagcaaatattgacgcaagagaggcggctatttttaacgcatgggcacctcttcgggccgacgaatctgcccgctctgcatactggcgatgtgttggtttatggtcatacgcatctgccggtggcgcaacagcaggaaggactgtatcactttaatcctgggtcagtgagtatcccgaaaggcgggtatgcggcaagctacggtattctggatgataatgtgttgagcgtaatcgcactcaatgatcaaagtatcattgcgcaggttgcaattaactcgtaa

SEQ ID NO: 369345 - DNA, 555 bp, Salmonella enterica
atggtggaacagcgtcgtttggcaagtacggaatgggtggatattgtgaatgaagacaatgaagtcattgcacagtccagccgggaacagatgcgtgcgcaacgcttacggcatcgtgcgacgtatatcgtcgttcatgatggtatgggtaaaattctggtgcagcgtcgtaccgaaacaaaagattttttgcccggtatgttagatgctaccgcaggcggcgtggttcaggctgatgagcagctactggaatctgcccgccgcgaagcggaagaagagttgggtattgcaggcgtgccgtttgccgaacacggtctgttttactttgaagaccaacattgccgggtttggggcgcgctgtttagctgcgtttcccacgggcctttcgcgcttcaggaagatgaagtcagcgaagtgtgttggctgaccccggaggagatcaccgcgcgctgtgatgagtttacgccagattcgctcaaagcgctggcgctgtggatgacccgcaacgccaaaaacgaagccgcgctccaggagaaaccggaagagacggaataa

SEQ ID NO: 369346 - DNA, 1020 bp, Salmonella enterica
atgtcgataccccgtaaacggcgcagtaccggtaaagtgactatcgccgatgtagcccaacttgccggtgtaggcacgatgaccgtatcacgagccttacgcacgccggaacaggtctctgataaactccgggaaaaaatcgaagcggcagtgcatgagttgggctatatgcctaatctcgccgccagcgcgctggcgtctgcctcctcgcacaccatcgcgatggtcgtaccgaaccttgcggaagcggggtgttctgaaatgttcgccgggctgcaacaaattttacagcccgcaggctaccagattatgctggcggaatcgcagcatcgcgtggaacaagaggagaagctgctcgaaacgctgctggcctccaacattgccgcagcgattctgcttagcgtcgaacatagcactaccgtgcgccagtggctaaaaaatgcctctatcccggtgatggagatgggcgcgattcgcagcgatcctattgatatgaatatcggtattgataacgttgcggcaatgtatgagctgacggaaatgctgattcagcgcggttatcagaatatcgggctgctatgcgccaatcaggagcagtggatttttcagcaacatctgcacggctggtacaaagcgatgcttcgccaccatatgtcgccaaaccgggtgattaatgccgccttgccgcccaatttttctaccggcgcgtcgcaactgccggagtttttactggcgtggccggagctggacgcgctggtatgcgtatcggatgagctggcctgcggcgcgttatacgagtgccaacgacggcggatcaaagttccggacgatttagcggtggtcgggtttggcgatagcgatgtcagccgggtctgccagccgccgttaaccaccatggccgtaccgcaccgtaagattggcagtgaagccggacgggcgctgttggaaaggttaaatcagggaaactggagcgatcgaaaatccatcgcctccagtttatgtatgcgggaaagctgctaa

SEQ ID NO: 369347 - DNA, 444 bp, Salmonella enterica
atgctgggaacctggttatctgacgcaaccatcacgctacgggagagcgtggaaacgtggtcgcaggcgctggaaatttgcggcaaacccctgctggacgcaggtgttatcgcaccggaatacattacggcgattgttcagcagcaccaaaagcttgggccgtattatgtattagcgccagggttagcgatgccgcatgcgaggccggaagagggggcgaaagggttaggtttatcgttactgaaactacagcacggcgtttcatttggcgcagacgaattcgatccggttgacatcattattatgctggcggcgcctgataagcacagtcatatcgaaatgatatcggcgctggcggaattattttccagtgatgtagatatggaaaaattacatcaggcaaaaaacctggaggacattaaaacgattattgaccgtttctga

SEQ ID NO: 369348 - DNA, 273 bp, Salmonella enterica
atgaaaatcatggcaatttgcggttccggcctgggtagtagttttatggtagaaatgaacattaaaaaagtattaaagaaactcaatattgacgccgaggtggaacactccgatctttcatcggccacgcccggggctgccgatctttttgtaatggccaaagatatcgcggccagcgccagcgtaccggaaagccaactggtggtgatcaataacatcatcgacatcaacgaactggaaacgcagttgcgcgcatggttcgctaaacaataa

SEQ ID NO: 369349 - DNA, 1392 bp, Salmonella enterica
atgtttatccttgaaacgctgaattttgttgttgatattttaaaagtaccctcggtgcttgtagggttaattgcgcttattggtctggtggcgcagaaaaaagcgttttccgatgtggtaaaaggcacgattaaaaccattttaggttttattgtgcttggtggcggcgcaaccgtactggtgggttcattaaacccgctaggggggatgtttgaacacgcttttaatattcagggcattattcctaataatgaagcgatagtctcaatcgcactggaaaaatatggcgcgtccacggcgttaattatggcatttggtatggtggccaatattgtcgtggcgcgctttacgcgtcttaaatatatctttttgaccgggcatcacaccttttacatggcctgtatgattggcgtaatcctgaccgtggcggggtttgagggcgtagggctggtcttcaccggatcgctaatcctggggctggtgatggccttcttcccggcgttggcccaacgttatatgaggcggattaccggtaccgatgacattgcgtttggtcacttcggtaccctgggatatgtgctttccggctggattggcagcctgtgtggtaaaggctcccgctccacggaagagatgaacctgccgaaaaacctcagttttttacgcgacagttctatctcgatttcgctgaccatgatgattatctatctgatcatggcagtcagcgctgggcgtgagtatgtcgaagcgacgtttagcggcgggcaaaactatctggtgtacgccatcatcatggcaatcaccttcgccgccggcgtgttcatcattctgcaaggcgtccgtctgattctggctgaaattgttccggcctttaccggcttttcagaaaaactggtgccaaacgcgcgtccggcgctggactgcccggtggtgtatccctatgcccctaacgcggtactgattggcttcctgttcagttttctcggcgggctggtggggctgttcctgctgggacagatgaagcttgtgttaatcctgcctggcgttgtgccgcacttctttaccggcgcgaccgcaggcgtctttggcaatgccaccggcggtcgccgcggggcgatgatcggcgcatttgctaatggtctattaatcactttcctgccagtgctgttactgccggttctcggcgcgatcggcttcgccaataccacgttctcggatgctgactttggcgtaatcggtattttgttgggcaacctggcgcgttatctgtcgccgatggctatcacggggctggtggtggcgctattcgcgctactggtggcgtacaacgtgttggccaaaaacaaaaaagcgactgccgaagtgcaggaaaatagcggagcgaaagaatga

SEQ ID NO: 369350 - DNA, 831 bp, Salmonella enterica
atgaacgtaaccgaaatcacccaactggcgcgcgatattcgcgtcgccacgctcaaatccttaaaccatcttggctttggtcactatggcggcagcatgtcggtagtggagactctggcggttctgtacggcgcggtgatgaaaatcgaccctgccgacccggactggccggaacgcgattacttcgtactgtcgaaaggccatgcgggccccgcgttgtacagtaccctggcgattaaaggctatttcccgcgcgaagagctgaatacgcttaaccagaacggcacccgtcttcccagccatccggatcggctaaaaacgcgcggcgtggacgccacgaccggctcactgggacagggcatctctattgcgggcggaatggcgttgtcgcataaactggcgcggcgacccaaccgggtattttgcattgtcggcgatggcgagctcaatgaagggcagtgctgggaggcgtttcagtttattgcccaccaccgcctgaataatctgaccgttttcattgactggaataaacagcagcttgacggcgagctggaggagattatcaatccattcgatctggaagggaaattccgtgcgtttggtttcgatgtcgtcaccgtcaaaggcgatgatatcgccggactactggcggtggttcagcctgtgctgcccgctgatgcccggccacgggttgtgatccttgacagcattaaagggcagggggtgccatacctggagcagttaacgaattctcaccacttacgcctgacggatggcatgaagcagacgctcaatgaggccattcatcaactggaggtcatgcatgattaa

SEQ ID NO: 369351 - DNA, 954 bp, Salmonella enterica
atgattaagcttgcgcccgcagggcttaaagacgatatcgaaatgcgcaaagtttacgccggttttgtcgccgggcagattgaggccggaagcccaattattgcgcttgaggctgatttaatgagctcaatggcgatggacagcgtggcgcgtgactacccgcagcatgtcattaactgcggtattatggaggcgaatgtgattggcactgcggcggggctggcgctgaccggtcgtaaaccgtttgtgcatacctttaccgcttttgccagccgtcgctgttttgatcagctcttcatggcgctggattatcagcgtaacaacgtcaaagtgatcgcctccgatgccggagtgacggcgtgccataacggcggcacccatatgtcttttgaagatatggggattgttcgcgggctggcgcactccgtagtactggaggtgacggatgcggtgatgttcgcggatattttacgccagctaatggacctggacggtttttactggctgcgtaccatccgtaagcaggcgacgagtatctatgcgccaggctctacctttaccattggcaagggcaacgtactgcgcgagggcgatgatattacgcttatcgccaacggcattatggtggcggaggcgctggaggcggcgcgccaactggagcaggaaggcgtgagcgccgcggtcattgatatgttcaccttaaagcctatcgatcgcatgttggtgaaaaactacgcggaaaaaacgcggcgtatcgtcacgtgtgaaaaccacagcatccataatggactggggtcagcggtggcggaagtgctggtggaaaactgcccggtgccgatgcgccgtgttggcgtcaaagagcgttatgggcaggtaggaacgcaggatttcttacaacaagagtacggactcaccgccgaagcgattgtagaagccgcgaaatcactgctttaa

SEQ ID NO: 369352 - DNA, 1521 bp, Salmonella enterica
atgtctgtcgttacagaatcaaaaacagccagaaaatgggcaatgcccgatacgctggtcatcatcttttttgtcgccattttaaccagtatcgccacctgggtcgtacccgttgggatgtttgatagccaggaagtgcagtatcaggtcgatggtcagacaaaaacccgcaaagtcgtcgacccgcactcttttcgcattgtgaccaatgaggccggggaagcgcagtatcatcgcgtacaatttttcactaccggcgatgaaagaccagggctgatgaattttccgtttgaagggttaacatccggatcgaaattcggcactgccgtcggcatcattatgtttatgttggtgattggcggcgcattcggcatcgtgatgcgtaccggcaccgtggataacggcattctggcgcttattcgccacacgcggggcaacgaagtcctgtttattccggtgctatttgtcctcttttcgttagggggcgccgtatttggcatgggcgaagaggcggtcgcctttgcaattatcatagccccgctgatggtcaggctgggctatgacagcattaccaccgtcctggtgacctatatcgccacccaaattggctttgccagttcgtggatgaaccctttctgcgtagtcgtcgcccaggggattgccggcgtgccggtactttccggctccgggctgcgtattgtggtctggattgtcgccacgctgattgggctggtttttacactggtctacgcctcacgcgtgaaaaagaatccgctgctgtcccgcgtccacgaatccgatcgctatttccgcgaacagcaggatgaagtcgtccagcgccctttcaccttcggtgactggctggtactgctggtcctgaccggcgtaatgatttgggtcgtctggggcgtgattgtccacgcctggtttattccggagatcgccagccagtttttcaccatgggcgtggtgatcggcctcatcggcgttatcttccgcctcaacggtatgacggtcaacgtgatggcgtcctcattcaccgaaggggcgaggatgatgatcgcgcccgccttgctggtgggttttgctaaaggcattctgctgctggtcggcaacggtgaagccggggaacccagcgtgctcaatacgctgcttaacagtatcgcgcatggcatcagcgggcttaataatgctatcgccgcctggtttatgctgctcttccaggcggtatttaatttctttgtcacgtccggttcgggtcaggcggcgttaaccatgccattactggcgccgctcggcgatctggtcggtgttaaccgtcaggtgactgttctggccttccagtttggcgatggcttcagccatattatctatccgacatcagcctcgctgatggccacgctgggcgtgtgccgggtcgattttcgcaactggctgaaagtgggagcgtcgctgctgggactactgtttattatgtccagcgtggtcgtcattggcgcgcagatgatgggatatcattaa

SEQ ID NO: 369353 - DNA, 2145 bp, Salmonella enterica
gtgtcccgtattattatgctgatccctaccggaaccagcgtcggcctgaccagcgtcagcctcggcgtcatccgtgctatggaacgcaaaggcgttcgtctgagcgtctttaagcctatcgcccagcctcgcgctggcggcgatgcgcctgaccagaccaccactatcgttcgcgcgaactctaccctgccggcggctgaaccgctgaagatgagccacgttgaatctctgctctccagcaaccagaaagacgtgctgatggaagagatcatcgcgaactaccatgcgaataccaaagacgcggaggtggtgctggttgaaggtctggttccgacccgtaaacatcagttcgctcagtctctgaactatgaaatcgcgaaaacgctgaatgcggaaatcgtttttgtcatgtctcagggtaccgacacgccagaacagctgaacgagcgtatcgaactgacgcgcagcagcttcggcggcgcgaaaaacaccaacatcaccggcgttatcatcaacaaactgaatgcaccggttgatgaacaaggtcgtactcgcccggatctgtcggagatttttgacgactcttccaaagcgcaggtgatcaaaatcgatcctgctaaactgcaggaatccagcccgctgccggttctgggcgcggtgccgtggagcttcgacctgattgcgacccgcgctatcgatatggcgcgtcacctgaacgccaccatcattaacgaaggcgatatcaaaacccgccgagttaaatccgtcactttctgcgcgcgtagtattccgcatatgctggaacatttccgcgcaggctcgttgttagtgacctccgctgaccgtccggacgtactggtcgcagcttgcctggccgcgatgaacggcgtagaaatcggcgccctgttgctgaccggcggctatgaaatggacgcacgcatttctaaactgtgcgaacgcgcattcgccaccggtctgccggtctttatggtgaacaccaacacctggcagacttcgctgagcctgcaaagcttcaatctggaagtcccggttgatgaccatgagcgcatcgagaaagttcaggaatacgtcgcgaactacgttaacgctgagtggatcgagtcgctgaccgccacttccgagcgtagccgtcgtctctctccgccggcgttccgctaccaactgaccgagctggcgcgtaaagccggtaaacgcgtagtgctgccggaaggcgacgaaccgcgtaccgtcaaagcggcggcaatctgcgctgaacgcggcatcgccacttgcgttctgctgggcaacccggatgaaatcaaccgcgtcgcggcatctcagggcgttgagctgggcgcaggtattgaaatcgtcgatccggaagtggtgcgtgaaagctatgtcgctcgcctggttgagctgcgtaagagcaaaggcatgaccgaaccggttgcccgcgagcagctggaagacaacgtggtgctcggcacgctgatgctggagcaagacgaagtcgacggcctggtttccggcgcggttcataccaccgccaacaccatccgtccgccgctgcagcttattaaaacggcgccgggtagctccctggtctcttctgtgttctttatgctactgccggaacaggtttacgtttacggcgactgcgcaatcaacccagacccgactgcagagcagctggcagaaatcgcgattcagtctgcggattccgccattgccttcggcatcgaaccgcgtgtggcaatgctctcctactccaccggcacctctggcgcgggcagcgacgtagagaaagtacgtgaagcgacgcgtctggcgcaggaaaaacgtcctgacctgatgatcgacggtccgttgcagtacgacgccgcggtcatggctgacgtagcgaaatccaaagcgccgaactcgccggttgcgggtcgcgctaccgtgttcattttcccggatctgaacaccggtaacaccacctacaaagcggtacagcgttctgccgacctgatctccatcgggccgatgctgcagggtatgcgcaagccggtgaacgacctgtcccgtggcgcactggttgacgatatcgtctataccatcgccctgacggcgatccaggcttcccaacagcagcagtaa

SEQ ID NO: 369354 - DNA, 1203 bp, Salmonella enterica
atgtcgagtaagttagtactggttctgaactgcggtagttcttcactgaaatttgcaattattgatgcagttaatggtgatgaatacctttctggtttagccgaatgtttccatctgccagaagcacgcatcaaatggaaaatggacggcagtaaacaagaagcggctttaggtgcaggcgccgctcacagtgaagcgctgaactttatcgttaacactattctggcacaaaaaccagaactgtctgcgcagttaactgcaattggtcaccgtatcgtacacggcggcgagaagtataccagttccgtagtcattgatgagtccgtcattcagggcatcaaagattccgcctctttcgcaccgctgcataacccggctcacctgattggtatcgccgaagcgctgaaatctttcccgcagctgaaagataaaaacgttgcagtattcgacaccgccttccatcagaccatgccggaagaatcttacctgtatgccctgccgtacagcctgtataaagaacacggcgttcgtcgctatggcgcacacggcaccagccacttctatgtaactcaggaagcggcaaaaatgctgaacaagccggtagaagaactgaacattatcacctgccacttgggcaacggcggttctgtttccgctatccgtaacggtaaatgcgtggatacctctatgggtctgaccccgctggaaggcctggtcatgggtacccgttccggcgatatcgaccctgcgattatcttccacctgcacgacactctgggtatgagcgtggatcagatcaacaaaatgctgaccaaagagtccggtctgctgggtctgactgaagtgaccagcgactgccgttatgttgaagacaactacgccaccaaagaagacgcaaaacgtgcgatggacgtttactgccaccgcctggcgaagtacatcggttcttacaccgctctgatggacggtcgtctggatgcagtcgtgttcaccggcggtatcggtgaaaacgccgcgatggttcgcgaactgtctctgggtaaactgggcgtgctgggctttgaagtcgaccacgaacgtaacctggcggcccgcttcggcaaatctggtttcatcaacaaagaaggtacccgtccggcggtggtgatcccaaccaacgaagaactggttatcgcgcaggacgcgagccgtctgactgcctga

SEQ ID NO: 369355 - DNA, 456 bp, Salmonella enterica
atgtcgacaccggataatcgctccgtaaatttttttagcttatttcgccgggggcagcactacgcgaagacgtggccgatggaaaagcggctggcgcccgttttcgtcgaaaaccgcgtcattcgtatgacgcgctatgccatacgatttatgccgcctgtcgccgtctttacattatgctggcagatagcgctgggcggtcagttaggtccggccgtggcgaccgccctgttcgccctgagcttgcctatgcagggattatggtggttagggaaacgttccgtgacgccgttgccgccttcaatccttaactggttttacgaagttcgcggtaaattgcaggaggctggacaagcgctggcgccggtagaaggaaagccggattaccaggcattagctgacacgcttaagcgcgccttcaaacaactggataaaactttcctggatgatttgtaa

SEQ ID NO: 369356 - DNA, 495 bp, Salmonella enterica
atggaaatgaccaacgcgcaacgtctgattttgtctaaccagtacaaaatgatgacgatgctcgatcccaccaacgccgagcgttaccgtcgcttacaaacaattattgaacgcggctacggcctgcagatgcgcgagctggatcgcgagtttggcgagctgacggaagagacctgccgtaccatcatcgatattatggagatgtaccatgcgctgcacgtctcctggaccaacctcaaagatacgcaagccatcgacgaacgtcgcgtcaccttcctggggtttgacgccgcgacggaagcgcgctacctcggctatgtccgttttatggtgaatatagaaggacgctacactcactttgacgccgggacacacggctttaatgcccagacgccgatgtgggaaaaataccagcggatgttgaatgtctggcatgcctgcccgcgtcagtaccacctgagcgcgaatgaaatcaatcaaatcattaatgcctga

SEQ ID NO: 369357 - DNA, 660 bp, Salmonella enterica
gtgcagtgtaaaggttttctgtttgatctggatggaacgttggttgactcattacctgccgtcgaacgcgcgtggtgtagctgggccgatcgttttaaccttgctcatgatgaggtgctgggctttattcatggcaaacaggcgatcacctcgttgcggcattttatggcgggtaaatcggaggcggaaattgccgctgagtttacgcgcctggagcaaatagaagccactgaaaccgcagggatcaccgcgttgccgggggcagtcgatttactcaatcacctgaataaagcgggcattccgtgggctatcgtcacctccggttcaatgccggtcgcgcgtgcgcgccatcaggtcgcgggccttccagcgccagaggtgtttgtcaccgccgaacgagtcaaacgcggcaaaccggagccggatgcgtatttgctgggcgcacaactgcttggcctggcccctcaggagtgcgtcgtagtagaagatgccccggctggcgtgctgtccgggctggctgcgggctgccacgtcattgcggtcaatgcgccggccgacacgccgcgtctggcggatgttgattttgcgttggatagcctgacgcaattatcggtcgctaaacaaccaaacggcgatgtggtggtgttaagaaagacgtga

SEQ ID NO: 369358 - DNA, 1827 bp, Salmonella enterica
gtgaacggtgaattgatttgggttctctctttactggcgattgccgtcgtgttgtttgcgacgggcaaagtacgtatggatgcggtggctttattcgtcattgttgcttttgtccttagcggtaccttgacccttccggaagccttctccggctttagcgatccgaatgtcattcttatcgccgccttatttattattggcgacggcctcgtgcgcaccggcgttgcgacggtggtcggtacctggctggttaaaatggcgggcagcagtgaaatcaaaatgctggttttactgatgatcaccgtcgccggacttggcgctttcatgagttcaaccggcgtggtggcgatctttatccccgttgttcttagcgtttctatgcatatgcagacctcgccttcgcgcctgatgatgccgctgagttttgccgggcttatcagcggaatgatgacgctggtggcgacgccgccgaacctggtggttaacagtgaactgctgcgtgaaggcctgcacgggttcaacttttttagcgtgacgccgctggggatagtggtgttggcgctcggcattgtttatatgctggtgatgcgcttcatgctaaaaggcgatgcgcccggacaacaggccggtaagcggcgcactttccgcgatcttatccgcgagtaccgtctgacggggcgcgctcgccgtctggcgattcgccccggttcgccaatggtgggacagcggctggacgaccttaaactgcgcgaacgttacggcgccaatgtcatcggcgttgaacgctggcggcgctttcggcgggttatcgtcaatgtgaacggcgtatcggagtttcgcgctcgcgacgttctgctgattgatatgtcggcggcggaggttgacctcagagagttctgcgccgagcaactgctggaaccgatggtattgcgtggagaatatttttccgatcaggcgttggatgttggcatggcggaaatttcgcttattccggagtctgaactgataggcaagtcggtgcgtgaaatcgccttccgtacacgttacgggctgaatatggtcggcctgaaacgcgacggcgtcgcgctggaagggtcgctggccgatgaaccgttattgatgggcgatatcattctggtcgtggggaactggaagttaatcagcctgctggggcaaaaaggccgcgactttgtggtgctgaatatgccggtcgaggtcagcgaagcctctcctgcgcacagccaggcgccgcacgccattttctgcctggtactgatggtggcgctgatgttgaccgatgaaattcccaacccgatcgcggcgattatcgcctgcctgctgatggggaaatttcgctgtattgatgctgaaagcgcgtataaagcgatccactggccgagtattatcttgattgtgggtatgatgccgtttgcgctggcgttgcaaaaaaccggcggcgtctctctggtcgtgcaaggattaatggatatcggcggcggctatgggccgtatatgatgctgggatgcctgttcgtgctgtgcgccgtcataggactgttcatttctaacacggcaacggcggtgctgatggcgccgattgcgctggcggcggcgaaatcgatgggggtgtcgccctatccgtttgcgatggcggtggcgatggcggcatccgccgcctttatgacgccggtttcatcgccggtcaatactctggttctggggccgggaaactatagctttagcgattttgtgaagcttggcgtgccgttcacgcttattgtgatggcggtttgtattgtgatgattccgatgttgtttccgttttaa

SEQ ID NO: 369359 - DNA, 600 bp, Salmonella enterica
atgaagcagagccattttttcgcccatctctcccgcatgaagttgattaaccgctggccgctgatgcgtaacgtgcgtacggaaaacgtctccgaacatagtctgcaggtggcgatggtcgcccatgcgttggcggcgataaaaaaccgtaaatttggcggtcagctcaatgctgaacgcatcgcgcttctggcgatgtatcatgatgcctcggaagtactgaccggcgatctgccgacgccggtaaaatattttaattcccagatagcccaggaatataaagcgatcgaaaaaatcgcccagcaaaagctggttgatatggcgccggatgaattacgcgatattttcgcaccgcttattgatgagaatgcctggagcgaagaagaacaggcaatcgtaaaacaggccgatgcgctttgcgcctacctgaaatgcctggaggagctctcagcgggaaacaatgagtttggactggcaaaaacgcggctggaaaaaacgctggaattacgtcgcagccaggagatggactattttatggcggtgttcgtaccaagtttccatctctctcttgacgagataagccaggattcaccgctttaa

SEQ ID NO: 369360 - DNA, 1215 bp, Salmonella enterica
atgtcccccattgaaaaatccagcaaactcgaaaatgtctgttatgacattcgtggccccgttctgaaagaagcgaaacgccttgaggaagaaggtaataaagttcttaaactgaatatcggcaaccccgcccccttcggattcgaagcgccggacgaaattctggtcgatgtcattcgtaatttgccgacggcgcaaggatattgcgactcgaaagggctttattctgcccgtaaagcgattatgcaacattatcaggcccgtggaatgcgcgatgtaaccgtggaagatatctatatcggtaacggcgtttccgagctgatcgttcaggcgatgcaggcgttgcttaacagtggcgatgaaatgctggttcccgcgcccgattatccgttatggacagcggcggtatcgctctccagcggcaaggcggtacattatctttgcgatgaatcttccgactggttcccggaccttgacgatatccgcgccaaaatcaccccacgtacgcgtggtattgtcattattaatccaaacaaccctactggcgccgtctattctaaagaattgttgatggaaattgtcaacattgcgcgcgagcataatctcatcatcttcgccgatgaaatttatgacaagattctctatgacgatgccgagcatcactctatcgccgcactggcacctgatctgctgaccatcacctttaatgggttgtctaaaacctatcgcgtcgccggcttccgccagggctggatggtgctgaacgggccgaaaaaacatgcgaagggctatattgaagggctggagatgttagcctcaatgcgcctgtgcgccaacgtcccggcgcaacatgctattcagaccgcgctcggcggctatcaaagcattagcgaatttattctgccgggcggtcgactgtatgaacagcgtaaccgcgcctgggagttgattaacgatatccccggcgtttcctgcgtaaaaccgcgcggcgcgttgtacatgttccccaggatcgacgctaaacgttttaatattcacgacgaccagaagatggtgctggacttcctgctacaggaaaaggtgctgctggtgcaaggtaccgcctttaactggccgtggccggatcacttccgcattgtgacgctaccgcgtgaagatgacctggagatggccatcaaccgttttgggcgtttcctctcaggttaccatcaataa

SEQ ID NO: 369361 - DNA, 939 bp, Salmonella enterica
atgataaatgcaaatcgtccgataattaacctcgatctcgatctgctgagaacgttcgtggccgttgccgatctgaacaccttcgccgcggcggcggcggcggtatgtcgtactcagtctgcggtcagtcagcaaatgcagcgtcttgagcaactcgtgggaaaggaattgttcgcccgccatggtcgtaacaaacttttgaccgaacacggtatccagcttctggggtacgccagaaaaatcctgcgttttaatgatgaggcgtgttcatcattaatgttcagtaatcttcagggagtgttaacaatcggcgcttctgatgaatcagctgatactatcctgccttttttgcttagccgaatcagctcggtttatccgaaactcgcgcttgatgtacgggtaaaacgcaacgcctatatggtggacatggttaaatcgcaggaagtagatttggtggtgacgactaaccaacctcattcgctggactgtctgaatttgcggacctcgcccacccattggtattgtgcggctgagtatgttttgcaaaggggagagcccgtaccactagtcctgctggacgatcccagtccattccgcgatatggtgctggagacgctaaatgcagcgggtattccctggcggctggcctatgtggcgtctacattaccggcggtacgcgcggccgttaaagccggtcttggcgtaacggctcgacctgtcgaaatgatgagtcccgaccttcgcgtgctgggcgccgcagacggattaccgcctttgccggatacggaatatctgttgtgccgcgatcccaatagccagaacgagctggcgatggtgattttccatgcgatggaaagctatcaaaacccatggcattacaaccagttttctgcagagggcggagatgatccgctgatggtggaagggggttttgagtag

SEQ ID NO: 369362 - DNA, 444 bp, Salmonella enterica
atgagtatgtcaacatccactgaagtcatcgctcatcactgggcattcgctatctttcttatcgttgccattggcctgtgctgcctgatgctggtaggcggttggtttttgggcggtcgcgcacgcgcgaggcacaagaacgttccgtttgaatcaggtatcgactcggtcggcaccgcccgcttacgcctgtctgccaagttttacctggtagccatgttcttcgttatcttcgacgttgaagcgctgtatctgttcgcatggtcgacttctatccgcgaaagcggctgggttggctttgtggaagctgcaatttttatttttgtgttactggctggtctggtttatctggcgcgtattggcgcgttggactggacgcccgcgcgttcacgccgcgagcgtatgaacccggaaacgaacagtatcgctaatcgtcaacgctaa

SEQ ID NO: 369363 - DNA, 663 bp, Salmonella enterica
atggattatacgctcacccgcatagatcctaacggtgagaatgaccgttaccccctgcaaaaacaggagatcgtaaccgaccccctggagcaggaagttaacaaaaacgtgttcatgggcaaactgcatgacatggttaactggggccgtaaaaactcaatttggccctacaacttcggcctttcttgctgctatgtagagatggtgacctcttttaccgcagtgcatgacgttgcccgtttcggcgcggaagtgctgcgtgcgtcgccacgtcaggctgacctgatggtggtggccgggacctgctttaccaaaatggccccggttattcagcgtctgtatgaccaaatgctggagccaaaatgggtcatttctatgggcgcctgcgccaactccggcggcatgtacgatatttattcggtagtgcagggcgttgataagttcatcccggtggatgtgtatatccctggctgtccgccgcgtccggaagcgtatatgcaggcgttgatgctgctgcaagaatcgattggcaaagagcgccgtccgctctcatgggtggtgggcgatcagggcgtgtatcgcgccaatatgcagccagaacgcgaacgtaaacgcggcgagcgtattgccgtcacgaacctgcgtaccccggacgagatttaa

SEQ ID NO: 369364 - DNA, 1803 bp, Salmonella enterica
atggtgaacaatatgaccgacttaaccgcgcaagacgctgcatggagtacccgcgatcatcttgatgatccggttatcggcgaactgcgcaaccgttttgggccggatgcctttaccgttcaggcgacccgcaccggtatccccgttgtttgggtcaagcgtgaacaactactggaggttggcgatttcttaaagaaactgccgaaaccttacgtcatgctgtttgacttacacggcatggatgaacgcctgcgtacgcaccgtgacgggttacccgccgcggatttttccgttttctaccacctgatttccattgagcgtaatcgcgatatcatgctcaaggtggcgttgtctgaaaacgacctgcgcgtgccgaccttcactaaacttttccctaacgccaactggtacgagcgtgagacctgggagatgtttggtattgatatcgaaggccacccgcacctgacgcgcatcatgatgccgcaaacctgggaaggccatccgctgcgtaaagattatccggcgcgcgcgaccgaattcgacccgtttgagctgaccaaagccaagcaggatctggaaatggaagcgctgacctttaagccggaagactgggggatgaagcgcgggactgacaacgaggactttatgttcctcaacctcggcccgaaccacccgtctgcgcacggtgcgtttcgtattatcctgcaacttgacggtgaagaaatcgtcgactgcgtgccggatatcggctatcaccaccgcggcgccgaaaaaatgggcgagcgacagtcctggcatagctacattccctataccgaccgtatcgaatacctcggtggttgcgtcaatgaaatgccgtacgtgctggcggtagaaaagttggcagggatcaccgtcccggatcgtgtgaacgtcatccgcgtgatgctctccgaactgttccgcattaacagtcatctgctgtacatctcgacctttattcaggacgtcggcgcgatgacgccggtcttctttgcctttaccgaccggcagaaaatttatgacctggtggaagccattaccggtttccgtatgcacccggcctggttccgtatcggcggcgtcgcgcacgacttgccgcgcggttgggatcgcctgctgcgagagttccttgagtggatgccgaagcgtctggattcttacgagaaagccgcgctgcgtaacactattctgaaagggcgttcgcagggcgttgccgcttacggcgcgaaagaggcgctggagtggggcaccaccggcgcagggctgcgcgcgaccgggatcgacttcgacgtacgtaaatggcgtccatactctggctacgaaaactttgactttgaagtgccggtgggcggcggcgtttccgactgctatacccgcgtgatgctgaaagtggaagagctgcgccagagtctgcgcattcttcagcagtgcctcgataacatgccggaagggccgttcaaagcggatcacccgctgaccacgccgccgccgaaagagcgcacgctgcaacatatcgaaaccctgatcacccacttcctgcaggtctcctggggcccggtgatgccggcgcaggagtccttccagatggtggaagcgacgaaggggattaacagttactacctgaccagcgacggcagcactatgagctaccgtacccgcgtgcgcacgccgagctttgcgcacctgcagcagattccctcggcgatccgcggtagcctggtctccgacctgattgtctatctgggtagtatcgattttgttatgtcagatgtggaccgctaa

SEQ ID NO: 369365 - DNA, 501 bp, Salmonella enterica
atgcacgagaatcaacaaccacaaaccgaggcttttgagctgagtgcggcagagcgtgaagcgatagagcacgagaagcaccactacgaagacccgcgtgcggcgtccattgaagcgctgaaaatcgttcagaagcagcgtggctgggtgccggacggcgcgatctacgctattgccgatgtgctgggtattccggcgagcgacgtcgaaggcgtcgccacattctacagccagattttccgtcagccggtcggtcgccacgtgattcgctactgcgacagcgtggtgtgccatatcaccggctatcaggggattcaggccgcgctggaaaaaaatctcaacatcaaaccggggcagacgacctttgatggtcgctttacgctgctgccgacctgctgcctggggaattgcgataaagggccgaacatgatgattgatgaggatactcacagccatctgaccccggaagccattcctgaactactggagcggtataaatga

SEQ ID NO: 369366 - DNA, 1338 bp, Salmonella enterica
atgaaaaacgttatccgtactcccgaaacccatccgctgacctggcgtctgcgcgatgacaaacagccggtctggctggatgaatatcgtagcaaaaacggctacgaaggcgcgcgtaaggcgctgaccggcctgtctccggatgaaatcgtcagccaggtaaaagacgccggtctgaaagggcgcggcggcgcgggcttttccaccggtctgaagtggagcctgatgccgaaagatgaatccatgaacatccgttacctgctgtgtaacgccgatgaaatggagccgggcacctataaagaccgtctgctgatggaacaactgccgcacctgctggtggaaggcatgctgatctccgcgttcgcgctgaaagcgtatcgcggctacatcttcctgcgcggcgaatatatcgaagcggctgtacatttgcgccgtgcgattgctgaagccaccgaggccgggctgcttggcaaaaatatcatgggcaccgggttcgactttgaactgtttgtccacaccggggcagggcgttacatctgtggtgaagaaacggcgctgattaactccctcgaaggccgccgcgcgaacccacgctccaagccgcccttcccggcgacctccggcgtatggggcaaaccgacctgtgtgaataacgtcgaaacgttgtgcaacgtcccggcaatcctcgccaacggcgtggagtggtaccagaacatctcgaaaagcaaagatgcgggtaccaagctgatgggcttctcaggccgcgtgaagaatccgggcctgtgggaattaccgttcggcaccaccgcgcgcgagatcctcgaagactacgcgggcggtatgcgcgatggcctgaaattcaaagcctggcagcctggcggggcgggaaccgacttcctgaccgaggcgcatcttgacctgccgatggagttcgaaagcatcggtaaagcaggcagccgtctgggcaccgcgctggcgatggcggtagaccacgaaatcggcatggtgtcgctggtgcgtaacctggaagagttctttgcccgcgaatcctgcggctggtgtacgccatgccgcgacgggctgccgtggagcgtgaaaattctgcgcgcgctggagcgtggcgaaggccagccgggggatatcgagacacttgagcaactgtgtcgtttcctcggaccgggtaaaaccttctgcgcgcatgcgccgggcgcggttgagccactgcaaagcgcaattaagtatttccgcgaagaattcgaagctggcatcaagcagccgttcagcaatacccatttaatcaatggtattcagccgaacctgctcaaagagcgctggtga

SEQ ID NO: 369367 - DNA, 2727 bp, Salmonella enterica
atggctacgattcatgtagacggcaaagaatacgaggtcaacggcgcggacaacctgctacaggcatgtctgtccctcggccttgatattccgtatttttgctggcacccggcgctgggaagcgtcggtgcttgccgccagtgtgcggtgaagcaataccaaaacgcggaagatacgcgtggtcgcctggtgatgtcctgtatgacgccagccaccgacggtacctttatctctattgacgacgaagaagcgaaacagttccgtgaaagcgtggtggagtggctgatgactaaccacccgcacgactgtccggtctgtgaagagggcggtaactgccatcttcaggatatgaccgtgatgacgggtcacagtttccgtcgctaccgtttcaccaaacgtacccaccgcaaccaggatctggggccgttcatctctcacgaaatgaaccgctgcatcgcctgctaccgttgtgtgcgttactacaaagattatgccgacggcaccgatctgggcgtctatggcgcgcatgacaacgtctacttcgggcgtccggaagacggtacgctggaaagcgaattctccggtaacctggtcgagatttgcccgaccggcgtcttcaccgataaaacgcactccgagcgttacaaccgtaaatgggacatgcagtttgcgccgagcatctgccagcagtgttccatcggctgtaacatcagcccgggcgagcgctatggcgaattacgccgtatcgaaaaccgttacaacggtaccgttaaccactacttcctctgcgaccgcggtcgtttcggctatggctatgtgaacctgaaagaccgtccgcgtcagccggttcagcgccgtggcgacgacttcatcaccctcaacgccgagcaggcgatgcagggcgcggcggatattctgcgccagtcgaagaaagtgatcggtatcggttcgccacgcgccagcattgagagcaactttgcgctgcgtgaactggttggtgcggaaaacttctacaccggtatcgcgcgcggcgagcaggaacgtctgcaactggcgctgaaagtgctgcgtgaaggcggcatttacaccccggcgctgcgggaaatcgaatcttatgacgcggtactggtcttgggcgaagacgttacccagaccggcgcgcgcgttgcgctggcggtacgtcaggcggtgaaaggtaaagcgcgtgaaatggcggcggcgcagaaagtggccgactggcagattgcggccatccttaacatcggccagcgtgccaaacatccgctgttcgtgaccaacgtggacgacacccgtctggatgatatcgccgcctggacctatcgcgcgccggtggaagatcaggcgcgcctgggctttgcgattgcccatgcgctggacaatacagcgcctgcggttgacggtatcgacagcgacttgcaaaacaaaattgatgtcattgtgcaggcgttggccggcgcgaaaaaaccgctgattatctccggcactaacgccggtagcagtgaggtgattcaggcggccgccaacgtggcgaaagcgctgaaaggccgtggcgccgacgtcggtattactatgattgcccgctccgtgaacagcatggggctgggtatgatgggaggcggttcgcttgacgatgcgttgggcgagctggaaaccggcagcgcggacgcggtggtggtgctggaaaacgatctccaccgtcatgcaagcgctacgcgcgtgaacgccgcgctcgccaaagcgccgctggtgatggtggttgaccatcagcgcacggcgattatggaaaacgcgcatctggtgctttccgcggcaagcttcgccgaaagcgatggtacggtcatcaacaacgaaggccgcgcgcagcgcttcttccaggtttatgatccggcctactacgataacaagacgattatgctggaaagctggcgctggctgcattcgctgcacagcaccgtcgaaaaccgcgaagtggactggacacagcttgaccatgtgatcgacgcggtcattgccgccatgccgcaatttgccggcattaaagacgccgcgccggatgcgaccttccgcattcgtgggcagaagctggcgcgcgaaccgcatcgttacagcggtcgtacggcgatgcgcgccaatatcagcgtgcatgaaccacgtcagccgcaggataaagacaccatgttcgccttctcgatggaagggaataaccaaccgactgccccgcgatctgaaattccgttcgcctgggcgccgggctggaactccccgcaggcgtggaacaaattccaggatgaagtgggcggcaaactgcgtcacggcgatccgggcgtgcgtttgattgaagcgactgagggcggtctggattatttcactaccgtgccggcaagcttccaggcgcaggacggtcagtggcgtattgcgccgtattaccacctgtttggcagcgacgaattgtctcagcgttctccggtcttccagagccgtatgccgcagccgtatatcaaacttaacccggcggatgccgcgaagttgggcgtcaatgccgggacgcgcgtctcctttagctacgatggcaatacggtgacgctgccggttgaaatctctgaagggttagcggcagggcaggtagggctgccgatgggtatgcctggcatcgcgccggttctggctggcgcgcgtcttgaggatctgcgggaggcgcaacaatga

SEQ ID NO: 369368 - DNA, 978 bp, Salmonella enterica
atgagttggattacaccggatctgattgagatcctgctgagcattctcaaagcggtggtgattctgctggtggtcgtcacctgcggggccttcatgagctttggcgaacgtcgtctgctgggtctgttccagaaccgttatggaccaaaccgcgttggctggggcggctcgctccagctggtcgcggatatgatcaagatgttctttaaagaagactggatcccgaaattctcggatcgcgtcatctttaccctggcgccgatgatcgcatttacttcgctgctgctctccttcgccattgtgccggttagccctaattgggtggtggccgatttaaacatcgggattttgttcttcctgatgatggccggtctggcggtttacgcggtgctgttcgccggttggtcgagcaacaacaaatactcgctgctgggcgcgatgcgcgcgtctgcccaaacggtgagctatgaagtgtttcttggtctttccctgatgggcgtggtggcgcaggccggttcatttaatatgaccgatatcgtcaataaccaggcgcatctgtggaacgtgattccgcaattctttgggtttgttactttcgccatcgcgggcgtagcggtctgtcaccgtcacccgtttgaccagccggaagccgagcaggaactggcggacggttaccacatcgaatattccggtatgaaattcggtctgttcttcgtgggggagtacatcggtatcgtcaccgtttccgcgctgatggtaacgctgttcttcggtggctggcatggcccgttcttaccgccattcgtctggttcgcgctgaaaaccgcgttcttcatgatgatgttcattttgattcgtgcgtcgttaccgcgtccgcgttatgaccaggtaatgtccttcggctggaaagtttgcctgccgctgacgctcatcaacttgctggtaacggcggctgtcattctgtggcaggcgcaataa

SEQ ID NO: 369369 - DNA, 543 bp, Salmonella enterica
atgaccttaaaagaattattagtaggtttcggcactcaggtacgcagtatctggatgatcggcctgcatgcgttcgccaaacgcgaaacgcggatgtatccggaagagccggtctatttaccgccccgttaccgtggccgtatcgtgctcacgcgcgacccggacggcgaagagcgctgcgttgcctgcaacctgtgcgcggtagcctgtccggtaggctgtatctctctgcaaaaagcggagaccaaagatggccgctggtatccggaatttttccgcattaacttctcacgctgcatcttctgcggcctgtgcgaagaagcgtgcccgaccacggcgattcagttgaccccggacttcgaactgggcgaatacaaacgtcaggatctggtgtacgaaaaagaggatctgctgatttccggtccgggcaaatacccggaatataacttctaccggatggcgggtatggcaatcgacggcaaagataaaggcgaagcagagaacgaagccaagcctatcgacgtcaagagcctgttaccgtaa

SEQ ID NO: 369370 - DNA, 555 bp, Salmonella enterica
atggaattcgctttttatatctgtggcctgatagccatcctcgcgaccctgcgagtgatcacccataccaatccggtacacgcgctgttgtatctggtgatatcgctactggcgatttccggggtgttcttttcgctgggcgcttactttgccggtgcgctggaaattatcgtctacgcaggcgccatcatggtgctgtttgtgttcgtggtgatgatgctcaacctcggcggcagcgaaatcgaacaggaacgccagtggctgaagccgcaggtgtggattggtccggcggttttgtcggccattatgctggcggtcattgtgtacgccattctgggcgttaacgaccagggcatcgacggcacgccgattagcgcgaaagcggtgggcattacgctgttcgggccttatgttctggcggtcgaactggcgtctatgctgctgctggcaggcctggtggtggcgttccacgtcggtcgtgaagagcgtgcgggcgaagtgctaagcaaccgcgccgatgaccgcgcgaaaagaaaaacggaggagcgcgcatga

SEQ ID NO: 369371 - DNA, 303 bp, Salmonella enterica
atgatccccttaacacacggactgatcctcgctgcgattttattcgtcctgggtttaaccggtctggttatccgccgcaatctgctgtttatgctgatcgggctggaaatcatgattaacgcctccgcgctggcctttgtggtcgccgggagctactggggccagaccgatggtcaggtgatgtacattctcgccatcagccttgcggctgcggaagcgagtattggacttgcgctgttgctgcaactccatcgccgtcgccagaacctgaacatcgattcagtaagtgagatgcgtggatga

SEQ ID NO: 369372 - DNA, 1842 bp, Salmonella enterica
atgaacatgcttgccttaaccattattctgccattgattggctttgtactgctggcgttctctcgcggacgctggtcggaaaatctctccgcgactattggcgtgggctccgttggtctggcggcgttggtgacagcgtttgtcgggatggatttcttcgccaacggcaaacaggcgttcagccagccgctgtggacgtggatgtcggtcggtaacttcaacatcggttttaacctggtgctggacggcctgtcgctgactatgctctctgtggtcaccggcgtcggcttcctgatccacatgttcgcgtcctggtacatgcgtggggaagagggctactcccgcttcttcgcttataccaacctgtttatcgccagcatggttgttctggtgctgtccgataacctgctgttgatgtacctcggctgggaaggcgtgggcctgtgctcttatctgttgatcggcttctattacagcgatccgaagaatggcgcagcggcaatgaaagccttcgtggtgacccgtgtcggtgacgtgttcctcgccttcgcgctgttcattctctacaacgaactgggcacgctgaacttccgcgaaatggtcgagctggcgccagcgcactttgctgacggcaacaacatgctgatgtgggcgacgctgatgctgctgggcggcgcggtcggtaaatctgcgcagctaccgttgcagacctggcttgccgacgcgatggccggcccgacgccggtctccgcgttgatccacgccgcgacgatggttaccgccggtgtctacctgattgcacgcacgcatggcctgttcctgatgacgccggaaattctgcatctggtgggtattatcggggcgattacgctggccatggcgggtttcgccgcgctggtgcagaccgacatcaaacgcgtgctggcctattccaccatgagccagattggctacatgttcctggcgctgggcgtgcaggcgtgggatgcggcgattttccatctgatgacccatgcgttcttcaaagcgctgctgttcctggcgtccggttccgtcattctggcctgccatcacgaacagaacatctttaagatgggcggtctgcgtaagtctattccgctggtgtatgcctgcttcctggtgggcggcgcggcgctgtcggcgctgccgctggtcactgcgggcttcttcagtaaggatgagatcctggctggcgcgatggcgaacggtcatatcaatctgatggtggcaggtctggtcggcgcgttcatgacctccttgtacaccttccggatgattttcatcgtattccacggtaaagaacaaattcatgctcatgcagggaaggggattacccaccatctgccgctgattgtcctgatgattctgtctacctttgttggcgcgctgattgtgccgcctctgcagggggggctgccgcagacaactgaactggcgcatggtcgtgtgttgaccctggaaattacctctggcgtagtggcgattgccggcatcctgattgccgcatggctgtggctgggtaaacgtacgctggtgacgtcgatcgccaacagcgcgccgggccgtctgctgggcacctggtggtataacgcctggggctttgactggctgtacgacaaagcattcgtcaagccattcctcggtatcgcctggctgctgaagcgcgacccgcttaatgcgttgatgaacattccggctatcctttcccgttttgcaggcaaaggcctggtactgagcgagaacggttatttgcgctggtatgtggcatccatgagcatcggcgcggttgtagtgctggcgctgttgatggtactgcgttga

SEQ ID NO: 369373 - DNA, 1530 bp, Salmonella enterica
atgttattaccctggttgatattaatcccctttatcggcggctttctgtgctggcagaccgaacgctttggcgtgaaggtgccgcgctggatagcgctgattaccatggggctgacgctggcgctcggtctgcaattgtggttgcagggcggctactcactgacgcaatccgccggtattccacagtggcaatctgaatttgttctgccgtggatcccgcgttttggcatctctatccatctggcgctcgacggactgtcgctgctaatggtggtgctgaccggcctgctcggcgttctggcggtgctttgctcctggcgagaaatcgaaaaatatcagggcttcttccacctgaacctgatgtggatcttaggcggcgttatcggcgtgttcctggccatcgacatgttcctgttcttcttcttctgggaaatgatgctggtgccgatgtacttcctgatagcgctgtggggccacaaagcttctgacgggaaaacgcgtatcacggcggcgaccaagttcttcatctacacccaggcgagtggtctggtgatgctgattgccatcctggcgctggtctttgtgcactacaacgcgaccggcgtgtggaccttcaactatgaagagctgctgaatacgccgatgtcccacggtgtggaatatctgctgatgctgggcttcttcatcgccttcgcggtgaaaatgccggtggttccgctgcatggctggctgccggatgcgcactcccaggcgccgaccgccggttccgtcgacctggccggtatcttgctgaaaaccgccgcttacggtctgctgcgtttctccctgccattgttcccgaacgcgtcggcggagtttgcgcctatcgccatgtggctgggcgttatcggcattttctacggcgcgtggatggcctttacccaatacgacatcaagcgcctgattgcctatacctccgtttcccacatgggcttcgtgctgatcgctatctacaccggcagtcagctggcgtaccagggcgcggtgattcagatgattgcacacggtttgtccgcagccggtctgttcattctgtgcggccagttgtacgaacgtctgcatacgcgtgacatgcgtatgatgggcggcctgtggggcaagatgaagtggttgcctgcgctgtccatgttctttgcggtggcgacgctcggtatgccgggcaccggtaactttgtcggcgaatttatgattctgttcggcagctaccaggtggtgccgatgattaccgtgatctccacctttgggttggtattcgcctctgtatactcgctggcgatgctgcatcgcgcttactttggtaaagcgaagagccagattgccagccaggaactgccagggatgtcgctgcgcgagctgtttatcattctgttgctggtggtgcttctggtactgcttggcttctatccgcagccgattctggatacctcgcattctgcgatgagcaacatccagcagtggtttgttaattctgttactactacaaggccgtaa

SEQ ID NO: 369374 - DNA, 1458 bp, Salmonella enterica
atgacaataactccacaacacctgattgcgctgctaccgctgctgatcgtcggcttgacggtggtggttgtgatgctctccattgcgtggcgacgcaatcatttcctcaatgccacgctgtcggtcattgggcttaacgctgctctggtttcgctttggtttgtcggccaggctggggcaatggacgtcacgccgctaatgcgcgttgacggctttgcgatgctctacaccgggctggtgctgctggcgagcctcgccacctgcacctttgcctacccgtggcttgaaggctataacgataaccaggaagagttctacctgctggtgttaatcgccagcctgggcggaattctgctggcgaacgccaaccatctggcggcgctgttcctcggtattgaactgatctcactgccgctgttcggcctgattggttatgctttccgccagaaacgctcgctggaagccagtatcaaatacaccatcctctccgccgccgcctcgtctttcctgctgttcgggatggcgttggtgtacgcgcagtccggcaacctgtctttcgaagcgctcggtaagagcctcggcgatggtatgctgcacgagccgttgctgctggcgggctttggcctgatgattgtcggtctgggctttaaactctctctggtgccgttccacctgtggacgccagacgtttaccagggcgcgcctgcgccggtttccaccttcctggcgacggcgagcaaaatcgctatcttcggcgtggtgatgcgtctgttcctgtatgcgccggtaggcgacagcgaagcggtacgcgtggtgctgggcattatcgcctttgcctctatcatcttcggtaacctgatggcgctgagccagaccaacatcaaacgtctgctcggttactcttctatctctcacctcggctatctgctggtggcgctgattgccctgcagagcggcgagatgtcgatggaagcggtaggcgtttatctggccggttatctgttcagcagcctcggcgcgtttggcgtggtcagcctgatgtccagcccgttccgcggcccggatgccgactccctgtactcttaccgtggtctgttctggcaccgtccggttcttgccgcggtgatgacggtgatgatgctgtcgctggcaggtatcccaatgacgctgggctttatcggcaaattctacgtgctggcggtcggcgttcaggccagcctgtggtggctggtcgccgccgtggtggtgggttccgcgattggtttgtactactacctgcgcgttgcggtgagtctctacctgcacgcgccgcagcaaccgggacgcgacgcgccgacaaactggcagtacagcgcaggcggtatcgtggtgctgatctccgcgttgctggtgttggtactgggcgtctggccgcagccgctgattagccttgtgcaactggcgatgccgctgatgtaa

SEQ ID NO: 369375 - DNA, 1791 bp, Salmonella enterica
atgcttaatggaaaaacattaatgctgttgttgggtggggttgttctctcgggctgtgggccggagccctccgacccacagggaaataatccggctgagttaaaacaggagcaggctatccagaaagaaaatagcgctcaggccggggatgacactgtccagaaaagacaagccgaggccgcccaacaggctgcgaaaaaagcagccgaatataaagcgaatactgaagccaaagccctggcagatgccaaagcggcatctctggcaacagccgaagcaccgcaatatgaaatgcggacacgtgccgcggcatcaaaagcgttcgctgcacaaggcggtaatgtaatggggaccgcgcgttacgaacactacgatgaaaatccgattaaacaggtaagtcaggcgccgctcgccacgtttagtctggatgtagacactggcagctacgctaacgtgcggcgctttctgaatcagggacaactgccgccgccggaagccgtgcgggtagaagagatgctcaactattttcccgcgcctcagcccgttgcggataagcaggataacactaaacccattgcggcctgtataccgatgccatttgcggttaaatacgaactggctccctcgccgtggaacgcgcagcgtacgctattaaaagttgatgttcaggcccgggacatgcaggtcagggatctgccacctgccaacctggtttttctcattgatacttctggttctatgcagccagcggaacgcctgccgctgatccagtcggcgctaaaactgctggtgaacgatctgcgtgcgcaggataacatcacgattgtgacctacgcgggcggcactcacgtcgcgttggcgtctacagcgggaaataacacaaccgcgattaaagcggcaattgataatctggatgcttacgggagtaccggtggtgaagcgggattacggctagcctacgagcaggccgaaaaagggtttatcaaaggcggcgttaaccgcattttgttgaccaccgacggtgattttaacctcggtattaccgatcccaaagacatcgaagcgctggtaaaaaaagagcgtgagaaaggtattaccttatctacgctgggcgtcggcgatgacaatttcaacgaagccatgatggtgaggattgctgatgtgggtaacggcaattacagctacatcgactccctctccgaggcgcaaaaagtcctcaaggatgagatgcatcaaacgctggtcaccgttgccaaagatgtaaaatcgcaaatcgaatttaatccgcagtgggtgactgagtaccggcagattggttatgaaaaacgccaactgcgcgacgaggatttcaataacgataaggttgatgccggtgatatcggcgcgggtaaacacgtcacgctattctttgaactgacgcttaacgggcagaaagcctcggtggataaactgcgctacgctcaggacaaagccgcctcaaagccaacaaaatcaagcgagctggcgtggatcaaattgcgctggaaagcgccgcagggcagcgaaagtacattagccgagttcccggtcgttatgggaaaaatgccgatctttgctgacgcctctgaagattttcgtttccgcgcggcggtagcggctttcgggcaaaaactgcgtggctcagaaacgctggcagatacgacctggccgcaaattattaaatggggtgaacaggcgcgcggggaagatagacaaggctatcgcgcggagtttattaaactggtaaaactggcggaaggcttgtctcactaa

SEQ ID NO: 369376 - DNA, 1002 bp, Salmonella enterica
atggacaattttcagaaagatattgatgacagggccaatttaaccctgtccaaccgttttgaactgctgttattccgtcttggtacatcgctgcatgaacagaagtcagagctgttcggcatcaatgtatttaagctgcgcgaaatcgtaccaatgcccgcctttacgcgcccggcaggcatgaaagcgccgctattgggcatggtcaatattcgggatcaggtcattccagtgattgatttgccagcggtagcgggctgcaagccggaaaccgggctgaatattttgctgatcaccgaatatgcgcgcagcgtacaggcatttgccgtcgagtcggtggaaaatattatgcgtcttgactggcaacaggtgcataccgccgagaaagccgtcaacggtcgctacatcaccagtattgcctgcctggatgataacaaagaaaccaacaacctggcgctggtgctcgacgttgagcagatcctttatgatattgtcccctccagccacgacctgcgcgccaccaatctgaagaccaataaattttatattacccctggcgcggtagccattgtggcggaagactccaaagtcgcccgcgcgatgctggaaaaagggctgaacgcgatgggaattccgcaccagatgcatgtgaccggcaaggatgcatgggagagaatccagcaactggcgcaggaagcggaggccgaaggtaagccaattagcgagaaaatcgcgctggtcctgacagatcttgagatgccggagatggatggctttacgttaacgcgtaaaattaaaaccgatgaacggctgaaaaagatcccggtcgttattcactcttccctttccggcagcgccaacgaagatcatatacgtaaggtgaaggccgacggctacgtggccaagtttgagattaacgaactctcttcggtcattcaggaagtgctggagcgcgcagcaacaaacagccagggaccactgatcagccgcaaaagcgcctga

SEQ ID NO: 369377 - DNA, 918 bp, Salmonella enterica
atggaattaatttttttaggtacgtccgcaggcgttcccacgcgctcacgcaatgtaacggcaattttattacatctgcaacatccaacgcagccgggagtatggctttttgattgcggcgaagggacacagcatcaaatgcttaataccgcgtttcatcccggtaagcttgagcgcatttttatcagccatcttcacggcgatcatctgtttggcctgccgggtctgctatgcagccggtcgatggcggggaacccccatccgctaaccgtatacgggcctcaaggcgtgcgtgagtttattgcaaccacactgcgtcttagcggttcatggaccgattttccgttgcaaattgaagaagttagcgcaggcgatattcttgacgacggtctgcgtaaagtgaccgcattcaggctggagcatccactggagtgctacggatatcgcgttgttgaacatgacaagcctggcgcgctgaatgccagggcgttaaaagccgcaggcgttacgcccggcccgctgtttcaggcgttgaaggcaggaaaaaccgtcacacttgccgatggaaggcagatcaatggcgccgactaccttgctcccgccgtggccgggaaatcagtggcgattttcggcgataccgcgccctgcgaggccgccctcgcgctggcgcaaggcgtggatgtgatggtccatgaaaccacgctggatgcgtcaatggaggagaaagccaacgctcgcggacacagctccacccgtcaaaccgcgacgctggcgcgggaagctgccgtcggtcggctgatcatgacccatattagctcacgctatgacgataaaggctgtcagcgcttactggcggaatgccgcgctattttcccggcgacggagctggcttacgatttttctgttttcccggtttag

SEQ ID NO: 369378 - DNA, 462 bp, Salmonella enterica
atgattgactggcaggatctccaccatagtgaacttaccgttcctcaactttacgcgttactcaaattgcgctgcgcggtctttgtggtagaacagcgctgtccttacctggatgtggatggcgatgatttagtcggcgacaatcggcatattctgggctggcatcaggatgagctggtggcgtatgcgaggattctgaaaagcgataacgaatcagacccggttgtcattggccgggtgatcgtcagcgatgcctggcgaggggcgaaactgggccagcaattaatggcgaaaacgctggaatcttgtgggcggcactggccggataagccgctatatctgggagcgcaggcgcatctgcaacctttttatgcgcggtttggttttattcccgtcaccgatgtttatgacgaagacggcattccgcaccggggaatggcgcgggaggttcatcaggcataa

SEQ ID NO: 369379 - DNA, 306 bp, Salmonella enterica
atgtcatatcaatttggtgaatcacgtgttgatgatgatctgactttgctcagcgaaacgctggaagaggttttacgttcctcaggcgatcccgccgatcaaaaatacattgagctgaaagcccgcgcggaacaagcgctggaagaggtgaaaaaccgcgtaagccatgcgtcggatagctattattaccgggcaaagcaggccgtttataaagcggatgactacgttcatgaaaaaccctggcagggtattggcgtaggcgcggcggtaggactggtgcttggactgctgctggcgcggcgctaa

SEQ ID NO: 369380 - DNA, 1296 bp, Salmonella enterica
gtgcattctattactactgcgctggaaaatctgacgcgtcagctatcgcaagagataccggcgacgccagggctttgcgttttcgatgcgcctttccctttaaacgatgccttcgatgcattgagctggctggccagccagtcatcctttccgcaattctactggcaacagcgcaatggcgacgaagaagctgccgttctcggggccatcaccgtattttcatcgctcgatctggcgcaacggtttttacgtcagcacgcgcagcctgacctgcgtatttgggggctgaatgcgttcgagccgaaagagggctacttattgctgccgcggctggagtggcgacgtagcggtggtacggcgaccttacgcttacatctgcacagtgacgtttcgctacgcgatgatgcgcgccaggcgaaagcgtttctcgcttctctggtcggcattaagcctgttccggcgctacgcctttcgctcacgagcgaacaacactggccggacaaagacggttgggtgaagctgattcagcaggccacccacaccattgcgcaagaggcgtttgataaagttgtgctggcgcgggccaccgacttacaattctcccgtccggtcaatgccgccgcgatgatggcgtccagtcgtcgtttaaatctcaactgctaccacttttttatggccttttccgccgataccgcctttctgggatcatcgccggagcggctctggcggcggcgtgaaacggcgctgcgtaccgaagcgctggctgggacggtggcgaaccatccggataaccataaagcctggcagcttggcgaatggttaatgaaagacgataaaaaccagcgagaaaatatgctggttgtcgaagacatctgccagcgactgcaaaactgcacccactcgctggatgtgctgccgccgcaggtgctcagactgcgcaaggttcagcatttgcgccgctgtatctggacggcgcttaatcaggcggacgacacgctctgcctgcaccagttacagcctaccgcagcggtcgccgggatccctcgtgaacccgcgcgttgttttatagaacaacatgagccgttcgaacgtgaatggtatgccgggtcggcaggctatctctccacgcggcaaagtgagttttgcgtgacgttacgttcagccaaagtgacggccaatgtggtgcgattgtatgccggcgcgggaatcgtccgcggctccgatccggaacaggaatggcaggaaatagataataaagcggccgggttacgtaccttattgcagatggatgcgtaa

SEQ ID NO: 369381 - DNA, 1671 bp, Salmonella enterica
atgtcagtaagtgcatttaaccggcgctgggcggcggtcatcctggaagccttaacccgtcatggcgtcaggcatgtttgtatcgcccctggttcccgttccacgccgctcacgttggcggcggcagagaatcctgcttttattcaccatacgcactttgatgagcgtgggcttggtcatctggcgttagggctggcgaaagtcagccaacagccggttgccgttattgtcacttcaggtaccgccgtggcgaacctctatccggcgctgattgaggcggggctgacgggcgagaagctcattttacttaccgccgatcgcccgccggagctgattgactgcggcgccaaccaggcgatccgtcaggcggggatgtttgcctcgcacccctcccaaactctgtcgttgccgcgtcccacgcaggatattccggcgcgctggctggtgtcgaccatcgacaatgcgctcgccatgcttcatgcgggcgcgctgcacattaactgtccttttgccgaaccgctgtatggcgatatgaatgacaccggtctggtctggcagcagcgtctcggcgactggtggcaggatgaaaaaccctggctgcgcgaagcgcgtcgactggaaagcgacaaacagcgcgactggtttttctggcgacaaaaacgcggcgtcgttgtcgccgggcgtatgagcgcggaagaaggcaaaaaagtggcgcagtgggcgcaaactctgggatggccattaattggcgacgtattgtcgcaaaccgggcagccgctgccgtgcgccgacctgtggctcggcaacgccaaagcggtgaccgaactgcagcaggcgcagattgtcgtccagcttggcagtagccttaccggaaaacgcttactgcaatggcaggcaacctgcgagccggaagagtattgggtaatcgacaatattgaaggtcgtctggaccctgcgcaccatcgtggacgcagactggtagcgaaaatcgccgactggctggaactacatccggcggaaaaacgtaaaccgtggtgtgtagagatcccgcgtctggcggaactggcgtggcaacgggtggtcgcgcagcgggacacctttggcgaagcgcagctggcgcaccgtatccgcgactatctgccggagcaggggcaattgttcgtgggcaatagtctggtggtgcgtctgatcgacgcgctgtcacagttgccggctggctatccggtatacagcaatcgcggggcgagcggcattgacggcctgctttccacggcggcaggcgtgcagcgcgccagcgccaaatcgacgctggctatcgtcggcgatttatccgcgctgtacgatcttaacgcgctggcgttactacgtcaggtatccgcgccgtttgtgttgattgtggtcaacaataacggcgggcagatcttttccctgctgccgacgccgcaaagcaaacgcgagcgcttttatttgatgccgcaaaacgtccattttgaccatgcggccgccatgtttaacctgcgctatcatcgcccggaaaactgggaagagctggagtctgcgctggctggcgcgtggcgaaccccggcgacaacggtgattgagctggtggtaaacgatacggacggcgcgcagacgttgcagcaacttttggctcaggtaagccatctatga

SEQ ID NO: 369382 - DNA, 759 bp, Salmonella enterica
atgatgttgcacgcgcagcacatgcccggacagcctggggcgccctcactggttttcctgcacggtttttctggcgattgccgtgaatggcagccggttggcgaacagtttcacggctgttcgcggctttatattgacttaccgggacatggcggatctgcggctattccggtcggcggctttgccgatgtcatcagattactgcgcgctacgttaattagttacaacatactaaagttttggttggtgggatactcccttggcggccgggtggcgatgatggcagcctgccagggaataccaggcctgtgcggcctggtggttgaaggcggtcatccggggctgcaaaatgaacaggcgcgcgctgaaagacgattgtccgacgggcgctgggcagagcgttttcgtcatgaaccattgactgaggtttttcacgactggtatcagcagccggtgttcgcctcgctgacggcgcagcaaagacaggcgctaacggcgctgcgtagccagaataacggcgaaacgctggctgcgatgctggaggcgacatcgcttgccgtccagccggatttacgcgaggcgctcaacgcgctggcatttccgttttattatttatgtggcgaacgcgacagcaaattccgcgccctggcgcaggaagtggcggcgacatgccatgtcattcgtaacgccggacacaacgcgcatcgggaaaaccccgctggcgtggtagacagtctggctcagattctgcgtctctga

SEQ ID NO: 369383 - DNA, 858 bp, Salmonella enterica
atgatctatcctgatgaaacaatgctttacgcaccggtagaatggcacgactgctcggagggttacaccgacattcgttatgaaaaatccaccgacggtattgcaaaaatcactattaatcgtccgcaggtgcgcaatgcatttcgtccgttgaccgtcaaagagatgattcaggcgctggcggatgcccgttacgacgacaacgtgggcgtgattattctgaccggcgaaggcgataaagcgttttgcgcgggcggcgaccagaaggtgcgcggcgattacggcggttatcaggatgactccggcgtgcatcacctgaacgtgctggacttccagcgccagattcgcacctgtccaaaaccggttgtcgcgatggtcgcgggttactccatcggcggtggtcatgtgctgcacatgatgtgcgacctgaccatcgcggcggaaaacgccatcttcggccagaccggtccgaaagtcggctcctttgacggcggttggggcgcttcgtatatggcgcgtatcgttggtcagaagaaagcgcgtgaaatctggttcctgtgccgccagtacgatgcgcaacaggcgctggacatggggctggttaacaccgtcgttccgctggcggatctggaaaaagagaccgtgcgctggtgccgcgaaatgttgcaaaacagtccgatggcgctgcgttgcctgaaagcggcgctgaatgccgattgtgacggtcaggccgggctgcaggagctggcgggcaacgctaccatgctgttctacatgacggaagaagggcaggaaggccgtaacgcctttaaccagaagcgtcagcctgacttcagcaaattcaaacggaacccataa

SEQ ID NO: 369384 - DNA, 963 bp, Salmonella enterica
atgcgtagcgcgcaggtataccgctggcagatccccatggacgcgggggtggttctgcgcgacaggcggttaaaaactcgcgacgggctgtatgtttgtctgcgtgacggcgagcgtgagggatggggagagatctctccgctgccgggcttcagtcaggaaacgtgggaagaggcgcagacggcgctcctgacgtgggtgaacgactggcttcaggggagcgagggattaccggagatgccttcggtcgcgtttggcgcaagctgcgcgctggcggaactgactggcgtcttgccggaggcggcggactatcgcgctgcgccgttatgcactggcgatcctgacgatttggtgctgcggcttgccgatatgcccggcgagaaaatcgctaaggtcaaagtgggtctttatgaagcggtacgcgacggcatggtggttaatttgctgctggaggcgatcccggatctgcatctgcgtctggatgcgaatcgcgcctggacgccgctaaaagcccaacagttcgcaaagtatgttaatccggattaccgcgctcgtatcgcctttctcgaagaaccgtgtaagacgcgggatgattcccgcgcctttgcccgtgaaaccggcatcgcgattgcctgggacgaaagtctgcgcgaagcggatttcacctttgaagccgaagagggcgtcagggctgtggttatcaaacctacgctgaccggatcgcttgataaagtgcgtgagcaagtcgctgccgcccatgcgttgggactgacggcggtcatcagctcttcgatcgagtccagcctcggcctgacgcaactggcgcggattgccgcctggttgacgccgggaacgctgcccggactggataccttgcatctgatgcaggcgcaacaggttcgcccctggcccggtagcgcgttgccttgtctgaagcgtgatgagctggaacgactgttatga

SEQ ID NO: 369385 - DNA, 1368 bp, Salmonella enterica
atgacattcacggattggccgtggcgccactggcgtcaggttcgcagccaggcgcccgctctgcgcctgaacgatgaagtgctaagctggcgcgccctctgtgagcgtattgatgcgctggcgggcgggtttgccgcgcagggcgtacgcgagggcgacggtgtcctgctgcgcgccgggaatcagccgcgcactctgttggcatggcttgcgctgatgcagtgcggcgcgcgggttctgcccgtcaatccgcagttgccccagacgttgctggaggcgctggtgccgaagttaacgctgcgttttgcgctgacactggaaggcgaaaacgcgttttccggattaaccgcgttgcagatacaaaagagcacagcggcgtatgctgtggactggcaaccgcagcgtctggtttccatgacgctgacatcgggttccacaggattgccaaaagcggctgtacatacgtgccaggcgcatcttgccagcgcgcagggggtgctttcgctaatgccgtttggccctcaggatgactggctgctatcgctgccgctgtttcatgtatccgggcagggtattatgtggcgttggctcttcgccggggcgcgcatgacggtacgcgataagcaaccgctggagcagatgctggcagggtgtactcatgcttcgctggtgccgacgcagctgtggcggctgctggcgaatcgggcggcggtgacgctgaaagccgttttgctcggcggcgcggtgattccggttgaactcaccgaccaggccagcaaacaagggattcgctgctggtgcgggtatgggctcacggagttcgcgtctacagtatgcgccaaggaggccgatggttctgatgatgtgggcgcgccgctccccggcagagagatcagaatcgtcgataatgaagtctggctgcgcgccgccagtatggcggaaggttactggcgtgatggcaaactgatcccgctggttaatgacgagggctggtttgccacgcgcgatcgcggcgatctgaaccacggcaggctaaccatcgccgggcggctggacaacctgttctttagcggcggcgaaggcattcagccggaggaagtcgaacgcgttattaatgcgcatccgctagtgcaacaagccttcgtcgtgccggtagaagataaagagtttggccatcgtcccgttgcggttgtggagtatgcatcgcaggccggagacgtgaacctcgctgaatgggtccgcgataagttggcgcgttttcagcagccggttcgctggttgacgctgccgtcagaactgaaaaacggagggattaaaatatctcgccgtgcgctccagcagtgggtgtgtgagaactgtaaaaattaa

SEQ ID NO: 369386 - DNA, 258 bp, Salmonella enterica
atggaatggttggttaagaaatcgcattatgtcaaaaagagggcgtgccatgttctggtgctgtgcgatagcggcggttcgctaaaaatgatcgccgaggcgaattccatgatattactgagtcccggcgatatcctgtcgcctttacaggatgcgcagtattgtattaatcgggaaaaacaccagaccttaaaaatcgttgatgcacgctgttattcctgcgacgaatggcagcggttgacgcgcaagccatcatga

SEQ ID NO: 369387 - DNA, 378 bp, Salmonella enterica
atgggcgtaatgtggggactgataagcgttgcgattgcctccctcgcccagttgagtttaggattcgccatgatgcgactgccatcgatagcgcatccactggcgtttatttccgggctgggcgctcttaatgccgcgaccctggcgctattcgccggtttggcggggtatctggtttccgtcttctgctggcataaaacattacacacgctcgcgctcagcaaagcctatgcgctgctgagtctcagctatgtgcttgtctgggtagcctcaatgttgttacccggtttgcaaggcgctttcagcctaaaagcgatgctcggcgtattgtgcattatggcgggggtaatgctgatttttctgcccgccagatcatga

SEQ ID NO: 369388 - DNA, 336 bp, Salmonella enterica
atgatcggcgtcattctggtgcttgccagtctgctcagcgttggcggtcagctctgccagaagcaagcgacacggccattgacggtgggcggacgccgccgtcacttgatgctgtggctgggcctggcgctgatatgcatgggtgcagcgatggtgctgtggctgctggtgctacaaaccctgccggtgggaattgcttacccgatgttgagtctgaattttgtctgggtcacgctggcggcctggaaaatctggcatgaacaggttccgccccgccactggtttggcgtcgcattaattatcagcggcattatcattctggggagtgcggcataa

SEQ ID NO: 369389 - DNA, 1647 bp, Salmonella enterica
atgatgaaatcgatacgctattatctggctttcgccgcatttatcgcgctctactatgttattcctgtcaatagccgcctgctctggcagccggatgaaacgcgctatgccgaaataagtcgggagatgctggcgtctggcgactggatcgtgccgcattttctgggattacgttattttgaaaaaccgatagccggttactggataaacagtctgggtcagtggctttttggcgctaccaattttggcgtgcgggctggcgctattttaacgacattgctggccgcagcgctggtggcgtggctgacgttccgcttatggcgggataaacgtaccgcgttgctcgcctccgttatctttctctccctctttgccgtttacagtatcgggacgtatgcggtactcgacccgatgatcgcgctttggcttacggccgggatgtgttgtttctggcaggggatgcaggccacgacccgaacgggcaagattgggatgtttttgctactgggcgcaacctgcggtctgggtgtattaactaaagggttcctcgccctggccgtaccggtggtgagcgtgctgccgtgggttattgttcagaaacgctggaaggactttttgctatacggctggctggcggtcttgagctgctttgtggttgtccttccctgggcgatcgccattgcgcgacgcgaagccgatttctggcattactttttctgggtggagcatatccagcgattcgccatgagcgatgcccagcataaagcccctttctggtactatctgccggtactgctcgcgggaagtttaccgtggctggggttactgcctggcgcgcttaaactgggctggcgcgagcgaaacggcgcattctatttgctcggatggacgatcatgccgcttctctttttcagcattgcgaaagggaaactgcccacctatgttctttcctgtttcgcaccgatagcgatactcatggcgcgcttcgtcctgcataacgtaaaagaaggcgtcgccgcgctacgtgtcaacggcgggatcaacctggtgttcgggataatcgggatcgtcgcggcgtttgtcgtctcctcatggggcccgctgaaatcgccggtgtggacgcatatcgaaacctataaagtgttttgcgtctggggcgtctttactgtttgggcgtttgtgggctggtatagcctctgtcatagccaacaatacctattacccgcgttttgtccgctgggactggcgctgctgttcggcttttccatccccgacagggtgatggagtccaaacagccacagttttttgtcgaaatgacccaggcgcctttggcatcaagccgctatattcttgccgacaacgtcggcgtcgccgccggtctggcctggagtctgaaacgagacgatattatgctctacggacacgcgggcgaactcaggtatggtcttagctatcctgatgtgcaggataaattcgttaaagccgacgattttaacgcctggctcaaccagcatcgtcaggagggcattattacgctagtactttcaatagccaaagacgaagacatcagcgctctttcccttccccctgcggacaatgttgattatcaggggcgtctggtgttaattcagtatcggcctaaatga

SEQ ID NO: 369390 - DNA, 900 bp, Salmonella enterica
atgacgaaagtcggtttacgcattgatgttgataccttgcgaggaacgcgtgaaggtgttccccggctgctggcgacattgcatcgccacggcgttcaggccagctttttcttcagcgtcgggccggacaatatgggacgtcatctttggcgtctgataagaccgcgatttttatggaaaatgctacgttcaaacgccgcttcgctctacggctgggatatcctgctggccggtaccgcctggccgggaaaaaatatcggcaacgccaatgccgggattattcgtgaaacggcaacataccatgagacgggactacatgcctgggatcaccatgcgtggcagactcacagcggccactggagtatccgccagcttgaagaagatatcgcgcgcggcataacggcgcttgaggccattatcggaaaacccgtcacctgctcagccgcggccggctggcgagcggatgggcgcgttgttcgtgcgaaagagccgttcaacctgcggtataacagcgattgccgtggaaccaccttattccgtccgctactgatgccgggccagaccgggacgccacaaatcccggtcaccttacccacgtgggatgaggttatcggccccgccgttcaggcgcagtcgttcaatacctggattatctcccgtatgttgcaggacaaaggcacgccggtatataccatccatgcggaagtcgaaggtattgtccatcagccgctgtttgaagatttgctcgttcgtgcacgtgacgcggggatcaccttttgtcctctgggcgaactgctgccgacatcgcctgagtctctgccgttggggcaaattgtacgtgggcacatccctggccgtgaaggttggctggggtgccaacaggcagcgagcgcctcatga

SEQ ID NO: 369391 - DNA, 1983 bp, Salmonella enterica
atgaaagccgttatttttgcctatcacgatatgggatgtcagggggtgcaggccgtactggatgccgggtatgagattgccgcgattttcactcatgccgacaatcctgcggaaaacaccttttttggctccgtctcccggctggcggcagaattagggattccggtttatgcaccggataacgtaaaccatcctatctgggtcgaccgcatcgctgagcttgcgccggatattattttttcgttctattaccgcaacctgttaagcgaagaaattctgcacctcgccccggctggcgcgttcaatctgcacggttctctattgcctgcctatcgtggccgtgcgccgctaaactgggttctggttaacggcgaaagcgaaacgggcgtaacgctgcatcgtatggttaaacgtgccgacgccggagagattgtcgccagtcaacgcgttgctattgcgcaggacgatgttgcgcttaccctgcatcataagctatgtcaggccgcgcgccagttgcttaatagcatcctgcccaccatgaaatgcggcgatataccttctgttccccagcgtgagtctgacgctacatattatggtcgccgcaggccggaagatggccttatcgactggcacaaaccggtttccacggtgcataacctggtgcgggcggtagccgccccctggcccggcgcgttcagctataacggctcgcaaaaattcactatctggtcttcccgaatttgtccggatgcgcagggcgcgcttcccggctcggtaatttcggtctctccgctgcgggtcgcctgcgctgatggcgcgctggagattattaccggccaggccggagacggcattactgtacagggctcgcagcttgcacagacgcttggtctggtggcgggcgcgcgtttgaaccgtccaccagcgaccagcggtaaacgtcgcattcgcgttctcatcctcggcgtcaacggttttatcggcaatcatttgaccgaacggttactgaatgaagagaattacgaggtctacggtatggatatcggcagcaacgccattagccgattcctgctccaccctcgatttcatttcgtggagggagatatcagcatccactcagaatggatcgaatatcatgtcaaaaaatgcgatgtcgtactgccgctggtagcaattgcaaccccgattgaatacacccgcaacccgctgcgcgtctttgaacttgattttgaagaaaacctgcggattatccgttattgcgtgaaataccgtaaacgcgtggttttcccgtctacctctgaagtgtacggcatgtgtacggacgcctcttttgacgaggacaaatcgaatctgatcgtcgggccggtgaataagccacgctggatttactccgtttccaaacagcttctcgaccgggtgatttgggcttatggcgaaaaagagggattgcgcttcacgcttttccgtccctttaactggatggggccgcggctggatagcctgaacgcggcgcgtatcggcagttcacgcgcgataacgcagttgattctgaacctggtagaagggacgccgataaagcttatcgacggcggtcagcagaaacgctgtttcaccgatattcgcgatgggatcgaagcattattccgcattattgtgaatgatggcgatcggtgcgatggcaaaatcattaatatcggcaaccctgacaacgaagccagtattcaggaactggcgacgctgttgctcgacagttttgataagcatccgctgcgctgccatttcccaccgtttgccggtttccaggtcgtcgaaagccgtagttattacggcaagggttatcaggatgtcgcacaccggaaacccagtatcgacaatgccaggcgctgtctgggctgggaaccgtctattgcgatgcgtgatacggttgaagaaacgctggacttcttcctgcgcagcgtagatgtcgcggaacgcgcatcatga

SEQ ID NO: 369392 - DNA, 984 bp, Salmonella enterica
atgtttgacgccgcccccataaaaaaagtctcggtggttattcctgtctataacgaacaggaaagcctgccggaattgataagacgcaccaccgccgcctgcgagagtctgggcaaagcgtgggagattttattgatagatgatggtagcagcgatagctcggcggagctgatggttaaggcgtcccaggaagccgatagccatatcatctctattttactcaaccgtaactacggtcaacatgcagcgatcatggcggggtttagccatgtaagcggcgatctcatcattacgctggatgccgatctgcaaaacccgccggaagagatcccgcgcctggtggcgaaagccgatgaagggttcgatgtggtaggcaccgtgcgccagaaccgacaggacagcctgtttcgcaaatcggcgtcaaaaatcattaatctactgatccagcgcacaacgggcaaagcgatgggcgattacggctgcatgttacgtgcctatcgccgccctattatcgatactatgttgcgctgccatgaacgcagcacctttatccctattctggccaacattttcgctcgtcgggctaccgagatcccggtgcatcacgctgaacgtgaatttggcgactctaaatacagttttatgcgtctcattaacctgatgtatgacctggtgacctgcctgacgacgacgccgctgcgcctgttgagtctgctgggcagcgttatcgccatcggcgggtttagcctgtcggtattgcttattgtacttcgcctggcgctggggccgcagtgggcggcggaaggcgtatttatgctctttgccgttctgtttaccttcatcggcgcgcaattcatcggtatgggactgctgggcgaatacatcggtcgcatttataacgatgtccgcgcccgcccccgctattttgttcaacaagttatctacccggaaagcacgccgtttactgaggaaagccaccaatga

SEQ ID NO: 369393 - DNA, 1140 bp, Salmonella enterica
atgtcggactttttgcctttctcccgtccggcgatgggcgcggaagagctcgctgccgttaagaccgtactggactcaggttggataacaaccggcccgaaaaatcaggaactggaagcggcgttttgtcggctaactggcaatcaatatgccgttgccgtcagttcagccactgccggtatgcacatcgcgttgatggcgctgggcattggtgaaggcgacgaggtcattacaccgtcaatgacgtgggtttctacgctaaatatgatcgttttactcggcgcgacccccgtcatggtcgatgtcgatcgcgatacgctgatggtcacgcctgaacatatcgaagccgcgattacgccacaaaccaaagcaattatccccgtccactacgctggcgcgcccgccgatctggacgctatttacgctcttggcgagcgttatggcatcccggtgattgaagacgcggcgcacgcgacaggaaccagctacaaaggtcgccacattggcgcccggggcaccgcgattttctccttccacgccattaagaacatcacctgcgctgaaggcggtatcgtcgtcacggataacccgcaattcgccgataaactgcgcagtctcaagtttcacgggcttggcgttgatgcctgggatcgacagagcggaggacgcgcgccacaagcggaagtcctggcgccgggctacaaatataatttgcccgacctcaacgccgctatcgcgcttgctcagttacagaaactggatgcgcttaacgctcgccgcgccgccatcgcagcgcagtaccaccaggcaatggcagacctgccttttcagcctctgagccttccgtcgtgggaacatattcacgcctggcatttattcattatccgggtcgatgaagcccgttgcggtattacccgggatgctctgatggcatcgctgaaaacgaaaggcatcggcacagggctgcatttccgcgccgcgcatacgcaaaaatattatcgcgaacgtttcccaacgctcacgctgcctgacaccgagtggaacagcgagcggatctgctcactgccgctcttcccggacatgaccgagagtgactttgatcgggtcattaccgcccttcatcagatagcaggacaataa

SEQ ID NO: 369394 - DNA, 606 bp, Salmonella enterica
gtgctggcatttaccctacgctttattaaaaacaaacgctatttcgcgattctggcgggggcgttggttattatcgccgggttgacctcacaacatgcctggagtggtaacggtctaccgcagattaacggtaaagcgctggcggcgctggcgaagcagcatccggtagtcgtgttattccgccatgccgagcggtgcgatcgttccgataatacctgcctgtcagacagcacggggattacggtcaagggtgcgcaagatgccagagcgctgggtaaagccttcagtgccgatatacaaaattacaatctctattccagtaatacggtgcgcaccatccagtcggcaacctggttttctgcgggcaggtcgcttacggtggataaaaaaatgatggattgcggcagcggtatttatgcttcaatcaatacgttactgaaaaagtcgcagaataaaaatatagtcatttttacccataatcattgtttgacgtatattgcaaaaaataagcgcggcgtaaagtttgatccggactatcttaatgcgctcgttatgcatgcggaaaacggaaaactctttttagatggtgaatttgttcccggctag

SEQ ID NO: 369395 - DNA, 426 bp, Salmonella enterica
atgcgtcaacgaactatagtttgcccattaattcaaaatgatggctgttatctgctgtgcaaaatggccgacaaccgcggcgtctttcccggtcagtgggcgctgtcgggcggcggggtcgagccaggcgaacgcattgaagaggcgctgcgtcgggagattcgggaagaactcggcgaacaactgattctgagcgatattacgccgtggaccttccgcgacgatatccgcgttaaaacctacgctgatggcagacaagaagagatttatatgatttatctcatcttcgactgtgtttccgctaatcgcgatatatgtattaacgacgaatttcaggactacgcctgggtcaagccagaagaactggcgctgtatgatttgaatgtagcgacacgccacacattagcattgaaagggttattataa

SEQ ID NO: 369396 - DNA, 567 bp, Salmonella enterica
atgtgcttgctggaaagggtaaaaatgaaaaaaagcatattattaggttttgccggaatgctgttcgtttctgcatcggcgcaggccatcagtattagcggccaggcgggcgaagattacaccaacattggcgtgggttttggtacggaatcgacgggactggcgctaagcggcaactggatgcacaacgatgatgatggcgatgctgcgggcgtgggtctggggctgaacattccggtgggaccgctgctggcgacggtaggcggtaaaggtatttataccaatccgaaagacagcgatgaaggctatgcggcggctgtcggcggtgggctacaatggaaaatcggcaacagcttccgtctgttcggcgagtattattattcaccagattcgctgtccagcggtatcgacagttatgaagaagcgaatgcaggcgcgcgtttcaccattatgcgcccgctgagcattgaagccggttatcgttacctgaacctggcgggtaaagacggcaaccgcgataatgcgattgctgacggcccttatgttggcgtaaacgccagcttttga

SEQ ID NO: 369397 - DNA, 1197 bp, Salmonella enterica
atgctaaatgtggaaatgctatccaccggggatgaggtgttgcacggacaaatcgttgacaccaatgccgcctggctggctgattttttctttcatcagggcgttccgttatcacggcgaaatacggtaggcgataatctggacagtctggtcgctatcttgcgtgaacgcagtcaacatgctgatgttttgattgttaatggcgggttagggccgaccagcgatgatttaagcgcgctcgccgcggcaacggcaaaaggcgaaggattagtactgcaccaggcgtggctgaccgaaatggaacgctactttcagcagcgtggccgcgtgatggcgccgagcaaccgtaaacaggcggaactgcctgccagcgcggagtttattaataatccggtcggcactgcctgtggatttgcgctccagctcaaccgctgcctgatgtttttcacccccggcgtaccgtcggaatttaaggttatggtggagaaggaaatcttaccgcggttacgcgcgcgtttttcgctgccggagccgccgctttgcctgcggttaacgacttttggacgttcagaaagcgacctcgcgcagcgtctcgattcactgccgttgccgcccggggtgacgatggggtatcgctcatcaatgccgatcattgaactgaaattgaccggcccggctacgcaacgggaggcgatgctggcgttatggccagaggtcaaacgggttgccgggcagaacctgatttttgaaggtacggaaaacctgccggcgcaaatagcccgccgcctgcaggaaaggcagttgagtctgacgttgagcgagcaatacaccagcggcttactggcgctacagctttcccgcgccggggcgcctgttcttgccagcgaagtcgttccttctcaggaagagacgctggcgcaaacggcgcactggacgacagaacggcgcagcaatcattatgccggtctggcgctggccgtgtcggggctggaaaacgaacatcttaatttcgcgctggcgacgccggatggcacgtatgccttacgcgtgcgttttagcgccaatcggtatagcctggcaatacgtcaggaggtctgcgcgatgatggcgctaaatatgctgcgccgctggcttaatggcgaggacattaccagcgagcatggctggatagacgtggttgaatcattgacatcataa

SEQ ID NO: 369398 - DNA, 783 bp, Salmonella enterica
atgttggaatcaagtaaagtcccggctcttactcgcgcaatcgacatcctcaatttgatcgcgcgtattggcccatgcagcgcggcaatcattattgaaacgctgcgtattccaaaaagcaccgcgtacctgctgttgaatgaattaaaacgtcagcgatttattagcctcgatcatcaggataactactgcctgtggactaagctcgttgaattgtcgggtcatgcgctcagcaagatggatctgcgggagctggcgcgtcctcgtctaacacaactgatggatgaaaccgggctgctgtgtcacttggggatcatcgaccacgaaaatgcgtattacatactgaaagtggaatcctcatccactatcagcgtgcgctcgcatgaggggaaaagcctctctctttatcgttccggcatcggcaaatgcctgctggcatggcagccggccgccgtacgcaaagccattattgaacaactggtatgggagcgagccacgctgaccaccatcaccgagccgcaacaattgaatgatgagctggaacgcattcgccagcgtggatggagctttgataacggggaggattatccggatgtccgctgcgttgccgcaccggtatttaatgccagaaacgaactgaccgcggcaatttcagtggtcggcacgcgcctgcaaatcaacgaagagaatcttgattatttggccggtaaagctattgcctgtgccaaagatatttcacgcctgttgggatggaaaagtcccttcgactcactcgcatcttaa

SEQ ID NO: 369399 - DNA, 1206 bp, Salmonella enterica
atgactcttcctaaaattaaacacgttcgagcctggtttattgggggcgctaccgcagagaaaggggctggcggcggggattatcacgaccagggaggaaatcactggattgatgaccatatcgccactcccatgagcaaatatcgcgactatgagcagtctcgtcagtcttttggaatcaacgtgttagggacgctgattgtcgaagtagaggcggaaaatgggcagacggggttcgccgtttcgacagcaggggagatgggctgttttatcgtagaaaaacatcttaaccggtttattgaaggcaaatgcgtaagcgatatcaaacttattcacgatcagatgctcggcgcgaccatgtactactccggttccggcggtctggtgatgaacacgatttcctgtgtggatctggcgctgtgggatctgtttggcaaggtggttgggctgccggtttataaattgctgggcggagcggtgcgcgatgaaattcagttttacgccaccggcgcacgcccggatctggctaaagaaatgggctttatcggcggtaaaatgccgactcactgggggccgcacgatggtgatgcggggatccgtaaagatgccgcgatggtggcggatatgcgtgaaaagtgcgggccggatttctggctgatgctcgactgctggatgagtcaggatgtgaactatgcgactaaactggctcacgcctgtgcgccatttaatctcaaatggattgaagagtgtctgccgccgcagcagtatgaaggctatcgcgaattaaaacgcaacgcgcctgcagggatgatggttaccagcggcgaacaccatggtacgctgcaatccttccgcactctggcagaaaccggcattgatattatgcagccggatgttggttggtgcggcggattaaccacgctggttgagatcgccgcgcttgccaaatcgcgcgggcaactggtggtgccgcacggttcgtctgtctattcgcaccatgcagttattactttcactaatacccctttcagcgagttcctgatgaccagcccggactgttccaccctgcgtccgcaatttgacccgattctcctggatgagccggtgccggtgaatggacgcatccataaatcagtgctggataagccgggcttcggcgtcgagcttaaccgtgactgtcacttgaaacgcccttatagccactaa

SEQ ID NO: 369400 - DNA, 792 bp, Salmonella enterica
atgagcatcactttacttgacggcgtagtgaagaaaaaccgcgcacgtttaattccttttatgttggcactgtatgtactggcgtttctggatcgttcaaatattggttttgccaaagagacctatcagatagataccgggctaagtaatgaagcctacgcgctaggggccggtattttctttgtggtttacgctttccttggcgtaccggctaacctgctgatgcgcaaatttggcgcaagaacctggatcggcacgactaccctgctgtggggctttctctctgctgcgatggcctgggcggatagtgaagcaaaattcctgataatccgcacgctattgggcgcggcggaggctggatttttccccggcatgatctatctaacttcacaatggttcccgcagcgtaaccgtgccagcattatggggctattttatatgggcgcgccgctggcgttaacgttgggttcgccgctctccggcgctctgctggagatgcatggttttatggggcacccgggatggttctggatgttcgttatcgaaggcctactggcgattggcgcagggatattcacctttttctggcttgatgacactccgcagcaggcgcgttttcttagcctggaagaaaagaacgcgcttatcaggcaactggcgagcgaagaagagaaaaaggtcacgtcaaggcttgcggatgcgctgcgtaatggacgcgtctggcaactggctattatttatctgacgattcaggtggcggtatacggactcatctttttcctgccgacctag

SEQ ID NO: 369401 - DNA, 486 bp, Salmonella enterica
ttgggcactaaagtgggctttaccgcttcggtggtaacagcggttccctgggtggcggctttgcttggcacatggcttattcctcgctactccgaccgtaccggcgatcgccgtaacgttgcggcagtgacgttactggctgcgggtattggcattggcctgtcaggtctggtttctccggtgctcgctattctggcgctctgtgttgcagcagtaggatttattgccgttcagcccgtattctggaccatgccgacgcagctactttccggtacggctctggcggcaggaattggtttcgttaatctgtttggcgctgtgggcggttttattgccccaattctgcgcgtaaaagcggaaacgttgtttgccagcgatgcggcgggcctgctgacgctggccggagtcgccatcattggctcattaattatcttcacgctgagcgttaatcgtccggtggcgcaatccggcgctgcgcatcattaa

SEQ ID NO: 369402 - DNA, 804 bp, Salmonella enterica
atgaacgcattgttatcaaatccttttaaagaaggattacgtaaaggggatacgcaaattggtttgtggctcagttcaaccacctcttatatggcggagattgcggcgacgtcgggttatgactggttgttaatagatggcgagcacgcgcctaatacggtgcaggacttgtatcatcagttacaggccatcgccccatacgccagccagccggtgattcgcccgatcgagggaagtaaagcgctcattaaacaggtactggacatcggggcgcaaacgctactgatcccgatggttgacaccgcagaacaggcgcgccaggtcgtttccgctacccgatacccgccgttggggcaacgaggcgttggcgcgagcgtggcgcgtgcggcgcgctgggggagaatcgacaactatatggcacaggccaatgagtcgctctgcctgttggtgcaggttgaaagcaaagtggcgctggaaaaccttgacgcgattctggaggttgaaggcattgatggcgtctttatcggtccggcagatctctctgcttcattgggttaccccgataatgccggacacccggaagtgcagcgaatcattgaatcgtgtatttatcgtattcgcgctgccggaaaagcggcgggttttttggcggtcgatccggcaatggcgcagaaatgtctggcgtggggcgcgaattttgtcgcggtcggggtagatacgatgctctacaccgaggcgctggacagcaggttggcgatgtttaaatctgttcagtcagtaagcacggcaaaacgtagttattga

SEQ ID NO: 369403 - DNA, 177 bp, Salmonella enterica
atgccggatggcacgtatgccttacgcatgcgttttagcgcctatcggtatagtctggcaatacgtcaggaggtttgtgcggtgatggcgctaaatatgctgcgccgttggcttaatggcgaggacattaccagcgagcatggctggatagacgtggttgaatcattgacggcatag

SEQ ID NO: 369404 - DNA, 1023 bp, Salmonella enterica
atgaatatatgtgtaaattcactttaccgattgagcacaccgcaatttcacagtttatattcagaagatgtgagcgatgaggcgcttgcgttgttgattggcgaagtagagaacggtaatcagaattgtattgatctgttatgcaatcttgcgttacgcaacgatgacctgggacataaagttgagaaattactttttgatctctttagcggaaaaagatcgggatcaccagatatagacaaaaaaatcaatcaggcttgccttgtattacatcaaatcgccaataacgatataacaaaaaataatactgagtggaaaaagctacatgccccttccagattactttatatggccggttcagcgacaaccgacctttctaaaaaaataggaatagcacataaaattatgggcgaccagttcgctcagacagatcaagaacaggtaggagttgaaaatctttggtgtggtgcgcgaatgttgtcgtcagatgagctggcagctgcaacgcaaggtctggttcaagaatcacctcttctctcggtaaactatcctattgggctgattcatcctaccaccaaagaaaatatattaagcactcagctacttgaaaagattgctcaatcaggattatctcacaatgaagtcttcctggtaaatacaggagatcactggcttctctgtttattttataaacttgcagaaaaaataaaatgccttatatttaatacttattatgatttaaatgaaaatactaagcaagagattatagaagcagcaaaaattgcaggtatatcagaaaacgaaaatattgattttattgaaactaatttacaaaataatgtacccaacggctgtggtctattttgttaccatgcaattcaactcttatcgaatgcaggacaaaacgatcctgctaccacactacgagagtttgcggaaaatttcttaacgctttcagtagaggaacaaacactatttaacacccaaacccggcgacaaatatatgaatacagtctccagtaa

SEQ ID NO: 369405 - DNA, 1191 bp, Salmonella enterica
atgagcgacacacgttttgaaagttgtattaaatgtacggtgtgcaccaccgcatgcccggtcagccgcgttaatcctggctaccctggccctaaacaggccggaccggatggcgagcgcctgcgtctgaaagacggcgcactgtatgatgaggcgctgaaatattgcattaactgcaaacggtgtgaggtcgcttgtccgtcggacgtgaagattggcgatatcatccagcgcgcccgcgcaaaatacgatacgacgcgcccgtcattgcgtaattttattctcagccataccgatctgatgggcagcgtttcaacgccgttcgcgccggtggtcaataccgccaccgcattaaagccagtgcgccagttgcttgattacgcgctcaaaatcgatcatcgccgcaccttaccaaaatactctttcggcaccttccgccgctggtatcgtagcgtggcggcgcagcaggctaaatacaaagatcaggtcgcctttttccatggctgttttgtgaattacaaccatccgcagctcggaaaagatctgattaaggtgctgaacgcaatgggtactggcgtacagttactgagtaaagagaagtgttgcggcgtaccgctgatcgctaacggttttacggataaagctcgcaaacaggctatcagcaatgtggagtcgctacgcgaggcgattgccgtcaaaggtattccggtcatcgccacgtcatccacctgtacgtttgcgttgcgcgatgaatatcctgaagtgctggacgtggacaacgccgggctgcgcgaacatatcgagctggccacccgctggctatggcgcaaactggatgccgggaaaacgctgccgcttaatcctttaccgctgaaagtggtctaccatacgccgtgtcatatggaaaaaatgggctggacgctttacacgcttgaactgttgcggcaaattccggggcttgaattgacggtacttgattcacagtgctgcggcattgccggtacgtatggatttaaaaaggaaaactatccgacatcacagtccatcggcgcgccactgttccgccagattgaagagagcggcgccgacattgtcgtcaccgattgtgaaacctgtaagtggcaaattgagatgtctacaagcaaacgctgcgaacaccccattacgctactggcccaggcgctcggctaa

SEQ ID NO: 369406 - DNA, 1260 bp, Salmonella enterica
atgaaatttgatacggttattatgggcggcggtctcgccggtttgctatgcggactgcaactccagcagcatggattacgctgcgccatcgtcacccgcggacaaagcgcgctgcatttttcctccggctcgctggatctactcagcgccctgcccgacggccaaccggtgaccgacattaccgccgggcttgatgcgctgtgccgccaggcgcctgaacatccttattcgcgtttaggcgcgcaaaaagtccttacgctggcgcaacaggcgcaaacgctacttaacgccagcggcgcgcagttatacggtgacgtacagcaggcgcaccagcgtgtcacgccgcttggcacattgcgttcaacctggcttagctcgccggaagtaccggtctggccgttatccgcacagcgaatttgcgtcgtcggcgttagcggattactggatttccaggcgcaccttgcggcagcgtcgctgcgccaacgcgacctcaacgtggaaaccgcagaaatcgaccttccggaactggacgtactgcgtgataacccgacggaatttcgcgcggtcaatattgcgcgtctgcttgataacgaagaaaaatggccgctgctgtacgacgcgctgtcgccaatagcgacaaactgcgacatgatcatcatgcccgcctgtttcgggctggcgaacgatacgctgtggcgctggcttaacgaacgtctgccctgcgcgctcacgctgctgccaacgctgccgccatcggtgctcggtattcgtctgcacaatcagctccagcgccagtttgtccgtcagggcggcatctggatgccgggcgatgaagtgaagaaagtcacctgccgtcgcggtaccgtgagcgaaatatggacccgcaaccatgccgatatcccactgcgcccgcgttttgccgtacttgccagcggtagcttctttagtagcggtctggttgccgagcgcgaagggatccgcgaacctattttagggctcgacgtacagcaaacggccacccgcgccgaatggtatcaacaacatttctttgacccacagccctggcagcagtttggcgtcgtgacggatgacgccttccgcccctcccttgcgggcaacacggtagaaaatctgtatgcaataggttctgtgctggcgggattcgatcctatagctgagggatgcggcggcggtgtctgcgcagtcagcgccctccaggccgcgcaccatatcgctgagcgtgcaggagaacagcaatga

SEQ ID NO: 369407 - DNA, 1629 bp, Salmonella enterica
atgaaaactcgcgactcgcaagcaagtgacgtgattatcattggcggtggagcaacaggcgcagggatcgcccgcgactgcgcgctgcgcggtttacgtgtcattctggtggaacggcatgatatagcgaccggcgcgaccgggcgtaaccacggactgctgcacagcggcgctcgttatgcggttaccgacgcggaatccgcgcgcgagtgcattagtgaaaaccagattttaaaacggatcgcccgccattgcgtcgaaccgacggatggtctgtttattacgttgccggaagatgatcttgcgtttcaggccacctttattcgcgcctgtgaagcggcgggcattcgcgctgaagccatcgatccgcagcaggctcgcatcatcgaaccttccgttaaccctgcgctcatcggtgcggtaaaagtgccggatggcaccgtggaccctttccgccttaccgccgccaatatgctggatgccagagaacatggcgcaatcgtgttaacggcgcatgaagtgaccgggctcattcgtgaaggcgcaacggtctgcggcgtccatgtgcgcaaccatctcactggcgaaacccagacgcttcacgcgccggtggtggtcaatgcggctggtatctgggggcaacggatcgccgaatacgccgacctgagtattcgcatgttcccggcgaaaggctcgctgttgatcatggaccatcggatcaaccagcatgtcattaaccgctgccggaaaccatcggatgccgacattctggtacctggcgatacgatttcattgatcggcactacctctacccatattgattacaatgagatagacagcaaccgcgtcaccgcagatgaagtcgatatcctgctgcgtgaaggggaaaaactggcccctgtcatggcgaaaacgcgtattctgcgcgcgtattccggcgtccgcccgctggtggccagcgatgacgatcccagcggtcggaacgtcagccgcggtattgtgttgttcgaccacgccgaacgcgacgggcttgatggcttcattaccattaccggcgggaagctaatgacttaccgcctgatggcggaatgggcgaccgacgccgtgtgccgcaagttgggcaatactcgcccctgcatcacggcggatacgccgttgcctggctcaaaagagtccacggaacatacgctgaaacgcattatctcgcttcccgcgccgctacgcggatcggcggtttatcggcatggcgatcgcacgccggggtggctgagtgaaggccgccaacaccgtagcctggtctgtgaatgcgaggccgtcacggcgggggaagtgcagtatgccgtcgaaaacttaaccgtgaatagcctgctggatctgcgccgtcgcacccgcgtagggatgggcacttgccagggcgaactgtgcgcctgccgcgcggccgggctattgcagcgttttaatgtgacgaccgcggcgcaatctattacgcaactctctgaatttctgaatgagcgctggaaaggcgtacaacctgtcgcctggggagacgcgctgcgcgaaagcgaattcacgcgctgggtttatcagggattatgcggtctggagaaggagcaccaggatgaaatttga

SEQ ID NO: 369408 - DNA, 1359 bp, Salmonella enterica
atgttgagtatttttaaaccagcgccgcataaagcgcgcttgccagcggcggagattgatccgacctatcgccgattacgctggcagattttcctggggatattctttggctatgccgcgtattatctggtgcgcaagaactttgccctcgcgatgccctacctggtagaacagggtttttcacgcggcgatctgggctttgcgttgtccgggatttccatcgcttatggtttttcgaaatttataatgggttcggtgtccgatcgctcgaatccgcgcgtttttctgccggcagggttgattctggccgcagcagtcatgttgtttatgggctttgtgccgtgggcgacatccagcatcgccgtgatgtttgtgctgttgttcctttgcggctggttccaggggatggggtggccgccgtgcggacgtacgatggttcactggtggtcgcagaaagagcgcggcggcattgtgtcggtctggaactgtgcgcataacgtcggcggcgggatcccgccactgctgttcctgctggggatggcgtggtttaacgactggaaagcggcgctctatatgccagcctttggcgcgattgtggtggcgctgttcgctttcgcaatgatgcgcgatacgccgcaatcctgcggtctgccgcctatcgaagagtataaaaacgactatccggacgactacaacgaaaaagcggaagaagagctgactgcgaagcagatcttcatgcagtacgtactgccgaacaaattactatggtatatcgctatcgccaacgtgtttgtttatctgctgcgctacggcatcctcgactggtcgccgacctacctgaaagaagtgaagcatttcgcactggataaatcctcctgggcctacttcctgtatgaatacgcgggtattccgggcacgctgctgtgtggctggatgtcggataaagtcttccgcggcaaccgcggtgcgaccggcgtgttctttatgaccctggtgactatcgcgaccatcgtttactggatgaacccggcagggaacccgaacgttgatatggcttgtatgattatcatcggcttcctgatctacggcccggtaatgttgatcggtctgcacgcgctggaactggcgccgaaaaaagcggcgggtacggcggcgggctttaccggtctgtttggttacctgggcggttctgtcgctgcaagcgccattgtgggttataccgttgacttcttcggttgggatggcggctttatggtgatgattggcggcagcattctggcggtaatcctgctggtggtcgtgatgattggtgaaaaacgccatcatgatgagctgcagttaaaacgcaacggaggctaa

SEQ ID NO: 369409 - DNA, 1071 bp, Salmonella enterica
atgaaaaccacactgaaaaaccttagcgtggcgttaatgttggcaggaatgaccatcggaagcggcgccgtggcggctgaaaaagtcgttatcgcccaccgtggtgccagcggttatctgccggagcatacgctaccggcgaaagcgatggcgtatgcgcaaggggcagattatctggaacaggatttagtgatgacaaaggacgaccatctggtcgtcctccatgaccactaccttgaccgggtgactgacgtcgctgaccgttttccggaccgggcgcgtaaagatgggcgctattacgctatcgattttacgctggatgaaattaaatccctgaagtttaccgaagggtttgatattgaaaacggcaaaaaagtacaaacttatccgggccgtttcccgatgggaaaatctgatttccgcattcatacctttgaagaggaaattgaattcgttcagggattaaatcactctaccggtaaaaatatcggtatttatccggaaattaaagcgccgtggttccatcatcaggaagggaaagatattgccgcgaaaacgctggaagtgctgaagaagtatggttacaccggcaagcaggacaatgtctatttgcagtgttttgatgtcgctgagctgaaacgtattaagaatgaactggaacccaaaatggggatggatctcaatctggttcaacttattgcgtataccgactggaatgaaacacagcagaaacagccggacggtcgttgggtaaattacaactacgactggatgtttaagccgggcgctatgaagcaggtggcggaatatgcggacggtattggtccggattaccatatgctggttgcggaaggctcaacgaaagggaatatcaagctgactggaatggtgcaagacgcgcatcagaataagatggtagtgcatccttacactgtgcgtgccgatcaattgccggactatgccacagacgtcaatcagttgtacgacatcctgtataacaaggcgggcgtcgacgggctgttcactgacttcccggataaggcggttatgttcctgcaaaaaaatgactaa

SEQ ID NO: 369410 - DNA, 879 bp, Salmonella enterica
atgacactaactcaaatccacgccctgcttgccgtactggagtacggcggatttaccgaggccagcaaacggctatacatgacgcaatccgccgtcagccaggccatctccgcgcttgaggaggagctcggcgttgacatattgattcgtgagcgtcgtaaagagattgagcttaccgccgccggtagccgcatcgtcaggcacttacgcgcgatccagcgcgacgtcaacgcggtaaaagagattgccgaacaagaaaaaaagaacccggcccgtacgctacggattggctgttttcccagcgcctgcgcctgcattttacccggcgtcattcgctattttgaaagccatcatccaaatgtaaaaattatcccctatgaagagaacagtacggctattattgattcgctgcaggacggaagtattgatgccggtttcgttccttttccggtcaacggtatgtattgcgtccccatttaccgggataaattcaccgtagtggtgcctgaaaatcatcccctggcggccaatagtacggtaacggtcgaagaactgatggacgaaccacttattgtcagtaaaggtcgttatgaattaagcattatggcgttgtttaaagaaaagggtattgagccgatatttaaatatgaatttaaccatcccgatactgcgctgaattttattcgccagggattaggtatcgccttattgccagaattaaccttaaaagccacgacaggaaaattatgctccgtggcgctggaacccaccttttatcgacaaatttccctgttagcaaaagaaccgccggtagaaggaagtccgttatttttattacaaaaatgtatggaaacactgaccgatgaggggttgctataa

SEQ ID NO: 369411 - DNA, 1218 bp, Salmonella enterica
gtgcgccatctgagcgggtcgttaagaatgaaagaaaaattatggacgaaggatttttgggcaatcaccatagtcagttttattatcttttttgttttttatgtactgctaactttattacccatttatatcgctgaccgcctgcatgcttctgcagataaggccgggctgttagtgacatgtttcctggccgcggcaattgttattcggccatttgccggacaatgggtgggaaaatattcgaataaaaagattctggtgctctcttctctggcttttttggtgattaccgcgctgtatccggtttgccattctatcgagtcgctgctctttatccgcgtacttcatgggattacgtttggtgttattaccacggtaaaaggaactatttcagcgcggttaattccggcctcccgacgtggagagggcatcagctttttctctttagcgatgggccttgcgatggtcgtaggaccgtggatcggtttgaatatggcccgctggaacgcgttcactgccgcattctggctttgttccgctgtagcggcgttagggattgtactttccctgattgtgacggtccctccggtaattcgtcatgccgatggttcgaaaccgaatctgggttttgccgcgatgtttgaccgcgccgccttgccttttgcgctggtcaccttttttatgactttctcctatgccggcgtatcggctttcctggcgctgtatgcgcgtgagctggatttaatggcggcggccagtaatttcctgctgtgctacgcgattttcctgatgatatgccgtaccttcaccgggaatatttgtgataaaaaagggccgaaatatgttgttttcccatgcctgttggcttttaccatcggtctggtggcgctgggctacaccaatggcagcatcatgatgattatttccggcggtctcatcggtatcggctacggttcggtcacgccggttttccagacgcaaattatcagctcggttgaaccgcataaaatcggcgtggcgaattcactgttctttaacgcgatggatgccggaatggcgattggcgcctttatcatgggaatgatggttgagtcggttggctatcgtatgatttatgtcgctggcgcggtgctggtggtactcgctggcgcactgtatgccgtgcagatgaaaaaacgtggcgtgatgcctttggtttccaccagcgagttgcactga

SEQ ID NO: 369412 - DNA, 255 bp, Salmonella enterica
atgggacgcgtcacgctgcgtatcactggcacacagctgctgtgccaggatgaacacccttctctgctggccgcgctggaatcgcataacgttgaggtggagtatcagtgccgcgaaggttattgcggctcctgccgtacccgactggttgccggtcaggttgactggattacggaacctttagcgtttatccagccaggagagattttgccctgctgctgcagggcaaaaggcgatatcgaaatcgagatgtaa

SEQ ID NO: 369413 - DNA, 1131 bp, Salmonella enterica
atggcatacaccactttttcacagacgaaaaacgatcagctcaaggaacccatgttctttggccagccggtcaacgttgcacgctatgaccagcagaaatatgacatcttcgaaaaactgatcgaaaaacagctctctttcttctggcgtccggaagaggtcgacgtctcccgcgatcgtatcgattatcaggcgttgccggagcacgaaaaacatatcttcatcagcaacctcaaataccagacgctgctggattccattcagggacgtagcccgaacgtcgccctgctgccgctcatttccatcccggagctggagacgtgggtagagacctgggcgttttctgagacgattcactcacgatcctacacccacattattcgtaacatcgtcaacgatccggcggtcgtgtttgacgatatcgtgaccaatgagcaaattcagaagcgcgccgaaggtatctccgcctactacgacgaacttattgagatgaccagttactggcacctgctcggtgaaggcacccataccgttaatggcaaaacggttgtcgtgaatctgcgtgagctgaagaaaaaactgtatctgtgcctgatgagcgtgaacgcgctggaagccatccgcttctacgtcagcttcgcctgctctttcgcatttgccgagcgtgaactgatggaaggcaacgccaaaattatccgtctgatcgcccgtgacgaagctctgcatctgaccggcacgcaacatatgctgaacctgttgcgtagcggcgtggacgacccggagatggcggaaatcgccgaagagtgtaaacaggaatgttatgacctgttcgtgcaggcggcgcagcaggaaaaagagtgggcggactatctgttccgcgacggttcgatgatcggcctgaataaagatatcctgtgtcaatacgttgaatatattactaatattcgtatgcaggcggtagggctggatctgccgttccagacccgctccaacccaatcccgtggatcaatacctggctggtgtccgataacgttcaggttgcgccacaggaagtggaagttagttcttatctggtcggacaaatcgattcggaagtcgataccgacgatctgagtaatttccagctctga

SEQ ID NO: 369414 - DNA, 2286 bp, Salmonella enterica
atgaatcagagtctgctggtgacaaagcgtgacggccgtactgagcgcatcaatctcgacaaaattcatcgcgtgcttgattgggcggcagaaggactgaataacgtatcggtttctcaggtcgagctacgctcgcatattcagttttatgatgggattaagacctccgatatccatgaaactatcattaaggccgccgcagacctgatctctcgcgatgcgccggattatcaatacctggctgcgcgtctggcgattttccacctgcgtaagaaagccttcggccagtttgagccgcccgcactttaccaccatgtggtaaaaatggttgagcttggcaaatacgacaatcatctgctggaagactacacggaagaagagttcaagcagatggattcgtttatcgttcacgatcgcgatatgaccttctcctacgctgccgttaagcagctggaagggaaatatctggtgcaaaaccgcgtgaccggcgaaatctatgaaagcgcacagttcctctacattctggtagcggcctgcctgttctcgaactacccgcgtgaaacgcgtcttgactatgtaaaacgtttttacgatgcggtctctacgttcaaaatctcgctgccgacgcccatcatgtccggtgtgcgtaccccaacccgtcagttcagctcctgcgtactgatcgagtgtggcgacagtctggattccatcaacgccacctccagcgctatcgtgaaatacgtttctcagcgcgccggtatcggcatcaacgcgggacgcattcgtgcgctgggcagcccgattcgcggcggcgaagcgttccacaccggctgtattccgttctacaagcacttccagacggcggtgaaatcctgttcgcagggcggcgtgcgcggcggcgcggcaaccctcttctacccgatgtggcatctggaagtggaaagcctgctggtgctgaaaaacaaccgcggcgtggaaggcaaccgcgtacgtcacatggactacggcgtacagatcaacaaactgatgtatacccgcctgctgaagggcggcgacattacgctgttcagtccgtcggatgtacccgggctatacgatgcgttcttcgccgaccaggacgaattcgaacgcctgtacgtgaaatatgaacacgacgacagcatccgcaaacagcgtgtgaaagcggtcgaactgttctcgctgatgatgcaggaacgcgcctctaccggtcgtatctatatccagaacgttgaccactgcaatactcacagtccgttcgatccggttgtcgccccggtacgccagtctaacctgtgtctggagattgccctgccaaccaaaccgctgaacgatgtcaacgatgaaaacggcgaaattgcgttgtgtacgctgtctgcattcaacctgggcgccattaaaactctggacgagctggaagaactggctattctggcagtacgcgctttggatgctctgctcgattatcaggattacccgattccggctgccaaacgcggcgcaatgggccgtcgtacgctgggcattggcgtgattaacttcgcctactggctggcgaaaaacggtaagcgttattccgacggcagcgccaataatctgacgcataaaaccttcgaagccattcagtactatctgcttaaagcgtccaacgaactggcgaaagagcaaggcgcctgcccatggttcaacgaaaccacctatgcaaaaggcattttgccgatcgacacctacaaaaaagatctggatgcgatcgtcaacgaaccgctgcactacgactggcaacagctgcgtgagtcgatcaaaacccacggtctgcgtaactccacgctatcggcgctaatgccgtcggaaacgtcgtcccagatctccaacgccaccaacggcattgagccgccgcgcggctacgtcagcatcaaggcctcgaaagacggtattttgcgtcaggtcgtgccggattatgagcatctgaaagacgcttacgaactgttgtgggagatgccgaacaacgacggttatctgcaactggtgggtatcatgcagaagtttatcgatcagtcgatttccgccaataccaactacgatccgtcacgtttcccgtcaggaaaagtgccgatgcagcaactgctgaaagatttgctcaccgcgtataagtttggcgtgaaaactctgtactatcaaaatacccgcgacggcgcggaagatgcgcaggacgatttggcgccttctattcaggacgatggctgcgaaagcggcgcttgtaagatctga

SEQ ID NO: 369415 - DNA, 729 bp, Salmonella enterica
atgaacactgaaaaaccgtcggtagctcacaacgttgaccataatgaaatcgccaaattcgaagccgtcgcgtcgcgctggtgggatctggagggcgaattcaagccattgcatcgtatcaaccccctacgccttggctacattactgagcgctcaggcggcctgtttggtaaaaaggtgctcgacgtcggctgtggcggcggtattctggcggagagcatggcgcgcgaaggcgcaaccgtcaccgggctggatatgggctttgagcctttgcaggtcgccaaactgcatgcgctggaaagcggcatcgaggtagagtacatgcaggagacggttgaggaacatgcggcaaaacacgcccagcaatacgacgtcgtcacctgtatggaaatgctggagcacgttcccgatccgcaatcggtcgtccacgcctgcgcccaactggttaaacccggcggcgaggtgttcttctcaacgttgaaccgcaatgggaaatcctggctgatggcggtcgtcggcgctgagtatattctgcgcatggtgccaaaaggcacgcacgacgtgaagaaattcattaagcctgctgaactgttaagctgggtagatgaaaccgtcctgaaagagcaacatatcaccgggctgcactacaacccgataaccaatactttcaaactcggtcccggagtagacgttaactacatgttgcatacccgcgctaaaaaagcctga

SEQ ID NO: 369416 - DNA, 885 bp, Salmonella enterica
atgttacgtaaaaaacaatacaattcaaaagctaatgtgtcatatctgatatatcagcaagcaaacttaatgaaatatacaataacaacaataaagtatgtaaattttcttatatctgatatattagatccgttaattttgaataaattaattacaatggagccgggtttaaccatggaggagaagaaaatgaaaaatagattaaagcgtgactttagtcacatatcaattgaaatacccaaatccatcacccaggtgattaaagagaaaataagggagatgattatccatggcgatttcgatcttgggcaagcgatcagtgaaaatgaactatcaaatattctgatggtaagtaaaacaccaattcgtgaagcttttatttggctgagctataatgaaaacttagtcaacatcattccccgcagtgggacatttgttttttctgtcaccgacgaggatatcaatgatctcatcaaaatgagggttatccttgaacagggcgcaattcgtgaagcgatggagaaaaatgctaacaatgtcatagtcgaattaagcaatattttatcgaagtcagcaaaaattaatgcagagcgcgatacgcaagcttacctcaaactggatcatgattttcattatgtttttgtgaaatatgccgataataaatacatttcacaagcacacctgttgatctcagcacgtttattggcaattcgctacagactggattttaccactgaatatatcaccagctctaaccgtggacatgccactattttggatatgttaaaaaacaacaacgtcgagggcgtctgtaattttatcacgcaccacatcggtagcggttttacagaacgcgcaagaaaacttcttgcgctgaaagcgtaa

SEQ ID NO: 369417 - DNA, 1326 bp, Salmonella enterica
atgagtagtccacaagaaaatttatacgatgcaattcgtattgtaaaaaggaaaatcattcctttggcctttattctttacttttttaactatatggatcgtgtcaatattgggtttgctgcattacgcatgaatgaatctctcggtattacgcctgaggatttcgctaatatttcttctgtattcttcatatcatatttaatctttcaaattccgagtagcattggcttgcaaaagcttggcgcaagaaaatggattagttccattattatcggctggggagcggtaacagggctgattttttttgctaaagatactcaacatattttgctggctcgcatttttttgggggtatttgaagctggctttttcccgggcatggtttattatcttgcatgttggttcccggctcgtgaacgcggaaaagtcaatagtttcttcatgttatctattgctgttgcatcggtattggctgcaccgatgtctggttggatcatcgagcatttgaataccccggattatgaaggctggcgctggctttttgctattgaaggtatccctaccgtattccttggcatcctgacattttatttactgcctgacagtccagaaaaggctaaatggcttacgccacagcagatatcggccttagttaataaattacgtactgacaatgaaaccgcagctgcattaaataaaaataccaactcatcctttctttccgtaatcaaaaatccagttttgcttcagctttctttcgcctacatgttgattcaggcggctgctctggcggcaaactactggttgccggggttggtgaagggattttcagctgattttacggatactgacgttggtttaatcatgagtattccgtttattttcgctatgttcagcatgccctggtggggctggcattccgataaaaagaatgaacgaaaatggcatgctgcattacccatgtttctggcaggctgtggttttctgatgattgctcttgtcccctcaatgtcgctgagaatgctggggctaacgttctatggtgttgggatcctcagctattacggaccttactgggcgctgccttctgcattattgtcgccgtcagggttggctatcagcattgcgtttattaactcatgttcaagtcttggcggattcctgattaataagtcactgggatttgtttctactcattatggtgcgacaggaatatttattgtagaggcaatactttgcttcgctgcggtagccgttttggcgttaatgaaaattgatgtgaaaaaagaaaaaagccaacaaacaaatgttgtatcacgaacctga

SEQ ID NO: 369418 - DNA, 1203 bp, Salmonella enterica
atgaaaattacatctattgaagtttttgactgtgaattaaaaaaaagagatcaaacgatgtcatcctataatccagtacttatccgggtgaataccgactcaggattaagtggtattggcgaagtaggactggcctatggcgcaggcgctaaagctggcgtagggatcatcagagatctggcgccattggttgtgggtgaagatccattaaatatcgaaaaaatttgggagttctttttcagaaagactttttgggggatggggggcggaaacgttttttatgccggaatgagcgctattgatattgctctttgggatatcaaaggtaaatatttaggtgtacctgtttatcagctccttggcgggaaaactaatgaaaaattaagaacctatgctagtcagttacaatttggttggggggataaacgccagatattagtgacacctgaggaatatgctgaggcggcgcgtgcggctcttgacgatggatatgatgcgattaaagtggatccactcgaaatcgatcgtaatggcgatgactgtgtttttcagaataaaaatcgtaactattcaggattgttactggccgatcaattaaaaatgggggaagcgcgaattgccgctatgcgtgaagcaatgggggatgatgctgatattatcgtggaaatccattctcttctcggtacaaactcagctattcaatttgcgaaggcgatagaaaagtatcgtatctttctttatgaagaaccgattcatccattaaattctgataatatgcagaaagtttcccgttcaacaacgattccaatcgccactggcgagcgttcctacacaagatggggatacagggaattactggagaagcagtctattgccgtagcgcaacctgatttgtgtctctgcggcggaattaccgaaggaaagaaaatctgtgactatgctaatatttatgacaccactgtacaggtgcatgtttgcggcggtcctgtttccacggtagccgcgctgcatatggaaacagcaattcccaactttattattcatgagcatcataccaatgcgatgaaagcatctattcgggaactttgtacccacgattatcaaccggaaaatggctattatgtcgcgccggaacagcccggattgggtcaggaattaaacgatgaggtagtgaaagaatacctggcctatgtgattaaatag

SEQ ID NO: 369419 - DNA, 2637 bp, Salmonella enterica
atgagcgaccttgcgagagaaattacaccggtcaacattgaggaagagctgaaaagctcctatctggattatgcgatgtcggtcattgttggccgtgcgctgccggatgtccgagatggcctgaagccggtacaccgtcgcgtactttacgccatgaacgtattgggcaatgactggaacaaagcctataaaaaatctgcccgtgtcgttggtgacgtaatcggtaaataccatccccacggcgattccgcagtgtatgacaccatcgttcgtatggcgcagccattctcgctgcgttacatgctggtggatggtcagggtaacttcggttctattgacggcgactccgcggcggcaatgcgttatacggagatccgtctggcgaaaatcgcccacgaactgatggccgatctcgaaaaagagacggtggatttcgtggataactatgacggtacggaaaaaattccggacgtcatgccgaccaaaattccgaatctgctggtgaacggttcttccggtatcgcagtaggtatggcgacgaatatcccgccgcacaacctgacggaagtgattaacggctgcctggcgtatatcgacaacgaagacatcagcattgaagggctgatggaacatattccggggccggacttcccgaccgccgcgatcatcaacggtcgtcgtggtatcgaagaagcctaccgtaccggtcgtggcaaagtgtacattcgcgcccgcgcggaagttgaagctgacgcgaaaacgggccgtgaaaccatcatcgtccatgaaattccctatcaggtgaacaaagcgcgcctgatcgagaaaatcgccgagctggtgaaagataaacgcgtggaaggcatcagcgcgctgcgtgacgaatccgacaaagacgggatgcgcatcgtgattgaagtgaaacgcgatgcggtgggcgaggtggtgcttaataatctctactcccagacccagctacaggtttccttcggtattaacatggtggcgctgcatcacggccagccgaagatcatgaacctgaaagacatcatttcagcgttcgtgcgccaccgccgtgaagtggtgacgcgtcgtactatttttgaactgcgtaaagcccgtgaccgcgcgcatatccttgaagctctggcgattgcgctggctaacatcgacccgattatcgaactgattcgccgcgcgccaacgccggcagaagcaaaagcggcgctgatttcgcgtccgtgggatctgggcaacgttgctgcgatgctggagcgcgctggtgatgacgctgcgcgtccggaatggctggagccagaatttggcgtgcgtgacggtcagtattacctgactgagcagcaggcgcaggcgattctggatctgcgtttgcagaaactgaccggcctggagcatgaaaaactgctcgacgaatacaaagagttgctggagcagattgctgaactgctgcacattctgggcagcgccgatcgcctgatggaagtgatccgcgaagagatggagttaattcgcgatcagttcggcgatgagcgtcgtaccgaaatcaccgccaacagcgccgatattaatatcgaagatctgattagccaggaagatgttgtcgtgacgctgtctcaccagggttacgtcaaatatcaaccgctgacggattacgaagcgcaacgtcgtggtgggaaaggtaaatctgccgcgcgtattaaagaagaagactttatcgaccgcctgctggtggccaacacccatgacaccatcctctgcttctccagccggggccgtctgtactggatgaaggtctatcagttgccggaagccagccgcggcgcgcgcggtcgtccgatcgttaacctgctgccgctggaagccaacgaacgtatcaccgcgattctgccggttcgtgaatacgaagaaggcgtcaacgtctttatggcgaccgccagcggtaccgtgaagaaaacggcgctgaccgaattcagccgtccgcgttccgccggtattatcgcggtgaacctcaacgacggcgacgagctgattggcgttgacctgacttctggttctgacgaagtcatgctgttctcggccgcgggtaaagtggtgcgcttcaaagaagacgccgtccgtgcgatggggcgtaccgcgaccggtgtgcgcggtattaagctggcgggagacgataaagtcgtctctctgatcatcccacgcggcgaaggcgctattctgaccgtaacgcaaaacggctacgggaagcgtaccgcagcggacgagtacccgaccaagtctcgtgcgacgcagggcgttatctctatcaaagtgaccgagcgcaacggttccgttgtcggtgcggtacaggtagacgattgcgaccagatcatgatgatcacggatgccggtactctggtgcgtacccgagtgtccgagatcagcgtcgtgggacgtaatacccagggcgttatccttatccgcacggcggaagatgaaaacgtggtgggtctgcaacgcgttgctgaaccggtagatgacgaagaactcgacgctatcgacggcagcgtggcggaaggggatgaggatatcgccccggaagcggaaagcgatgacgacgttgcggatgacgctgacgagtaa

SEQ ID NO: 369420 - DNA, 2847 bp, Salmonella enterica
ttgaaataccttgcttcctttcgaactacgctgaaagtctcgcgctacttattcagagcgttagcgttactcatttggctcttaatcgcctttgtttcggtgttttacatcgtcaatgccctgcaccagcgggaatctgaaattcgtcaggagttcaaccttagctccgatcaggcgcagcgttttatccagcgcacgtcggatgtgatgaaagagctcaaatatatcgccgagaaccgtttaacggcggaaaacggcgtcatgtcgtcgcgtgcgcgtgatgacaaaatggtggtgccggactttgaaccgctatttgccgactcagactgtgcggcgatgggctccgcctggcgcggatcgctggagtcgctggcctggtttatgcgttactggcgcgacaacttttcagcggcgtatgatcttaaccgcgttttcctgattggcagcgataacctctgtatggcgaatttcggcctgcgtgaaatgcccgtggagcgcgatgatgcgttaaaagcgttacatgagcggattatgaaataccgcaacgcgccgcaggaagaaagtgggaataaccttttctggataagccagggcgcgcgtcagggcgtgggctacttttatgcgctgacgccggtgtatctggccaaccgtctgcaggcgctgctgggcgtcgagcagtccatccgtatggaaaattttttcacgcccggcagtttgccgatgggcgtcactattattgatgagaacggccattcgctgatttcgttgaccggtcctgacggcaatattaaagcggagccgcgctggatgcaggagcgctcctggtttggttatacgccaggttttcgcgaactggtactcaaaaaaagcctgccgccatcctcgctcagtattgtctattctgtgcctgtagatttagtcctggagcgtattcgtattcttatcctgaacgctatcctgctgaacgtgctggtgggcgcagggctgtttacgcttgcgcggatgtatgagcggcgaattttcattccggcggagagcgatgcccagcgtctggaagagcatgaacagttcaaccgtaaaatcgtcgcctccgcgccggtggggatctgtattttgcgcactattgatggtgtcaatattctgagtaacgaactggcgcacacctacctgaacatgctcacgcatgaagatagacagcgcctgacgcaaatcatttgcggccagcaggttaacttcgttgatgtattgaccagcaataataccaatttgcaaattagcttcgtccattcccgctatcgcaatgaaaacgtcgcgatttgcgtgttggtagatgtgagtacgcgcgtcaaaatggaagagtcgctgcaagagatggcgcaggcggcggagcaggcaagccagtctaaatccatgttccttgcgacggtcagccatgaattgcgcacaccgctgtacggtatcattggcaatctcgatctgctgcaaaccaaagagctgccaaaaggcgtggatcggctggtcacggcgatgaataactcctccagtctgttgctgaaaattatcagcgacattctcgacttctcgaaaattgagtcggaacagctaaagattgagccgcgcgaattttcaccgcgagaggtgatgaaccatatcaccgccaattatctgccgctggtggtgcgtaagcagctcggcctgtattgttttattgagcctgacgtgccggtatcgctgaacggtgacccgatgcgtttacagcaggttatttcaaacctgttgagcaacgccattaagtttaccgatattggctgcatcgtgctgcatgtgcgctgtgatggggattatctcagcattcgcgtgcgggataccggcgtcggtattccggcaaaagaggtggttcgcctgttcgatcccttcttccaggtgggaaccggcgtacagcgtaactttcaggggaccggtctggggctggcgatttgcgaaaaattgatcagcatgatggacggcgatatttccgtcgattcggagccgggcatggggagccagtttacgctgcgcatcccgctttatggcgcgcaataccctgtgaaaaagagcgtggaaggactcgccggaacctgctgttggctggcggtgcgcaatacttctttgtgccagtttattgagaccagtctggcgcgtagcggcgttcatacgcagcgttatgaagggcaagaacccgccgcggacgatattttgattgtcgatgacgcgctggagcatacctggcaggggagggctgcggtcgtcttttgccgccgtcatatcgggattccgttggaaagagcgccgggcgagtgggtgcatagtgtggcgtcggtgcatgagttgcccgcgctgttggcgcgtatctatagtattgagctggatagtgaagcgctttccagcgcattgccgacgacggataaaaccgcagattcaaatgacgacatgatgattctggtcgttgacgatcatccgatcaatcgccgcttgctggccgatcaactgggatcgctggggtatcagtgtaagacagccaatgatggcgtggacgctctgaatgtgctgagtaaaaatgctatcgatattgttctgagcgatgtgaacatgccgaacatggacggctatcgcctgacgcagcgtatccgtcagcttgggctgacgctgccggtcgtcggcgtgacggcgaacgcgctggcggaagagaaacaacgttgcctggagtccggtatggacagttgtttgtcgaagcctgtgacgctggatgtgttgaaacagacgctggcggtgtatgccgagcgggtacgtaaaacgcgggcataa

SEQ ID NO: 369421 - DNA, 651 bp, Salmonella enterica
atgaacaatatgaacgtaattattgccgatgaccacccgattgtactgttcggtattcgcaaatcacttgaacaaatcgagtgggtgaatgttgtcggcgaatttgaagattccacagcattgatcaacaacctgccgaaattagatgcgcatgtgttgatcactgacctctccatgccgggagataaatacggcgatgggatcaccttgatcaagtacatcaagcgtcattttccgagcctgtctattatcgttctgaccatgaacaacaatccggcgatcctgagcgccgtgttggatcttgatattgaagggatcgtactcaagcagggtgcgccaaccgatctgcctaaggcgctggccgcgctgcaaaaaggcaaaaaattcaccccggaaagcgtttctcgtctgctggagaaaatcagcgcaggcggttacggcgataagcgcctgtcgccaaaagagagcgaagtattacgcctgttcgccgagggtttcctggtcaccgaaatcgccaagaagctcaaccgcagcattaagaccatcagcagccagaagaaatcggcgatgatgaaactgggcgtagagaatgatatcgcgctgctcaactatctctcttccgtcaccctgagtccgacagacaaagaataa

SEQ ID NO: 369422 - DNA, 2670 bp, Salmonella enterica
atgagtcagtctgacacaacggtctctacccgattctcccttctaccgggaagcattacccgtttcttcttattgctgatcattgtgctgctggtaacgatgggcgttatggtacagagcgccgtcaacgcctggttgaaagacaaaagctatcaaattgtcgatatcactcacgctattcataaacgcgtggacacctggcggtatgttacctggcaaatttatgacaacatcgccgccaccactacgccatcgacaggtgaaggacttcaggaaacgcgtctgaaacaggatgtgtattatcttgaaaagccgcgacgtaaaactgaagcgctgattttcggttcccatgacagcgccacgctggaaatgacgcagcgtatgtcaacctatctggatacgctgtggggcgcggaaaacgtgccgtggtcaatgtattatctcaacggacaggataacagcctgattcttatctctaccctaccgttgaaagatctctcttccggctttaaagagtccactattggcaatatcgtcgattcccgccgggcagagatgttgcagcaggcgaatgcgctggatgagcgcgaaagtttctcctcattgcgaaaactggcctggcaaaacggtcactattttacgctgcgcacgaccttcaatcagccaggacatctggcgaccgtggtggcgtttgatctgcccattaatgatttaatcccgccgggaatgccgctggacagttttcggatagagcctgacgcaacccaggcgacggggcgaagcagtgaaaaggaagcgccagatagcgtcacgattagctttaacggttcaaaaattgagatctcctcagcgcttaactctaccggaatgcgcctgatctggcaggtaccgttcggtacgcttttgcttgatacgttgcaaaatattctgctgcctttactgctgaacatcgggctgctggcgttggcgttatttggctacgccacgttccgtcatcagccgggacggtcgacggaatcgacatccggcaacgcggcgaataacgagcttcgcgtcttacgcgccattaatgaagagatcgtttctctgctgccgctgggtctgctggtctacgatcaggaaggcaaccgcaccgtgatcagcaataaaatcgccgatcatctgttgccgcatcttaacctgcaaaatattaccagcatggcggaacagcatcagggcgtgattcaggcgacaattaataacgaactgtatgagatccgtctgtttcgcagccagatcgctccccgcacgcagatctttattattcgcgatcaggaccgggaagtgctggtgaataagaagcttaaacaggcgcagcgtttgtatgagaagaatcagcagggtcgcgccgcctttatgcaaaatatcagcaacacgcttaaagagcccgtacgccaactggcggttaacgccgcggcagtcaccacgccggaaagcctgaaactggcggatcaggcggatgtattggtacgtatgatcgatgaaatccaactggcgaatatgctggaaaatgacgcatggaagagcgaagccacgctgttctccctgcaggatcttattgacgaagtcgtgccggaagtgctgcccgccattaagcgtaaagggctgcaactgctgattaataaccatcttagcggcaacgatgaacgctggggcgatcgcgacgccctgcgtcggattttgctgctgttgattcagtatgccgtcacaacgaccgctatgggtaaaattacgcttgaagtcgagcaggatgaatctatcgcggagcgtctgactttccgtattctggatacgggcgaaggcgtaacgttaaacgagattgataatctgcatttcccgtatatgaatgaaacgcagggcgatcgttacggcaaagcgaatccgctcaccttctggctgtgcaatcaactggcgcgcaaactgggcggtcatctcaacattaaagcgcgagaaacgctgggcacgcgctataccgttcatgtcaaaatgcttcctcacgatcagcatactcaggtcgaagagcgcctgctggacgacgtgagcgtgatggtcgatgtgacgtccaacgaggttcgcgcgattgtgctgcgtcagttagaaaactggggcgccacctgcatcacgccggatgaaaggcagataagtcaagaatatgatctctttttaacggataatccgtctaatcttactgcctcgggcttgcttttaagcgatgatgagtcaggcgtgcggaaaattggcccgggtcagttgcgcgtcaactttaatatgagcaatgctatgcaggaagctgtactacaacttatcgaagagcagctggcgcaggaagagattcccgcctccccgctcggcggagatgaaaatgccgagcttcatgccagcggctattatgcgctatttgtagacacagtaccggatgatgttaagaggttgtatactgaggcggcaaccagcgatttcgctgcgctggcccaaacggcccaccgcctgaaaggggtgtttgccatgcttaatctggtacccggcaagcagttatgtgaaacgctggaacatctgattcgtgagaaagatgctccaggtatagaaaaatatatcagcgacattgacgcctacgtcaaaagcttgctgtag

SEQ ID NO: 369423 - DNA, 1137 bp, Salmonella enterica
atgaaagttaaagtactgtccctcctggtaccagctctgctggtggcgggcgcagcgaatgcggctgaaatttataataaagacggcaacaaattagacctgtttggtaaagttgatggcctgcactacttctctgacgacaaaggcagcgacggcgaccagacctacatgcgtatcggcttcaaaggcgaaacgcaggttaacgatcagctgaccggttatggccagtgggaatatcagattcagggcaaccagactgaaggcagcaacgactcctggacgcgtgtggcgtttgcgggtctgaaattcgctgacgcaggttccttcgattatggtcgtaactacggcgtaacctatgatgtgacctcctggaccgatgttctgccggagttcggcggcgacacctacggcgctgacaactttatgcagcagcgtggtaacggctatgccacttaccgtaacaccgacttcttcggcctggtggatggcctggacttcgcgttgcagtatcagggcaaaaatggcagcgtgagcggtgaaaacaccaacggtcgcagcctgctgaaccagaacggtgacggttacggcggatcgctgacttatgcaatcggcgaaggcttctctgtcggtggcgctatcaccacgtctaaacgtactgccgatcagaacaacaccgctgacgaacacctgtatggtaacggcgatcgcgctacggtctacaccggcggcctgaaatacgatgcgaacaacatctatctggcagcgcagtattctcagacctataacgcaacccgttttggtacctctaacggcaacaataagtccacctcttacggttttgccaacaaagcgcagaactttgaagtggttgctcagtaccagttcgactttggtctgcgtccgtctgtggcttacctgcagtctaaaggtaaggacatcagcaacggctacggcgccagctatggcgaccaggacatcgtaaaatatgttgatgtcggcgcgacttactacttcaacaaaaacatgtccacctatgttgattacaaaatcaacctgctggataaaaacgactttacccgcgatgcgggcatcaacaccgacgacatcgtagcgctgggtctggtttaccagttctaa

SEQ ID NO: 369424 - DNA, 1053 bp, Salmonella enterica
atgaaaatgactttttgccgggccgtgtgtctggcggcggcttttttacttatgggctgcgatgaggctcccgaaacgacaacagcgtcacctgccgctcaggtgctggaaggtaaaacgatggggaccctctggcgggtgagcgtggttggcatcgatgcgaaacgcgccgcagagttacagactaaaatccagactcagcttgatgctgatgattggttgctttctacctataaaaatgactccgcgctaatgcgttttaaccattcacgcagccttgcgccctggccggtcagcgaagccatggcggatatcgtgacctcggcgctacgtattggcgcgaagacggatggcgcgatggatatcaccgtgggcccgctggtcaatctgtgggggtttgggccggatcggcagccgctgcatatcccaacaccagcacaaatcgatgcggcaaaagcgaaaacaggcctgcaacatttgcaggttatcgacagggctggacatcagtttttgcaaaaagatctgccggatctttatgttgatctctccacggtcggggagggctatgcggcggatcatctggcgcgactgatggagcaggagggcattgcgcgttatctggtctcggtgggcggcgcattaagcagtcgcgggatgaatgcgcaggggcagccgtggcgcgtcgcgattcagaagccgaccgaccgggaaaacgcggtgcaggcgattgtggatatcaacgggcatggcatcagcacctccggcagctaccgtaactattacgagctggatggcaagcgcgtatcgcacgttatcgatccacaaacggggcgccccattgaacacaatctggtatcggttacggtcatcgcgccaacggcgctggaagcggacggctgggacaccggcctgatggtgctcggtacgcaaaaggcgcaagaggtcgtgcggcgggaagggctggcggtctttatgatcatgaaagaaggtgaaggctttaaaacctggatgtcgccgcagttcaaaacgttcctggtgagcgataagaattaa

SEQ ID NO: 369425 - DNA, 1059 bp, Salmonella enterica
atgaaaaaagcgttacttaccgatgatgaatgctggctgcgggtgcaggcgcgcgatgccagcgcggatgggcgtttcgtttttgcagtgcgaaccactggcgttttttgccgcccttcttgtcgctcgaagcgggcgttacgtaaaaatgttcgcttttttgccaacgcggagcaggcgctggacgccggttttcgcccctgcaagcgctgtcagccggataatgcgcgcgcgcagcaacggcggttggataagattgcctgcgcctgccgtttacttgagcaggagacgccggtaacgctggcgtctctggcgcaggcggtggcgatgagcccgtttcatctgcaccgtctgtttaaagtgagcaccggaatgacgccgaaagggtggcagcaggcgtggcgcgcccggcggctgcgtgaggcgttggcgaaaggagagccgatcacggcggctatttatcgcgctggcttcccggatagcagtagctactaccgtcatgccgaccagacgctgggcatgacggcaaaacagtttcgcaaaggcggcgataatgtctccgttcgctatgcgctgacggactgggtttacggacggtgcctggtggcggagagcgagcgggggatttgcgcgattctccccggtgatagcgacgacgcgctactggctgaattacacacccttttcccgacggcccgccacgaacctgccgacgcgtcttttcagcaacgggtgcggcaggttgtcgcggctatcaacacacgcgatgtgctgctctcgttgccgctggatatccagggaaccgcgtttcaacagcaggtctggcaggcgttatgcgcaattccctgcggcgaaaccgtaagctatcaacagcttgccgcgactatcggcaaacccacggcggtacgcgcggtcgccagcgcgtgcggcgcgaataaactggcgatggtgatcccgtgtcatcgggtcgtgcgtcgcgatggcgcgctctccggttatcgttggggcgtgcgtcgaaaagcgcagctattaaagcgagaagcgcaaaaagaggagtag

SEQ ID NO: 369426 - DNA, 651 bp, Salmonella enterica
atgctggatctatttgctgatgaagcgccctggcaagagcccctggcgcctggcgcggtggtgttgcgccgctttgcgtttcgcgcggcgcagtcgctattagacgatatcgggtttgtcgccagtcagtctccgtttcgtcagatggtgacgccgggcggctacaccatgtcggtggcgatgaccaactgcagcgcgttagggtggaccaccgatcgtcacggttattgttatgccgtgcgcgatccgttgaccgataaaccctggcctgcgctgccgttatcgtttgccagcgtatgtcgtcaggcggcaatcgcggcagggtatgcgagcttccaaccggacgcctgcctgatcaatcgctacgcgcccggcgcaaaactgtcgctgcatcaggataaagacgagccggatctgcgcgcgcctattgtctcagtttcgttgggggtgccggcggtttttcagtttggcggcctgcgtcgcagcgatccgctccagcggatcttactggagcatggcgatatcgtggtctggggcggcgagtcccgtctgttttatcatggtatccagccgcttaaagcgggctttcatcccatgaccggtgaatttcgttacaatctcaccttccgtcaggcggctgaaaaagaataa

SEQ ID NO: 369427 - DNA, 1644 bp, Salmonella enterica
atggaacttcttattcttgtctggcggcagtaccgctggccatttattagcgtgatggcgctgagcctcgccagcgcggcgctggggattggcctgatcgcgtttatcaatcagcgcctgattgaaacggtggacaccaacgtcatggtgctgccggaatttctcggcctgctcctgttgctaatggtcgtcacattaggttcccaactggcgctcaccactctgggacaccatttcgtttaccgcctgcgcagcgaatttatcaagcgcattctggatacgcacgttgaacgcattgagcaactgggcagcgcctctttactggccggtctgaccagcgatattcgcaatattactatcgcctttgtgcgtctgcctgagctggtgcagggcattatcctcaccgtcggctcggcggcgtatctggcgatgctatcgacaaaaatgctgctggttacggctatctggatggcggtcactatctggggcggattcgtgctggtggcgcgggtttaccagcatatggcgaccctgcgcgagaccgaagataagctgtacaacgactatcagacggtgctggaaggacgcaaagagctgacgctaaaccgcgagcgtgcggagcagatttttcagcaatgctataccccggacgccaaagagtaccgtcatcacattatccgtgccgatacttttcatctgagcgccgtcaactggtcgaatatcatgatgctgggggcgataggcctggtcttctggatggcgaatagtctcggctgggcggataccaacgtcgcggcgacctattcactgacgttgctgttcctgcgcacgccgctgctgtctgcggtgggggcgttgccaaccctactgaccgcccaggtggcgtttaataaactgaataaattcgcgctcgccccgtataagcctgattttccacagccgaaagcctttcccgactggaagacgctggagctgcgcaacgtggttttccactatcaggataacgcgttttccgtggggcccatcaacctgacgattcaccgcggcgaactgctgtttttaattggcggcaacggtagcgggaaatcgacgctggccatgttattgaccggtttataccagccgcaatcgggaacgattttacttgacggtcaacctattgccgccgggcagccggaagattatcgcaaactgttttctgcggtgttcaccgatgtgtggttattcgaccgcctgctggggccgcaggggaaacccgccaatcccgcgctggtcgaaaagtggcttgagcacctgaaaatgacgcacaagctggagctaaacgacgggcgcattttgaatcttaaactgtcgaaagggcaaaaaaagcgcattgcgctgctgctggcgctggcggaagagcgcgatattattttgctggatgagtgggccgccgatcaggacccgcatttccgccgggagttttatcaggtgctgttgccgttaatgcaggaaatgggcaaaaccattttcgccatcagccatgatgatcactattttattcacgccgatcgtctgcttgaaatgcgcaacggacagctaaccgaactcaccggcgacgaacgtgatgccgcctcgcgtgatgcggttgcgcgtactgcgtaa

SEQ ID NO: 369428 - DNA, 507 bp, Salmonella enterica
gtgaacaatcaaatgaagatgtttgtccctgccgttgtcttcgccgccctcgccagcgcctctgcctgggctaacaatggtgataccgcccagccgctggaaaaaatcgccccctatccgcaggcggaaaaaggaatgaagcggcaagtgataacccttacccctcagcaggatgaatctaccctcaaagtggaactgttgattggtcaaacgctgaatgtggattgtaaccagcatcgcctcggcggcacgctggaaacaaaaacgctggaaggctggggctatgactattatgtctttgataacgtcacctctccggtatcaaccatgatggcctgccctgaaggtaagaaagagcaaaaattcgtcaccgcctggctgggtgaagacgggatgctgcgctacaacagcaagctgccgatcgtggtgtataccccggcgaatgtggacgtgaaataccgcatctggaaagcggacgctaacgtacagaacgccgtcgcgcgataa

SEQ ID NO: 369429 - DNA, 132 bp, Salmonella enterica
atgcataccccgatagaggtaaatgctgttgccggatcaaaagagtgccaggtaaagacccgtaaacgtgctttttctcacatttcaatgagttatatagatgcttatataacgaaaatcactaatagttga

SEQ ID NO: 369430 - DNA, 492 bp, Salmonella enterica
atggttgatttatcccgtcgaagcatgttgaccggcagttggcgcaacgccagcaatgggattcttccgccgtgggccagagaaacaacctattttctcgcacattgtctgcgttgcgacgcctgcatccaggcgtgtgaggccgacatcctgcagcgaggggcggggggatatccgagcgtagatttcaaacggggcgagtgcagcttttgttatgcctgtgcgcaggcctgtactgaatcgctttttcttccgcgccacaccagggcctgggatctgatttttacgctcacggaaaactgcctcgccaggcaatcggttgaatgccatcgctgccaggacagttgtgaacctatggccattacctttcgtcccacgctatccggcatttaccagccgcagcttgactcgcaggcctgtaacggatgcggggcgtgtgtggctatctgtcccgtgtcagccatcaaagcggagaaccaccatgcgcactaa

SEQ ID NO: 369431 - DNA, 264 bp, Salmonella enterica
atgcgcactaactggcaggtctgtagcctggtcgtgcaggccaaaagtcagaacatcgccgccattggcacacagttgaacacgttgccgggttgcgaagtcgcgttaagcgacgttgaaagcgggcaactgatcgtggtggcggaagcagatcagagtgaaacgctgatgcaaacaattgagtcagtacgcaatgtcgagggcgtactggcggtgtcgctggtttatcaccagcaggatgagcaaggtgaggaaacaccatga

SEQ ID NO: 369432 - DNA, 2487 bp, Salmonella enterica
atgaaactcagtcgtcgtagctttatgaaagctaacgccgttgcggccgctgcggcggctgccggtctgagcgtgccgggcgtcgcccgcgccgttgtcgggcagcaggaagccatcaaatgggataaagcgccgtgccgtttttgcggaacgggttgcggtgtgttggtgggaacgcagcagggccgtgtggtcgcctgccagggcgaccccgacgcgccggtcaaccgtggtctgaactgcattaaaggctacttcctgcccaaaatcatgtacggtaaagatcgtctgacgcagccgatgctgcgcatgaaagacggcagctatcacaaagacggcgagtttacgccggtgagctgggaacaggccttcgatgtgatggaggagaagtttaaaacctccctgaaagagaaaggaccagaagcgatcggcatgtttggatcgggtcaatggaccatctgggaaggctatgccgccgcgaaactgttcaaggctggtttccgctctaacaacatcgacccgaacgcgcgtcactgcatggcctcggcggtggtgggctttatgcgcacctttggcatggatgaaccgatgggctgctacgacgatattgagcaggccgatgcgtttgtgctgtggggttccaacatggcggagatgcacccgattttatggtcgcgcatcactaaccgccgtttgtccgacccgaacgtgaaggttgccgtcctctccaccttccagcaccgcagctttgaactggcggacaacggtattgtctttaccccgcaaagcgatctggtgatccttaactatatcgcgaattacattattcagaacaacgcggtaaatcaggatttcttcacaaagcatgtgaacctgcgtaaaggggcgacggatatcggctacggcttacgcccgacgcacccgctggaaaaagcggcgaagaatccgggctccgacgcttccgagccgatgagcttcgacgagtataaagccttcgtggcagaatatacgctggacaagaccgctgaaatgaccggcgtgccaaaagatcaactggaacagttggcacagctctacgccgatccgaataagcgcgtgatctcttactggacgatgggttttaaccagcatacccgcggcgtgtgggcgaataacctggtttacaacctccatctgctgaccggaaaaatctcccagcctggctgcggtcctttctcgctgacaggccagccttccgcctgcggtacggcgcgtgaagtgggaaccttctcacaccgtctacccgcagacatggtcgtgacgaacgaaaaacaccgtgatatctgcgaaaaacactggcagatccccgctggcactattccggcaaaagtgggtttacacgcggtggcgcaggatcgcgcgttgaaagacggcaagctgaacgtctactgggtaatgtgtaataacaatatgcaggccgggccgaacatcaatgaagatcggatgccgggctggcgcgatccgcgtaactttatcattgtttccgatccttacccgacggtgagcgcgctgtctgcggatctgatcctgccgaccgccatgtgggttgagaaagaaggcgcttacggcaacgccgaacgccgcacgcagttctggcgtcagcaaattaaagcgccgggcgaagctaaatccgacctctggcaactggtgcagttctcccgtcgttttaaaaccgaggaggtctggccggaggcgttgttggctcagaagccggagctgcgcggcaaaacgctgtatgacgttctgttcgccacgccggcggtcagcaaattcccgctgagcgagctgaaagaggatcagttaaacgatgagtctcgtgagctgggcttctatctgcaaaaagggctgtttgaagaatacgcctggtttggacgtggccacgggcacgatctggcgccgttcgacgattaccacaacgcgcgcggtctgcgctggccggtcgtcgaaggcaaagagacgcaatggcgttacagcgaaggcaacgacccgtatgtaaaagcgggggaagggtacaaattctacggtaaaccggatggcaaagcggtgatcttcgcgctgccatttgaacccgcggcggagtcgccggacaacgagtacgatctgtggctttccaccggtcgcgtgctggaacactggcataccggcagtatgacgcgccgcgtgcctgaattgcatcgcgccttcccggaagcggtggtctttattcacccactggatgcgaaagcgcgcgatctgcgtcgcggggataaggttaaagtgtcgtcccgccgcggtgaagtgatttcgattgtcgaaacgcgtggacgtaaccgtccgccgcagggactggtgtatatgccgttcttcgatgccgctcagctagtgaacaacctgacgctggatgcgacggacccgctctctaaagagacggacttcaagaagtgcgccgttaagctggcgaaggtgtaa

SEQ ID NO: 369433 - DNA, 696 bp, Salmonella enterica
atgtcccgtacagcgaaaccccaaaatggccgccgccgcttcctgcgtgatgttgtgcgcactgcgggcgggctggcggcggttggcgtggcgctgggcttgcaacagcaaaccgcgcgcgcatcgggcgtgcggctgcgtccgcctggcgcgctgaatgaaaatgtcttcgccagcgcctgtgtgcgctgcgggcagtgcgttcaggcgtgtccatacgacacgctaaaactggcgacgctggcctccgggctatcggcaggcacgccctatttcgtcgctcgcgacatcccctgcgaaatgtgtgaagacattccgtgcgccaaagtctgccccagcggggcgctgaataaagatatcgcctccattgatgactcgcgcatggggctggcggtgctgctggatcaggaaaactgcctcaactttcaggggctgcgctgcgacgtttgttaccgcgaatgcccgaaaatcgatgaggccatcacgctggagctggatcgcaacatgcgcaccggcaaacatgcgcgctttctgcccaccgtacacagcgacgcctgtaccggctgcggcaaatgcgaaaaagtctgcgtactggagcaaccagcgataaaagtgttgccgttgtcattggcgaaaggggagttaggacaccattaccgcttcggctggctggaggggaaagatggcaaatcgtaa

SEQ ID NO: 369434 - DNA, 870 bp, Salmonella enterica
atggcaaatcgtaaacgcgacgccgggcgagaagcgcgggcgaaaaaaggctggtggcgtagccaccgctggctggtgttacgccgtatcagccagtttatggtgctggggatgtttctcagcggcccgtggctgggcttttgggttttgcatggcaactacagcagtagtttgctgttcgataccctcccgttgaccgatccgctgattaccctggaaagtctcgccagtggacatcttcccgctaccgtggcgctgacgggagcagtgattatcgctgtgctgtatgcgctggcgggaaagcgactattttgcagttgggtttgcccgctaaaccccgttaccgatttggctaactggatgcgcaggaaatttgacctgaaccagtctgcgacgattccacgccatatacggtacgtccttctggtggtggtgttaatcggttcggcgttgaccggcacgctgctgtgggaatggattaatcccgtgtcgctgttaggccgtagtctggttatgggatttagtagcggcgcgttgctgattattgctttgtttttatttgatttattagtcgttgagcacggttggtgcggccatatttgcccgatgggcgcgctgtatggcgtgctgggcagtaaaggcgtagtgaccgtgacggccaaaaaacgtgaaaaatgtaatcgctgtatggattgttttcatgtttgcccggaaccgcatgtgctacgtgcgccggtgctggatgagcaaagcccggcgcaggtcacccaccgcgactgcatgacctgcggccgctgcgtggatgtctgttctgaggatgtttttacaataacgatacataacatcattcgggatgcatcgcggcggtaa

SEQ ID NO: 369435 - DNA, 450 bp, Salmonella enterica
atgaaaagccatgacctgatgaaagcgctgtgtcaatggatggccacgcttgccctggtggtaagtggtgcggtttgggcggcaaacggagtggatctgagccagtcgccggaagtatccgggacgcaggaaggggcgattcgtatgccgaaagagcaggagcgtatgccgctaaattacgtcaaccagccaccgatgatcccgcacagcgtcgagggctaccaggtgacgaccaataccaaccgctgtctgcaatgccacggcgtggaaagttatcgtacgacgggcgcgccgcgtatcagcccgacgcactttatggacagtgacggtaaagtgtcgggcaacgtcgcgccgcgtcgttatttctgcctgcagtgccacgtaccgcagtctgataccgcgccgattatcgacaatacctttaccccctcgcaaggttacgggaaataa

SEQ ID NO: 369436 - DNA, 603 bp, Salmonella enterica
atggaaaattctaaccgtaaacccggctggataaagcgcgtctggcgatggtggcgcagccccagccgcctggcgctggggacgctgctgttaatcggttttatcggcggcatcatcttctggggcggcttcaataccggaatggaaaaggctaacaccgaagagttttgtattagctgccatgaaatgcgcaacacggtgtatgaggagtatatggaaaccgtccactacaacaaccgtagtggcgttcgtgccacctgtcctgactgccatgtgccgcatgagtgggggccgaagatgatccgtaagatcaaagccagtaaagagctgtatgcgaaggtatttgggctgatagatacaccgcagaaatttgaagctcatcgcctgacaatggcacaaaatgagtggcggcgcatgaaagacaacaactcgcaggaatgccgtaactgccacaatttcgactttatggatctgaccgcgcaaaaaggcgtcgcggcgaaaatgcacgatcaggcggtaaaagacggacagacctgtatcgattgccacaaagggatcgcgcataaactgccggatatgcgtgatgttaaaccaggtttctga

SEQ ID NO: 369437 - DNA, 1596 bp, Salmonella enterica
atgaaaatcaataagccatcacgcattaatggccgcgttcccgtgctctctgcacaagaagcagtaaattatattccagatgaggccactttatgtattctgggcgctggcggcggtattctcgaagcgacaacattaattaccgcactggcagataaatatcaaacaacccagtcaccacgagatttatctattattagccctaccggattaggtgaccgcgccgatcgcggcatcagcccgctggcgcaggagggattggtaaaatgggcgctatgcggacattgggggcaatctccccgtatttctgaactggctgaacaaaataaaatcgccgcctataactacccacaaggcgtattaacccagacgctgcgcgccagcgccgcacaccagccgggtattctgagcgatatcggtattggtacctttgtcgaccctcgccaacagggcggaaaattaaacgacgtgactaaagaagatctcattaagctggtagagatcgataataaagaatatctctattataaagcgatagcgcctaatgtggcttttatccgcgccaccacctgcgacagcgaaggctatgcatcatttgaagatgaggtgatgtatcttgatgcactggtgatcgcccaggccgttcacaataatggcggtattgtaatgatgcaggtgcagaaaatggtaaaaaaagccacgctgcatccaaaatccgtgcgtattcccggctatctggtggatattgtggttgtcgacgccgaccagacgcaactctatggcggcgcgccggtgaaccgatttatctccggggattttactcttgatgatagtacccagcttaccctgccccttaatcagcgcaagctggtagcccgacgcgcgctgtttgaaatgcgtaaaggcgcggtaggcaatgtgggcgtaggcattgccgacggcattggtctggtcgctcgcgaggaaggctgcgccgatgacttcgtgctgaccgtagaaactggcccggtgggcggtattacctctcagggtgtggccttcggcgccaatgtcaatacccgcgcgatcctcgatatgacctcacaatttgatttttatcacggcggtgggctcgatgtctgctatttaagttttgccgaagtggatcaacacggtaatgtcggtgtacataaattcaacggcaaaattatgggcaccggcgggtttatcgatattagcgcaacgtcgcaaaaaattattttctgcggaactctgacggccggaagtttaaaaactgaaattaccgatggcaaattaaatattctgcaggaaggtcgcgtgaaaaaattcgtcagcgaactgccggaaattacgttcagtggaaaaattgcgcttgagcgcgggttagacgtgcgttacatcactgaacgtgcggttttcactctcaaacaagatggcctgcatttaattgaaattgcgcctggcgtcgatctgcaacgggatattcttgacaagatggatttttcaccggttatctcaccagatttaaaactgatggacacaagattatttaccgatagcactatgggattcacgcttcctgacgcaacacattaa

SEQ ID NO: 369438 - DNA, 759 bp, Salmonella enterica
atgaaaaccgtaactgtaagagatctcgtggttggcgaaggcgcgccaaagatcattgtgtcgctaatgggaaaaaccattaccgatgtgaaatcggaagcactcgcctaccgtgaagcggatttcgatattctggagtggcgcgttgaccattttgccaacgtgacaacggcggaaagcgtacttgaggccgccggcgccatccgggagattattaccgataaacccttgctatttaccttccgcagcgcgaaagaaggcggcgaacaggcgctaactaccggacagtatatcgctctgaatcgtgcagcggttgacagcggtctggtcgatatgatcgatcttgagctttttaccggcgacgacgaggtgaaagccaccgtcggctatgctcatcaacacaatgttgcggtgatcatgtctaaccatgattttcataaaacgcccgcagcggaagagattgttcagcgtctgcgtaaaatgcaggaactgggcgccgatattccgaagatcgccgtcatgccacagactaaagccgatgtcctgaccttacttaccgccactgtagaaatgcaggagcgctatgcggatcgtccgattattaccatgtcgatgtcgaaaaccggggtaatatctcgtcttgccggcgaagtgttcggttctgcagcaacgtttggcgcggtgaaaaaagcatctgcgccgggacaaatatcggtagccgatctgcgtaccgtattaactatattgcaccaggcgtaa

SEQ ID NO: 369439 - DNA, 867 bp, Salmonella enterica
atggatgttaccgcaaaatatgaattaattggtcttatggcgtatcctatccgtcatagcttatcgcccgaaatgcaaaacaaagcgttagaaaaagcggggctaccgtatacctatatggctttcgaagtggataacacgacgtttgccagcgccattgaaggactgaaagcattaaaaatgcgcggtacgggcgtctccatgccaaacaaacagctcgcgtgtgagtatgtcgatgaattaacgccagcagcaaaactggttggcgctatcaacaccattgttaacgatgacggctatctacgcggctacaacacggatggtacgggccatattcgggcaattaaagaaagcggtttcgatattcggggaaaaaccatggtgctgctcggcgcgggaggcgcggctaccgccattggcgcccaggcagccattgaaggcattaaggaaattaaactgtttaaccgtaaagatgactttttcgaaaaagcggttgcctttgcgaagcgggtgaatgaaaacaccgattgcgtcgttaccgtcaccgatcttgccgatcagcacgcttttactgaagcgcttgccagcgcagatattctgacgaacggcaccaaagttggcatgaaaccattggagaacgaatccctgatcggcgatgtttccctgctccgccctgaattgctggtcaccgaatgtgtttataatccgcatatgacaaagttattgcagcaggcgcaacaagctggttgcaaaacaattgatggttacggcatgttgttatggcaaggagccgaacagtttgaactgtggacaggaaaagcatttccattggactatgtgaagcaggtgatgggattcacagcctga

SEQ ID NO: 369440 - DNA, 1236 bp, Salmonella enterica
atgtctcagaacaaggctcgcaacatgccatatttgctggctgttatctgcatttattttagttactttctccacggcatgagtgttattacactagcccagaacatgacctcccttgcacagaaattctccacggatagtgccggtatcgcctatttaatctctggcattggtcttggtcgtctggtcagtattttattctttggcgtactgtccgataaatttggccgtcgggcaataatactgcttggcgccgtactatatatgctatttttcttcggtattcccgccagtcctaacctgatgatcgctttcatattagcggtgtgtgtcggcgtggcgaactccgcgctggataccggcggataccctgcattaatggagtgttttcccaaagcatcgggctcggcagttattctggttaaagcgatggtctcttttgggcaaatgatttatccccttattgtcagcgccttgttagtcaaccatatctggtacggctacgcggtggtaatccccggtatccttttcgtcctcatcacgttgatgctgttgaaaagccgttttcccagccaacttgtcgatgccagtattgcgaaagaattaccccagatgaacagtactcccctcgtctggctggaaggcgtagcttccgttttatttggcgtcgccgcgttctcaaccttctatgtgattgtggtctggatgcctaaatatgcgatggccttcgccggaatggcggaatccgacgcgctgaaaaccatctcttattacagtatgggatcgttggtttgcgtgtttatttttgccgcattgctgaaaaaaatggttcgccctatctgggccaatgttttcaatgccgggctggcgacactcaccgctgcggcaatttacctgtatccctctccactgatctgtaatgctggcgccttcgtgattggtttttccgctgctggaggtattttacaattaggtgtatcggtaatgtcggaatttttccctaagagtaaagctaaagtcaccagtatatatatgatgatggggggcgtagctaactttattattccactgatcaccggttatctctctactattggcctgcaatatatcattttgttagattttgcctttgcactactgacatttatcaccgccattattgtatttattcgctattatcgcgtatttaagatcccgcaaaacgatgtccgatttggcgagcgttatttccagtaa

SEQ ID NO: 369441 - DNA, 1212 bp, Salmonella enterica
atgaaaaatcgttatttccctaccgctgtagggttgtattttaattactttgtacatggcatgggggttatcctgatgagcctgaacatgtcatcgcttgaacagcaatggcataccagtgccgcaggcgtatctattgtgatctcttcgcttggtattggccggctaagcgttttgttaatcgccggtatgctttccgatcgctttggtcgccgtccttttatcattctggggaccgcctgttacctgatttttttcattggcattctttatgctcagacgatttttgtcgcttatgcctgtggctttttagcgggtatggccaacagttttttggatgcaggtacctatcccagtttgatggaagccttccctcgctcccccagtacggcaaatattctgatcaaagcatttgtctctggcgggcaattcttgttgcccattattatcagtttattagtctgggctaatatgtggtttggctggtccttcctgcttgccggggcgatcatgcttattaatgctctgtttttattacgctgtccttttccaccctatcctggtcggatattgaagcccaaaatctcgcaagcgcctgtcgcaggcgtacatcattgctccctcatcgatcttatcagctacaccctttatggctatatctcgatggcaaccttttatcttatcagccagtggctggcgcagtatggacagttcgtcgcaggaatgtcgtatacccaatccatcaaactgttaagtatttatacctgcggatcgctactctgcgtttttataaccgccccgctggtcagaaaaacaattcgctctaccacattattgatgttttatacctttatctcttttattgcgcttctgacggtctgcctgcatcctcaggcctatgttgttatgatcttcgcattcgtcattggattctcttccgccggtggcgtagtacaaatcggcctgacgctgatggcggcccgttttccacaggagaaaggtaaagcgaccggcatttattacagcgccggcagtatcgcgacgttcactattccgttgatcacagcgcggatttcagaaatgagcattgcacatattatgtggtttgataccggtatcgccgcagtgggatttctcctcgcactgttcatcggttaccgaagtcgggctgaatcacaacatcacgctgaagcagcgtcaaccgcgcaataa

SEQ ID NO: 369442 - DNA, 360 bp, Salmonella enterica
atgatgaacgcgttagaactacaagcactacggcgtatttttgatatgacgattgaagaatgcacaatctatatcacccaggataataattcgacaacctggcaacgatgggaagctggcgacacacccatctctccagaaatcattgccaggctgaaggaaatgaaagccaggagacagcgacgaattaacgccattgttgacaaaataaataaccgcatcggcaataatacaatgcgttacttccctgatttatcttcttttcagtccatttatacagagggtgattttatcgagtggaaaatttatcaatctgttgctgccgaacttttcgcacatgatctggagcggctgtgttag

SEQ ID NO: 369443 - DNA, 1119 bp, Salmonella enterica
atggtaaatgttcgtcagcccagggatattgcgcaagtgctgctatcggtgctgtttttagccatcatgattgtggcctgtttgtggatagtacagccttttattttggggtttgcatgggcaggtacgattgttatcgcgacctggcccgttttgctgaaattacaaaaaatattgtggggccgccgctcgcttgccgtattggtcatgacgctgctgttagtgctgctcttcgttattcccgtcgccttgctggtgaacagcattgtcgatggtagcggcccgctcatccatgcagtgaccggcggcgatatgacgctacccgatctggcatggttaaataatattccgttggttggcgccaaactgtatgccggatggcatagcctgctggatatgggcggtagcgctattatggcgaaagtgcggccttatatcggcacaaccacgacctggtttgtcggtcaggcggcgcatatcggacgctttatgatgcactgtgccctgatgctgttgtttagcgccctgctttactggcgcggcgaacaagtggcgatgggtatacgccattttgcctgtcgtctcgcggctaaacgcggcgatgcggcggttctgctggctgcccaggcgatccgcgccgtggcgcttggcgtggtggttaccgcgctggtacaggcggtacttggcggcgtcgggctggcgatttccggcgtgccttacgctaccctgttgacggtagtgatgatcctttcgtgtctggttcagttggggccgttgccggtattgattccagccattatctggctttactggacaggcgacaccacctggggcaccgtgctgctggtttggagcgccgtcgtcggcactctggataacgtgattcgcccggtactcatccgcatgggtgccgatttaccgctgcttctgatcctttccggggtaatcggcggcctgattgcattcggtatgattggtctgtttattggaccggtgcttctggccgtgacctggcgtttgttctccgcatgggtacatgaagttccggcgccgacgaatgaaccagaggagatccttgaagagctggatgacatcgaggaagccaacaagcagtcataa

SEQ ID NO: 369444 - DNA, 3057 bp, Salmonella enterica
atgattccacaaatttctcaggcacccggcgtcgttcagctggtgctcaattttttgcaggcgctggagcagcaagggtttacgggcgatacggcaaccagctatgccgaccgtctgacaatgtcgaccgataacagtatctaccagcttcttcccgatgctgttgtgtttccccgttctacggcggatgtcgcgcttcttgcccgtctggcggcggagccgcgctttacgtcgctgatatttacccctcgaggcggcggtactggcacgaatggccaggcgctaaaccagggcattattgttgatatgtcccgctatatgaaccgcattattgaaattaatcctgaagagggatgggtgcgggtagaggcgggagtgataaaagatcagcttaatcaagcgttaaagccgtatggctatttttttgcgccggaactttccaccagtaatcgcgccacgcttggcggtatgattaataccgatgcctccggtcagggttcgctggtctatggaaaaacgtcagatcacgtcttaggcatacgggccgtattgttggggggcgatatccttgacacgcaatcgatgcccgtagagcttgcccggacgctgggtgaaaacacgacgacgccaggccgcatctatcagaccgtctatcagtcctgcctggaaaaccgccaacttatcctcgatagctttccaaagctcaatcgcttcctgacaggctacgatttacgccacgtctttaacgatgacatgacccgcttcgatctcacccgcatcttaacggggtcggaagggacgctggcgtttattactgaagcccggctggatattaccccgatacccaaagtccgccgtctggtgaatgtaaaatacgactcctttgattccgcgctgcgtaacgccccttttatggttgatgcgcgcgccttatccgtcgagacggtcgattccaaagtccttaacctcgcgcgggaagatattgtctggcactccgttagcgaattgattaccgatgtgccggataaagagatgcttggcctgaatatcgtggaattcgcgggtgacgatgaagcgcttattgacggacaggtcgaggcgctgtgccaccggctggatggcctgatggcgcgagcggaagcgggcgtgatcggctggcaactttgtaccgatttgacgggtattgagcgtatttacgcgatgcgtaaaaaagcggtagggctgctgggtaatgcgaaaggcgctgccaaaccgattcctttcgcggaagatacctgcgtgccgcctgaacatctggccgattacatcgccgaatttcgcgctctgctggatggtcatggcttaagttacggcatgttcggccacgtggatgccggggtgctgcatgtgcgtccggcgctggatatgtgcgatccgcagcaggaactgttgatgaaacagatctccgatgaggtcgtcgcgctgaccgccagatacggtgggctgttgtggggcgagcatggaaaaggttttcgtgcggaatacagcccggcctttttcggcgaagttctgtatggcgagctgcgcaaaataaaagcggcttttgatccgcataatcgacttaacccgggtaaaatctgtccgccgcaggggatagaggcgccgatgatgaaggtggatgcggtaaaacgcggcacctgggatcggcaaattccgctggcggtacggcagacctggcgcggcgctatggagtgtaatggtaacggcctgtgctttaatttcgatgcgaaaagcccgatgtgcccgtcgatgaaaattagccttaaccggatccactcgccgaaagggcgggcgacgctggtgcgggaatggctccgtctattggccgatcgcggcgtcgatccgttgaagctggaaaaggagttgccagaaaaacgcgccagcttacgcacgctgattgcccgcacccggaatagttggcacaaacgcaaaggcgagtatgacttttcccatgaagttaaagaggccatgtccggctgtctggcgtgtaaagcctgtacgacccagtgtccgattaaaatcgatgttccggagtttcgttcacgtttcttacagctttaccatacgcgttatctgcgcccggtacgcgatcatctggtggcgacggtcgagacctacgcgccgctgatggcgcgtgcgccaaagacctttaacttttttattaaccaaccggtggttcgtaatctggcgaaaaaacatatcggtatggtggatttacctctgctttctgccccttcattgcaacagcaactggtgggccatccgtctgccaatatgacgcttgagcaactggaacgcatgagcgccgagcaaaaagcgaaaacggtactggtggttcaggatccgtttaccagctactacgacgcccgggtcgtggcggactttatccgcctggcggaaaaactgggcaggaggccggtattgttaccgttctcgccgaatggtaaggcgcagcatattaaaggttttcttaatcgctttgcgaaaacggcgaaaaaaacctctgagttccttaatcggatcgccgcgttggggatgccgatggtgggcgtcgatccggcgctggttctgtgttatcgcgacgaatacaaactggcgctgggtgaacagcgcggcgattttcatgtgttgctggtgaatgaatggctggcgcaggaaataaatgcaagactgtccgtcgaggtgagcggcgaaccgtggtacttttttggtcattgtacggaagtcacggctttacccggcgcgcctgcgcagtgggccgccatctttgcccattttggcgcgaagctggaaaatgtcagcgtaggctgctgcggtatggcgggcacttatggacatgaactcaccaatcataaaaattcgctgggaatttatgagctatcctggcatcaggcgatgcaacgtctaccgcgaaaccgctgcctggcaaccggctattcctgccgaagccaggttaaacgcattgaaggtacgggcgtgcgtcacccgttgcaggcattactggagattataggttga

SEQ ID NO: 369445 - DNA, 411 bp, Salmonella enterica
ttgatctggaaacgtgaagtgaccctcgatgcgcttaatgcgatgggggaaggaaatatggttggcctgcttgatatccgctttgagcgtattggggacgatacgctggaagcgacaatgcccgtcgatcatcgcaccaaacagccgttcggcttgctgcatggcggagcgtctgtggtgctggcggaaagtatcggctcggtcgcaggttatctgtgtacgcagggggagcaaaaggtggtggggctggaggtgaatgccaaccatgtacggtcggcgcgtcaggggcgcgtacgaggcgtctgtaaagcgttgcataccggggctcgccatcaggtctggcagatagagatctttgatgaacagggacgtctgtgctgttcttcgcgtcttactacggcgattgtgtga

SEQ ID NO: 369446 - DNA, 189 bp, Salmonella enterica
atgtctactgatttagacccgacccaactggcgattgaatttttacgccgtgataaaaccgaactttctcccgcgcagtatttgaagcgtttaaaacagctggagttagagtttgccgatctcctcaccctctctgcaaccgaactgaaagaagagatctatttcgcctggcggttgggcgtgcattaa

SEQ ID NO: 369447 - DNA, 1347 bp, Salmonella enterica
atggttgttacgctcgcgtatatcgcactttttttggttttctcgtgggtcatcttgagaattaatcaaaaaagcgattccctgtcgaaaagcgtttttatcgctatctttttaggggctgttattggtttatccctgcattttatttcagcaaatcacactaaaactattatcgaatggtacagcatcgtcggcaatggttacgtccacctgttaaaactggtcgctataccgctaatttttatttctattctttccgccatcaataaactggaaaatagcgccggcatcggaaaaatgtcgctgacgatcgtcggatgcatgttatgcctggtgatggttgccggttttatcggattactgaccgctcatgtgctggggcttgacgccagcgcttttgtgcacatgccgtcaatgttaactacagaagaagtcaataagactgccgcggtgtcgattccccagttagtgacatcgctgatcccgactaatatttttcttgatcttacgggagccagaagtgtttccgttatcggcatcgttatcttcacgctaatagcggggatcgctctgttaaaggtcaaaaaagaggcgccggaagaaggtcagaaattaagcgcaggcattaacgctatccagatctgggtcatgaagatggtacgtatcgttattgcattaacgccctatggcgtcatggcattaatgactaccgtattttcatcataccactttgaacaattcgccagcttacttggttttatcggcgcctgttatatcgcgattttcatgatgtttatcgtgcatgccatcttgctgatcctcagcggtaataatccagcgcgttatttcagtatggtctggcccgtcttaacctttgcgtttgtttcccgcagcagcgcagcctctatcccgctggccatttccgcccaggaaaaatttggcgtacaaagcactattgccaatatttccgcctcgtttggctccagtatggggcaaaatggctgcgccgggatttatccggctattatggtagcgatgattgcgcccaccatcggcattgatccgctctcgctgcattttctggccgcgatgttgcctgccattgcgctagggtctattggcgtagccggcgtcggcggcggcggtacgttcgcggcgctgattgtcctgtcgacgttgaattttcccgttgcgctggtcggtatttttattgccatcgaacctatcgttgatatggcccgcacggctctgaacgttaacggatcgatgatgtcaggtgtgctggctaaccgtattttgaataatcatacggctgacgacatgccagcggttattgacagaccttag

SEQ ID NO: 369448 - DNA, 369 bp, Salmonella enterica
atggaattgcattcagacacgtttaacccggaggacttcccctggcaagggctgacgctaacgccagcggcggcagcgcacatacgtgaactggcagaaaagcagccgggcatgttgggcgtgcggttaagcgtaaaacagacgggatgtgccggatttggctatgttctggataccgttcgggagccggataaagacgatctggtttttgaagccgaaggcgcaaagcttttcgcaccgttacaggcgatgccttttattgacggaacagaagtggattacgtacaggaagggctgaaccagttatttaaatttcataaccccaaagcccagaatgaatgcggctgcggcgaaagttttggggtatag

SEQ ID NO: 369449 - DNA, 1488 bp, Salmonella enterica
atgtctcgtaacactgaagcaacggaagaggtcggcatctggacaggcggacgccttaattacaaagaaggatttttcacgcaactacccactgatgaactggcaaaaggcatcagcgaagaggtggtgcgcgcgatttccgcaaagcgtaacgaacctgagtggatgctggaatttcgtctcaatgcctatagagcctggctggacatggatgaaccgcactggctgaaggcgcactacgataaactgaactatcaggactacagctattactctgcgccatcatgcggaaactgcgacgatagctgcgtttcccagccgggagccgtacagcaaacgggcgcgaatacctttttgagtaaagaggttgaagacgccttcgagcaacttggcgttccggttcgcgaagggaaagaggtcgccgtcgatgcgatttttgattcggtctccgtagcgaccacataccgtgaaaaactggcggaacagggcattattttctgttcttttggcgaagcgatacacgatcaccctgacctggtcaggaaatatcttggcaccgtcgtgccggggaacgataacttttttgccgcgctgaatgcggcagtcgcttccgatgggacatttatctatgttcccaaaggcgtgcgttgcccaatggagttatccacctattttcgcattaacgccgagaaaaccggtcagtttgagcgcacgattctggtggcggatgaaggcagctatgtgagttatatcgaaggctgctccgcgcccgtacgcgacagttatcagctccacgccgcggtagtggaagtcatcatccataaagatgctgaagtaaaatattccaccgtacaaaactggttcccgggcgacaacaacacgggcggcattctgaactttgtgaccaagcgggcgttgtgcgaaggggaaaacagcaagatgtcgtggacccagtcggaaaccggttcggcgattacctggaaatacccgagctgtatcctgcgcggtgataattctatcggcgagttctattccgttgcgctgaccagtggacatcagcaggctgacaccggcaccaaaatgatccatatcggtaaaaacacgcgctcaaccattatctcaaaaggcatttctgccggccacagccagaacagctaccgtgggctggtaaaaattatgccgacggcaaccaacgcccgaaatttcacccaatgcgactccatgttgattggagcggactgcggcgcgcatacgttcccgtatgttgaatgccgcaataacagcgcgcagctggagcacgaggcgacaacatcacgcatcggtgaagatcagcttttctattgtctgcaacgcggcatcagcgaagaagacgctatttcgatgatcgtcaacggtttctgcaaagacgttttctcggaactaccgctggagttcgccgttgaagcgcaaaaactgctgacgattagccttgagcacagcgtcggttaa

SEQ ID NO: 369450 - DNA, 747 bp, Salmonella enterica
atgttaagcattaaagatttacaggtcagtgtggaagaaaaagcgattttgcgtggcctgaatctggagattcgccccggcgaagttcacgccattatggggccgaacggttccgggaaaagcacgctctccgccaccctggcgggacgtgaagattatgaggtcaccggcggctcggttacgttcaagggtaaagatctgcttgaactgtcgccggaggaacgggcgggcgaagggatttttatggccttccagtacccggtagaaatccccggcgtcagtaaccagtttttcctgcaaaccgcgctgaatgccgtgcgcgcctaccgcgggcagacgtcgttggatcgctttgattttcaggatctgatggaagaaaagatcgcattgctgaaaatgccggaagatttactgacccgttcggtaaacgtcggtttttccggcggggagaaaaagcgcaatgatattttgcaaatggcggtgctggagccggaactgtgcatccttgatgagtcggactccggactggatatcgatgcgttgaaaattgtggcggaaggcgtcaacgcgttacgcgacgataaacgcgcttttattatcgtgacccactatcagcgcatactggactatatcaaacccgattacgtccatgtcctctatcaggggcgaattgtccgatccggcgattttactctggtcaaacaactggaggagcagggttatggctggcttaccgaacagcagtaa

SEQ ID NO: 369451 - DNA, 1272 bp, Salmonella enterica
atggctggcttaccgaacagcagtaaagcgctacagcaatggcagcatctctttgaggaaaaaagagaaagtcgaactgagcaggcaagacaacatttacaacagatgttacgtctgggattgccgacgcgtaaacatgaagactggaaatacacgccgctggagggcttaacccatagccagtttatccagcagtgtgcgactatcagcgccgcacagcgtgatgcgttggcgctgcaaatcgatgccgtgcggctggtgtttgtcgatggtcggtttatgccagagctcagtgatagcacgcaaaacagcggatttgacgttagcgtcagggatgagcgccagacgcttgccgcgccggtacagcctgaggtttttctgcatctgacggaaagcctggcgcaatgtgtcacgtatatacaggtacggcgaaatcagcgtccgaccaggccgctactgttaatgcatatcacgcagggcgtggatggcgacgagctgaacaccgcgcattatcgccaccatctggcgctggcggaaggcgcggaagcgacggttattgagcattatgtcagccttacagcggcaaaacattttaccggcgcgcgtctgacgatgaacgttgcagacaatgcgcaactgcatcatatcaaactggcgtttgaaaatgcgtccagctatcactttgcgcataacgatcttctgctggcgacagacgcctcggcgtttagccacagttttctgctgggcgccgcagtactacgtcaccacagcagctcacaactgaatggtgaaaacgcgacgcttcgactgaatagtctggcgatgccggtgaaaaatgaagtttgcgatacgcggacatggctggaacataacaaaggctactgtaacagccgccagtcgcacaagaccatcgtcagcgacaaaggacgcgcggtctttaatggcctgattaacgtggcgcaacacgccattaaaaccgacggccagatgaccaataataacctgttgttggggaaactggctgaagtcgataccaaaccgcaattagagatctatgccgatgacgtgaagtgcagccacggcgcgacgatcgggcgtattgacgatgagcagatgttttatctgcaatcacgcggcatcagacagcaggaggcgcggcacatgattctttacgcgtttgccgcagagttaacggaagctatccatgatagcgcccttaaacagcaggtgctggcgcgaatcggccagcgactgcccggaggcctggtatga

SEQ ID NO: 369452 - DNA, 1221 bp, Salmonella enterica
atgacatttcctgtagaaaaagtacgggcggattttcccatactgcagcgtgaagttaacggcctgccgctggcttacctggacagcgcagccagcgctcaaaaacctaatcaggtgattgatgctgaatctgccttctaccgtcacggctatgctgcggtacatcgaggtatccatacgttaagcgcgcaggcgaccgaaagcatggagaatgtgcgtaagcaggcgtcgcggtttattaacgcccgctccgcagaagaactggtgttcgtgcgcggtacgacggagggcattaaccttgtcgccaacagttggggaacggaaaatattcgcgccggggataacattatcatcagcgagatggagcatcacgccaacatcgttccctggcagatgctgtgcgagcgcaaaggcgctgaactgcgcgtgatcccgttgcatcctgacggtacgctgcggctggagaccttagctgcgctgttcgatgaccggacccgactgctggccattacccatgtttccaatgtgctggggacggaaaacccactgccggacatgattgcgctggcgcgccagcatggggcgaaagtgctggtggatggcgcccaggccgtgatgcaccatgctgttgacgtccaggcgctggactgcgatttttacgttttctccggccataaactttacgggccgaccggcatcggcattctgtatgttaaagaggcgttgctgcaagaaatgccgccgtgggaagggggcgggtcgatgatctcgaccgtcagcctgacgcagggaacgacatgggcgaaagcgccctggcgttttgaggcgggaacgccgaatactggcggcatcatcggtctcggcgcggcgattgactatgtgacgtcgctgggactggataagattggcgattatgagcagatgctgatgcgctatgcgctggagcaactggcgcaggtgcctgatatcacgctgtatggtccggcgcagcgattgggcgtcatcgcgtttaatctgggtaaacaccatgcttacgacgtcggcagctttcttgataattacggtatcgcggtacgaacgggacatcactgcgcaatgccgctcatggcctggtatggcgtgccggcaatgtgccgggcttcgctggcgatgtataacacccatgaagaagtggaccgactggtggcaggattaacgcgtatccaccgcttattgggataa

SEQ ID NO: 369453 - DNA, 417 bp, Salmonella enterica
atggctgcgctaccggataaagaaaaactgctgcgtaactttacgcgttgcgctaattgggaagagaaatatttatatattattgagttggggcagcgcctggcggagttaaatccgcaggatcgtaatccgcaaaatacgattcatggctgtcagagccaggtgtggatcgtgatgcggcgaaacgccaacggcattatcgaattgcagggcgacagcgacgcggcgatcgttaagggccttatggcggtggtatttattttgtaccaccaaatgacggcgcaggatattgtgcattttgatgtccggccatggttcgaaaaaatggcgcttgcgcagcacctcacaccttctcgttctcaggggctggaagcaatgattcgcgcaattcgcgctaaggccgccactcttagctaa

SEQ ID NO: 369454 - DNA, 1002 bp, Salmonella enterica
atgaaacgtgcgtctttcattacgctaactattatcggcgcgtatagcgcgttacaggcagcctgggcggttgattatccattaccgcccgaaggcagccgtcttattggtcagaatcaaacctataccgtacaggaaggtgataaaaacctgcaggctatcgcccggcgttttgatacggcggcgatgctcattcttgaagcgaacaatacgattgcgccggtgcctaagcccggtacgctaattaccattccctcgcagatgctattgccggatgcgcccagggaaggcgttatcgtcaacctcgcggagctacggctgtattattacccgccgggagaaaaccgcgttcaggtgtatcccatcggcatcggtttgcagggactggaaactcccgtcatggacacccggatagggcaaaagatccccaacccgacgtggacgccgacggcgggcatacgccaacgttcgcttgagcgggggatcacgctgccgccggtgatccctgccgggccaaataacccgctgggacgctatgcgctgcgtctggcgcacggtaatggggaatatctcattcatggcaccagcgcgccggatagcgtaggtctgcgcgtgagttccggttgcattcgcatgaacgcgccggacatcaaagcgttatttgcgcaggtcagaacggggacgccggtaaaagtgattaaccagccggtgaaattctctgtcgagccgaatggcattcgttatgtagaggtgcacaggccgctatcgccggaagaagagcaaaacgtgcagacgatgccctacgtgttgcctgcggaatttaccgcgttcagaaacgcgcaaggggtggatagtcgcctggtcgataaggcgctataccggcgagccgggtatccagtcagcgtgagcgccgggcagacgccagcggtaaatacgaccgcagtcgaatccgctcagaacggttttgtcggggaagaggggcaaacgcgcgcgacgcagtag

SEQ ID NO: 369455 - DNA, 216 bp, Salmonella enterica
atggcgcacgatgtgcgccattttatatcgtgcgtcaaattacttacggacgtgggatactactttgttgtccagacgctggttctcgcgagctgcgtcgtctttagcagcctgaacgtcggaacgcattgcatttacgtcattactcagttgctcaactttagcgctcagcgtctgtacatcggaagacaactgatcgattttagcgttgtttga

SEQ ID NO: 369456 - DNA, 237 bp, Salmonella enterica; identical to SEQ ID NO: 73187

SEQ ID NO: 369457 - DNA, 1413 bp, Salmonella enterica
atgaaaaagacgaaaattgtttgtactatcggtccgaaaaccgaatccgaagagatgttaagcaaaatgctggacgcgggcatgaacgtgatgcgtctgaacttctctcatggcgattatgcagaacacggtcagcgtatccagaacttgcgcaacgtgatgagcaaaaccgggaaaaaagccgctattctgcttgatactaaaggaccagaaatccgcaccattaaactggaaggcggtaacgacgtttcgctgaaagcgggtcaaaccttcacttttaccaccgacaaatccgtggtcggtaataatgaaatcgttgccgtcacctatgaaggcttcaccagcgacctgagcgttggcaacaccgtcctggttgacgatggtctgatcggtatggaagtgaccgccatcgaaggcaataaagtcatttgtaaggtgctgaacaacggcgatctgggcgagaacaaaggcgttaacctgccgggcgtttctattgctctgccagcgctggctgaaaaagacaaacaggacctgatcttcggttgcgaacagggcgttgactttgttgctgcgtcctttatccgtaaacgttctgacgttgtcgaaattcgcgagcatctgaaagcccacggcggcgaaaacatccagattatctctaagatcgaaaaccaggaaggcctgaacaacttcgatgaaattctcgaagcttccgacggcatcatggttgcgcgtggtgacctgggcgtagaaatcccggttgaagaagtgatttttgcgcagaaaatgatgatcgaaaaatgtatccgcgcacgtaaagtcgtgatcaccgcgactcagatgctggattctatgatcaaaaacccgcgtccgacccgcgcagaagcaggcgacgtagcgaacgccatcctcgacggtacggatgcggttatgctgtccggcgaatccgccaaagggaaatacccgctggaagccgtttctatcatggcgaccatctgcgaacgtaccgaccgcgtcatgaacagccgtctggactacaacaacgacagccgtaaactgcgcattacggaagcagtatgccgcggcgcggtagaaaccgccgaaaaactggaagcgccgctgatcgtggtagcgacccagggcggtaaatccgctcgcgccgtgcgcaaatacttcccggacgccaccatcctggcattgaccaccaatgaagtgaccgcccgtcagttagtactgagcaaaggcgtggtatcgcagctggtgaaagaaatcaattctactgatgatttctaccgtctgggcaaagatgtcgccctgcaaagcggcctcgcccagaaaggcgacgtcgtagtgatggtctccggcgcgctggttccaagcggcaccactaacaccgcctctgttcacgtactgtaa

SEQ ID NO: 369458 - DNA, 1344 bp, Salmonella enterica
atgaaaaaagtcaaaaaattgtctcttaccgatttagtgctttatggtctggtgtttatggtgcctatcgcgccagtctctctttatggcgtcgtttataatctttcgcacggtatggttgcgctggtttatattattggcgctatcgcgatgttttttaccgcgtacagctactctaccttatcgcagcatatctcctcgtcgggttcggcctatgcgtatgctggcgtatgcattaatcccgccgtagggtttctgaccggatggatattactgctggattatcttttgttccctacgctcgtggcagtgctgggcggcgtcgcggtccacgctattttaccgcaaatcccggtctgggtctggccgttgatttatgtggctatcggcaccggagtcaactatctcgggatacagcaaacggcgaaattcgataagttactggtctttattcaactcggtattctggcgattttcgtgctactcattgtccgtctgatgctgctggacagtagtcagataacgctttccttccggccttttttcgattcacagtggttcaccccagggctcatcgcgacggcgatttcggtggctgcgctgaactttctcggctttgacgctatcagtacattaagtgaagaaagcgaaggcgggggacgcgccgtcagtaaagcaacgctgttggcgttagttttggcgacggtactgtttattatcgttgtggcgtttgcggcgttcgccaccggtaatgtcgaccgcttcgcggaaggcaatgcgacgaatgaagcatttttcaccattgccggcaacgttggcggtatctggctcaaagtggcattttccatcattgtggcgtttgtgtgcgccgtcggcaacattattaccgcgcaaacggcggtgtccagagtgctattttcaatggggcgcgaccgaatgttgcccgccttcctcgctcacgtccataccacgcgtaaaacgccggattatgccattctgtttaccggcggcgtcaccctgctgctcagctacctgttttccggcaagattgagtctatctccacgctggtgaactttggcgcgcttttcgctttttttgtcgtgaacctgtgtgtgtttatcctgttcaatttccggatgaaagcccagcggcgcattttcgcccatgtcatttcgccgatcatggggatgatcgtcatcggctacgtctgtttaaacatgaacattcacgctctgatactcggaattagctgggcggcgatcgggatagcgattctgtgctatcgaaaagcacataaccaaaacatcgccatcgacctggaaggcaaaaagttgctcgattga

SEQ ID NO: 369459 - DNA, 894 bp, Salmonella enterica
atgaatgatacttatctctatggcgaaatgttttctgaaaacatattgacaagctatcggatttatggagacagaaaatcattactcacgccgctcattatccttcatggcggcccttctggcggctttgattatttattaaattatcgccgtctggctgatgacgggcgcatggtaatattttacgatcaatatggctgcggtcgttcaacgcattttcctcatgctgacgcgtctttctggactattgcgcgttatctcagtcaattaacccaattaattcatcacctgggtattggacacgggtattcgatactgggacattcctggggcggaatgcttgccgcagagcacgcctgcttacagcctgccgggcttcgcgggacgatactggccagttcgccggccagtatcgccctgtggcaacaggaagccatacggctctttaacgctctgacgccaatgtccgatgacgatatcaaaaacgtcattatgcccgccgtcatttatcaaaacccaccggaacagctggtcgcttattatgccagacacgtttataccctcgcggaagaagccgttcatgttcagcgctctaatgcgcagttcgccgccgaccctacgggttatcacattttatggggaaccaatgaactggcggcaaatggcaaacttgccgactgggatattacgccccatttgtgccagatacgctgtcctgttctggtactgcgcggcgaaaacgatcaggcaaccgagcgcgtcgtctctccgcttctctctcacatttcagactgccgcgcggtcactattcctggcagcagccataacccgcatgaagaaaatatcgcgccctgcctcgcagcggtaagcgcgtttttacgcgatctggcataa

SEQ ID NO: 369460 - DNA, 738 bp, Salmonella enterica
atgaaaattttatttattggcgaatcctggcacattcatatgattcactctaaaggttttgatagctttacatcgagcaaatatgaagaaggcgcagactatttattatcctgcttacgccagggtaatatcgatgtggactacatgcctgcccatattgtgcaaactcgttttccacataccgccgaagcattagcctgctatgatgcgatcgtcatcagtgatatcggtagcaatacgttcctgctacaaaacagaacgttttataatatggacattattcctgatgcattacaacttatcgccgattatgttgctgagggcggcggtctgttgatgatcggcgggtatttatcctttacgggaatagaagcaaaagccaattataaaaatacggttctggcggaggtattgccggttgatatgctggatgtagatgaccgcgtagaactaccgcaaggatgtaaagcagtaaatactgcggtagagcatgttattacccagccatttagcgaatggccgccgctgttgggctataacaagcttatcgccaaagaaaatagtcaagtccttgctgaaattaatggcgatccactgttagttatgggtacttaccataaagggaaagtatgttgctttgccagtgattgttcgccgcactggggaagcccgcagtttctgcaatgggaacattacgccaccttctggtgtaatgttttacacacaataaaaaaataa

SEQ ID NO: 369461 - DNA, 1227 bp, Salmonella enterica
atgtttaaagaagaaagacgtcatgccatcattaatttactgataaaggataatagtgttagcgtcagtaaactttcagacctttataaggttagccaggagactattcgttccgatctacgctatttccagaaatcaggtatgcttcagcgttgctatggcggagggattttaaaccgtgacgcgctgagtaagcttatcactgaaaataagattgatatctccagcactatcgccacgccaatccatcaggatgcaaaactgcgccgggaaaacccaaaaaaagcaggcaaggtgtgtgttttaggctcattcaatattgatgtttcagcaaccgtgccgtggtttccacaaagcggagaatccattctggccagtcaatttggattctatcctggcggtaaaggagccaaccaggctttagcggcgaacaatgccggcgctgcggcacattttatttttaaagtgggcaaagatcagttcagcgcatttgctatgaatcatattattcaatcaggtatcgcctcatacagcgcgtatcaaacagataaagcgcccaccggtagcgcattgatctatgtctccgccgtggatggcgataatattatcgccatctaccctggcgccaatatgatgctcaccacgcaagagattaacgagcaacaccgttatatcgccgagtctgacgttatgttaatgcagctcgaaacgaacattgaagcgttgactgaatttattcgtctgggcaaacaagaaaataaaatgatcatgctgaatcctgccccctatacgaaacaggtgacgcatttattatctgatattgacatcatcacgccgaatgaaactgaagcctcttttttatccggcgtaaccattactgatattaatgatgcgaaaaaagccggaaatattattctgcaatccggggtgaaaaaagtcatcattacccttggcgcccgtggatctctgctctgtgagcacgcccgcacgttgtatattcctgcgtggagcgccgtggtaaaagatgccgccggggccggtgacgcttttaatggcgccttagccgccgcgctggcgcgacaagcagacatggtcgcagccattcaatatgcctccgctttcgcttctctggcggtggaacaagtcggtgcgtcgagtatgcctcagcacttgcaggttttacatcgaatgcgtacccaatctaataaagtcattcacattaattaa

SEQ ID NO: 369462 - DNA, 3063 bp, Salmonella enterica
atggctaatttaacccgtcgtcagtggctaaaagtcggtctcgccgtcggtgggatggtcacttttggtctgagctaccgtgatgtggcgaaacgcgcaattgatggcctgttaaacgggacatccggcaaggtaacgcgcgaccgcatctttggcaatgcgttaattccggaggcgcaggcgcaaacgcactggcagcaaaatccacaacaaaccatcgccatgacgcaatgcttcggctgttggacacagtgcggtatccgcgcccgggttaatgccgatggcaaagtgatacgcatcgccggcaatccctatcaccccttgtcgcaggaacacccgattgactcgtccgtcccttttagcgaagccatggagcaactggcgggagaaagcggtcttgacgcccgctcaaccgcctgcgcgcgcggcgccacgctgctggaaagcctgtacagtccgctacgactgcttgaaccgatgaaacgcgtgggtaaacgcggcgaagggaaatggcagcgcatcagctttgagcaacttattgaagaagccgtggaaggcggcgatctgtttggcgaaggtcatgtggacggactgcgcgctattcatgcgccggatacgccaattgacgcaaagcaccccagtttcgggcccaaaaccaatcagttactggtcacgaataccagcgacgaaggccgcgatgcgtttctgcgtcgttttgcgctaaatagcttcggcagcaagaatttcggcgcgcatggcgcctactgtggactggcttaccgggccggctccggggcattgatgggcgatctggataaaaacccgcatgtcaaacccgactgggaaaacgtggagtttgcgctctttatgggcacctccccggcacagtccggcaatccgtttaaacgccaggcacgtcagttggcgagcgcccgactgcgtgagaattttcaatacgtcgtggttgcccccgccctccccttatcaacggtgctcgccgatcctcgcggtcgctggcaaccggtcatgcccggcagcgattcggcgctggcaatggggatgatccgctggatcatggataatgaacgttataatgctgattatctggcgattcccggcgtacaggctatgcagcaggccggcgagcaaagttggaccaacgccacgcacctggtcattgcggatgaactgccgacgcttgccggacaacacctgacgctgcgccatcttacgcccgatggcgaagagacccctgtcgtgctgaataccgacggcgagttggtcgatgcgtccacttgccgacaggcacggcttttcgtgacgcagtacgttacgctcgccgacggccaacgggtcacggtgaagagcgggttgcaacgcctgaaagaggcggcagaaaagctctcgttggcgcaatacagcgaacagtgcggcgtaccggaagcgcaaattatcgcgctggcggaaacctttaccagtcacggacgtaaagccgcggtcatcagtcacggcggcatgatggccggcaatgggttttataacgcctggtcggtcatgatgcttaacgcgctgatcggcaacctcagcttgtccggcggcgtctttgtcggcggcggcaaattcaacggcgttagcgacggcccccgctacaacatgaacagttttgccggaaaagtgaaaccgtccgggttaagtattgcccgtagcaaaaccgcttatgaagcatcggaagaataccgcgacaaaattgccggcgggcaatccccttatccagccaaagcgccgtggtatccctttgtggcaggccagcttaccgaactgttgacctccgcgctcgaaggctatccttatccgcttaaagcctggatttccaatatgagcaacccgttttacggtgttcccggtctacgcgccgtggcggaagaaaagctaaaagaccctcgccgactgccgctctttatcgcgattgacgcctttatgaatgaaacgacggcgctggcggattacattgtgccggatacgcacaattttgagagctggggctttacggcgccctggggcggcgtagccagtaaagccactaccgcccgctggccggttgtcgcccccgccactcgccgaacggtggacgggcaacctgtctcaatggaagcattttgtattgcggtagcaaaacggctccatctgcccggcttcggcgaccgggcgataaccgatccgcagggcaatacttttccactgaaccgggcggaagacttctatctgcgcgtagccgctaatatcgcctttatgggcaagacgccggtcgcgctggcaaatcaggaagatatttcgcttaccggcgtcagccgcattctgccagcaattcagcacacgcttaaagctgatgaggtcggtcgcgtggcgtttatctactcgcgtggcggccggtttgcgcccgaggatagcggctatacggagcaacggttaggtaacgcgtggaaaaaacccttacagatctggaatgcagatgtcgccgcccaccgtcacgccatcaccggggagcgcttcagcggttgcccggtctggtatccggcgcgtttgtcagatggtcgtgcgattgacgaccagtttcccattgggcaatggccgctgaaactgatttcatttaaatcaaataccatgtccagctcaacagccgtcatcccgcgcttacaccatgtgaagccagcaaacctggtggcgctgaatccgcaagacggcgagcgttatggactgcaacatggcgatcgggtacggatcattacgccgggcggtcaggtcgtggcgcaaatcagtttgttaaatggcgtgatgccaggcgtcatcgccatcgaacacggatatggccaccgcgagatgggcgcaacgcagcactctctggatggcgtgcctatgccgtatgatccacaaatcagggcaggcataaatcttaacgatctgggctttgccgatccgacaagaaccattaccaacacctggctcgactgggtttctggcgcggcagtacgtcaggggctgccggcaaaaatcgagcgtatataa

SEQ ID NO: 369463 - DNA, 1023 bp, Salmonella enterica
atgacgcattcactcatcattgaagaagtgctggctcacccgcaggacattagttggctgccgtgggcggtacaatatttcttttttattggcattgccgcctgcgccgcactgtttgcctgttatcttcactggcggaaaaaagacgccgcaacagaagaaaatcgggcattactgattgccattacctgtgcgattaccgcaccgctggcgctgacggcggatctgcaccagactgcccgcgtctggcatttctatgcctggccgacgccctggtcgtggatgccctggggagcgttgttcctgccgctgtttaccggatttctcgctctgtggttcctggcgcagcagattaaacgattattcaataaaagttacaacgtcactaaatggttggcgttagccagcgcgctttgcgcggtgggcctgttgatttataccggccgcgaagtctccgttgtgctggcgcgcccaatctggtttagctacgccttccccgtggcgatgttccttagcgccttacaggcgttcttcgcgctgatgattgtcgccgcccgacgcgactcggtaaggctgccaaaaatattgtggggacaaatctggacgctggcggcgctggggctggttgtggccatgtgggttagcggcgatacgctttccggcacggcaatccgtcagtggattaccgtcgccctgtcagccaaatattacgctgtcggctggctagcgctgtgggtattcacgctgctgttctgtagcctgacgctacgtcatccgttatcgcagctaagacgcgtcctgctggttctcagcgcgctggcgctatgttggctgatgcgctggacattgttgattcaggtacaaaccgtccccaagttcaacgcgcaatttaacccttactcgttaccaggcggaacggatggctggctggctattctcggcaccttcggcctgtggatagcgctactgattattattcgtgaaacgctgaacggactcaccaggagattacaacatggctaa

SEQ ID NO: 369464 - DNA, 735 bp, Salmonella enterica
atggacagcagtaaacggcaatttctccagcagctcggcgtcctgaccgctggcgcctcgctggttccgctggctgaagcgaaatttcctttttcgccggagcggcatgaaggctctccccgacaccgttacgccatgcttatcgacctgcggcgttgtatcggctgtcagtcctgtaccgtaagttgcactattgaaaaccaaacgccgcagggcgcgtttcgtacgacggtgaaccaataccaggtccagcgtgaaggtagtcaggaagtcacgaatgtgctattgccgcgtctgtgcaaccattgcgataaccccccctgtgtgccggtctgcccggtacaagccacctttcagcgggaagatggcattgtggtggtggataacaaacgctgcgtcggctgcgcctattgtgtccaggcgtgtccttacgacgcccgatttatcaatcatgaaacgcaaactgccgataaatgcacgttttgcgtccatcgtctggaagccgggctgttacccgcttgcgtagagtcctgcgtcggcggcgcgcgtattattggcgatatcaaagatccccatagccgcatcgccaccatgcttcatcagcatcgcgacgctatcaaggtattaaagccggaaaacggcacgtcgccccatgttttctacctgggtctggacgacgcctttgtcaccccattaatgggccgtgcgcagcccgcgctttggcaggaggtctga

SEQ ID NO: 369465 - DNA, 1779 bp, Salmonella enterica
gtgagaggtaaaaccgtaaggcgcctggcggtgttggcggcagtagggctactttgtcatggcgcgtgggcagggacgtggaatatcggtattttggccatgcgcggcgaggcgtctacgcgtagccactggcaaccgttggcaaagacattaagccaacagcttccaggcgaaacctttcatatccagccgctggatctgcatcaaatgcaggaagccgttaaccagggaaccgtgcagtttgtgataaccaacccggcgcaatttgtccaactgaacagccatgcgccgctgcgctggttagcttccctgcgttccacgcgcgatgggaaagcggtgagtaatgttattggcagcgtgattttgacccggcgcgatagcggcatcaccacggcgcatgatctcatcggtaagacagtcggcgcgattgatgctcaggcgtttggcggctatttattaggctataaagcgctcagcgacgcgggcttacgcccggagcgcgattttcatcttcgttttaccggatttcctggcgatgccttagtctatatgctgcgcgaaaaagcggtgcaggcggcaattgtgccagtgtgcctgttagaaaatatggatcaggaaggattgattaataaaaaggactttatcgcgctgctttcccgaccgacgccactgccttgcttaaccagtacgccgttatatcctgactggtcgttcgcggcgctacctgcggtaagcgatgcgctggcggatcgcgtaacgcgagcgctattcaacgcgcccgccgccgcgtcatttcactggggcgcgccagcgtcgaccagtcaggtggaagctttgctgcgtgatgttcgtcagcaccctcagcagcgccgactgtggctggatgtcaaaagttggttaatccagcaccagctaatggtcggtggcgtgattctggcgttcctgttgctcacgctcaattatatttgggtcatgctgctggtgcgtcgacgcggaaaacaactggaacgtaataatgtagtccttcatcagcatgagcgggcgctggaaaccgcccggcaaatgagcgtgttgggtgaaatgacctccgggtttgcccatgagcttaatcagccgctttccgcgattcgacattatgcccaggggggcctgattcgactgcgcgctgcagatgaacagcatcccttgctgccggcgctggagcagattgaccagcaggcgcaacgcggtgcggatactctgcgtaacctgcgtcactgggtcagccaggcgcagggcaacccggtgctaaccgaagcgtggaaggccatagccattcgcgaggcgattgatcatgtctggcaattgttgcgtatggcgcaacagtttccgacagtgactctgcataccgaggttagcgctgcgctgcgcgtaacgctgccgtcagtgctgctggaacaggtgctggcgaatatcattcttaatgcggctcaggcgggcgccacccatttatgggtcgttgctgaacgcactgaacacggcatcagtatcgctttacaggataacgccgggggaatcgatgaggcgctattacgtcaggcgtttcagccgtttatgaccacccgcaaagaggggatgggcttagggctggcgatttgccagcggctggtgcggtatgggcggggcgatatcagtatcaggaaccagaccgcgccggacggtctgtcgggaacggtggtcacgatacatttcttacatgaaaatgggggcagggatggcgacaattcatctactggatga

SEQ ID NO: 369466 - DNA, 621 bp, Salmonella enterica
atggcgacaattcatctactggatgatgatacggcggtcactaacgcgtgcgcgtttttactggaaagtctgggatatgacgtaaaatgctggacgcagggggcggattttttggcgcaggccagtctgtatcaggccggggtcgtattactggatatgcgaatgccggtactggatgggcagggcgttcatgatgcgttgcgccagtgcggaagtaccctggcggttgtttttcttaccgggcatggcgatgtaccgatggccgtggagcagatgaaacgcggcgccgtcgattttctgcaaaaaccggtatcggtaaaaccgctacaggcggcgctggagcgtgcgctgacggtttcatcggcagcggtggcgcgtcgtgagattatactgtgttaccagcagttgacgccgaaagagcgtgagctggccagcctggtggcaaaaggatttatgaaccgtgaaattgcggaagcgatgaatatcgcggtgcgtaccgtagaggtgcaccgcgccagagtcatggaaaaaatgcaggccggtagcctggcggaactgattaggcgtttcgaaaaaatggcctcgccagagaccagaatacgaacaacgtatgagccatga

SEQ ID NO: 369467 - DNA, 213 bp, Salmonella enterica
atgacaaaaccgacaaaagatgacgaactgtaccgcgagatgtgccgggtggtgggcaaggtcgtgctggaaatgcgcgatctggggcaggagcctaaatatattgttattgcgggcgtgttaagaaccgcgctggcgaatcaacgcatccaacgtagcgcgttagaaaaacaggctatggaaaccgtgattaacgctctggcgcggtcatag

SEQ ID NO: 369468 - DNA, 960 bp, Salmonella enterica
atgaataacaaacccgtagtcggcattagcggatgtctgactggcgccacggtacgctttgatggcggacataagcgtatggattttgtcatgaactctctggcgccgtgggtggactacaaaccgatctgcccggaggtggcgatcggcctgcccgtgcctcgccctgcgctgcgtcttatccagacgacctgtggcgacattcggatgcgctatagccatgccccgcacgatgacgtcaccgagcgaatgaatgcctttgccgatcggtttctgccaacaataggcgaactggcggggtttattgtgtgtgcaaaatcgcccagttgcggaatggagcgcgttcgcctgtatgatgaaaagggtaacaggggccgcaaagctggcacggggctgtttaccgccgcgatgatggacaaatatccctggctgccgatagaggaagatggtcgcctgcacgatccggtactacgcgagaatttcatcgcacgtatcttcgcgctacatgaattaaatgcgctacgcgcgcagggcttgagtcgtcacagtttgctcgcgtttcatagccgatacaaacttcagcttctcgcccaccaccaggccggctaccgcgaaattggccctttcgtcgcgcgtctgcatgagtggggcgatctggatgccttctttgtccgatacagagaaaaactgatggctatcctgcgccaccccgcttcacgtaaaaatcacaccaatgtgctgatgcatatccagggctattttcaccgcgcgttgaacagcaggcaacgcgcggaattacgcgaggtgattctcggctaccgggcgggccaactacctatcctggcaccgttaacgctgctgaagcactatctggcggaacatccagatgactatctacgcagccagaattattttgagccgtaccctgatacgttagggctgcgcttagccatcacctga

SEQ ID NO: 369469 - DNA, 729 bp, Salmonella enterica
atgtcgtattctataggcgaatttgccagactatgcggtatcaatgccgccacgctaagggcatggcagcgacgctatggtttattgaaaccgcagcgtactgatggcgggcatcgcttatacagcgatgacgatattcgacaagcgcttagcatcctcgactgggtgagaaaaggcgtaccgataagccaggtcaaacccttactgtcgcgtccggtcattcgcctgggcgataactggataacgatccaggagacgatgctccaacatctccacgaagggcgaattgacgcgctgcggctgttgatttatgactgtggccgggaatatcctcgcgcagaactggtaacccatttattgcgtccgttgcgcagcaaagtgtccgcgcaccttcccgccgtgatgacgctgcgcgaaatactggatggcatcattattgcttacacctctttttgccttgaaggcgacagaaaagcgcctggcaacaatgcctttattagcggatggcatctctcggatcactgtgaaatctggctggaagcgttgactcgtaccggacaagagctgcggctcaatgtgcttccctctccaccagccgcgctggcgcccgagctgttcgcccagagaaaatggttcctggtgaccaccggaaagctcactgccgggcagaaaaaacagcttgcccagtggcgcaacgtggtcgcttcgctggaggttatcacgctataa

SEQ ID NO: 369470 - DNA, 639 bp, Salmonella enterica
atgaaagaatataagatcttattagtagacgatcatgaaatcatcattaacggcattatgaatgccttattaccctggcctcattttaaaattgtagagcatgttaaaaatggtcttgaggtttataatgcctgttgcgcatacgagcctgacatacttatccttgatcttagcttacctggcatcaatggcctggatatcattcctcaattacatcagcgttggccagcaatgaatattctggtttacacagcataccaacaagagtatatgaccattaaaactttagccgcaggtgctaatggctatgttttaaaaagcagtagtcagcaagttctgttagcggcattgcaaacagtagcagtaaacaagcgttacattgacccaacgttgaatcgggaagctatcctggctgaattaaacgctgacacgaccaatcatcaactgcttactttgcgcgagcgtcaggttcttaaacttattgacgaggggtataccaatcatgggatcagcgaaaagctacatatcagtataaaaaccgtcgaaacacaccggatgaatatgatgagaaagctacaggttcataaagtgacagagttacttaactgtgcccgaagaatgaggttaatagagtattaa

SEQ ID NO: 369471 - DNA, 2763 bp, Salmonella enterica
atgaatttgctcaatctcaagaatacgctgcaaacatctttagtaatcaggctaacttttttatttttattaacaacaataattatttggctgctatctgtgcttaccgcagcttatatatcaatggttcagaaacggcagcatataatagaggatttatccgttctatccgagatgaatattgtactaagcaatcaacggtttgaagaagctgaacgtgacgctaaaaatttaatgtatcaatgctcattagcgactgagattcatcataacgatattttccctgaggtgagccggcatctatctgtcggtccttcaaattgcacgccgacgctaaacggagagaagcaccgtctctttctgcagtcctctgatatcgatgaaaatagctttcgtcgcgatagttttattcttaatcataaaaatgagatttcgttattatctactgataacccttcagattattcaactctacagcctttaacgcgaaaaagctttcctttatacccaacccatgccgggttttactggagtgaaccagaatacataaacggcaaaggatggcacgcttccgttgcggttgccgatcagcaaggcgtattttttggggtgacggttaaacttcccgatctcattactaagagccacctgccattagatgatagtattcgagtatggctggatcaaaacaaccacttattgccgttttcatacatcccgcaaaaaatacgtacacagttagaaaatgtaacgctgcatgatggatggcagcaaattcccggatttctgatattacgcacaaccttgcatggccccggatggagtctggttacgctgtacccatacggtaatctacataatcgcatcttaaaaattatccttcaacaaatcccctttacattaacagcattggtgttgatgacgtcggctttttgctggttactacatcgctcactggccaaaccgttatggcgttttgtcgatgtcattaataaaaccgcaactgcaccgctgagcacacgtttaccagcacaacgactggatgaattagatagtattgccggtgcttttaaccaactgcttgatactctacaagtccaatacgacaatctggaaaacaaagtcgcagagcgcacccaggcgctaaatgaagcaaaaaaacgcgctgagcgagctaacaaacgtaaaagcattcatcttacggtaataagtcatgagttacgtactccgatgaatggcgtactcggtgcgattgaattattacaaaccacccctttaaacatagagcagcaaggattagctgataccgccagaaattgtacactgtctttgttagctattattaataatctgctggatttttcacgcatcgagtctggtcatttcacattacatatggaagaaacagcgttactgccgttactagaccaggcaatgcaaaccatccaggggccagcgcaaagcaaaaaactgtcattacgtacttttgtcggtcaacatgtccctctctattttcataccgacagtatccgtttacggcaaattttggttaatttactcgggaatgcggtaaaatttaccgaaaccggagggatacgtctgacggtcaagcgtcatgaggaacaattaatatttctggttagcgatagcggtaaagggattgaaatacagcagcagtctcaaatctttactgctttttatcaagcagacacaaattcgcaaggtacaggaattggactgactattgcgtcaagcctggctaaaatgatgggcggtaatctgacactaaaaagtgtccccggggttggaacctgtgtctcgctagtattacccttacaagaataccagccgcctcaaccaattaaagggacactatcagcgccgttctgcctgcatcgccaactggcttgctggggaatacgcggcgaaccaccccaccagcaaaatgcgcttctcaacgcagagcttttgtatttccccggaaaactctacgacctggcgcaacagttaatattgtgtacaccaaatataccagtaataaataatttgttacccccctggcagttgcagattcttttggttgatgatgccgatattaatcgggatatcatcggcaaaatgcttgtcagcctgggacaacacgtcactgttgccgccagtagtaacgaggctctgactttatcacaacagcagcgattcgatttagtactgattgacattagaatgccagaaatagatggtattgaatgtgtacaattatggcacgatgagccgaataatttagatcctgactgcatgtttgtggcgctatccgctagcgtagcgacagaagatattcatcgttgtaaaaaaaatgggattcatcattacattaccaaaccagtgacattggctaccttagctcgctatatcagtattgccgcagaatatcaacttttgcgaaatatagagctacaggagcaggatccgagtcgctgctcagcgttactggcgacagatgatatggtcattaatagcaagattttccaatcactggacctcttgctggctgatattgaaaatgctgtatcggctggacaaaaaatcgatcagttaattcacacattaaaaggctgtttaggtcaaatagggcagactgaattggtatgctatgtcatagacattgagaatcgcgtaaaaatggggaaaatcatcgcgctggaggaactaaccgacttacgccagaaaatacgtatgatcttcaaaaactacaccattacttaa

SEQ ID NO: 369472 - DNA, 384 bp, Salmonella enterica
atgctggcagttttaaaaggcattgcattaattcaggatatcaaggccgaaggtaatagccgatcctggataatgactattgatgggcatcctgccagaggagaaattttctcagaagcattttctatttctttgttcttaaatgacctggaaagcttacctaagccttgtcttgcctatgtgacactactgcttgcagcacacccggacgtccatgattatgctatacagctcacagcggatgggggatggttaaacggttattataccacaagtagtagctctgagcttattgctattgagatagaaaaacacctggctttaacttgcattttaaaaaatgtaatacgcaatcaccataaactttattcgggtggggtataa

SEQ ID NO: 369473 - DNA, 1494 bp, Salmonella enterica
atggtagtaaataaacgtttaatcttaattttactatttatactcaatacagcaaagagtgatgagttatcatggaaaggtaatgacttcaccctttatgccagacaaatgccattagcagaggttttacatctgctctcagagaactatgatacggctattactattagcccattgataacagctacatttagtggaaaaattccgcctggaccaccggtcgatattttgaataacctggcagcacaatatgatttgcttacctggtttgatggcagcatgttatatgtatatcctgcatcgttattaaaacatcaggttatcactttcaatattttatctactggacggttcattcattacttacgcagccagaatatcctttcatcaccgggatgcgaggttaaagaaattaccggtaccaaagctgtggaggtgagcggtgttcccagctgcctgactcgtattagtcaattagcttcagtgctggataatgcgttaatcaaacgaaaagacagtgcggtgagtgtaagtatatacacgcttaagtatgccactgcgatggatacccaataccaatatcgcgatcagtccgtcgtggttccaggggtcgtgagtgtattgcgtgagatgagtaaaaccagcgtaccggcgtcatcgatgaacaatggttcacccgctacacaggcattgcccatgtttgctgccgacccacgccagaatgcagtgatcgttcgtgattatgcggccaatatggccgggtatcggaaacttatcacagaattagatcaacgccagcagatgatagagatttcggtgaaaattatcgatgttaatgctggagatattaaccagttaggcatcgactggggaacggcagtgtcgctgggtggcaagaaaattgcgttcaatacaggtttgaatgacggtggtgctagcggtttttcaacggtaatcagcgatacctcaaactttatggtgcgtttgaatgccctagaaaaaagctctcaggcttatgtactttcccagccatctgtggtgactttaaataatatccaggctgtgctggataaaaatattactttctataccaaactgcagggagaaaaagtggctaaacttgaatccatcactacgggttctttgttgcgcgttacacctcgcttgttaaatgataatggcacgcaaaaaataatgcttaatcttaatattcaggatggacaacaaagtgatacgcaaagcgaaacagacccgctgcccgaagtgcaaaattctgaaattgcttcgcaggccacattattggccgggcaaagtctattgctgggaggatttaaacaaggtaaacaaatccactcgcaaaataaaattcctttattgggcgatattcctgtcgtaggccatttgtttcgcaatgatacgactcaagtacatagtgtaatcaggctttttttgattaaagcctcagtagtaaataatggcatatctcatggttaa

SEQ ID NO: 369474 - DNA, 1212 bp, Salmonella enterica
atggcatatctcatggttaatccaaagagttcctggaaaatacgttttttaggtcacgttttacaaggccgggaagtatggctgaatgaaggtaacctgtcactgggggagaaaggatgcgatatttgtattccgcttactataaatgaaaaaattattctgagagaacaggcagataatttatttgttgatgccgggaaagccagagttagagttaatggccgcagatttaatccaaataagccgctaccatccagtggggttttgcaggttgcgggagtggctatcgcgtttggtaaacaggattgtgaacttgctgattatcaaatacccgtttccagatcagggtactggtggttggctggcgtattcttgattttcatcggtggaatgggtgtcctgttaagtattagtggtcagcctgaaacggtaaatgacttacctttgcgggttaagtttttattagacaaaagcaatattcattatgtgcgggcgcaatggaaagaagatggcagcctgcagttgtccggttattgctcgtcaagcgaacagatgcaaaaggtgagagcgactctcgaatcatggggggtcatgtatcgggatggtgtaatctgtgatgacttattggtacgagaagtgcaggatgttttgataaaaatgggttacccgcatgctgaagtatccagcgaagggccggggagcgtgttaattcatgatgatatacaaatggatcagcaatggcgtaaggttcaaccattacttgcagatattcccgggttattgcactggcagattagtcactctcatcagtctcagggagatgatattatttctgcgataatagagaacggtttagtggggcttgtcaatgttacgccaatgcggcgctcttttgttatcagtggtgtactggatgaatctcatcaacgcattttgcaagaaacgttagcagcattaaagaaaaaggatcccgctctttctttaatttatcaggatattgcgccttcccatgatgaaagcaagtatctgcctgcgccagtggctggctttgtacagagtcgccatggtaattacttattactgacgaataaagagcgtttacgtgtaggggcattgttacccaatgggggagaaattgtccatctgagtgccgatgtggtaacgattaaacattatgatactttgattaactatccattagattttaagtga

SEQ ID NO: 369475 - DNA, 243 bp, Salmonella enterica
atgacaactttgacccggttagaagatttgctgcttcattcgcgtgaagaggccaaaggcataattttacaattaagggctgcccggaaacagttagaagagaacaacggcaagttacaggatccgcagcaatatcagcaaaacaccttattgcttgaagcgatcgagcaggccgaaaatatcatcaacattatttattatcgttaccataacagcgcacttgtagtgagtgagcaagagtaa

SEQ ID NO: 369476 - DNA, 324 bp, Salmonella enterica
atgataaagaaaaaggctgcgtttagtgaatatcgtgatttagagcaaagttacatgcagctaaatcactgtcttaaaaaatttcaccaaatccgggctaaggtgagtcaacagcttgctgaaagggcagagagccccaaaaagagcagagagacagagagtattcttcataacctatttccacaaggcgttgccggggttaaccaggaggccgagaaggatttaaagaaaatagtaagtttgtttaaacaacttgaagtacgactgaaacaacttaatgctcaagccccggtggagataccgtcaggaaaaacaaaaaggtaa

SEQ ID NO: 369477 - DNA, 591 bp, Salmonella enterica
atgtcttcaggaaacatcttatggggaagtcaaaaccctattgtgtttaaaaatagcttcggcgtcagcaacgctgataccgggagccaggatgacttatcccagcaaaatccgtttgccgaagggtatggtgttttgcttattctccttatggttattcaggctatcgcaaataataaatttattgaagtccagaagaacgctgaacgtgccagaaatacccaggaaaagtcaaatgagatggatgaggtgattgctaaagcagccaaaggggatgctaaaaccaaagaggaggtgcctgaggatgtaattaaatacatgcgtgataatggtattctcatcgatggtatgaccattgatgattatatggctaaatatggcgatcatgggaagctggataaaggtggcctacaggcgatcaaagcggctttggataatgacgccaaccggaataccgatcttatgagtcaggggcagataacaattcaaaaaatgtctcaggagcttaacgctgtccttacccaactgacagggcttatcagtaagtggggggaaatttccagtatgatagcgcagaaaacgtactcatga

SEQ ID NO: 369478 - DNA, 474 bp, Salmonella enterica
atgaaaaaagacccgaccctacaacaggcacatgacacgatgcggtttttccggcgtggcggctcgctgcgtatgttgttggatgacgatgttacacagccgcttaatactctgtatcgctatgccatgcagcttatggaggtaaaagagttcgccggcgcagcgcgactttttcaattgttgacgatatatgatgcctggtcatttgactactggtttaggttaggggaatgctgccaggctcaaaaacattggggggaagcgatatacgcttatggacgcgcggcacaaattaagattgatgcgccgcaggcgccatgggccgcagcggaatgctatctcgcgtgtgataacgtctgttatgcaatcaaagcgttaaaggccgtggtgcgtatttgcggcgaggtcagtgaacatcaaattctccgacagcgtgcagaaaagatgttacagcaactttctgacaggagctaa

SEQ ID NO: 369479 - DNA, 1455 bp, Salmonella enterica
atgaatcgaattcacagtaatagcgacagcgccgcaggagtaaccgccttaacacatcatcacttaagcaatgtcagttgcgtttcctcgggttcgctgggaaagcgccagcatcgtgtgaattctacttttggcgatggcaacgccgcgtgcctgttatcagggaaaattagtcttcaggaggcaagcaatgcgttgaagcaactgcttgatgccgtacccggaaatcataagcgtccatcattgcctgactttttgcagaccaatcccgcggttttatcaatgttgatgacgacattaatactcagcgtttttggtaataacgctcaatcgttatgccaacagcttgagcgggcaactgaggtgcaaaatgcattacgtgataagcaggtaaaggagtatcaggagcagatccagaaagcgatagagcaggaggataaagcgcgtaaagcgggcatttttggcgctatttttgactggattaccggcatatttgaaactgtgattggcgccttaaaagttgtggagggttttctgtccggtaatcccgcagaaatggctagcggcgtagcttatatagccgcaggttgtgcaggaatggttaaagccggagccgaaacggcaatgatgtgcggtgctgaccacgatacctgtcaggcaattattgacgtgacaagtaagattcaatttggttgtgaagccgtcgcgctggcactggatgttttccagattggccgtgcttttatggcgacgagaggtttatctggcgcagctgcaaaagtgcttgactccggttttggcgaggaagtggttgagcgtatggtaggtgcaggggaagcagaaatagaggagttggctgaaaagtttggcgaagaagtgagcgaaagtttttccaaacaatttgagccgcttgaacgtgaaatggctatggcgaatgagatggcagaggaggctgccgagttttctcgtaacgtagaaaataatatgacgcgaagcgcgggaaaaagctttacgaaagagggggtgaaagccatggcaaaagaagcggcaaaagaagccctggaaaaatgtgtgcaagaaggtggaaagttcctgttaaaaaaattccgtaataaagttctcttcaatatgttcaaaaaaatcctgtatgccttactgagggattgttcatttaaaggcttacaggctatcagatgtgcaaccgagggcgccagtcagatgaatactggcatggttaacacagaaaaagcgaagatcgaaaagaaaatagagcaattaataactcagcaacggtttctggatttcataatgcaacaaacagaaaaccagaaaaagatagaacaaaaacgcttagaggagctttataaggggagcggtgccgcgcttagagatgtattagataccattgatcactatagtagcgttcaggcgagaatagctggctatcgcgcttaa

SEQ ID NO: 369480 - DNA, 588 bp, Salmonella enterica
atggaagcgagtaacgtagcactggtattaccagcgccttccttgttaacaccttcttccactccatctccctccggggagggaatgggtactgaatcaatgcttctgttatttgatgatatctggatgaagctaatggagcttgccaaaaagctgcgcgatatcatgcgcagctataacgtagaaaaacaacggctggcctgggaactgcaagtcaatgttttacagacgcaaatgaaaacaattgatgaagcgtttagagcatcaatgattactgcgggtggcgcaatgttgtcgggtgtactgacgataggattaggggccgtaggcggggaaaccggtcttatagcgggtcaagccgtaggccacacagctgggggcgtcatgggcctgggggctggtgtagcgcaacgtcaaagtgatcaagataaagcgattgccgacctgcaacaaaatggggcccaatcttataataaatccctgacggaaattatggagaaagcaactgaaattatgcagcaaatcatcggcgtggggtcgtcactggtcacggttcttgctgaaatactccgggcattaacgaggtaa

SEQ ID NO: 369481 - DNA, 417 bp, Salmonella enterica
atggtgcaagaaatagagcaatggttgcgtcggcatcaggtgtttactgagcctgcatatttaggggagaccgccatattacttgggcagcagtttatattatcgccttacctggtgatctatcgtattgaggcaaaagaaatgattatttgtgagttcaggcgcctgacgcccgggcaacctcgaccacagcaattgtttcacttactgggacttttacgcgggatatttgtgcatcacccgcagttaacatgtttaaagatgttgataatcaccgacgttctggatgaaaaaaaagccatgctacgcaggaaattattgcgcatcctgacagtaatgggagcgacctttacacagcttgatggcgataactggacagttttatccgccgagcatcttatccagcgacgtttttaa

SEQ ID NO: 369482 - DNA, 429 bp, Salmonella enterica
atgaaagaagatcagaaaaataaaatacccgaagacattctgaaacagctattatccgttgatccggaaaccgtttatgccagtggttacgcctcatggcaggagggggattattcgcgcgccgtaatcgattttagttggctggtgatggcccagccatggagttggcgtgcccatattgcattggctggcacctggatgatgcttaaagaatacacgacggccattaatttctatggacatgccttgatgctggatgccagccatccagaaccggtttaccaaacgggcgtctgtctcaaaatgatgggggaacccgggttggcgagagaggcttttcaaaccgcaatcaagatgagttatgcggatgcctcatggagtgagattcgccagaatgcgcaaataatggttgatactcttattgcttaa

SEQ ID NO: 369483 - DNA, 783 bp, Salmonella enterica
atgaaaattcatattccgtcagcggcaagtaatatagtcgatggtaatagtcctccttccgatatacaagcgaaggaggtatcgtttcctccccctgaaattccagcgcctggtacccccgcagcccctgtgctgcttacgcctgaacaaataaggcagcagagggattatgctatacattttatgcaatacactattcgtgcgctgggtgcgacagtcgtgtttgggttatcggttgctgcagcggtaatttctggcggggcaggattacccattgctattcttgcgggggcggcgctcgtgattgctattggggatgcttgctgtgcgtatcataattatcaatcgatatgtcagcaaaaggagccattacaaaccgccagtgatagcgttgctcttgtggtcagtgcgctggccttaaaatgtggggcaagtcttaactgcgctaacacccttgctaattgtctttctttattaatacgttcaggaatcgctatttctatgttggttttacccctacagtttccactgcccgcggctgaaaatattgcggcctctttggacatggggagtgtaattacctccgttagcctgacggcgataggtgcggtactggattattgccttgcccgcccctctggcgacgatcaggaaaattctgttgatgaactttatgccgatcccagtgcgttattggcggaacaaatggcagcgctctgtcaatctgctactgcacctgcattaatggacagttctggtcatacatctcggggagaaccatga

SEQ ID NO: 369484 - DNA, 690 bp, Salmonella enterica
atgaaacctgttagcccaaatgctcaggtaggagggcaacgtcctgttaacgcgcctgaggaatcacctccatgtccctcattgccacatccggaaaccaatatggagagtggtagaataggtcctcaacaaggaaaagagcggttattggccggacttgcgaaacgagtgatagagtgttttccaaaagaaatttttagttggcaaacggttattttgggcggacagattttatgctgttccgctggaatagcattaacagtgctaagtggtggaggcgcgccgctcgtagccctggcagggattggccttgctattgccatcgcggatgtcgcctgtcttatctaccatcataaacatcatttgcctatggctcacgacagtataggcaatgccgttttttatattgctaattgtttcgccaatcaacgcaaaagtatggcgattgctaaagccgtctccctgggcggtagattagccttaaccgcgacggtaatgacgcattcatactggagtggtagtttgggactacagcctcatttattagagcgtcttaatgatattacctatggactaatgagttttactcgcttcggtatggatgggatggcaatgaccggtatgcaggtcagcagcccattatatcgtttgctggctcaggtaacgccagaacaacgtgcgccggagtaa

SEQ ID NO: 369485 - DNA, 216 bp, Salmonella enterica
atggatattgcacaattagtggatatgctctcccacatggcgcatcaggcaggccaggccattaatgacaaaatgaatggtaatgatttgctcaacccagaatcgatgattaaagcgcaatttgccttacagcagtattctacatttattaattacgaaagttcactgatcaaaatgatcaaggatatgcttagtggaatcattgctaaaatctga

SEQ ID NO: 369486 - DNA, 291 bp, Salmonella enterica
gtggaatcattgctaaaatctgaagttattagcgacgatgttcgacggttgctgctggaaatcatgtttgcgggcgttaaccatagcctgatttcccaggtacatgcgatgttaccagcgctaacggttattgttccggataaaaaattacagttggtatgtctggcattattgttggcgggtttaaatgagccgctaaaagccgcgaaaattttatcggatatagatttgccagaggctatggcgctgcgtctgttatttcctgcaccaaatgaggggtttgaaaattga

SEQ ID NO: 369487 - DNA, 264 bp, Salmonella enterica
ttgaatatttctgatatgagcgtagtgcctgtaagcactcaatcttatgtaaagtcctctgcagaaccgagccaggagcaaattaatttttttgaacaattgctgaaagatgaagcatccaccagtaacgccagtgctttattaccgcaggttatgttgaccagacaaatggattatatgcagttaacggtaggcgtcgattatcttgccagaatatcaggcgcagcatcgcaagcgcttaataagctggataacatggcatga

SEQ ID NO: 369488 - DNA, 750 bp, Salmonella enterica
atgaaggttcatcgtatagtatttcttactgtccttacgttctttcttacggcatgtgatgtggatctttatcgctcattgccagaggatgaggcgaatcaaatgctggcattacttatgcagcatcatattgatgcggaaaaaaaacaggaagaggacggtgttaccttacgtgtcgagcagtcgcagtttattaatgcggttgagctacttagacttaacggttatccgcatcgtcagtttacaacggcggataagatgtttccggctaatcagttagtggtatcaccccaggaagaacagcagaagattaattttttaaaagaacaaagaattgaaggaatgctgagtcagatggagggcgtgattaatgcaaaagtgaccattgcgctaccgacttatgatgagggaagtaacgcttctccgagctcagttgccgtatttataaaatattcaccacaggtcaatatggaggcctttcgggtaaaaattaaggatttaatagagatgtcaatccctgggttgcaatacagtaagattagtatcttgatgcagcctgctgaattcagaatggtagctgacgtacccgcgagacaaacattctggattatggacgttatcaacgccaataaagggaaggtggtgaagtggttgatgaaatacccttatcagttgatgttatcgttgacaggactgttattaggagtgggcatcctgatcggctatttttgcctgagacgccgtttttga

SEQ ID NO: 369489 - DNA, 252 bp, Salmonella enterica
ttgcttctacagtggtttagcgaggatgagatctggcagctatatggttggttggggcaaagagatggcaaattacttcctccgcaagtgatgcaacaaactgcattgcagatcggtaccgccattcttaatcgggaagcgcatgacgatgcggttttacatgcgctattagtattattaccccctccgcagcgtatactttggccgaagacttctcttaccgagattatcttcatggagcatttgctatga

SEQ ID NO: 369490 - DNA, 675 bp, Salmonella enterica
atgagttttacttcacttcctctgacggaaattaaccataagctacccgctcgaaatattattgagtcacagtggataacattacaattaactttatttgcgcaagagcaacaagctaagagagtttcacatgctattgtgagctccgcttaccgtaaggctgaaaaaatcatccgagacgcctatcgttatcagcgtgaacagaaagttgagcagcaacaagaactagcgtgcttgcgtaaaaatacgctggaaaaaatggaagtggaatggctggaacagcatgtaaaacatttacaagaagatgaaaatcaatttcgttcattggtcgatcacgcagcgcatcatattaaaaatagtatagaacaggttctgttggcctggttcgaccaacagtcggtagacagtgttatgtgccatcgtctggcacgccaggccacggctatggcggaagagggagcgctttatttgcgtattcatcctgaaaaagaggcattgatgcgtgaaacttttggcaagcggtttacgttgattatcgagcctggtttctctcccgatcaggctgaactttcctcaacacgatatgccgttgagttttcactttctcgtcatttcaacgcgttactgaaatggttacgtaatggtgaagataaaagaggtagcgatgaatattaa

SEQ ID NO: 369491 - DNA, 993 bp, Salmonella enterica
atgaatattaaaattaatgagataaaaatgacgccccctacagcatttacccctggccaggttatagaggaacaagaggttatttcgccttcaatgttagctctccaggagttacaggaaacgacgggggcagcgctctatgagacgatggaagaaataggaatggcgctgagtggtaaactgcgcgaaagtaataaattcactgatgctgagaaactggagcgcaggcagcaggctttgctgcgtttgataaaacaaatacaggaggataatggggcagcgttgcgtccgcttaccgaagagaatagtgatcctgatttacagaatgcgtatcaaattatcgctcttgcaatggcgcttactgccggcgggttgtcaaaaaagaaaaaacgcgatttgcaatcgcaactggatacgcttacagcggaggagggatgggaacttgccgtttttagtttactggaacttggcgaagtggataccgctacgctgtcctcgctgaagcgttttatgcaacaggcgatagacaacgatgaaatgcccttatcgcagtggttcagacgcgtggcagactggccggatcgctgtgaacgggtccgtattttgctaagagcaatagcctttgaacttagcatatgcatcgaaccctcggagcaaagtcgtttggccgcagcattagtacgtttgcgtcgtttgctgttattccttggccttgaaaaagagtgccagcgtgaggagtggatttgccagttgccgcctaatacattactgccgctactactcgatattatttgtgagcgctggcttttcagtgattggttgcttgatagacttaccgctatagtttcttcatcgaagatgttcaatcggttactccaacaacttgatgcgcagtttatgctgatacccgataactgttttaacgacgaagatcaacgtgaacaaattctcgaaacgcttcgtgaagtaaagataaatcaggttttattctga

SEQ ID NO: 369492 - DNA, 369 bp, Salmonella enterica
atggattgggatctcattactgaacgtaatattcagctttttattcaattagcaggattagctgaacggcctttagcgaccaatatgttctggcggcaaggacaatatgaaacctatctaaactatcataacggtcgtattcacttatgtcagatactcaagcaaaccttcttagacgaagaactgctttttaaagcgttggctaactggaaacccgcagcgttccagggtattcctcaacgattatttttgttgcgcgatgggcttgcaatgagttgttctccacctctttccagctccgccgagctctggttacgattacatcatcgacaaataaaatttctggagtcgcaatgcgttcatggttag

SEQ ID NO: 369493 - DNA, 2046 bp, Salmonella enterica
atgcgttcatggttaggtgagggagtcagggcgcaacagtggctcagtgtatgcgcgggtcggcaggatatggttctggcgacggtgttattaatcgctattgtgatgatgctgttacctttgccgacctggatggttgatatcctgattactatcaaccttatgttttcagtgatcctgctcttaattgctatttatcttagtgaccctctcgatttatcggtatttccgtctttattacttattactacattatatcgtttgtcactcacaatcagcacatcacggctggtactgttacaacataatgccggtaatattgtggatgctttcggtaagtttgtcgtaggaggaaatctcaccgttgggttggtcgtatttaccatcattactatcgtgcaatttattgtcattacaaaaggtatcgagagggtggcggaagttagcgcacgtttctcgcttgatgggatgccaggcaaacaaatgagtatcgatggcgatttgcgtgccggagttatcgatgcagaccatgcccgtacattaagacagcatgtccagcaggaaagccgctttctcggtgcgatggacggtgcgatgaaatttgttaaaggcgatacgattgccggtattattgttgttctggtgaacattatcggcggtatcattatcgctatcgtacaatatgatatgtcgatgagtgaggctgttcacacttatagcgtactgtcaatcggagatggtttatgtgggcaaattccatcgctgctgatttcccttagcgcgggaattattgtcacccgtgtcccgggtgagaaacgccagaacctggcgacagagttgagttctcaaattgccagacaacctcagtcgctcatattaaccgctgtggttttaatgctcctcgctttaattcctggctttccttttatcactctcgctttcttttcagcgttgttagcattgccaattatcctcattcgccgcaaaaagtctgtggtttccgcaaatggcgtcgaagcaccggaaaaagatagtatggttcccggcgcatgtcctctaatcttacgtcttagcccgacgttacattctgccgacctgattcgtgatattgacgccatgagatggtttttatttgaggataccggcgtccctctccctgaggtgaatattgaggttttgcctgaacccaccgaaaaattgacggtactgctatatcaggaacccgtatttagtttatctattcccgctcaggcggattatttattgataggcgcggacgctagtgtggtgggtgacagccagacgttaccgaacgggatggggcagatctgttggcttacaaaagacatggcccataaggcgcaaggttttggactggacgttttcgcgggcagccaacgtatctctgccttattaaaatgtgtcctgcttcggcatatgggagagtttattggtgttcaggaaacgcgttatctaatgaatgcgatggaaaaaaactactctgagctggtgaaagagcttcaacgccagttacccattaataaaatcgctgaaactttgcaacggcttgtatcagaacgggtttctattagagatttacgtcttattttcggcaccttaattgactgggcgccacgtgaaaaagatgtcctgatgttgacagaatatgtccgtatcgcgcttcgccgtcatattctgcgtcgtcttaatccggaaggaaaaccgctgccgattttgcggatcggcgaaggtattgagaacctcgtgcgtgaatccattcgccagacggcaatggggacctatactgcgctgtcgtctcgtcataagacgcagatcctgcaacttatcgagcaggcgctgaagcagtcagccaaattattcattgtcacttctgtcgacacccgacgtttcttgcgaaaaattacagaagccaccttgttcgacgtaccgattttgtcatggcaggaattaggagaggagagccttatacaagtggtagaaagtattgaccttagcgaagaggagttggcggacaatgaagaatga

SEQ ID NO: 369494 - DNA, 1302 bp, Salmonella enterica
atgaagaatgaattgatgcaacgtctgaggctgaaatatccgccccccgatggttattgtcgatggggccgaattcaggatgtcagcgcaacgttgttaaatgcgtggttgcctggggtatttatgggtgagttgtgctgtataaagcctggagaagaacttgctgaagtcgtggggattaatggcagcaaagctttgctatctccttttacgagtacaatcggacttcactgcgggcagcaagtgatggccttaaggcgacgccatcaggttcccgtgggcgaagcgttattagggcgagtcattgatggttttggtcgtccccttgatggccgcgaactgcccgacgtctgctggaaagactatgatgcaatgcctcctcccgcaatggttcgacagcctatcactcaaccattaatgacggggattcgcgctattgatagcgttgcaacctgtggcgaagggcaacgagtgggtattttttctgctcctggcgtggggaaaagcacgcttctggcgatgctgtgtaatgcgccagacgcagacagcaatgttctggtgttaattggtgaacgtggacgagaagtccgcgaattcatcgattttacactgtctgaagagacccgaaaacgctgtgtcattgttgtcgcaacctctgacagacccgccttagagcgcgtgagggcgctgtttgtggctaccacgatagcagaattttttcgcgataatggaaagcgagtcgtcttgcttgccgactcactgacgcgttatgccagggccgcacgagaaatcgctctggccgccggagagaccgcagtttctggagaatatccgccaggcgtatttagtgcattgccacgacttttagaacgtacaggaatgggggaaaaaggcagtattaccgcattttatacggtactggtggaaggcgatgatatgaatgagccgttggcggatgaagtccgttcactacttgatggacatattgtgctatcccggcggcttgcagagagggggcattatcctgccattgacgtgctggcaacgctcagccgcgtttttccagtcgttaccagccatgagcatcgtcaactggcggcgatattgcggcggcgcctggcgctttaccaggaggttgaactgttaatacgcattggggaataccagcgaggagttgatactgatactgacaaagccattgatacctatccggatatttgcacatttttgcgacaaagtaaggatgaagtatgcggacccgagctacttatagaaaaattacaccaaatactcaccgagtga

SEQ ID NO: 369495 - DNA, 378 bp, Salmonella enterica
atggaaactttgctggagataatcgcgcggcgtgaaaagcaattacgcggcaagcttaccgtacttgatcagcagcaacagacgattattacggaacagcagatttgccagacgcgcgctttagcagtgtctaccagactgaaagaattaatgggctggcaaggtacgttatcttgtcatttattgttggataagaaacaacaaatggccgggttattcactcaggcgcagagctttttgacgcaacggcagcagttagagaatcagtatcagcagcttgtctcccggcgaagcgaattacagaagaattttaatgcgcttatgaaaaagaaagaaaaaattactatggtattaagcgatgcgtattaccaaagttga

SEQ ID NO: 369496 - DNA, 375 bp, Salmonella enterica
atgcgtattaccaaagttgagggaagtcttgggttgccatgccagtcttatcaggatgataacgaggcggaggcggaacgtatggactttgaacaactcatgcaccaggcattacccattggtgagaataatcctcctgcagcattgaataagaacgtggttttcacgcaacgttatcgtgttagtggcggttatcttgacggtgtagagtgtgaagtctgtgaatcaggggggctaattcagttaagaatcaatgtccctcatcatgaaatttaccgttcgatgaaagcgctaaagcagtggctggagtctcagttgctgcatatggggtatataatttccctggagatattctatgttaagaatagcgaatga

SEQ ID NO: 369497 - DNA, 969 bp, Salmonella enterica
atgttaagaatagcgaatgaagagcgtccgtggatggagatgcttccaacgcaaggcgctaccattggtgagctgacattgagtatgcaacaatatccagtacagcaagggacattatttaccataaattatcataatgagctgggtagggtgtggattgcagaagaatgctggcagcgctggtgtgaagggttaattggcaccgctaatcgatcggctatcgatcctgaattgctatatggaatagctgaatgggggctggcgccgttattgcaagccagtgatgcaaccctctgtcagaacgaaccgccaacatcctgcagtaatctaccacatcagctagcgttgcatattaaatggacagttgaagaacatgagttccatagcattatttttacatggccaacgggttttttgcgcaatatagtcggagagctttctgctgcgcgacaacagatttatcctgcccctcctgtagtagtccctgtatatttaggctggtgccagcttacgttaattgaacttgagtctatcgaaatcggcatgggcgttcggattcattgctttggcgacatcagactcggtttttttgctattcaactacctggggggatctacgcgagggtgttgctgacagaggataacacgatgaaatttgatgaattagtccaggatatcgaaacgctacttgcgtcagggagtccaatgtcaaagagtgacggaacatcttcagtagaacttgagcagataccacaacaggtgctctttgagatcggacgtgcgagtctggaaattggacaattacgacaacttaaaacgggggacgttttgcctgtaggtggatgttttgcgccagaggtgacgataagagtaaatgaccgtattattgggcaaggtgagttgattgcctgtggcaatgaatttatggtgcgtattacacgttggtatctttgcaaaaatacagcgtaa

SEQ ID NO: 369498 - DNA, 648 bp, Salmonella enterica
atgtctttacccgattcgcctttgcaactgattggtatattgtttctgctttcaatactgcctctcattatcgtcatgggaacctctttccttaaactggcggtggtattttcgattttacgaaatgctctgggtattcaacaagttcccccaaatatcgcactgtatggcctcgcgcttgtactttccttattcattatggggccgacgctattagctgtaaaagagcgctggcatccggttcaggtcgctggcgctcctttctggacgtctgagtgggacagtaaagcattagcgccttatcgacagtttttgcaaaaaaactctgaagagaaggaagccaattattttcggagtttgataaaacgaacctggcctgaagacataaaaagaaagataaaacctgattctttgctcatattaattccggcatttacggtgagtcagttgacgcaggcatttcggattggattacttatttatcttccctttctggctattgacctgcttatttcaaatatactgctggctatggggatgatgatggtatcgccaatgaccatttcattaccgtttaagctgctaatatttttactggcaggcggttgggatctgacactggcgcaattggtacagagcttttcatga

SEQ ID NO: 369499 - DNA, 267 bp, Salmonella enterica
atgaatgattctgaattgacgcaatttgtaacgcaacttttatggatcgtcctttttacgtctatgccggtggtgttggtggcatcggtagttggtgtcatcgtaagccttgttcaggccttgactcaaatacaggaccaaacgctacagttcatgattaaattattggcaattgcaataaccttaatggtcagctacccatggcttagcggtatcctgttgaattatacccggcagataatgttacgaattggagagcatggttga

SEQ ID NO: 369500 - DNA, 780 bp, Salmonella enterica
atggcacaacaggtaaatgagtggcttattgcattggctgtggcttttattcgaccattgagcctctctttattacttcccctattaaaaagtggcagtttagggtccgcgattttacgtaatggcgtgcttatgtcacttacctttcccatattaccaatcatttaccagcagaagattatgatgcatattggtaaagattacagctggttagggttagtcaccggagaggtgattattggttttttaattgggttttgtgcggcggttcccttttgggccgttgatatggcggggtttctgcttgatactttacgtggcgcgacaatgggtacgatattcaattctacaatagaagctgaaacctcactttttggcttgcttttcagccagttcttgtgtgttattttctttataagcggcggcatggagtttatattaaacattctgtatgagtcatatcaatatttaccaccagggcgtactttattatttgaccagcaatttttaaaatatatccaggcagagtggagaacgctttatcaattatgtatcagcttctctcttcctgccataatatgtatggtattagccgatctggctttaggtcttttaaatcggtcggcacaacaattgaatgtgtttttcttctcaatgccgctcaaaagtatattggttctactgacgctcctgatctcattcccttatgctcttcatcactatttggttgaaagcgataaattttatatttatctaaaagactggtttccatctgtatga

SEQ ID NO: 369501 - DNA, 1059 bp, Salmonella enterica
atgagcgagaaaacagaacagcctacagaaaagaaattacgtgatggccgtaaggaagggcaggttgtcaaaagtattgaaataacatcattatttcagctgattgcgctttatttgtattttcatttctttactgaaaagatgattttgatactgattgagtcaataactttcacattacaattagtaaataaaccattttcttatgcattaacgcaattgagtcatgctttaatagagtcactgacttctgcactgctgtttctgggcgctggggtaatagttgctactgtgggtagcgtgtttcttcaggtgggggtggttattgccagcaaagccataggttttaaaagcgagcatataaatccggtaagtaattttaagcagatattctctttacatagcgtagtagaattatgtaaatccagcctgaaagttatcatgctatctcttatctttgcttttttcttttattattatgccagtacttttcgggcgctaccgtactgtgggttagcctgtggcctgcttgtggtttcttctttaataaaatggttatgggttggggtgatggctttttatatcgtcgttggcatactggactattcttttcaatattataagattagaaaagatctaaaaatgagtaaagatgacgtaaaacaggagcataaagatctggagggcgatcctcaaatgaagacacggcgtcgggaaatgcagagtgaaatacaaagtgggagtttagctcaatctgttaaacaatctgttgcggtagtgcgtaatccaacgcatattgcggtttgtcttggctatcatcccaccgatatgccaataccacgcgtcctggaaaaaggcagtgatgctcaagctaactatattgttaacatcgctgaacgcaactgcatccccgttgttgaaaatgttgagctggcccgctcattattttttgaagtggaacgcggagataaaattcctgaaacgttatttgaacccgttgcagccttgttacgtatggtgatgaagatagattatgcgcattctaccgaaacaccataa

SEQ ID NO: 369502 - DNA, 1374 bp, Salmonella enterica
gtgcagaagtataccagtgaagcgcgtcagttattagcgttagcgataccggtgatccttgcgcaagtggcacagaccgcaatgggattcgtcgataccgtcatggcgggaggctatagcgctacggacatggctgccgtcgctatcggcacctctatctggcttcccgccattttgtttggtcacggcttactgctggccttgacgcctgtgattgcgcaactcaatggctccggccgtcgtgagcgtatcgcgcatcaggttcgacaagggttctggctggcgggctttgtctccgtgctggtgatgatcgtcctgtggaatgccggatacattatccgctctatgcataatattgatccggcgctggccgataaagccgtgggttatcttcgcgcgctgctgtggggcgcgccaggataccttttctttcaggtagcgcgaaaccagtgcgaaggtctggccaaaaccaaaccgggtatggtgatgggatttttgggcctgctggtgaatattccggtgaactatatttttatctatggccattttggtatgccggaactcggcggtatcggctgcggcgttgcgactgcggcggtctattgggtgatgtttatcgccatgctttcttacattaaacacgcgcgttcaatgcgtgatattcgtaatgaaaaaggctttggcaaacctgatagcatcgtcatgaagcgcctgattcaactggggttgccgattgcgctggcgctgttctttgaagtgacgttatttgcggtcgttgcgctgctggtttcgccattaggtattgtggatgtcgccggtcatcagattgcgcttaactttagctcgctgatgttcgtactgccgatgtcgctggctgcggcggtaacgattcgagtgggttatcgtctgggccagggctcaacgctggatgcgcaaaccgcagcgcgtaccggtttaggcgtcggcatttgtatggctgtggttaccgctatttttaccgttactctgcgtaagcatattgctttgctctacaatgacaaccctgaggtcgtggcgcttgccgcgcaattaatgctgctcgctgcggtttaccagatttccgactctatacaggttatcggcagcggtattctgcgcggttataaagatacgcgttccatcttttttatcacctttaccgcctactgggtgttaggtttacccagcggttatatcctggcgttaacggatttggtggtggatcgtatgggaccggcaggcttctggatggggttcatcatcggcctgacctcggcggcggtgttaatgatgctacggatgcgctatctacaacgtcagccgtccgccatcattttgcagcgcgctgcgcgataa

SEQ ID NO: 369503 - DNA, 642 bp, Salmonella enterica
atgtttacggggatcgtacagggtaccgcgaaactggtatcgattgatgaaaaacccaactttcgcacccatgtggtgacgttaccggactacatgctggaggggctggagacgggggcgtcggtagcgcataacggatgctgtttgacggtgactgaaataaacggcaaccagataagttttgatctgatgaaagaaacgttgcgcatcaccaatctgggcacgttgagggtaggtgatgaggtcaacgtagagcgtgccgctaaattcagcgatgaaatcggtggtcatctgatgtcggggcatattattacgacggcggagatcgcgaaaatcctgacctccgaaaataaccatcaggtgtggtttaaagtgcaggatgcgtccctgatgaagtatatcctgtacaaaggctttatcggcgtcgacggcatcagtttgaccgtcggcgaggtaacgccaacgcgcttctgcgtgcatctcattccggaaacgctggaacgtactacgcttggcagaaaaaaactgggtgagcgtgtgaatatcgagatcgatccgcaaacgcaggcggttgtcgataccgtagaacgcgtactggctgcgcgagaaaatgcggtcagaaatcaggccgacattggctaa

SEQ ID NO: 369504 - DNA, 1149 bp, Salmonella enterica
atgagttcatcgtgtatagaagaagtcagcgtaccggatgataactggtaccgaatcgccaacgaattgttaagtcgcgcggatattacaattaatggttccgccccgtctgacattcgtgttaagaatcccgatttttttaaacgcgtccttcaggaaggatcgttggggttaggtgagagttacatggatggctggtgggaatgcgagcgtctggatattttcttcagcaaagtcttacgtgccggtcttgaaaatcaactcccccaccatgttaaagatacgctccgtatcctcggcgcgcgtctgattaatctacaaagtaaaaaacgcgcctggattgtcggcaaggaacattacgatcttggtaatgaccttttttcccgtatgctcgatccctatatgcaatattcttgcgcctactggaaagatgccgatacgctggaagcggcacagcaagccaagctgaaattaatttgcgaaaagctacagctacaaccggggatgcgtgtgctggatatcggctgcggctggggcggtctgtcgcaatatatggcgacccattatggcgttagcgtggtgggcgtaacgatctccgctgaacaacaaaaaatggcgcagacgcgttgcgaaggtctggatgtctccattctcctggaagattatcgcgaccttaacgatcagtttgaccgaatcgtctccgtcggcatgttcgaacatgtcgggccaaaaaactacaacacctattttgaggttgttgacaggaatttaaaaccggatggtcttttcctgctccatactattggttctaaaaaaaccgatcataatgtcgatccgtggatcaataagtatattttccccaacggttgcttgccgtctgttcgtcaaatcgccgaggccagcgaatcacactttgtaatggaagactggcataactttggcgccgactatgacacgactctgatggcgtggcatgagcgctttatcaatgcctggccagagattgcgggcaattataacgagcgctttaaacgtatgttcagctattatctcaacgcctgcgcgggtgcgtttcgcgcgcgtgatatccagctttggcaggtggtatttacgcgcggcgttgaaaacggactgcgcgttcctcgctaa

SEQ ID NO: 369505 - DNA, 1206 bp, Salmonella enterica
atgcaacctggaaaaggttttttagtctggttagccggtcttagcgtgctgggatttctggctacggacatgtacctgcccgcgtttgccgccatacaggcggatttacaaacgcctgccgccgcggtcagcgccagcctaagcctgtttttagctggctttgccgtcgcgcaactcctctggggaccgctatcggatcgttatggccgtaaaccgattttactgctagggttatctatctttgcactcggaagtctggggatgctgtgggtagaaagcgcggcagcactgctgacgctgcgcttcgtgcaggccgtcggcgtttgcgcggcaacggtaatctggcaagcgctggtgaccgattattacccttcgcaaaaaattaaccgtatcttcgccacgatcatgccactggtgggattatccccggcgcttgcgcccttactgggaagctggatactgacgcatttctcatggcaggcgattttcgccactctgttcgtgattacgttgttgctgatgttgccggcgctgcgtttaaaaccatcggtaaaagcgcgtaccgaaggacaggataaactcactttcgcgacgttgttacgctctaaaacctatcgcggtaatgtgctgatttatgccgcctgttccgccagcttttttgcgtggctaacagggtccccgtttattctcagcgcgatgggttacagcccggcagtgattggcctgagctatgttccgcaaaccatcgcttttctgattggcggatatggttgccgcgcggcgctacaaaaatggcagggctaccaattgcttccgtggctgttagggctgtacgcgctgagcgttatcgccacctggggagcgggccttctgaataatgcctcactggtggagatcctgattcctttctgcgtaatggcgattgctaatggcgccatctaccctatcgtcgtcgcgcaagcgttacgccctttccctcaagccacggggcgcgctgcggcgctacaaaatacgctgcaactggggttatgtttcctggcaagcctggtggtttcatggctcatcagcacgccgctgctgaccaccaccagcgtaatgctctctaccgttgttctggcggcgttaggctacaaaatgcagtctcatgcagattgcgctgagaccggatttccccatgccaatgtcgcccacgacaagtctcactaa

SEQ ID NO: 369506 - DNA, 933 bp, Salmonella enterica
atgtggtcggaatactcgcttgaagtggttgacgccgtagcgcgcaatggcagttttagcgcggcggcgcaggaactgcaccgtgtgccttcagcagtcagttacaccgttcgtcagttagaggagtggctggccgtaccgctttttgtacgacgtcaccgtgatgttgaactgacgcctgctggcgtctggtttttaaaagaagggcgttctgttatcaaaaaaatgcagatcactcgccaacagtgtcagcaaattgctaatggttggcgtgggcagttagctattgcggtggacaatatcgtcagaccagaacgtacccggcagatgatcgtcgatttctatcgccattttgacgatgtggaactgctggtttttcaggaggtgtttaacggcgtctgggacgcgctctccgacgggcgtgtcgaactggcgattggggcgacgcaggcgattccggtaggggggcgttacgcttttcgggatatggggaccctgagctggagctgcgtagtggcaagcgatcacccgctggcgtcgatgcctgggccgttaagcgatgataccctgcgcaactggccgtcgctggtcagggaagacacttcgcgaaccttaccgaaacggattacctggctgctggataaccaaaaaagggtcgtcgtaccggactgggagtcatcggcaacctgcctgtcggcaggactatgcgtgggaatggtgccgacgcattttgcccgacagtggatagacagcggaaaatgggtggcgctgacgttagagaatccgtttcccgatgcggcctgttgcgtgacgtggcagcaaaacgaagcctcgcccgcgctggcatggctgctggactatttgggcgatagcgaaacgttgaatcgggagtggctgcgggagccagaagaggctcccgacagcggggattaa

SEQ ID NO: 369507 - DNA, 1026 bp, Salmonella enterica
atggcaacaattaaagatgtagcgaaacgagcaaacgtttccactacaactgtatcacacgtaatcaacaaaacgcgttttgtcgctgaagaaacgcgtaacgcggtctgggcggcaattaaagagctgcactactctcccagcgccgtcgcgcgtagcctgaaggttaaccataccaagtcgataggcttactggcgaccagcagcgaagcggcctattttgccgaaattatcgaggcggttgaaaaaaactgtttccagaaaggctatacgctgattttaggcaacgcctggaataacctggaaaaacagcgcgcctacctgtccatgatggcgcaaaagcgcgtggatggcctgctggtgatgtgttctgagtatccagaacctctgctttccatgctggaagagtatcgccatattccgatggtggtgatggactggggtgaagcgaaggccgattttaccgacacggtgattgataacgcctttgcaggcggctatatggcgggtcgttatctggttgagcgcggccaccgggatatcggcgttattcccggcccgctggagcgcaacaccggcgcgggccggctggcaggctttatgaaagccatggaggaggcgctgatcaacgtgccggacaactggattgttcagggcgacttcgagccggaatccggttaccacgcgatgcagcaaattttatcgcagtcacatcgccctaccgccgttttctgcggcggcgatattatggcgatgggcgcgctttgcgcggctgacgaaatggggcttcgcgtaccgcaggacgtttcggtgatcggttatgacaatgtgcgtaacgcccgttactttaccccggcgctgacgacgattcaccagcccaaagactctttaggcgaaaccgcatttaatatgctattggatcgcatcgtcaataagcgcgaagagtcacagtctattgaagttcatccacgcctggttgagcgtcgctcggtcgctgacggcccgttccgcgactatcggcgttaa

SEQ ID NO: 369508 - DNA, 582 bp, Salmonella enterica
atgtcgttcgaattacctgcattaccgtatgccaaagatgctctggcgccgcatatttctgctgagacgctggaatatcactatggcaaacatcatcagacttacgtgaccaatcttaacaatttgatcaaaggcacggcgtttgaaggcaaatcgctggaagagatcgtgcgcacttccgaaggcggcatctttaataacgccgctcaggtgtggaaccacaccttctactggaactgcctggcgccaaacgctggcggcgaaccgaccgggaaactggctgatgctatcgcggcatcttttggcagcttcgcggaatttaaagcgcagttcaccgatgccgctatcaaaaactttggttccggatggacatggctggtaaaaagcgctgatggcaaactggctatcgtttctacctcaaatgccggtacgccgctgactacggatgcaacgccgttgctgacggttgatgtgtgggaacacgcgtattacatcgactaccgcaacgcccgtccaaactatctggagcatttctgggcgctggttaactgggaatttgttgcgaaaaatctcgccgcataa

SEQ ID NO: 369509 - DNA, 822 bp, Salmonella enterica
gtggcgcggataaacaaaatctcgatcacgctctgtgctttactttttactactctcccttttacgccaatggcccatgcttccaggcaagccaaagcgacgcctgctgtttctcatgtcacgaaaacggcagataaaaagaaaagcacaacgaaaaagatcagtaagaccagcaaaaaaaacgtaaaaaaaacctcaaaaaccagccgttcttcttccgcttctacgccaaaacgtaccaccgccgccacgaaatctcgtcatacgacgcatcgtcgtaacagaaccgcgcccgcgtcaatcgccgccctcgacgtaacggaaaaatgcacgacgcgtaaaggccgtaagccgcactgcgtgaaggggaaaggaacattgccggtctctattgccgatgcgcatcgtgcaaaagtacaaaaagcgacgaaaaccgcgatgtccaaactcatgaaccagattggtaaaccgtatcattggggaggcgcgtcgccgcgtaccggttttgattgcagcggtctggtttattatgcctataaagatttagtgaagatccgtatcccccgaacggcgaatgagatgtatcacctgcgtgacgcggcgcccattgagcgtagcgagttgaaaaacggcgatctggtgttcttccgtacgcaggggcgcggcaccgccgatcacgttggcgtctatgtcggcaacggtaagtttatccagtctccgcgcagcggtcaggaaattaagatcacctcactgaacgaagaatactggcaacgtcattatgtcggcgcccgccgggtgatgacgcctaaaacaattcgctaa

SEQ ID NO: 369510 - DNA, 348 bp, Salmonella enterica
atgagcaccactatcgaaaaaattcagcgccagatcgctgaaaacccgattctcctgtatatgaaaggttcaccgaaactgccaagctgtggtttttctgcgcaggccgttcaggcgctttcagcctgcggggaacgttttgcctatgttgatatcctgcaaaacccggatattcgcgctgaattaccgaaatacgccaactggccgacattcccacaactgtgggtggacggcgagctggtcggcgggtgtgatattgtgattgagatgtatcagcgtggtgagttgcagcagcttattaaagaaactgcggcaaaatataaaactcaggagccggacgcagagtaa

SEQ ID NO: 369511 - DNA, 648 bp, Salmonella enterica
atgtccgataacgctcaactttccggtctgtgcgaccgttttcgtggtttttatcctgtcgtcatcgacgttgaaactgcaggatttaacgctaaaaccgatgcgctgctcgaaatcgccgccatcacgctgaaaatggatgaacaaggctggctgatgccggacatgacgctgcatttccatgtggagccgttcgctggagccaacttacagccggaagcgcttgcgtttaacggtatcgatccctctaacccgctacgcggcgcggtgagtgaatatgaggcgctacacgctattttcaaaatggtgcgtaaaggtatcaaagaaagcggttgtagccgcgccattatggtcgcgcataacgccacttttgatcacagttttatgatggccgccgcagagcgcgcctcgctgaaacgtaacccgtttcatccgttcgtcacctttgataccgcggcattgagcggactggcgctggggcaaacggtgttatcaaaagcgtgcctggcggcaggtatggagtttgacggcgaaaaggcccattccgctttgtatgataccgagcggacagcggtgctgttttgtgaaatcgtcaatcgctggaagcgcctgggcggctggccgttacctttgccgacggataaataa

SEQ ID NO: 369512 - DNA, 408 bp, Salmonella enterica
atgcgtttattgcatactatgctgcgcgtcggcgatttgcagcgttccatcgctttttacaccaacgttctgggcatgaaattgctgcgtaccagtgagaatccggaatacaaatactcgctggcctttgtgggatatggtccggaaacggaagaagcggtcatcgaactaacctataactggggcgttgagagctatgacatgggcaatgcgtacgggcatatcgcgctgagcgttgacaatgccgctgaagcctgtgaacgcattcgtcagaacggcggcaacgtgacccgtgaagcggggccggtaaaaggcggttcgactatcatcgccttcgttgaagatccggatggctataaaatcgaattgattgaagctaaagacgcaggccgcggtctgggtaactga

SEQ ID NO: 369513 - DNA, 1098 bp, Salmonella enterica
atgtcatcagcaaaactgtttacccccctcaaggtgggtgccatcacggcgacaaatcgcgtatttatggcgcctttgacgcgtttgcggagtattgaaccgggcgacattcctacgccgttaatggcggaatattaccgtcaacgcgccagcgccggattgatcatcagcgaagccacacaaatctccgcacaggcgaaaggctatgccggcgcaccgggattacacagcgatgagcagatcgccgcctggaaaaaaatcactcagggagttcatgctcagggcggccatatggcggtgcaactgtggcatacgggccgtatttcacacgccagcctgcaaccaggcggacaagcgcccgttgcgccatccgctatcaatgcgggaactcgcacttctttgcgtgacgaaaacggccaggccatccgcgtagaaacttccacgccgcgcgcgctggatactcacgagatccccgggatcgtcaacgatttccgccaggctatcgccaatgcccgagaggcaggcttcgacctggtggagctgcactccgcgcacggttatctgctgcaccagttcctctctccgtcttctaatcaccgtaccgatcggtacggcggcagcgtagagaatcgcgcccgtctggtgctggaggtggttgatgccggcattaaggaatggggcgccgaccgtatcggcatccgcctttctcctgtcggcactttccagaatgtcgataacggcccgaatgaagaagctgacgccctttatctgattgaagcgttaggcaaacgcggcattgcttatctgcatatgtctgaaccagactgggcgggcggagaaccgtacagcgacgcattccgtgaaaaagtgcgcgcgtgtttccacggccccatcatcggcgctggcgcctatacgccagaaaaagcggaagatctgatcgaaaaagggctgattgacgccgtggcgtttggtcgcgattacatcgctaacccggatctggtggcgcgtctgcaacgtaaagcggaacttaatccacagcgtcccgaaagtttttatggcggcggcgcggaaggctacactgactaccctactctgtaa

SEQ ID NO: 369514 - DNA, 600 bp, Salmonella enterica
atgaataagcaaaccgaacatgatacccgcgaacatctgctggccaccggcgagcagctttgtatgcaacggggttttaccggcatggggcttagcgaattgctcaaaaccgcccaggtgcctaaagggtcgttttatcactactttcgctcgaaagaagccttcggcgtcgccatgcttgagcgacattacgcctgctatcatcagcgtcttacggcgcacttcacctccggtcccggtaatcatcgcgatcgccttctcgcctggtatcaggaaacgttaaagcagttttgccagcaaggcgccatcagcggttgcctgacggtgaaactgtcagcggaggtctgcgatctgtcggaggatatgcgctctacgatggataaaggggcgcaggagatcatggcactgcttgcacgcgcgctggaagatggccgtaatagccactgtttacatttcaccggccagccgttgccacaggcgcaggtactttatgccctgtggctgggcgccaatttgcaggccaaaatatcccgtagcgccgcgccgctggaaaatgcgttggcgcatgttaagaccatcattgcaacgcctgagcagtaa

SEQ ID NO: 369515 - DNA, 240 bp, Salmonella enterica
gtggccgagcagttggagttttttcctgtagcaagcccatgtcgcggtatctgccagtctgatgagcgtggcttttgtcggggctgtatgcgcagccgcgacgaacggtttaactggcaaaaaatgagcgatgccgagaaacaaaatgtactgcggctttgtcgccagcgtttcttgcgtaaaatacgcgcaaacaagcctctcccatcggaagatcctcaacaaccttcactcttttaa

SEQ ID NO: 369516 - DNA, 897 bp, Salmonella enterica
atggttcagcgtgtcaccatcgctccacaaggcccggagttttcgcgttttgtcatgggttactggcgtttgatggactggaatatgtccgcgcgtcagttagtgagttttatcgaagaacatctggatttgggcgtcactaccgttgaccatgcggacatttatggcggttatcagtgcgaagcggcatttggcgaggcgctaacgctggcgccgcatttgcgggaaagactgcaaatcgtcaccaaatgcggtattgccaccactgccagagcggaaaataagctcggtcattatattaccgatcgccgccatattattctgagcgccgaacagtcattaaaaaatctggcgacagattatctggatatgttgttaattcaccgtcccgatccgttaatggatgcggatgacgtcgccgaggcgtttcaacatctgcaccaaagcggcaaagtgcgccattttggcgtttctaattttacgccagcgcaatttacgttgctgcaatcgcgcctgcctttcaccctggcgaccaaccaggtggagatctcgccggttcaccagcctttgttgctggacggcacattagatcaattacagcaactgcgtattcgtccgatggcctggtcatgtcttggcggcggtcggctgtttaatgatgaggcttatcagccgttgcgccaggaactttccgttatcgcgcaagaactcaacgccagttctattgaacaggtggtctatgcctggattttacgtttgccgtcgcagccgctgccgattattggctcgggtaaaatcgaacgcgtacgtgccgcactagaagcggaaacgctgtcattgtcgcgtcaacagtggttccgaatccgcaaggcggcactgggttatgacgtgccgtaa

SEQ ID NO: 369517 - DNA, 522 bp, Salmonella enterica
atgaagcgattaagtttagcgatggtgacgctgctggcctgtgcgggtgcgcaggctgccagcgagaaagtagagatgaatctggtgacggcgcaaggcgtaggacagtctatcggcaccgtcgtcatcgatgaaaccgaaggcggcttaaaatttaccccacaccttaaagcgttgccgccgggcgagcatggttttcacattcatgccaacggtagctgccagccagcgattaaagacggccaagcggttgccgcagaagccgctggtggtcatctggacccacaaaataccggcaagcatgaaggaccggaaggccaggggcatctgggcgacctcccggtgttagtcgttaataatgatggtatcgccaccgaaccggttactgcgccgcgtctgaagtctcttgatgaagtgaaagataaagcgctcatgatccatgtgggcggcgataacatgtccgatcagccgaaaccgctcggcggcggcggaacgcgttacgcctgcggcgtcattaaataa

SEQ ID NO: 369518 - DNA, 2040 bp, Salmonella enterica
atgaaactctccctgccagccctgcgaaatacgccctggtttaaagcgacctccggccagtggcgttacgcgttgcgcaataccattgccatgtgtctcgcgctgacattcgcttattatctcaatctggatgagccctactgggcgatgacttcggccgcagtggtgagctttccgaccgtaggcggcgtaatcagtaaaagtctggggcgtattgccgggagtttactcggcgcgaccgccgcgttgattattgccggccatacgctgaatgaaccctggttgttcttatttagcatggccgcctggatcggtttttgtacctgggcctgcgcgcattttaccaataatgccgcttatgctttccagttgtccggctacacggcggcgatcatcgcgttcccgatggttaatattgtagaaatcacgcagttgtgggatatcgcccaggcacgtgtatgtgaagttatcgtcggcatcctctgtggcggcatgatgatgatgatcctacccagcacatcggatggtaccgccctgctcaccgcgttgaaaaacatgcatgcgcgcttgctggaacatgccagtctactgtggcagccggagactaccgacgctatccgctccgcgcatgagggggtcattgggcaaatcctgaccatgaacctgctgcgtattcaggccttctggagtcactaccgttttcgccgccagaatgcattgctaaatgcattgttacaccagcaattacggctaaccagcgtgatctccagtctgcgtagaatgcttttaaattggccgacgccgccggaaaacagccgcgaagtcattgaacaactcttagctgagttggcaaaaccgcgcgcggacagctacaccgtggcgcggattattgcgccgctacgcccgcaggatgaacaggattatcgtcacctcgcgttctggcagcgattacgctatttttgccagctatatctgcgcagcagccgtcagttatatctgatcgaaagcggcgcgccggtagatcaaatccatatccgccgcactcccggccttgcgcggcatacggataacgcagaggccatctggagcggcgtgcgtaccttttgcacgctcacggtaattggcgcctggagtattggcgcgcaatgggaatccgggcccggcgcattaaccctggcggcgatcagttgcgtcctctactccatcgtcgccacgccgtttaagtcgctttccttattgatgcgtactttagtgctgctgtccttattcagcttcgtggtgaaatttggcctgatggtgcaaatcaccgatctgtggcaattcttgcttttcctttttccgctgttcgtcacgatgcaactgcttaaactgcagatgcctaagctggcgggactgtgggggcagcttatcgtttttatgggctcattcatcgccgtgaccaatccaccggtgtacgacttcgccgacttccttaacgataataccgccaagatcgtcggcgtcgcgatttcctggctggcgtttgcgattttgcgccccggttccgatgccgtaaaaagccgccgccatatccgcgcgctacgccgcgatttcgtcgatcagcttagccgtcacccttcccataacgaaagcgagtttgaatcgctgacctatcatcacgtcagtcagctcagcaatagccaggatgcgctggcgcgccggtggttattacgttggggagtggtactgctgaactgctcgcatgtggtgtggcagctgcgcgcctgggagtcgcgttccgatccgctttcccgggtgcgggatatttgtatatccctgctgcgcgatgtgatgagcgagcgcggcgtacagcaacgcccgcttgccgttacgctacaggaactacagcgtatctgcgacacgctcgcacatcatcatcaacccgccgcgcatgaactggcggcgattatctggcgtttacactgttcgctgtcgcagctggaacaggctccagcgcagggaacactgtctccgggttatttaatgacgccgcaggcgtaa

SEQ ID NO: 369519 - DNA, 861 bp, Salmonella enterica
atgtcgttaaaaacaataaaatatttttctactctcattgtcgccgtcgtcgccgttctggccgcatggtggttatggaattactatatgcagtcaccgtggacgcgcgatggtaaaatccgcgcggaacaggtcagcgtaacgccgcaggtttctggcagcattacccaactcaatatcaaagataatcagttcgtcaacgccggggacgttctttttgtcattgataaaacgcccttccatattgcagaacttaacgcgcaggcgcagttggccaaagcgcagtccgatctggcaaaagcgaataatgaagccgatcgacgtcgacatttatcgcgtaactacatctctgctgaagatctggatagcgccaatctgaatgttaaagcgatgcaggccagcgtagatgtcgcactggcgacgttaaaacaggcgcagtggcagcttagccagacggaagtaaaagcgccggtatccggctgggtgaccaacctttccacgcgtaccggtgattatgccagtaccggtaagccacttttcgccctggtagatagccattcattttatgtaatgggatatttcgaagaaaccaaactacgccatatccgcgaaggtgagcctgcattaataacactgtatagtggcaatgttaagttacagggtcacgttggcagtatcgggcgcgctatttacgaccaaagcgtggaaagtgactccggtttagtgcccgatattaaacccaacgtaccgtgggtacgtctggcgcaacgcgtaccggtacgtatcgaatttgacgctttgccgcaggatatcacgctcgtctccggcactacctgcagcgtagccattgggcagcggtaa

SEQ ID NO: 369520 - DNA, 237 bp, Salmonella enterica
gtgaagtgtatactcaacgccacaggattgcccttacaagatctcatgttgggagcatctgtttactttccgccattctttaaagcctttgcgcttgggttcgttatctggttgtttattcaccgactcctgcgtgaccggatatactctgatgaaatctggcatcccctgttaatggatctctccctctttacgctttgcgtatgtctgggcctcgttttactgatcgcgtggtaa

SEQ ID NO: 369521 - DNA, 435 bp, Salmonella enterica
ttggaatcgccactaggttctgatctggcacggttggtgcgcatttggcgtgctctgattgaccatcgcctcaagcctctggaattgacgcagacacattgggtcacgttgcacaatattcatcaattgccgcctgaccagtcgcagattcaattggctaaagcgataggcattgagcagccatcgctggtacgcacgttggatcaacttgaagataaggggctaatttcgcggcaaacctgcgccagcgatcgtcgcgctaagcgcattaaactgaccgagaaagcggagccgctgatcgctgagatggaagcggtcattcataaaacgcgcggtgaaattttggctgggatttcttcagaggagattgagcttctgattaaacttatcgccaaacttgaacacaatattatggaattgcactctcacgattga

SEQ ID NO: 369522 - DNA, 468 bp, Salmonella enterica
atgattaaacgtgtactggccgtttcactgatggggttatccttagctgggtgtgttaacaatgatagcctttcgggtgatgtttataccgcatccgaggctaaacaagttcagaatgtaacgtacggtactatcgttaacgttcgtccggttcaaattcagggcggtgatgattctaacgtgattggcgctatcggcggcgcggtgttgggcggattcctcggcaacactatcggcggcggtacgggtcgttcactggcgaccgcggcaggcgcggtggctggcggcgtagcgggccagggcgtccagagcgcaatgaataaaacccagggtgtggaactggaaattcgtaaagacgatggcaacaccattatggttgtgcagaaacaaggaaatacgcgtttctcggcaggtcagcgtgtcgtgctggccagcaacggcagccaggttaccgtctctccacgctaa

SEQ ID NO: 369523 - DNA, 1122 bp, Salmonella enterica
atgaaatcgggccgttttattggcgttatgtccggaaccagccttgatggcgtggatgttgtactggcggcaattgatgaaactatggttgcgcaacaggcaagtctcacctggcctattcccgttcatctgaaaaaaggcattctcgatatttgccagggacagccgcttacgctctcgcaactcggccagctggatacccagttaggccggctttttgcacaggcggttaatgcgctgttagcgcgacaacgtttgcagccgcgggatatcgtcgccattggttgtcatgggcaaacggtctggcatgaaccgaccggcgaggccccgcatacgctgcaaattggcgataataatcacatcgtcgcccatacggggattacagtggtcggcgattttcggcggcgggatattgcgctgggcggacaaggcgcgccgttggtgcctgctttccatcacgcgctgttgggacatccgacggaaaaacgtatggtcctgaatatcggcggcattgccaatttatctctgcttttccccggacaggcggtgcgcgggtacgacacggggccgggtaatatgttgatggatgcgtggatttggcgacaatgcgcgcagccctacgacaaagacgcggcatgggcgaaagaaggtcaggttattcttccattgctgcaaaagatgttgcgcgatccgtactttgctgcgtcggcgcccaaaagtacaggacgcgaatatttcaactatggctggttagagcgtcatcttacggctttccctggcgcagacgcgcgcgatgtacaggccacgctggcggagctgacggcggtctccatcgcccaacaggtgctgctcaatggcggctgcgagcggctgatggtctgtggcggcggaagccggaatccgttagtgatggcccgtctggcggcgctgttgcccggtatcgaggtttcgaccaccgataaggcggggatcagcggcgatgatatggaagcgctggcctttgcatggcttgcctggcgaacgctcgcgggcctgccgggaaatttaccttccgtgacgggggctacagaagccagtgttttaggcgctatttacccggctaacccaataactcagagttaa

SEQ ID NO: 369524 - DNA, 363 bp, Salmonella enterica
ttgcccttccagaagcaggagagctttcgggatatgcctatgaaaaagatcgcaataatgtgtttacctgtgctgctgaccggctgtagcgtttatcaacaatttgttgaacgtatgcaaacggatacgctggaataccagtgtgatgagaagccgcttaccgttaaagtcaataacccgcgtgaagaggtcagttttgtttatgacaataagctgctgaccctgaagcaaggaatctcggcctcgggcgcgcgttataccgacgggatttatgttttctggtcgcaaggcgagagcgccacggtctataaacgagacagaattgtgcttaataactgtcagttacaaaatccgaagcgttga

SEQ ID NO: 369525 - DNA, 657 bp, Salmonella enterica
atgtctgataacgaccaattgcagcagatcgcgcatctgcgccgtgaatacacgaaaggcggcttgcgtcgccgcgatttacccgctgaaccgttaaccttatttgagcgctggcttgggcaagcgtgcgacgccagactggccgatccgacggcaatggtcgtggcgaccgtagatgacaaggggcaaccgtaccagcgtattgtattgctcaagcattatgatgaaaaaggcctggtcttttataccaacctgggaagccgcaaggcgcatcaaattgagcacaatccgcgtatcagcctgttatttccctggcatatgcttgaacgccaggtgatggtgacaggcaaagccgagcgtctctccacacttgaggtggtgaggtatttccacagccgtccgcgcgacagccagatcggcgcatgggtttctaaacaatccagccgcatttccgcgcgcggtatcctcgaaagcaaattcctggagctcaagcagaagtttcaacagggcgaagtgccgttacccagcttttggggtggttttcgcgtgagtatcgaacagatggagttctggcagggcggcgaacatcgtctgcacgatcgctttttataccaacgcgacgacggcgcatggaaaatcgaccgtcttgcgccctaa

SEQ ID NO: 369526 - DNA, 1275 bp, Salmonella enterica
atggcaagcagtaacttgattaaacaattgcaagagcggggactggtagcccaggtgacggacgaagacgcgttggcagagcgactggcgcaaggcccggtcgcgctctattgcggcttcgatcctaccgctgacagcttgcatttggggcatctggttccattgttatgcctgaaacgcttccagcaggcagggcacaaacctgttgcgctggtaggcggcgcgaccggtctgattggcgacccgagctttaaagccgccgagcgtaaactgaacactgaagagaccgttcaggagtgggtggcgaaaattcgtaaacaggttgccccattcctggactttgattgcggcgaaaactccgccatcgcggccaataactatgactggttcggcagcatgaatgtgctgactttcctgcgcgatatcggtaaacatttttccgttaatcagatgatcaacaaagaagcggtgaagcagcgtctgaaccgtgacgatcagggtatctctttcacggagttctcttataacctgctacaggggtacgacttcgcttgtctgaataaactgcacggcgttgccttacagattggcggttctgaccagtgggggaacatcacttccggtatcgacctgacccgtcgcctgcaccagaatcaggtatttggtttgaccgttccgctgatcaccaaagctgacggcacgaaattcggtaaaaccgaaggcggcgctgtctggctggatccgaagaaaaccagtccgtacaaattctaccagttctggattaacaccgcagatgccgatgtttatcgcttcctgaaattcttcacttttatggacattgaggagatcaatgccctggaagaagaagataaaaacagcggtaaagcgccgcgcgcgcagtatgtactggccgagcaggtgacgcgcctggttcatggtgaagaggggctggtcgcggcgaaacggatcactgaatgcctgttcagcggttcactgagcgcgctgagcgaagctgactttgagcagttggcgcaggacggcgtaccgatggttgaaatggaaaaaggcgccgacctgatgcaggcgctggtagacgccgaactccagccgtcgcgtggtcaggcgcgtaagactatcgcctccaacgctgtcactatcaatggtgaaaaacaatccgatcctgaatacatctttaacgatgaggaccgtctgtttggccgctataccttattacgtcgcggcaaaaagaactattgtctgatttgctggaaataa

SEQ ID NO: 369527 - DNA, 861 bp, Salmonella enterica
atgaagaatatcctcgctatccagtcccatgttgttttcggacatgcgggcaacagcgccgccgaatttcccatgcgccgtcttggcgcgaatgtttggccgctgaataccgttcagttttctaaccacacgcaatatggtaaatggaccggctgtgtcatgccgcccagccatctgactgagattgtccaggggattgcggacattggccagttagcgcactgcgacgccgtacttagcggttacctgggatctgccgagcagggagaacacattctcggtattgtgcgccaggttaaagcagcaaatccgcaggcaaaatatttctgcgatcccgtgatggggcatccggaaaagggttgtatcgtggcgcctggcgtcgcagagttccatgtgcgttatgcgctacccgccagcgatattatcgcgcctaacctgattgaactggaaattctcagcaaacatagcgtgaataatgtgaatgacgccgtgcaggcggcgcgagaactgattgctcaggggccagaaattgtactggtaaaacatctcgcccgcgccggttacagttcagaacgctttgaaatgctgctggtgacagcgcaggaagcctggcatattagccgtccgctggtggatttcggttcacgtcagccggttggcgttggcgatgtcaccagtggtttattgctggtcaaacttttgcagggcgcgacgttgcagcaggcgctggagcacgttacggcggcagtctatgagattatgatcgccaccaaaacgatgcaggagtacgaactgcaggtcgtggcggcccaggacaggatcgctaaccctgaacattacttcagcgcaacgcggctgtaa

SEQ ID NO: 369528 - DNA, 606 bp, Salmonella enterica
atgaaactgttctacaaaccgggtgcctgctctcttgcttcccacattaccctgcgcgaaattggcaaagactttacgcttgatggcgtcgatctcgcaaaaaaacgcctggaaaacggtgatgattacctggcagtcaaccctaaaggacaggttccggctctgctgctggatgacggcacactgttgactgaaggcgtcgccattatgcagtacctcgccgacagcgttcccgaccgccagcttctggcgccggtaagtagtcttgctcgctatcatacgctggaatggctcaactatattgcaacggaactgcataaaggctttaccccgctgttccgccctgacacgccggaaactcttaaacccgccgttcgcgccgctctggaaaagaaatttcagtatgtggatgaatcgctttcagacgaccagtggatttgcggccagcgttttaccatcgcagacgcttatctgtttaccgtattgcgttgggcctatggcgtaaaactgaatatggacgggttaacgcatattgaaagttatatgcagcgtgtcgcaaaaagaccgaccgttgcggcagcgcttaaagcggaaggactgaattaa

SEQ ID NO: 369529 - DNA, 1506 bp, Salmonella enterica
gtgtctactgcaaacaaaaaaccaactgaaagcgtcagtttgaacgctttcaaacaaccgaaggcgttctatctcatcttctcgatagagttatgggagcgttttggttattacggcctgcaaggcattatggccgtctacctggtaaaacaactgggtatgtcagaagcggattccatcacccttttctcttccttcagtgcgctggtgtacggcctggtcgccattggcggttggttaggtgataaaattctgggcaccaaacgcgttattatgttgggtgccgtggtgctggctatcggttatgcgctggtcgcatggtctggtcatgacgctggcatcgtctatatgggcatggcggctatcgctgtgggtaacggtctgtttaaagctaacccgtcctccctgctgtctacctgctacgcgaaggatgatccgcgtctcgacggcgcatttacgatgtattatatgtccgtcaacatcggctccttcttctctatgctggcgacgccgtggctggcggcgcgttatggctggagcaccgcgtttgcgcttagcgtcgtcggtatgctgataaccgtcgttaactttgctttctgccagcgctgggtgaaaagctacggttccaaacccgactttgaaccgatcaacttccgtaatctgctgctgacaatcgtgggtattgtcgttctgattgcggtcgccacctggctgctgcacaaccaggatatcgcgcgtatggtgctgggcgtaatcgctcttggcatcgtcattatcttcggtaaagaagcgttttccatgcacggcgcggctcgccgtaaaatgatcgtcgcctttattttgatgctgcaggcgattatcttcttcgtactgtacagccagatgccgacgtcgctgaacttctttgccattcgtaacgtcgagcactctattctcggtatcgcgttcgaaccggaacagtatcaggcgctgaacccattctggatcattatcggcagcccgattctggccgctatctataacaggatgggcgatacgctgccgatgccgatgaaattcgccattggtatggtgctgtgttccggcgcgttcctgattctgccgctgggcgccaaatttgcgaacgatgccggcatcgtatccgtaaactggctgatcgcaagctacggcctgcaaagtatcggtgagctgatgatctccggtctgggactggcaatggtcgcacagttggttccgcagcgtctgatgggtttcatcatgggtagctggttcctgacaacggcaggcgctaacatcatcggcggttatgtcgccaacctgatggctgtgccgagcgacgtgactgacccactgatgtccctggaagtctatggtcgcgtatttatgcagattggcatagcaaccgccgttatcgccgtcctgatgctgctgacagcgcctaagctgaaccgtatgacccaggacgatgataccgctgaaaaaggctctaaagccgctacagtttaa

SEQ ID NO: 369530 - DNA, 636 bp, Salmonella enterica
atgaacaaagcaaaaaggctggaaattctgacgcgcctgcgcgacaacaatccgcaccccacaacggaactcaatttcacgtcgccgtttgagttgctgattgccgtgttgctttccgcgcaggcaaccgacgtcagcgtgaacaaggctaccgccaaactttacccggtcgccaatacgccagccgcgatgctggaactgggcgtagaaggcgtgaaatcctatatcaaaaccatcggtttatttaacagtaaagcggaaaacgtgattaagacctgccgtattttactggacaagcataatggcgaagtgccggaggatcgggcggcgctggaagcgcttcccggcgtggggcgaaaaaccgctaacgtagtactaaataccgccttcggctggccgaccatcgccgttgatacgcatatatttcgtgtatgcaaccgaacacagttcgcgccgggtaaaaatgtcgaacaggtagaagagaagttgctgaaagtggtgccgaatgagttcaaagtggactgccatcactggttaattttgcatggccgctatacctgtatcgcccgaaaaccccgctgcggctcctgcctcattgaagacctttgcgaatacaaagaaaaagtcgatatttga

SEQ ID NO: 369531 - DNA, 693 bp, Salmonella enterica
atgagcgaaataaaagacattgttgttcaggggttatggaaaaataactctgctctggtgcagctacttggcctgtgccctttactggcagtgacgtctacggcaaccaacgctctggggctgggtctggccacaacgctggtattaacgctgaccaaccttacggtgtccgcactacgtcgctggacgccggcagaaatccgtatcccgatttacgttatgatcattgcctcggtggtaagcgcagtacagatgctgatcaatgcgtatgcgttcggtttgtatcagtctttagggatttttattccgctgattgtaacgaactgcattgttgttggtcgcgccgaagcgtttgccgcgaaaaaaggaccgtggctttccgcgttggacggtttttctatcggcatgggcgcgacaggcgcgatgttcgtgctgggttcgctgcgcgagatcctcgggaatggtacgcttttcgatggcgcggatagcctgctgggaggctgggcaaaagtattacgggtcgagatatttcacaccgactcgcctttcctgctggcgatgctgccgccaggcgcgtttatcggcctggggctcatgctggcggtaaaatatcttattgatgaaaaaatgaagaaacgccgcgccgaaaccgcgccttccgctgttccggcaggtgaaacagggaaagtctga

SEQ ID NO: 369532 - DNA, 621 bp, Salmonella enterica
atgctgaaaacgattcgtaaacacggtattacgctggcgctttttgccgcaggctctacgggattgaccgcggtgattaatcagatgacaaaatcaaccatccacgaacaagcgctgcaacaacaacatgccctgttcgatcaggtattgccgccagatcgttacaataataatctgcaagagagttgttatctggtcgatgcgcccgccctcggcaaaggcacacaccgtgtttttatcgctcgcaaggatgataaacccgtagcggccatcattgaggccaccgcgccagatggctattccggcgctatccagcttattgttggcgcagatttcaacggtaccgtcctggggacgcgtgtgacggaacatcatgagacgccagggttaggtgataaaattgagcgccgtttgtctgactggattacccactttagcggtaaaaccatcagcggtgaaaatgatacgcactgggcggtgaaaaaagatggcggtgattttgatcaatttaccggggcgacaataacgccgcgtgccgtagtgaatgcggttaaacgcgccgggctgtacgccgaatcactgcccgctcagctcccccatttaaccgcctgtggagaatag

SEQ ID NO: 369533 - DNA, 1059 bp, Salmonella enterica
atggtattcagaatcgcaagctcgccttatacccataaccagcgccagacatcgcgaatcatgttgctggtagtaatcgccgctctgccggggattgccgcgcagacgtggttttttggttggggaacgcttttccagatcgttctggctgctatcacggcgctcgtcgcagaagccattgtcctcaggctgcgcaaacaatcggtcgccagtcacctgcaggattattccgcgttattgacggggcttttgctggcggtcagcatccctccgcttgcgccctggtggatggtcgtgctgggaaccggattcgccattattatcgctaaacagttatatggcgggctgggacaaaacccctttaatccggcaatgatcggttacgtggtgctattaatttcctttccggtacaaatgacaagctggttgccgccttatgaaatagccgcaacaacgcccgatatgctggacacgttacggatgatttttagcgggcataccgccagcggcggcgatatgacgctgctacgtatcggtattgacggtatcagccaggcgacgccgctggatacgtttaaaacgtccttgcgcgccggacattccgttgagcaaattatgcagtacccgatatacagcggcgcgctggccggcgtgggctggcagtgggttaacctcgcctggcttgtcggcggcgtattcctgctgtggcaaaaagctatccgctggcatatcccggtcagttttctgctgacgctggcgctatgcgccgcgttaggttggcttttctcgcccgctacgctggcctcgccgcagcttcatctgctgtcaggcgccaccatgctgggtgcattttttatcttaacggatccggttaccgcctccacgaccaaccatggacgtttaattttcggcgcgctggctggggtattagtgtggctgattcgtagcttcggcggctatccggacggcgttgcttttgctgtcctgttggcgaatatcacggttcctctgatcgactactacacgcgcccccgcgtctatggacatcgcaaaggataa

SEQ ID NO: 369534 - DNA, 2022 bp, Salmonella enterica
atgcttaaactattttccgctttcagaaaagataaaatctgggatttcgacggtggtattcatccgcccgaaatgaagacccagtcaaacggcacgccgctgcgtcaggtgcctttagcgccgcgcttcgttatccccttaaaacagcacattggcgctgagggcgagttgtgcgttagcgtcggcgatcgcgtgctgcgcggccaggcgctgacccgtggacgtgggagaatgctgccggtacacgcgcccacctccgggacggttatcgctattgccccccactcgacggcacatccttcggcgctggcggagttaagcgtcatcattgatgccgacggcgaggaccgctggattgaacgcgagggctggtctgattaccgcgcccacagccgtgaagcgctcattgaacgcattcatcagtatggcgttgccgggcttggcggcgcagggtttcccaccggcgttaaattgcagggcggcggcgataaaatcaccacgcttattatcaatgccgcagagtgcgaaccttacattacggcggacgatcgtctgatgcaggactgcgccgcgcagattgtggaaggtattcgcatcctggcgcatattctgcaaccgcgtgaggtattaatcggcattgaagataacaaaccgcaggctatttccatgctgcgcgccgtactggctgacgctcacgacatttcgttacgtgtgatcccaaccaaatacccttccggcggcgcaaaacaactcacccaaatactgacgggaaaacaggttccccacggcgggcgctcctctgatattggcgtgctgatgcaaaacgtcggtacggcttatgccgttaaacgcgccgtggttgacggcgaaccgatcacagaacgcgtcgtcaccttaacgggtgaagcggtaagccgtccgggtaacgtctgggcgcggctcggcactcccgttcgtcatttgcttaacgatgccggattctgcccttctgctgaccagatggtcatcatgggcggcccgttgatgggattcccccttccctggcttgacgtaccggtcgtaaaaatcaccaactgcctgctggcgccatccgtgactgaaatgggagcgcctcaggaagagaaaagctgtattcgttgcagcgcttgcgctgacgcttgccctgccgaccttttaccgcagcagctttattggttcagcaaagggcagcagcatgacaaggctaccgctcaccatattgctgattgtatagaatgcggcgcctgcgcctgggtctgccccagtaatattccgctcgtccaatatttccgtcaggaaaaagcggagattaatgcgatcaggcttgaagaaaaacgcgccgccgaagccaaagcgcgttttgaggctcgtcaggcaagactggagcgcgaaaaagccgcccgccttgcacgtcataagagcgcagcggtacaaccagcggcaaaagatcaggatgccattgccgctgcgctggcgcgggtaaaagagaaacaggcgcaggccacgcaaccggtggttattcaggcgggtagtctgccagacaatagcgccgtcatcgcggcccgtgaagcgcgtaaagcgcaagcgcgcgctaaacaagccgctcatccggtggctgacagcgcgatatccggcggcgacccgcgtaaagccgcggtggaggcggccatcgcccgcgccaaagcccgcaaacaggagcagcaggccggaagcgaacctgccgaaccggtcgatccgcgcaaagccgcggtggaggcggccatcgcccgcgccaaagcccgcaagcaggagcagcaggccggaggcgaacctgccgaaccggtcgatccgcgtaaagccgcggtggaagcggccatcgcccgcgccaaagcccgtaagcaggagcagcaggccggaagcgaacctgccgaaccggccgacccgcgtaaagccgcggttgctgcggctatcgcccgcgttcaggcaaaaaaagcagcacagcagcaggttgttaacgaggattaa

SEQ ID NO: 369535 - DNA, 579 bp, Salmonella enterica
atgaatactatctggattgccgttggcgccctgacccttctgggcctggtgttcggcgccattctgggttatgcctcccgccgattcgcggttgaagatgatccggttgttgaaaaaatcgatgcgattttgccgcagagccagtgtggtcagtgcggctatcccggctgtcgcccctacgctgaagccgtgggtctccagggcgagaaaatcaatcgttgcgcgcccggcggcgaagccgtcatgctgaaaatggcagagctgctaaacgtagagccgcagccatgcgatggtgaagaacagcaggccgcgccagtacgtatgctggcagttattgatgaaaataactgcattggctgcacaaaatgtattcaggcctgcccggttgacgccattgttggcgcaacgcgcgccatgcacacggtcatgagcgatctctgtactggctgtaatctgtgcgtcgatccgtgtccgacgcactgcatcgaattacgtccggtgaatgagacgcccgacagttggaaatgggatttgaacaccattcccgttcgcatcattcccgtggaacaacatgcttaa

SEQ ID NO: 369536 - DNA, 582 bp, Salmonella enterica
atgactgattacctgctgctctttgtcggaactgtactggtcaataactttgtactggtcaaattcctgggcctttgtccctttatgggcgtatccaaaaaactggaaaccgccatggggatgggcctcgcgacgacctttgtcatgacgctggcgtcgatatgcgcctggcttatcgacacctggatacttattccgctggatctgatttatctgcggacgctggcctttatcctcgtcattgctgtggtcgtgcaatttaccgaaatggttgtacggaaaaccagcccggcgttataccgcttgttaggcatcttcttaccactgattaccactaactgtgcggttctgggcgtagcgttactgaatattaatctcggtcatcactttcttcagtcggcgctgtacggattttccgccgccgtcggtttttcattagtgatggttctgtttgccgccatccgcgaacgccttgccgtggcggatgtgcccgccccttttcgtggtaacgcgatagcattgattaccgcaggattaatgtctttggcctttatgggctttagtggtttggtgaagttgtaa

SEQ ID NO: 369537 - DNA, 441 bp, Salmonella enterica
atgactacaacaccgccacaacgaattggaggctggcttcttggcccgttagcctggctgttagtcgcgttgttgagcgcctcgctggcgttattactctacgttatggcgcttgccacaccgcaaacgttcaagacgcttagcggacaggaaaccggtaatttactgctatggggcatttcatttattaccgctatcgccatgtggtactataccctgtggttgacgatcgcattcttcaagcgcagacgctgcgtgccgaagcattacattatctggctgctggtgtcggtgttactggcggttaaagcatttgccttttcgcccgtctcagatgcctttgccgtgcgtcagttactcttcccactgttggcgacggcgctcattgtgccttatctcaaacgttcagcgcgcgttaaaacaacgtttgttaatccgtaa

SEQ ID NO: 369538 - DNA, 216 bp, Salmonella enterica
atgactgttcaggattatctattaaaattccgcaaaattagttcgctcgaaagtctggaaaaactgttcgaccaccttaactatacccttactgatgacatggacattgttaatatgtatcgcgctgcagatcaccgccgtgccgaactggtttccggaggacgcctgtttgatgtaggtcaggttccgcaatccgtctggcgctatgtgcaataa

SEQ ID NO: 369539 - DNA, 1041 bp, Salmonella enterica
atgaatgacaaaatccgcgttgggttaatcggttatggctacgccagtaaaacctttcatgcgcccttaattatgggaacgccagggctagagcttgcggcggtatccagcagcgatgaaacaaaagtgaaagcagattggccggcggtttccgtggtctctgagccccgacatttatttaacgatccgcatatcgaccttatcgtgatcccgacgcccaacgatacccatttcccgctggcgaaagctgcgctggaagccggtaaacatgtggtggttgataaaccctttaccgtgacactgtcacaggcgcgagaattggatgcgcttgcgcggagcactggccgggtactttccgtcttccacaaccgacgctgggacagcgattttttgacgctgaaagccttgctggcggatggcgtgctcggcgaggtgtccttgtttgaatcccactttgatcgcttccgtccccaggtgcgcgaccgctggcgcgagcaaggcgggccgggaagtggtatctggtacgatctggcgccgcacttgttggatcaggccattcagctttttggcctgccggtcagcatgacggtggatttagcgcaactgcgtccgggcgcgcaatctacagattatttccacgcgattttatcctacccccagcgccgcgtgattttgcacggtacgatgctggccgcggcggaatccgcgcgatacatcgttcatggttcgcgcggtagctatgttaaatatggcctcgatccccaggaagaacggttaaaaaacggcgagcgtttaccgcaggaagactggggatacgacatgcgtgacggcgtattgaccctggttgagggagagacgcgcaaagaagagaactggcttacgttgccgggtaactacccggcatattatgccgccatccgcgatgcgttaaacggtaacggtgaaaatcccgtgccggcaagccaggcgattcaaattatggagttgattgaactgggcatggaatcggcaaaacatcgcgcgacgctgtgtcttgcctga

SEQ ID NO: 369540 - DNA, 1002 bp, Salmonella enterica
atgattgatattacgcttcctttgactgacatccaccgccaccttgatggcaacattcgcgcccaaacaattctggatcttggtcggcagttcaacatcgcccttcccgcccaaacgctggaaacgctgattccgcatgtccaggtcacctcaaccgaacccgatttagtgagctttctcacgaagctcgattggggggtaaaagtcctggcatcgcttgacgcctgccgccgtgtggcctttgaaaatattgaagatgccgcacgtaacggcctgcattacgtcgagcttcgcttttcgcccggctatatggcgatggcgcatcagttaccgatagcaggcgtggttgaagccgttatcgacggcgtacgcgacggctgtaacacgtttggcgtcgaggcgcgactcattggcattatgagccgtaccttcggcgaggcggcatgtttacaggagcttgatgcgctgctggcgcacagagagaacatcaccgcgctggatttagccggtgatgagctgggctttcccggcagtctgtttttgtcgcactttaatcgggcgcgcgatgcgggctggcatattaccgttcacgctggcgaagccgcagggccggaaagtatctggcaggcgattcgcgaactgggggccgagcgtatcggacatggcgtaaaagctgtcgaagatcgcgcgttaatggattttcttgtacaacagcgtatcggtattgaatcctgtctgacctcgaatattcagaccagtaccgtcgcatcgctggcagatcatccgctcaaaaccttccttgagcatggcgttctcgccagtcttaatacggacgatccggctgttcagggcgtagatattatccatgaatatcacgttgccgcgccagcggcaggattgagccgcgaacagattcgccaggcgcagattaacggtctggaaatcgcctttttgagcgatggcgaaaaacgtgcgctgcgcgaaaaagtggccgcggcgtaa

SEQ ID NO: 369541 - DNA, 237 bp, Salmonella enterica
atggtgctcgtcgtgagcattaggcggcacggaaaacatcgtgagtctggacaactgcatccccccctacgcctgtcagtgaaagatatgtcgtttgtcgatgtccaggcattgaaggacaatcacgcgacaggcatcgtacagctcaatcagcataatttgcaggtaattatcggcccgcaggttcagtcggtaaaagatgaaatggttggcctgatgaataccgttcaggcataa

SEQ ID NO: 369542 - DNA, 1509 bp, Salmonella enterica
atgaaaaaaacactggtagctgcaggtgtagtgattgcacttggcatcgtctggacaggcggcgcctggtatacggggaaaaagctggagaaccatctttcagaaatggtgactcaggccaatgaacagctcaagcgtactgcgccggaggccggtgtcgaattaagttatcaaaactaccagcgtggcgtgttcagtagccatctgcaactggttgtcaaaccggttgccggcgcagacactacctggttgaagcccgggcaaagcattgtgctggacgagtccgtttcacatggccccttcccgctcgcccagctcaaaacgctcaatctgatcccttctatggcgtcggtaaaaaccacgctggtgaataacgatgcggcaaaacccctctttgatatcgcgaaaggcgacacgccctttgttatcaatacccgcattggttatggcggcgatacccgctccgatatctctctcaagccgttaaactacgagaatgccggtgaaaaggtcgcctttagcggcggcgagttccagcttaacgccgataaagacggtaatgtggtttcgctgtcgggcgaagcgcagagcggcctggtcgatgccgttaacgaatataaccagaaggtccaactcacctttaataatttgaaaaccgacggtaccagtaaactggcaagctttggcgaacgtgtgggcgaccaaaagttaacgctggataaactgtccatcgccattgagggtaaagagatggcggtgctggaagggatggaaattgccggcaagtccgatctcgtcaacgacggaaaaaccattaacagccagttggattactcgcttaacagcctgaaagtgcagaatcaggatttgggcagcggtaaattaacgctgaaagtcggtcaaatcgacggcgaagcctggcaccagtttagtcagcaatatcatgcacaaacgcaggcgctgctgaatcagccggacgtggcgcagaatcctgagctttatcagcaaaaagtcactgaagcgttctttagcgctctccccgtgctgttaaaaggcgatccggtactgaccctggcgccgcttagctggaaaaacgccaaaggggaaaccacgctgaatctgtcgctgttcctcaaagatccggcaaccacaacggcacaaccgcaaacgctggcgcaggaagtcgaccgctccgtgaaatcgctggatgcgaaactggcaattccgatggacatggcggtcgagtttatgacgcagatagcaaagctggaaggctatcagcaggatgatgcggaaaaactggcaaaacagcaggtgcaggggctgtccgcaatgggtcagatgttccgactgacaacgctgaaggataatactatcgcctccagtttgcagtacgccaatggccagatcacgctcaacggacaaaaaatgccgttggaagactttgtcggcctgtttgggatgccggcgctttccgtaccggacgttccggcgctgcctcaacaataa

SEQ ID NO: 369543 - DNA, 1176 bp, Salmonella enterica
atgcaaaaactcattaactcagtgcaaaactatgcctggggaagtaaaactgcgttaacggaactttatggcatcgccaatccgcagcagcagccaatggctgaactctggatgggcgcgcatcccaaaagcagctcgcgaatcaccaccgccaacggcgaaaccgtctccctgcgtgacgccatcgaaaagaataaaaccgccatgctgggcgaagcggtagccaaccgtttcggcgaactgccgtttctgtttaaagtactgtgcgccgcgcagccgctctctattcaagtgcacccgaataagcgcaattccgaaatcggtttcgcgaaagaaaatgcggcgggtatccccatggatgccgcagagcggaactataaagatcctaaccataaaccagagctggtttttgccctgacgcctttcctggcgatgaacgcgttccgcgaattttctgacattgtctctttactgcaacctgtcgccggcgcgcattccgctatcgcccactttttgcaggcgccgaatgctgaacgtctgagccagcttttcgccagcctgttgaatatgcaaggcgaagaaaaatcccgcgcgttagccgtactcaaagcggcgcttaacagccagcaaggcgaaccgtggcaaacgatccgcgtgatttcagagtattatcctgacgacagcgggcttttctctcctttgttgctgaatgtggtcaaactgaatcccggcgaggcgatgttcctgtttgccgaaacgcctcatgcttatctgcagggcgttgcgctggaagtcatggcgaactccgataacgttctgcgcgctggccttacgccaaaatatatcgacatccctgagctggtcgcgaacgtgaagttcgaacctaaacctgccggcgagttgctgactgccccggtgaaaagcggcgcggagctggacttcccaattccggttgacgattttgctttttcactgcacgacctggcgcttcaggagacgagcatcggccaacacagcgccgcgattctgttctgcgttgagggtgaggcggtgttacgtaaagatgaacagcgtctggtactgaagccgggtgaatcggcctttatcggcgcggatgagtctccggttaacgccagcggcacaggccgtttagcgcgtgtttataacaagctgtag

SEQ ID NO: 369544 - DNA, 1647 bp, Salmonella enterica
atgtcaaacaaacccttcttttatcaagacccttttcccctcaaaaaggacgataccgagtactacttgttgaccagcgaacatgtttccgtcgccgaattcgaaggacaagagatcctgaaagtcgcgccggaagcgctaacgctgttggcgcgtcaggccttccacgatgcgtcttttatgctacgtcccgcgcatcagcagcaggtggcggatattctgcgcgatccgcaggccagtgaaaacgacaaatatgtcgcgctgcaattcctgcgaaactccgatatcgcggccaagggcgtgttgcccacctgccaggataccggtacggccattattgtcggcaaaaaaggccaacgcgtctggactggtggaggtgatgaagcggcgctggctcgcggcgtatataacacctatatcgaagataacctgcgctattcgcagaacgcggcgctggatatgtacaaagaggtcaataccggtactaacctgccggcgcagatcgatctctacagcgtcgatggcgatgaatataaattcctttgtattgctaaaggcggcggttcggcgaataaaacctacctctatcaggagacaaaagcgcttctgacgccgggtaagctcaaaaattatctcgtcgataagatgcgtacgctgggcaccgccgcctgtccgccgtatcacattgcgtttgtcattggcggcacctcggcggaagcgaacctgaagaccgttaagctggcctcggcaaaatactatgatgcgctaccaaccgaaggcaatgaacacgggcaggccttccgcgatattgagctggaaaaagaattgttgcttgaggcgcaaaatcttggcttaggcgcgcagttcggcggcaaatatttcgctcacgatattcgtgtcatccgattgccgcgtcacggggcatcgtgtccggtaggtatgggcgtgtcctgctccgcggatcgaaacattaaagcgaagatcaaccgggaagggatctggatcgagaagctggagcgcaatcccggtaaatatattcctgaggcgctgcgccaggcgggagagggcgaggcggtgcgcgttgatcttaaccgtcccatgagcgagatactgcaacaattgtcgcagtatccggtatcaacgcgcctgtcgctgaacggcacaattattgtgggccgcgacatcgcgcacgctaaactgaaagaacggatggacagcggcgaaggtttgccgcagtacatcaaagatcatcctatctattatgcggggccggcaaaaacgccggaagggtacgcctccgggtcgcttgggccgactaccgcaggacggatggactcttatgttgatcagctccagtcgcagggcggcagtatgatcatgttggcgaaaggcaaccgcagccagcaggtgaccgatgcctgtaagaaacatggcggcttctacctgggcagtatcggcggcccggcagccgttctggcgcagggcagtatcaagcgcctggagtgcgtggaatatcctgaactgggtatggaggctatctggaaaattgaagtggaggattttccggcctttattctggtggatgataaaggcaacgatttcttccagcagattcagtcatcgcagtgcgcacgctgcgttaagtaa

SEQ ID NO: 369545 - DNA, 1404 bp, Salmonella enterica
atggtaacggtacgccgcgagaaagattcaatgggcgcgattgaagtcccggcagataaactgtggggggcgcagactcaacgttcgctggagcattttcggatttccacggagaaaatgcccgtctcgctcattcacgctctggcgttgaccaagcgcgccgctgcgaaggtcaaccaggacttagggttgttggcggcggaaaaagccagcgcgattatccaggcggctgatgaagtgctggcgggaaaacatgctgatgagtttccgctggcgatttggcagaccgggtccggtacgcaaagcaacatgaatatgaatgaggtgttagcgaaccgcgccagtgaaattttgggcggcgttcgcggtatggaacgcaaggtgcatcccaatgatgacgtcaataagagtcaaagctcaaacgatgtgttcccaaccgccatgcacgtggcggcgttactggcgttacgcgaacaccttatcccgcaattatccgcattaacggatacgcttcgcgataaatcccacgctttcgccgatattgtcaaaattggccgtactcacctgcaggacgcgacgccgctcaccttaggccaggagatttccggttgggtagccatgctggaacataacctcaggcatattgagcacagtttaccgcacgtcgcggaactggcgctcggcggaaccgcagtagggacagggcttaatacccacccggaatatgcccggcgcgtggccgaggaactggcgacgattaccgcggcgccgtttgttaccgccccgaataaattcgaagcgctggcgacctgtgacgcgttggtacaggcgcatggcgcattaaaaggactggcggcctcgctgatgaaaatcgccaacgatgttcgctggctggcgtccggcccgcgctgcggcattggcgagattgctatcccggagaatgagccaggcagttccattatgcctggtaaagtgaatccgacccagtgtgaagcggtaacgatgctatgttgccaggtgatgggtaacgatgtggccatcaatatggggggcgcatcgggcaactttgagctcaacgtctatcgtccgatggttattcataattttctgcaaacggtgcgcctgctggccgatggcatggcgagtttcaatcaacactgtgcgtcaggaatcgagccaaaccgcgagcgtattacgcagttgctgaatgagtcgctgatgctggtcactgcgctcaatacgcacatcggttacgataaagcggcggagattgcgaagaaggcgcataaagaagggctgacgctcaaagcctcagccgtggcattaggataccttagcgacgaggagttcgacgcctgggtacgtccggagttgatggttggcagtatgacgccgggacgttaa

SEQ ID NO: 369546 - DNA, 930 bp, Salmonella enterica
atgtcccgctacgatctcgttgaacgcctgaatggcacttttcgccagatagaacaacacctggcggcgctgacggataatctacagcagcattcgctacttatcgcccgtgtcttttcactgccgcaggtgaccaaagaggcggaacatgcgccgctggatactatcgaggtaacgcaacatctggggaaagaggccgaaacgctggcgctacgtcactatcgccatttgtttattcaacagcagtccgaaaaccgcagcagtaaagccgccgtccgcctgcctggcgttttatgctatcaagtggataatgcgacacagctagatctggaaaatcaggtacagcgcattaaccagttgaaaaccaccttcgagcagatggttacggtagagtccggtcttccctcagcggcacgttttgagtgggtgcatcggcatctacccggcttaattacgctgaacgcttaccgcacgctgacgcttatcaataaccccgccaccatacgtttcggttgggcaaataaacatattattaaaaatttaagccgggatgaggttctgagccagttgaaaaaaagcctcgcgtcgccgcgcagcgtcccgccgtggacgcgcgaacaatggcaattcaagctggaacgggaatatcaggatatcgctgccttaccgcagcaggcccgactcaagattaagcgtccggttaaagtacagccgatcgcccgcatctggtataaaggccagcaaaaacaggtgcaacacgcctgccccacgccgattatcgcattaatcaacacggacaacggcgctggcgtgccggatattggcgggctggaaaactatgacgccgacaatattcagcaccgttttaaaccacaggcgcagccgctgcgactgattattccgcgactgcacctgtatgtggcggattaa

SEQ ID NO: 369547 - DNA, 1302 bp, Salmonella enterica
atgaaaaagctgtttgtgcagttttaccttttgctgttcgtctgttttctggtcatgaccttattggtcggactggtgtacaaattcaccgccgaacgcgcgggcaggcaatcgctcgacgatctgatgaaaagttcgctctatctgatgcgcagcgaactgcgggaaattccgccgcgtgaatgggggaaaacgttaaaagagatggacctgaacctctctttcgatttacgcgttgaaccgttaaatcactataagcttgatgccgccaccacgcagcgactgcgtgaaggcgatattgtcgcgcttgacgatcaatacacctttattcagcgtatcccgcgcagccattacgtcctggcggttggcccggttccctatctctatttcctgcatcaaatgcgactgctggatatcgccttaatggcgctcattgccttttctctcgcctttcctgtgtttatctggatgcgcccgcactggcaagaaatgctcaggctcgaatccgccgcgcagcgctttggcgagggtcatttgactgaacgcctgcacttcgataatggctccagtttcgaacgtctgggcgtcgcgttcaaccagatggcggataacattaatgccctgatcgccagtaaaaaacagctgattgacggtatcgcccatgagcttcgcacgccgctggtacgtttacgctatcggcttgaaatgagtgaaaatctgacaccgccggaatcacaggcgctcaatcgcgatattggtcaactggaagcgctgattgaagaactgctcacctatgcgcgccttgaccgaccacaaaatgaactgatgttgaccgaacccgacctccccgcatggttgctcgcgcatttgcaggatgtgcagagcgtgaccccggaacgtgccgtaaaccttctcacatgtgtaatcggcgattatggcgcgcttgatatgcggttaatgtcgcgagtgctggataacctgctgaataatgcgttgcgctacagtcgtaccaccgttcaggtcagcctgttactcgacggcagtcaggcaacgttgatagtcgaagatgatggccccggcattgaagcggatgcgcgtgagcgcatatttgaaccttttgtcagactcgaccccagtagagaccgggcgacaggcggctgcgggcttggactcgccatcgtacactctatcgccctggcgatgggcggtagcgtcgtctgtgacgagagcgaactgggcggcgcaaaatttagttttcgctggccggtctggcacgcgatgcccgacatgaccgctgcctga

SEQ ID NO: 369548 - DNA, 1701 bp, Salmonella enterica
atgatcagtctcgtcccgcctctgctttccagaaccgcgcttctctttctgctcacggccacaggcgcagccaccgccgcccgcccggcagcggatattattttgcataacggtaatatcatcactctgaatgatgcccagccgcaggccagcgcgctggtgatttccggctcgcggattgtggcgattggcgatgatacggcgacagatgaatggcgcggcgaccatacccgtaccatcgatttacagggtaaaaccgtgatacccggcctgaccgatacccacatccacgccattcgcggcggacaaacctggacattcgaaacctactggtacgacagcccttcgcttaaagacgcgctggataaattacgcgccgacgctaaccgtcgtccccacgatcaatgggtagccgtagtgggatcgtggataccggcgcaatttgcagaaaaccgggcgccgacggtagccgaattgagccacgcccttcccgatcatccggcttatattcagtatctttacgactatgcgttagtgaatcagcgcggtatagacgtacttggccttaacgacacccctcctcctgatttagcgggaatccgcgtagagcgcgacgcaaaaggtagcgccacggggaaattatttggtgacatcgccgcgtttaaccagctttttgccagcataagtagtaacgccgatcgcgagggcggtctgcgacaatttttcgctgatatgaacgctcgcggcgtgaccggcatcattgacccctctgccgggcctgccgccgcttatgagcctttatttgcaatgcgaaaccagggggatttaccgctgcgcgtggggtatcgcattccggtacagccagaagcgaaaggtcatgaagcgcagtggttcagcaacctgatggcctttcgcccggcgcgtgccgatgacgggcaactggcttttcttggcctgggggaaagcctggtggccggaatgaatgacggcgtgcggatggccccagggttttcttcctcagagcaggacaaaaccgcgcttcgccaggtcgcgacatttgcggcaaaacggggaataccgcttgagatccacgcctataccgatgacagcgccgacgcgatattgacgatttttgagcaggtagcgcagcagtacgatctgcgccctctccgctggtctattgcgcatctgaataccggttcgccacagacgcttgagcgaatgcgtaagctgggtctggcatacactgtgcaaatggggccttactttgaggggcttgccatccgtgacgccaatccacccggcgcgacggacaattcgccgccggttcgactggcgctggataaagggcttgtcgtagctggcggtaccgattcgacgcgtattggcattgccggtgtctggcacgctatcgaatatcatatcaccggtatagcgtcaggcggttccgtgcgtaaacccgccagcgagcggctcacgcgtctggaagcgctagcgttatatacacgtcatgccgcctggctcgcctttgccgaacaacaccggggccagcttcgcgtcggaaaacaggccgatctggcggtactcaatcagccatttatgacgatgccggaagacagaattgataccattcgcgctgttttgacgcttgtcgatggacgcattgttcacgaaagtccggaccttaacgccggacaatga

SEQ ID NO: 369549 - DNA, 1152 bp, Salmonella enterica
atgaaaagaaaagtattggcacttgtcatcccggctctgctggctgctggcgcagcacacgccgctgaaatttataacaaagacggcaacaaactggacctttacgggaaagtagacggcctgcactatttctctgatgactcttctaaagatggcgatcagacctatatgcgtgtcggctttaaaggcgaaacgcagattaacgaccaactgaccggttacggccagtgggaatataacgttcaggctaacactaccgaaggcgaaggcgctaattcctggactcgtctggcattcgccggcctgaaattcggcgactacggctcattcgactatggtcgtaactacggcgtcctgtacgacgtagaaggctggaccgatatgctgcctgagttcggcggcgactcctatacttacgctgacaactacatgaccggtcgtgctaacggcgtggccacctaccgtaacactgatttcttcggtctggtagacggtctgaacttcgcgttgcaatatcagggtaaaaatgaaagccaaagcgctgacgatgtaaatatcggtaccaataaccgtaataatggcgacgatattcgttacgataacggtgatggcttcggtatttctactacctatgatattggcatgggcttcagcgcaggcgctgcgtataccacttccgatcgtactaatgagcaagtcaatgctggcggcacgattgctggcggcgacaaagcggatgcatggacagctggcttgaaatatgatgccaacaacatctatttagcgactatgtattctgaaacccgtaatatgacgccttatggtaaaacggatgcgggttatgctggcggcgtagcaaacaaaacgcaaaacttcgaagttacagcccaatatcaatttgatttcggtctgcgcccggcggtttctttcctgatgtctaaaggtaaagatctgacctataacaacgttaatggcgatgataaagacctggttaaatatgctgatgtaggtgctacctactatttcaacaaaaacttctccacctatgttgattataaaatcaacctgctggatgatgacgaccagttctataaagatgccggtatcagcactgatgatatcgtcgcgctgggtatggtttaccagttctaa

SEQ ID NO: 369550 - DNA, 732 bp, Salmonella enterica
atgaaccgcattgtatttgttgaagacgacgctgaagtgggttctctcattgccgcttatctggcgaaacatgatattgatgtcattgttgagccgcgtggtgaccgggcggaggatcttatcctcaccactcagcccgatctggttttactggatattatgcttccaggtaaagatggcatgacgatatgtcgcgatttacgccaccgctggcaaggcccgattgtcctgctcacctcgctggacagtgatatgaatcatattctggcgctggagatgggcgcctgcgactacatcctcaaaaccacgcctccggccgttttgctggcgcgtctgcgcttacacctgcggcaaagcgaacaaacgcaacaggcaaaaagtcttcaggagagcgcgcttacgccgcataaagcgctgcgttttggcgcgttaaccatcgatccccttaaccgggcggtccagctcaatggcgatttcatatcgctctccaccgccgattttgaattgctctgggaactggcgacacacgccggacaaattatggatcgcgacgcgttgctaaaaacgctgcgcggcgtcaattatgatggtctggatcgcagcgtggatgtggcgatttcccgcctgcgtaagaaactgctggatagcgctgctgagccctatcgtataaagaccattcgcaataaaggctatctttttgcccctcatgcctgggacgaaacgacgggataa

SEQ ID NO: 369551 - DNA, 336 bp, Salmonella enterica
atgggactcgtgattaaagctgccctgggggcgctggtcgtcgtattgattggtctgctgtcaaaaacgaaaaattattatatcgccggattaattcctctgtttccaacgtttgcgcttatcgcgcactatatcgtggccagcgagcggggcatcgacgcgatgcgtaccaccatcgtctttagcatgtggtcgatcattccttatttcatttatcttgcaacgctatggtatttcagcggcgtgatgcgcctgcccgtcgcgcttggcggtgcggtggtctgctgggggctaagcgcgtggctgctgattttttgctggattaaatggcattaa

SEQ ID NO: 369552 - DNA, 1383 bp, Salmonella enterica
atggaaaaaaaactgggactgagcgcgctgaccgcgctggttttaagctcaatgcttggcgcaggtgttttcagtctgccccagaatatggccgccgttgccagtccggctgcgttgttaattggctgggccattaccggcgtggggatactcttactggcattcgccatgttaatccttacgcgcattcgctccgagcttgacggcggcatctttacttacgcccgcgaaggcttcggcgaactgattggcttttgttctgcctggggctattggctgtgcgcggtcatcgccaacgtatcctatttggttatcgttttttcagcgctgagtttctttaccgatacgcctgcgctgcgtctgtttggcgacggtaatacctggcaggctattgtcggcgcttcagtcctgctctggattgtccatttcctcatcctgcgcggcgtacaaacggcagccagcatcaatctggtcgcgactctggcgaaactgttgccgctcggcgcgtttattgtgctggctatcatgatgttcaaactggataccttcacactggacttcaccggtgttgaactcggtattcccgtatgggaacaggtcaagaacaccatgcttattacgctgtgggtatttattggcgttgaaggcgccgtcgtcgtctcggcccgagcgaaaaataaacgcgatgtaggccgcgccacgctactggcggttctcgcggcgctgggaatatatctcctggtcacgctgctttctcttggcgttcttgcgcgtccggaactggcggagatgcgtaacccgtcgatggccggactgatggtaaaaatgatggggccgtggggagaaattattattgcagcgggactgattgtgtctgtctgcggggcttatctaagctggactatcatggcggcagaggtgccgtttctggcggcagcctataaatccttcccgggcatcttcgcgcgacaaaatgcgcaaggcgcgccttctgcatcgttatggctcaccaatatctgtgtgcaaatctgtctggtgctgatctggctgaccggttcggactacaacacgctattgacgattgcgtcagaaatgattctggtgccctactttctggtcggcgcatttctgctgaagattgcaacacgtcccctccatcgggcggtcggtatcggagcctgtatttatggcttatggttgttatacgcgtcgggtcccatgcacctgctgctgtccgtcgtactgtacgcgcctggattactggttttcctgtatgcgcgtcggacgcacaagcatgacaacgtgttaaatcgtcaggaagtcgtgctgattggtttattgctggtcgcggcggttccggctacgtggatgctggtgggttga

SEQ ID NO: 369553 - DNA, 945 bp, Salmonella enterica
atgaagcttaagaacactctcctggcgtcggctctgctttctgcggctgctttttctgtccatgcagcaacagaactgacgccggagcaagcggctgcactaaaaccttatgaccgcatcgttattaccggtcgttttaatgctattggcgatgcggtctccgccgtgtcccgccgcgcagataaagaaggcgcagcctccttctatgttgtcgacacctcggagttcggcaacagtggtaactggcgtgttgtggcggacgtgtataaagccgacgcgccgaaagccgacgcgcccaaaaatcgtgtcattaatggcatcgtggaattaccgaaagaccaggccgtacaattagaaccgtatgataccgtcaccgttcagggcttctaccgtagccagccggaagttaacgatgccattacgaaagcggcgaaacaaaaaggcgcatacgctttctatattgttcgtcagatagatgcgaatcagggcggaaaccagcgcatcactgcatttatctataaacaagatgcgaaaaaacgcatcgtccagagcccggacgctattccggcagactctgaagctggccgcgccgcgctggctcagggcggcgaagctgcgaagaaagtcgaaattccaggcgtcgccacgtcagcctcgccgagcgccgaagtaggccgtttcttcgaaacgcaatcctccaaaggcggacgttacactgtcacacttccggatggcacaaaagttgaggagctgaataaagcgacggctgcgatgatggtgcctttcgacagcgttaagttcaccggcaactacggcaatatgacagaaatctcctatcaggtcgccaaacgcgcggcgaagaaaggcgctaagtattatcatattacgcgtcagtggcaggagcgcggcaataacatcaccatcagcgccgacctctataaataa

SEQ ID NO: 369554 - DNA, 1530 bp, Salmonella enterica
atgcgaattggcataccaaaagagcggttacccaatgaaacccgtgtcgctgcgacgccgaaaacggtagagcagctactgaagctggggtttagcgtcgctatcgaaagcggggcgggtcaactggcaagttttgacgacaaagcgtttgcgcaggctggcgcggatattgtagacggcaatgctatctggcagtcggaaattattctcaaggttaatgcgcctgaagaagaggaaatcgctttactgaaccccgggactacgctggtcagttttatctggcctgcgcaaaatcctgggttaatggagaaacttgccgaacgtaaggttacggtgatggcgatggactccgtgccgcgtatttcccgcgcgcaatcgctcgacgcgttaagctcaatggcgaatatcgcgggttatcgcgccattgtagaggccgcgcatgaatttgggcgcttctttaccggccaaatcactgccgccgggaaagtgccgccggcgaaggtgatggtgattggcgcgggcgttgccggtcttgcggctatcggcgcggcaaacagcctgggggcgattgtccgcgcgtttgacactcgtcctgaagtcaaagagcaggtccagagtatgggggctgagttcctcgaactggattttaaagaggaagccggtagcggcgatggttacgccaaagtgatgtccgaggcgtttatcaaagcggaaatggcgctctttgccgcccaggccaaagaggtcgatatcattgttaccaccgcgttgattccgggcaaacctgcgccgaagctgattacccgcgatatggtcgattctatgaaggccggcagcgtgattgtcgacctggccgcgcagaacggcggtaactgcgaatataccgtcgctaatcaggttgtgacgacggacaatggcgtgaaagtgattggctacaccgatctaccggggcgtttgccgacgcagtcatcccaactttatggcaccaacctggttaacctgctgaagctgctgtgcaaagagaaagacggcaatattgacgtggattttgacgatgtcgtgatccgtggcgtgacggtgattcgtgacggcgacattacctggcctgcgccgccaatccaggtttccgcgcagccacaggccgcgcctaaagcagcacctgcgccaaaagagccggaaaagcccgcttcaccctggcggaagtatgcgttaatggcgctggcgatcattctttttggctggctggccgatgtcgcgccaaaagagttcctcggccattttaccgtgtttgcgctcgcctgcgtggttggttattacgtggtgtggaacgtgtctcatgcgcttcatacgccattaatgtcggtgaccaacgcaatttcagggattattgttgtcggggcattattgcaaattggtcagggcggctgggtcagcttcctgagctttatcgcggtgcttatcgccagcattaatattttcggtggcttcaccgtgactcagcgtatgctgaaaatgttccggaaaaactaa

SEQ ID NO: 369555 - DNA, 1389 bp, Salmonella enterica
atgtctggaggattagttacagctgcatacattgttgccgcgatcctgtttattttcagtcttgccgggctttcaaagcatgaaacgtcccgccaggggaataacttcggtattgccgggatggcgatcgcgttgctggcgaccattttcgggccggataccggcaacgtggcatggattctggtcgccatgattattggcggcgcgattggcatccgcatggcgaaaaaagttgagatgaccgagatgccggagctggtcgcgattctgcacagtttcgtgggcctggcggcggtactggttggctttaacagctatctgtaccatgacgccagtctggcgccggtgctggtgaatattcatctgaccgaagtcttcctcggtatctttattggcgcagtcactttcactggatcgatcgcagcgtttggtaaactgcgcggcaaaatctcttctaagccgttgatgttgcctaaccgtcacaaaatgaacctggcggcgctggttgtttctttcctgttgctgctggtttttgtccgcaccgaaagcgtgggtctacaggttctggcgctgctgctgatgaccattatcgcgctggcgtttggttggcatctggtcgcctctatcggcggggcggacatgccggtggttgtttcaatgctgaactcctattccggttgggctgccgcggcggctggcttcatgttgagcaacgatttgctgattgtgaccggcgcgctggtcggttcgtcaggcgcgatcctgtcttacattatgtgtaaagcgatgaaccgctctttcatcagcgttattgctggtgggttcggtactgacggctcctcaacgggcgacgatcaggaagctggcgaacatcgcgaaatcacggcggaagagaccgctgagatgctgaaaaactcccactccgtcattattacgccggggtacgggatggcggtggcgcaggcgcagtatccggtggcggaaatcaccgaaaaactgcgtgcgcgcggtatcaatgtgcgtttcggcattcatccggtggcgggtcgcctgccggggcatatgaacgtgctgttggcagaggcgaaagtgccttatgacatcgtgctggaaatggacgaaatcaatgatgatttcgccgataccgataccgtgctggtgattggcgcgaacgatacggtgaacccggcggcgcaagacgatccccgcagcccgatcgccggtatgccggttctcgaagtgtggaaagcacagaatgtcgtggtctttaagcgttcaatgaatactggttatgctggtgtgcagaacccgctgttctttaaagagaatacgcaaatgctgtttggcgatgccaaagccagcgtggatgcaattctgaaagcgctttaa

SEQ ID NO: 369556 - DNA, 1035 bp, Salmonella enterica
atggcaaaaccgatcatcacgctcaatggtctaaaaatcgtcattatgctgggaatgctggtggttattctgagcggtatccgcttcgccgcagatatcattgttccctttattttggcgttatttattgcggtcgttctcaatcccgttgtgcaacggatgacccgatgtcgaattccgcgcgttatcgccgtgtcattgctcattgtgattattgtcatgctaatggtactgctactggcctatttggggacatcattaaatgaactggcccgtaccctaccgcagtatcgctcctcattggtgataccgttgcaacgtatcgaaccgtggttgcagcgagcaggcattggcgtgtcggttgatgagctggcgaaatatatcgatccaaacgccgcaatgactctggtaacgaacctgctcacccagctgtccaatgccatgtcgtccatctttttattgttattgaccgtggtatttatgctgctggaggttccacaattgcctgaaaaactgcagcagatgatgagccgtccggtggagggcatggcggcaattcaacgcgcgcttgatagcgtttcccattatctggtgctaaaaacagcgatcagtatcgtgacgggactggtcgcatggggaatgctggccgcgctggatgtccgcttcgcctttgtctggggactactggccttcgcgctgaactatattcctaatattggatcggtgctcgctgccctgccgcccattattcaggtgctggtatttaacgggttttatgatgcgctgctggtgctggcaggctatctgctgattaatctggtcttcggcaatatccttgagccacgaatcatgggacgtggtttaggcctttcaaccttagtggtatttttgtcgttaattttctggggctggctattaggtccggtgggcatgctgctctccgttccgttaaccatcattgtcaaaatcgccctcgaacagaccaccggcgggcagagtatcgccgttctgcttagcgatttaaacaaaagataa

SEQ ID NO: 369557 - DNA, 363 bp, Salmonella enterica
atgttttactggattttattagctctggctatcgcgactgaaattaccggcacgctctcaatgaaatgggctagcgtgggtaatggcaatgcgggttttattttaatgctggtgatgatcacgctgtcatatatatttctttcttttgcggtaaaaaagattgccctgggtgtagcgtatgccttatgggaagggatcggcattttatttattaccatttttagcgtgctgctatttgatgaagcattatcaaccatgaagattgccggcttgctgacgctggtcgccggcatagtattgatcaaatcagggacgcgtaaacccggcaaaccggtgaaggaggcgactcgtgcaacaatttga

SEQ ID NO: 369558 - DNA, 330 bp, Salmonella enterica
gtgcaacaatttgaatggatacacggcgcctggcttgggctggcaataatgctggaaatcgcggctaacgtactgttgaaattttcggacggctttcgccgtaaatgctatggcatcttatcgcttgccgctgttctggccgccttcagcgcgctttcccaggcggtaaaagggatagacctgtcggtggcgtatgcgttatggggcggttttggtattgccgccacgctggcggcgggctgggtgctcttcggccagcgcttaaaccccaaaggctgggttggcgtgatattgctgctcgccggaatggtcatgatcaaatttgcctga

SEQ ID NO: 369559 - DNA, 822 bp, Salmonella enterica
atgcataaaaccattgctgtattactgggcatagtgtgttttttaccggttatggcgaaagccaggggggctgaaacagacgccacggatgccagcgacgtcaaaacgcttttttttaaccatgatgatcgggtgcccgtcgccgatcctacccaatcgccgtgggatgccatcgggcaactagagaccgccagcggtaatttgtgtacggcaacgcttatctccccgcatatcgccctgacagcaggtcactgcctgctaacgccaccgaaaggaaaaccagacaaggcggttgcgctgcgttttgtggcgcgaaaaggagtatggcgctatgaaatccacggcattgaaggccgcgttgaaccgtcgctgggccgacgcctgaaagcggatggcgatggctggattgtgccgcctgccgcggcaagctgggattttggtctggtaatattgcgctacccaccttccggtatcacgccagtgcctttatttaccggcgataaagcggcgctcactgcggcgttgaaagccgcagaccgaaaagtcacgcagtccggttatccggaagatcatctgaatgcgctctattcccatcaggattgcgtcgtgaccggctgggcgcagaatgccgtactctcacaccagtgcgacacgttacctggcgacagcggctcgccgctcttattgcacacggatagcggatggcagctcattggcgtacaaagctccgcccctgcggctaaagatcgctggcgcgccgataaccgcgctatatccgtcaccggctttcgcgataagctgaaagctctggcgcaggattaa

SEQ ID NO: 369560 - DNA, 249 bp, Salmonella enterica
atgaaaaaagtattagctctggttgttgccgctgcaatgggtctctcttccgcagcattcgcggctgagactgcaacgcctgcgaaaaccgcagcgcctgccaaaacaacccagaacacccagcaccacaaaaaacagcataaaaaaaccgttgagcaaaaagcgcaggcggctaaaaagcaccagaaaaaaggtggtaaagcgccagccaaaaccccgtcaaaaccaactactcaaccggctgcgtaa

SEQ ID NO: 369561 - DNA, 1254 bp, Salmonella enterica
gtgagtcgtacaactattctcgatgacgccacggcgagcgatatcgatgaacaacgccattctcagccggttcaatttattaaacgcggtacagcgcctttcatgcgcgtcacgctggcccttttttccgcgggcctggcgactttcgcgctcctttattgcgttcagcctatactaccggtactttcccaggagtttggcgtctcccccgccagcagcagcgtttcactttctatttctaccgccatgctggctatcggcttactttttaccggcccgctttctgatgcgataggccgtaaaccggtgatggtcaccgccttgttattagcctcctgctgcacattgttatcaaccatgatgaccagctggcatggtattctgattatgcgcgcgctgatcggtctgtcgttaagcggcgtcgccgcggtgggaatgacctacctgagcgaagaaatccatcccagctttgtcgctttctctatggggctttatattagcggtaattccatcggcgggatgagcgggcgtttattaagcggcgtcatgaccgacttttttaactggcgcatcgcgctggcggccatcggatgctttgcgctggcgtccgcgctgatgttctggaagattttacccgcctcgcaacatttccgtcccacgtcgctacggcctaaaacgctatttattaatttccgtctccactggcgcgatcgggggttacctctgctgtttgcagaaggttttttactgatgggcgcgttcgtcaccctgtttaactacattggttatcgcctgatgctctccccctgggaattaagccaggccgtggtcggactgttatccgtagcctatctcaccggcacatggagctcgccgaaagctggcgccatgacctcacgctatggccgggggccggtgatgctgttctctaccgcagtaatgctgggtgggcttttactgacgctttttacctcgctttggctgatttttgctgggatgctgcttttttccgccggctttttcgccgcgcactccgtggccagtagctggattggcccgcgtgcgcgtcgggcgaagggacaggcctcgtcactttatcttttcagctattatctggggtccagtattgccgggacgctaggcggtgtattctggcatagttacggctggaacggcgtaggtggttttatcgcgctaatgctggtgctggccatcctggtcgggacgcggttacatcaccgtcttcatgcctga

SEQ ID NO: 369562 - DNA, 900 bp, Salmonella enterica
atgaatatcgaattacgtcatttacgttactttgtggcggtagcagaagagctgcattttggtcgcgccgccgcgcgcctcaatatctcgcagccgccgctgagtcagcagatacaaattctggagcagcaggtcggcgcgcgattactggcgcggactaaccgcagcgtagcgttaaccgccgccgggcgacagtttctggtggatagccgacacatcctgagtctggtaaacgacgccgccgctcgcgccgagcggttgcatcagggcgaagcgggtgaaatccgtattggctttacgtcttcagcgccttttattcgggcggtatcgcataccttttcgctgttccgccagtcctatccgggggtgcatatgcaaacgcgtgaaatgaatacgcgtgagcaaatcgcgccgctcaacgaaggcgtactggatattggcttactgcggaatacgccgttgcccgacacacttaatcgcgaggtgattttgcatgagccgcttatggccatgatcccgcgcgaacatcggctggcgcaaaagccggtcgtcagtctgacagaactggcggaagaacctttcgtctttttcgatccgcatgtcgggacgggcctctacgacgatatcctcggcctgatgcggcgctataacctgtcgccgaccatcacgcaggaggttggcgaggcaatgaccattatcggtctggtagcggcgggactgggtgtctcgattctgccggcatcctttaagcgtgtacagatgagcgagatgcgctgggttcccctggcggaagaggacgccgtatctgaaatgtggctggtatggccaaagcatcatgaacagagtcatgccgtacagcggttttgccaactgctattactggctgcccgacgggattaa

SEQ ID NO: 369563 - DNA, 1221 bp, Salmonella enterica
gtggttgctgatagtcagcctgggcatatcgatcaaattaagcagaccaatgctggcgcagtgtatcgcctgattgatcagctcggaccggtatcgcgaattgacctgtctcgtctggcgcagttggcgcctgccagtattacgaaaattgttcgcgaaatgctggaagcgcatttggttcaggaacttgaaattaaagaggcgggcagtcgcggacgtcccgccgtagggctgatggtggaaacggaagcctggcactatttatctattcgtattagccgtggcgaaattttccttgcactgcgcgatcttagcagcaaactggtggtagaagagtgtctggcgctgccgttaaacgaagctacgccgttgcttgagcgaattattacgcacgttgatcggttttttacccgccatcagcagaaactggagcgtctgacctccattgccattacgttaccgggcattatcgataccgaaaacggcgttgtgcaccggatgccgtattacgaagatgtcaaagagatgcctttgggagatgcgctggagcggcacaccggcgtaccggtttacattcagcatgatattagcgcctggacgatggcagaggcgctttttggcgcctcacgcggcgcgcgcgacgttatccaggtggtgattgatcataatgtgggggcgggcgttatcaccgacggtcatttgcttcatgcgggtagtagcagtctggtagagattgggcatacccaggtcgatccttatggtaagcgctgttattgcggtaatcatggctgtctggagaccatcgccagcgtcgatagcgtgctggaacttacgcagcttcggcttaatcagtcgatgagttcaatgttgcacggccagccgttaacggtagattcactgtgtcaggcggcgatgcagggagatctattagcaaaagatattattagcggcgttggcgcgcatgtcggacgcattctggctatcatggtgaatttatttaatccgcaaaaaattcttattggttcgccgctaagtaaagcggctgatatcctttttccagccattgctgacagtatccgtcaacaggcgctgcccgcctacagcaggaatacggttgtggaaagcacgcagtttaccaaccagggtacgatggccggggcggcgttggtaaaagacgcgatgtataacggctctttgttgattcgtctattacagggttaa

SEQ ID NO: 369564 - DNA, 696 bp, Salmonella enterica
atgctgaagcgtttctttattacaggtacagacacttctgttgggaagacggtggtttcccgcgcattactacaagcgttagcgtcgagtggtaagagcgttgcagggtataaacctgtcgctaaagggagcaaagagactgcagaagggatgcgcaacaaagatgcgctggtattgcaaagcgtctcttcgctggagttgccgtatgaggcgattaatccgatcgcgttaagcgaagaagaaagcagcgtcgcgcatagctgtcctataaattacaccttgctgtccaacggtctggcgagcctgagcgataaagtggaccacgttgttgtggagggcactggtggctggcgtagtttgatgaatgatttacgtccattgtctgaatgggtggtacaggaacagttaccggtattgatggtggtagggattcaggaggggtgcattaatcatgcgctactgactgcgcaagctgtcgctaatgatggactgcccttaattggctgggtggcgaatcgtatcaatcctggcctggcgcattatgctgaaattattgatgtgcttgggaaaaaactgccagcgccgctgattggcgagctaccgtacctgccgcgcgccgagcagcgtgagctggggcagtatattcgtttgtcaatgctcggcagcgtgctggcggtagatagaatcatggcgtaa

SEQ ID NO: 369565 - DNA, 1254 bp, Salmonella enterica
atgtttcgtcgcctgctgatcgctacgctcatcggtattctcgcggcgctggctgtcgccgccttccgtcatgcgatgcaattgctggagtggattttcctgagtaatgacaccggcagtctggtgaatgcggctgaggggctttcgccctggcgacggctgattacgccagcgcttggcggcctggccgctggtctgttgctgtgggggtggcaaaaaatgaaccaacagcgcccccatgcgcccactgactatatggaagcattgcaaaccgacgggcaatttgacgttggcgccagtctggtgaaatcgctggcctcgctgctggtcgtggtcagcggcagcgcaattggtcgcgaaggcgcaatgatcctcctcgccgcgctggcggcatccagctttgcccgacgcttcacgccgcgtgaggaatggaaattatggatcgccagcggcgccgctgcgggcatggcgggcgcttaccatgcgccgctggcgggcagcctgtttatcgcggaaatcctgttcggtaccttaatgctggcttccctcggcccggttgtcgtttccgccgtcgtcgccctgctaaccacccatctattaaacggtagcgattcactactctataccgtacatctgaccgttgatctccacgcgcgggagtacgtcatgatagtcagtaccggcctggtcgccggtctgtgcggtccattactgatgtggctgatgacggccagccataatagtttcttacgcttaaaactgtccccgccctggcaactggcgttgggcgggcttattgtcggattactgtcgttactcacgcccacggtatggggaaacggctatagcgtcgtacaatcatttttgctctctccgccgctattctcgctgattggcggaatttttgcgtgcaaaatcctggcggtgctcgccagcagcgggtctggcgcgccgggcggcgtctttacgccaacattatttgtcggattatcaattggaatgtttctgggtcggatatggggattctggctgccaggctcggatgaaatagcgattttattggggctggcgggtatggcgacgctactggcggcgacaacccatgcgccgataatgtccaccctgatgatttgtgaaatgaccggcgagtatcagttactccccggtctgctgattgcctgtgtagtcgcgtcagtgctctcgcgaacgttacgccatgattctatctaccgccagcacgctgccgagcattga

SEQ ID NO: 369566 - DNA, 1149 bp, Salmonella enterica
atgataaaactggaaaatctcaccaaacaatttgtacagaaaaagggtcagccgctaaaagccgtcgacaacgtcaacctgaacgtgccggaaggcgaaatgtgcgtcttactcggtccctccggctgcggcaaaaccaccacgttaaagatgatcaaccggctgatcgcgcccagcagcggtaatattcttatcaacggcgagaataccaacgatatggatacggtaacgctacgccgcaatattgggtatgttatccagcagatcggcctgtttcctaatatgacgattgaagaaaatattaccgttgtgccgcgcatgttgggttgggacaaagcgcgctgtaagcaacgcgccgaagagttgatggacatggtggcgctggatgccagaaaatttctgcatcgctatccaaaggagatgtccgggggacagcaacagcgtattggcgtgatccgcgctctggccgccgatccgccggtactgctgatggatgagcccttcggcgcggtggaccccattaaccgcgaagtgatccagaaccagtttctggatatgcagcgtaagctaaaaaagaccgtgatgctggtcagccatgatatcgacgaagcgctaaagctcggcgaccgtatcgccgtgttccgtcaggggcgaattgtacagtgcgccagtcctgatgaactgctggccaaaccggctaacgagtttgtcgggtcgtttgtcggtcaggacagaacgttaaagcgtttgctactggtctccgcgggcgatgttaccgaccaacagccaaccattaccgcgcggccttccatgccgttaagcgaggcattcggcattatggatgatcacgatattcgcgccattaccgtcattgacaacgacggtaagccactgggatttgtgaagcgccgggaagcgcggaacgccagcggaatctgcgccgatatcacccatcctttccgtattacgggcaaagcggaagataatctgcgtattgtgctgtccagattgtacgaaagtaatactagctggatgccgatcgttgatgaagacggacgctataacggtgaaatctctcaggattacatcgccgattatctcagctcaggccgcacgcgtcgggcgctaaatattcacgaaagcagctaa

SEQ ID NO: 369567 - DNA, 648 bp, Salmonella enterica
atggatacgatacattatatgctggataatgcaggctatctcgccagccttacctttcagcatctctggctggtcgcgctggccgtcggtctggcgattatcatcggcgtaccgttaggcgttttgattgtacgccacaaatggctggcaatgccggtattgggcgccgccacgctacttcttaccattccgtctatcgcgctgtttggattaatgatcccgctcttttcgctgatcgggcatggtattggcgttctgcccgctgtgacggccgtttttctctactctttactgccgattgtccgtaatacccatactgcgcttgatagtttgccgcccggtctgcgtgaagcgggacgcggcatcggtatgactttctggcaacggctgcgctgggtcgaaatcccaatggccctaccggttattttcgggggtatccgcaccgcggtagtgatgaatatcggcgtgatggcgattgccgcggtgatcggcgctggtggtctggggctgctactgttaaacggcattagcggcagcgatattcgcatgttaattgccggcgcgctaatgatctgtctactggcaattgtacttgactggctgttgcatcgtctgcaagtcgtactgacacctaaggggatacgataa

SEQ ID NO: 369568 - DNA, 903 bp, Salmonella enterica
atgagattcaaaaaacacctgttgggatggcttgccgcaacgctgttgttcagtagccagacgcaggccgcgccgctggttctcgccaccaaaagctttaccgagcagcatattctttccgctatgaccgttcagtatttgcagaagaaaggctttcaggttcagccgcaaaccaatatcgccgcggtgatttcacgtaatgcgatggtgaataaacaaattgatattacctgggaatacaccggtacatcgctgattattttcaaccgtatcgataagcgcatgagtccacaggaaacctacgacacggtaaaacgcctggatgcgaagctgggcctggtatggctcaaaccggctgacatgaacaatacttacgcgttcgcgatgcagcgcaaacgcgccgagtcggaaaatatcaccaccatctcgcaaatggtggcaaaaatcgaacaggtccggcagaacgatcctgaccacaactggatgctcggtctcgatctggaatttgccgggcgcagcgatgggatgaagccccttcagcaagcctaccaaatgcagcttgatcgcccgcaaatacgacagatggacccagggctggtctataacgccgttcgggatgggctggttgacgccgggctggtctataccaccgacggacgggtgaaagggtttgatctgaaagtgctggaagatgataaaggcttctttccaagttacgctgtcacgcccgtggtgcgtaaagaggtgctggaagccaatcctggccttgatgacgccttaaacaccctttccggcctgctcaataacgatgtgatatcgaccctaaacgcccaggtcgatatcgagcatcgcacgccgcaacaggtagcccatcaatttttgcaggacaaaggtctgctgtaa

SEQ ID NO: 369569 - DNA, 711 bp, Salmonella enterica
atgcacaccctcaccctaaaacgtgtacttgggttcactatcgtcattttgctgttactggcgctgtttatctggggaatcggtctggagacgctgaaagcgcgtcaggtcgatctgctgtatctcgggcaacggcatttgatgctggtctttacgtccatgttttttgctttactggtcggtatcccgagcgggattttactcagccgacctgcggcaaaaggatttgctgaatatgtcatgcaaatctttaatgttggtaataccttgccgccgctggccgttctggccttagcgatggtgattatcgggatcggcgatacgcccgccattgtcgcgctatttctggcctcccttctgcctatcgtccgcaatacctatgcgggcctctgttccgttcccgcctcactgattgaagcggcgaacgggattgggatgacaaaatggcagcggcttcgtcaggtagagctacctaatgcgtggccagtgatgctgtccggtattcgcatcgcgaccgccatcaatgtcggcaccgcgccgctggcctttctgatcggcgccagcagctacggcgagctgattttcccgggaatttatctcaacgattttccgacgttgatcctcggcgcaacggccacggcgttattcgcgctgattcttgacactctgcttgcctggtttgggcgacgccttagccctcataccgtctga

SEQ ID NO: 369570 - DNA, 615 bp, Salmonella enterica
atgaccacttttttacaacgtgatgatttttcagtaacggcgcgtgttcttggcgcgttgttttattattcgccggaaagccacgaaaccgctcctctggttcaggcgctattaaccgacgactggcaggcgcagtggccgcttgatgccgaggcgcttgcgcctgtggcggctatgtttaagacccacagcgaagagtcgttgccacaggcctggcagcgtctgtttatcggcccttacgctctgccgtctccgccgtggggttccgtctggctggatcgtgagagcgtattatttggcgattctacgctggcgctacgtcagtggatgcgcgaaaacggaattcagtttgaaatgcaacaaaacgagccagaagatcattttgggtcgctgttgctgctggcggcctggcttgccgagaatgatcgtcatcatgaatgcgaacaactcctggcctggcatctgtttccgtggtcgtcccgctttctggacgtatttatcgatcatgccgggcatccgttttatcaggcgttggggcaactggcgcgtctgactctggcgcaatggcaagctcaacttattattcccgtcgctgtaaaaccgttattccgttaa

SEQ ID NO: 369571 - DNA, 858 bp, Salmonella enterica
atgggaagtggatggcatgaatggccgttgatgatcttcacggtctttggtcagtgcgtggtcggcgcgttaatcgttagcggactgggctggctgacggcaaaagacgataccatcgcccgtcagcgcatcgtgcgtagcatgttttttctgtggctggtgatgggactaggattcctcgcgtcgattatgcatctcggctcgccgatgcgcgcgtttaactcgcttaaccgcgtaggcgcttccgcactgagtaatgaaatcgccgcaggatcggtgttctttgccgtaggcggcatctggtggctggtggcggtactcggtaaaatgcccccggcgctgggtaaagtgtggctgctggtcagtatggcgctcggcgttgcattcatctgggcaatgacgctcgtttatcagatagataccgtgccaacctggtataatggctacaccacgctggcctttttcctcacggcattcctgtgcggcccggtgtttgcggcgctactgctacgcatcgcgcgcgtcccattttgcagcgtgacgtttgccagtattagcggcctagcattggtggtgtgcgtggcggtcatcgtactacaaggactgtctctctcaaccattcacagttccgtgcaacaggccagccatctcgcgccggattacggtatgctacaggtctggcgcattgtcttgcttgccgccggattaggctgctggctatgtccgctaatccgtcgccgcgaaccgcataccgttggtttgctgctcggtgtcgtgctggtgctggcgggcgaaattattggccgcggacttttttatggcctgcatatgaccgtaggtatggccatcgcaggttaa

SEQ ID NO: 369572 - DNA, 618 bp, Salmonella enterica
atgacaacccagtatggattttttattgattccagtcgttgcaccggttgcaaaacctgcgaactggcctgcaaggactacaaagatctcactcccgacgtcagtttccggcggatatatgaatacgcaggtggcgactggcaggaagataacggcgtctggcaccagaacgtctttgcctattatctctccatttcatgcaaccactgcgaagacccggcctgtaccaaagtctgcccgagcggcgcgatgcacaagcgcgatgacggttttgtggtggtgaacgaagaggtctgtatcggctgccgctactgccacatggcctgcccgtacggcgcgccgcagtacaacgccgccaaaggtcatatgactaagtgcgacggctgtcatgatcgcgtcgccgacggcaaaaagccgatttgcgtggagtcctgcccgctgcgggcgctggactttggcccgatagacgaactgcgtaaaaaacacggagagctggctgccgtcgcgccgttgccgcgcgcgcatttcacgaagccgaatattgtgattaaaccgaacgccaacagccgcccgaccggggacactaccggttatctggccaatccgaaggaggtataa

SEQ ID NO: 369573 - DNA, 2409 bp, Salmonella enterica
atggcggccagtatcagccgacgaagcctggtgaaaacctccgctatcggtagccttgcgcttgccagtagcgctttcacccttccgttctcccgcatcgcacacgccgcagcagacctcgcatccggcaatgtggcagaaaaagcggtctggagttcatgtaccgttaactgcggcagccgctgcctgctgcgcctacacgtaaaagatgacaccgtatattgggttgaatcagataccacgggcaacgatgaatatggcaaccatcaggtacgcgcctgcctgcgcggccgttctattcgtcgccggatgaatcatcccgatcgcctgaaatatccgatgaaacgcgttggtaaacgaggagaaggcaaattcgaacgtatcagttgggatgaagcgttggataccatcggcgataacctgaaacgtatcctcaaggactacggcaacgaagcggtacatgtcctttacggtaccggcgtggacggcggcaatattaccaattctaacgtaccgtatcgcctgatgaacgcctgcggcggctatctcagccgttacggtagctacagcaccgcccaaatcagcgcggccatgagctatatgttcggcggcaacgacggcaacagtccggatgatatcgccaatacaaaactggtggtgatgtttggcaataaccccgcggaaacacgtatgagcggcggcggcgtgacatactatgtcgaacaagcgcgcgagcgctccaacgcccggatgatcgtgattgacccgcgttataacgacactgccgccggccgcgaagacgagtggctgccgattcgccctggtaccgatggcgcgctggcggcggcaatcgcctgggtgctgattaccgaagatcttattgataaaccgtttctggataaatactgcatcggctacgacgaaaccactctgcccgcctcggccccgcgtaacgcgcactataaagcctatattttgggtcagggcgacgacggtattgctaaaacaccgcaatgggccgcgcagattaccagtattccggcggaaaaaatcattcaactggcgcgggaaatcggctcggcgaaaccggcttacatttgccagggctggggaccgcaacgccactctaacggggagcagaccgcacgcgcaatcgccatgctgtctgtactcaccggtaacgtcggcataaatggcggtaattccggcgtgcgcgaaggcacctgggatctgggcgtcgaatggttttctatgctggagaacccggtaaaaacccagatttcggtctttacctggaccgacgctatcgatcatggcgcggaaatgaccgccacacgcgacggcgtgcggggaaaagacaagctcgacgtgccgatcaaatttttgtggtgctacgccagtaatacgctgatcaatcagcatggcgacatcgcccacacccacgaggtgcttcaggacgacagtaaatgtgaaatgatcgtcggcatcgagcactttatgaccgcgtcggcaaaatattgcgacattctgctgcctgatttaatgccgaccgagcaggaagatctgatttcccacgaatccgcaggcaatatgggctatgtcattcttggtcagcccgccacctcgccgaaatttgaaagaaagcccatttactggacgctcagtgaagtggctaaacggcttggtccggacgtataccagaccttcacagaaggccgcacgcagcatgagtgggtcaaatacctgcacgcaaaaaccaaagcgcgtaacccggaaatgccggattacgaagagatgaaacagacagggattttcaagaaaaaatgcccggaggagcactacgtcgctttccgctcattccgcgaagaccctgccgccaacccactgaaaacgccgtccggtaaaatcgaaatctattccgagcgtctggcaaccctcgccaacacgtgggagctgaagaaagatgagattatccatcctttacccgcctatacgccaggctttgacggttgggacgatccgcttcgtcagcgctacccgctacagctaaccggcttccactataaagcgcgtacccactccagctacggcaatatcgacatcctgcaacaggcgtgtccgcaggagatctggatcaacccgattgatgcgcaagcgcgcggcattcagcatggcgacaccgtgcgggtctttaaccagaatggagagatgctcattctggcaaaagtcacgccgcgcatattgcctggcgtcaccgctatcggccagggcgcctggttaaatgccgacatgtttggcgacaaagtcgatcgcggcggctccattaacattctgacgtcgcaccggccttccccactggcgaaaggtaatccgtcacacagtaatcttgttcaggttgaaaaggcgtaa

SEQ ID NO: 369574 - DNA, 2439 bp, Salmonella enterica
atgcccggagaaaagcaacaaacaggcgttagccgcaggacgttagtgaaatcagcggcgcttggctcactggcgctggctgccggaggcgtatctttaccgtttgggatgcgtaccgcggccgcggcggtgcagcaggctatgcgcaacgaagaagataaaatcgtctggggcgcctgttcggtcaactgcggcagtcgctgcgccctgcgtctgcatgtaaaagataatgaagtctggtgggttgaaactgataacactggcgacgatgtctacggcaatcatcaggttcgcgcctgcctgcggggccgttcaatccgtcggcgtattaaccatccggatcgccttaactatcccatgaaacgcgttggccgccgcggcgaaggcaaatttgaacgcattagctggcaggaagcactggacaccattagcgccagcctgaaaaagaccgtagagacctacggcaatgaagccgtttatatccactattcatccggcatcgtaggcggcaacataacccgctcgtcgcctgccgcctcgccggtgaagcgtttgatgaactgctacggcggttcgttgaatcaatacggctcatacagtaccgcgcaaatttcttgcgccatgccctacacctatggttccaacgacggcaacagcacatctgatatcgaaaacagtaaactggtggtcatgttcggcaataatccggctgaaacacgcatgagcggcggcggcattacctggtttctggagcaagcgcgtgaacgctcaaatgcgcgcatgatcgtaatagatccgcgctataccgataccgctgccggacgtgaagacgagtggataccgattcgccccggcaccgatgccgcgctggtggcgggaattgcctgggtattgattaacgaaaatctcgttgaccagccttttctcgataactattgcatcggctacgatgaaaagacccttccggctgacgcgccccccaatggccattataaggcttatattttgggccagggcgaggacggtatcgccaaaacgccgcagtgggcatcgcatattaccggcatccccgccgatcggattatcaaactggcgcgcgagataggcagcgtcaagccggcctacatctgtcagggttggggcccgcagcgtcaggcgaacggcgaacaaaccgctcgcgccatcgccatgttaccgattctgaccggcaacgtcggcattcatggcggtaatagcggcgcacgcgaatccacttacaccattaccattgaacgtctgccggtcctggagaatcccgttaaaaccaccatctcctgctttagctggacggacgccattgcgcgcggcccggaaatgaccgccctgcgcgacggcgtacgcggcaaagataagctggatgtcccgatcaaatttctatggaactacgctggcaacaccctgattaatcagcattcggatattaataaaacccatgaaattcttcaggatgaaacgaaatgcgaaatgattgtggtcatcgacaattttatgacctcttccgcgaagtacgccgatattttactgccggatctcatgaccgtcgaacaggaagatatcatccccaatgattacgccggcaatatgggatatctgatttttatccaaccggcgacgacgcctaagtttgaacgcaagcccatctactgggtactcagcgaaatcgccagacgcctcggcgacgatgtgtatcagcggtttaccgaaggccgtacacaggcgcaatggctgcaatatctgtacgccaaaatgcaggcaagagatccggcattgcccgcgtatgacgatctgaaaaaaatgggcatctataaacgcaaagatcccaacggccactttgtcgcctataaaaaatttcgtgaagatccgcaggccaatccgttaaaaacgccgtccggtaaaatcgaaatctactcaagcaaactcgctcacatcgccagtacctgggagctggcggaaggcgacgtgataagcccactgccgatttatacccctacttttgaaggatgggacgatccgaagcggagcaccttcccgctacagctgtttggctttcactataaatcccgtacccattcaagctacggcaatattgatgttctgcaggccgcctgtcgccaggaggtgtggataaatccgctcgatgcgcaaaaacgtggtatcgcgaatggcgataaggttcgcgtctttaacgatcgtggagaggtgcgtctacccgccaaagtcacgccgcgtattctgccgggcgtcagcgcgatgggtcagggcgcatggcataatgcggatatggctggcgataaaattgaccacggcgcctgcatcaatacgctcacgacgctgcgtccttcccccctggcaaaagggaatcctcaacatacaaatctggtggaaatcgaaaaaatctaa

SEQ ID NO: 369575 - DNA, 306 bp, Salmonella enterica
atgaaaatcgcaactgcaatagccgctctggcgttagttagcgccccctcgctggtgatggcggcaccgggatcgtgcgagagagtaaaaagcgatattgaacaacgtatcatcaataacggcgtgccggcggataattttacgctcactatcgttcctaacgaccaggccgatcagccggactcacaggtggtgggccattgcgcgaacgacacgcataaaattctttatacccgcaccagcagcggcaatgcgccagccaatacctctcccgctcaggacggttcatccgccgaaccgcaataa

SEQ ID NO: 369576 - DNA, 720 bp, Salmonella enterica
gtgatacgtgtgaagaaaccccttttactgacgttattgtgcatgatactggcaggttgtgataacccgaaatcccttgagtcttttacgccggaaatggccagtttttcgaacgaatttgattttgatccattacgtggtccggtaaaggatttcagccagacattgatgagtgagaatggcgaagtggcgaagcaggtcaccggtacgctttcacaggaaggctgttttgatacgcttgagttacacgatctggagaataatacggggctggcactcgtgctggatgccaattattaccgggatgctcagacgctggaaaaaaaggtgcagttacaggggaagtgccagctggcggcgttgccttcggcgggcgtgacctgggaaacggacgacaacggttttgtggtatcggcgacgggcaaagagatgaaggtcgagtaccgctatgatagcgaaggctatccgttaggtaagacaaccataaactcgcagaatacgctctctgtgacggcaaaaccctccgcggacccgcgtaaaaagctggattatacggcagtcagccgggtggatgatcgacaggtcggcaacgtcacacagagctgcgaatatgatgcgtacgcgaaccctgttgactgccggcttgttatcgtcgatgagagcgttaagccggcagtgttccaccattacaccattaaaaatcgtatcgattactactaa

SEQ ID NO: 369577 - DNA, 561 bp, Salmonella enterica
atgacaagtgactacaaggtcagactgcgcccgcttgagcgtgaagatttacgatttgtccaccagcttgataataatgccagcgttatgcgttactggtttgaagagccgtatgaggcttttgtcgaactgtcggatctctacgacaaacacatccacgaccaaagcgaacggcgctttgtcgtcgaatgcgacggtgaaaacgccgggctggtagaactggtggaaattaaccatgtgcatcggcgggcggaatttcagattattatctcgccggagtaccagggaaaaggcctggcgtcacgcgcggccaaactggcgatggattacggatttaccgtactcaatctctataaattgtatttgatcgtcgataaagagaatgaaaaagcgattcacatctaccgtaaactcgggtttagagtagaaggcgagctgattcatgagttcttcattaacggcgaataccgtaacaccatccgcatgtgtatcttccagcagcagtatctggatgaacataaaacgtccggttctacgctcctgaaacccaccgcgcagtaa

SEQ ID NO: 369578 - DNA, 342 bp, Salmonella enterica
atgaacaatacgctgagcaaacgcctgtgcctgacggcaatgcttacgttggcggccgttgtatatactacttccgcattcgctgaaaccagtaaactggtgattgaatcgggagatagcgcacaaagtcgtcaggaagcggctatggaaaaggaacaatggaacgacactcgcagtctgcgccagaaagtgaatacccgcgcagaaaaagagtgggacaaagccgatgccgcctttgataaccgcgataaatgcgagcaaagcgccaacatcaacgcctattgggagcccaatacgctgcggtgtctggatcgtcgtacaggtcgcgttattacgccctaa

SEQ ID NO: 369579 - DNA, 336 bp, Salmonella enterica
atgaatctcatgctaaagacgactctgcttttctttgtcaccgccctctgtgaaatcattggatgttttcttccctggctatggcttaagcgcggcgccagcgtgtggtggcttctgcccgccgctgcgtcacttgcgttattcgtctggcttttgaccttgcatccggcggcgagtgggcgggtttatgcggcttacggtggggtatatgtctgtactgcgctcctgtggttacgtgttgtcgatggcgtccggctcacggtttatgactggtgcggcgcgctgatcgcgctgtgtggaatgctgattatcgtcgtcggatggggacgtacgtaa

SEQ ID NO: 369580 - DNA, 1215 bp, Salmonella enterica
atgaagattgtaggggctgaagtttttgttacgtgtccagggcgtaacttcgtcaccttaaagataaccacggaagacgggatcaccggtctgggggatgccaccctgaacggacgcgagctcccggtggcctcgtaccttaccgatcacctgtgcccacagctcatcgggcgggatgctcgccgcatcgaagatatttggcagttcttctacaaaggcgcgtactggcgccgtggccctgtcaccatgtccgccatttccgcggttgatatggcgctatgggatattaaagccaaagccgccaatatgccgttgtatcagttactcggcggcgcttcgcgtgaaggcgtcatggtgtattgccataccacaggccacaccatcgacgatgtgctggaagactacgcgcgtcataaagagcaagggttcaaagcaatccgcgtgcagtgcggcgttccggggatgaaaaccacctacggcatggcgaaaggcaaggggctggcctatgagcccgcgacaaaaggccagtggccggaagaacaattgtggtcaacggaaaagtatctcgattttacgccaaagctgtttgacgccgtgcgtaatacgttcgggtttaatgaacatcttctgcacgatatgcatcaccgactgacgcctattgaggctgcccgctttggcaaaggtattgaagactatcgtttgttctggatggaagatccgacgccggctgaaaatcaggcatgcttccgcctcatccgccagcatacggtcacgccgattgcggtaggcgaagtctttaacagtatctgggattgcaaacagctcattgaagagcaattgattgactatatccgcaccacgcttacccatgccggtggtattaccgggatgcgccgcattgccgattttgcctcgctctaccaggtgcgtaccggttcgcatgggccgtccgatctgtcgccggtttgtatggccgctgcattacatttcgacctgtgggtgcctaactttggcgtgcaggagtttatgggctactccgaacagatgctggaggttttcccgcataactggacgttcgagggcggctatatgcatccgggcgacaagccaggactgggcattgagttcgatgaaaaactggcggcgaaatatccgtacgatccagcctatttgccggtggcccgcctggaagacggcacactgtggaactggtaa

SEQ ID NO: 369581 - DNA, 1020 bp, Salmonella enterica
atgaaaagcatcgtaatcgaaaaaccgaatacattaactatcgaaacgcgcgcgcttccgcagcctgcgccgggcgaagttcgcattaaagtgaaactggcgggtatctgcggttccgatagccatatttatcggggacataatccctttgcaaaatatccccgtgtcataggccatgaatttttcggtgtcatcgacgcggtaggcgacaacatcaatcgcgaccggataggagaacgggtatccgtcgatccggtgatcagttgcgggcattgttacccttgttcagtcggtaaacccaatgtgtgtacctcgctggtggtgctgggcgtgcatcgtgacggcggtttcagcgagtatgcggtggcgccggcccgtaatgctcatcgcataccggacaacatcgcagatcatcatgccgtcatggttgagccgtttaccattgcggcaaatgtgacgggacaagtgaatccgaccgagcaggacgtggcgcttatctatggcgcaggcccgatgggactgacgaccgtacaggcgctgaagggggtttatcaggttaaaacggtcatagtcgttgatcgcattgaagagcgtttagcgatggcgaagcagagcggcgctgactggaccctcaataatggtcaacattcactggcggaatttctacagcagaaggcgctaaagccgaccttgattgtcgatgccgcctgtcatcccgctatcctgcaagaggcgattacacttgcatcgtctgcggcacgcattgtcctgatgggattttccagcgacccgtgtgagattgtacagcagggtattaccggaaaagagctggctatttattcatcgcgtcttaatgccaataaattcccggtcgtgattgactggctgaataaagggcttattgatccggataagctgataacgcatacatttgattatcaacatgtcaccgacgcgattgagcttttcgagaaagaccagcgtcaatgctgcaaagtcttactcacgtttgcgaaataa

SEQ ID NO: 369582 - DNA, 1380 bp, Salmonella enterica
atgacacaaataaagcatgaacgatcgactcaggatttagtgcgcgctgccgtatctggatggttaggcaccgcgcttgaatttatggattttcagttatattcactaggcgcggctctggtcttccatgagatattttttccggaacagtctgccgcgatggcgcttattctggcaatgggcacctatggtgcaggttatatagccagaattatcggcgcctttgtttttggtaaaatgggcgaccgaatcggacgaaaaaaagtattgtttattaccatcaccatgatggggatctgcaccacgctgattggcgtactgccgacgtatgcgcaaatcggcatttttgcgccagtattactggtgacattgcgaattatacaggggctgggcgccggggcggaaatttccggcgcgggtactatgctggccgagtatgcgccgaaaggaaagcgtggtatcatttcctcgctggtcgcgatgggcaccaactgcggtacgttgagcgcgacggcgatctgggcggtgatgttctttgcgcttgaacgcgaacaactgatcgcctggggatggcgtattcctttcctggcgagcgtcgttgttatgatattcgcgatctggctgcgaatgaatctgaaagaaagtccggtattcgaaaaagtaagcgaaggcgaaaaatcgccagcgttaacgcctgcgtcagaaaatacattgggcgcgatgtttaccagcaaatctttctggctggctaccggtttacgttttgggcaggcgggcaattccgggcttattcaaaccttccttgccggatatttagttcagacgttattatttaacaaatctatcccaaccgatgcgttaatgataagttccgtaattggttttatcactatcccactcttggggtggttgtccgataaatacggtcgtcggctgccgtatataatattgaatatctccgcgattattctcgcctggccgatgctgtctattgtggtagataaaacgtatagccctggcgtaattatggcggcgctcattgttattcataactttgccgtgctgggattatttgcgctggaaaacatcaccatggcggaaattttcggatcgcgtaatcgcttcacccggatggcgatttcaaaagaggcaggggggctggtggcggtcggttttggccccgtcctcgcagggatcttttgtaacatgaccgattcctggctgcccatcttaattatgctggtgctctactcgtgtattggtctgatttctgcgttgttgatgccggaggtcagagatcgcgatctgagcttgcctgaggatgcggcggaagcgacagcggcagagaagttacgccactccgcaacccagacgagttaa

SEQ ID NO: 369583 - DNA, 1467 bp, Salmonella enterica
atgcaaaacaggcttttatcggcaaaggcgacgcttcctgattacgatcgtgcggcgctggtggcgcggatggtccatctcggttttggcgcgtttcatcgcgcgcatcagggggtttatacagatattctggctgcggagcagcatagcgactggggctattatgaggttaatcttattggcggcgaacagcagattgccgatctaaagcagcaggataacctctataccgtggcggagatgtcggcggaagcctggacggcgcgtgtggtgggcgtcgtcaaagcggcgttgcatgttcaggttgatggtctggaacgtgtgctggcggcgatgtgcgaaccgcaaatagcgattgtgtctctgaccattaccgagaaagggtattgtcattcgccagccacgggccaacttctgctggaacatcccatgattgccgccgacctgcaaaatccgcatcaaccgctaacggcaccgggtattattgtcgaagcgttagcgcgtcgtaaagccgcaggcttaccggcatttaccgtgatgtcctgcgacaacatgccggaaaatgggcatgtgacgcgtcaggttgtgacggcttacgcccgggaggtggatgcggaactggcgatatggatcgagcaaaacgtgacatttccgtcaaccatggttgatcggattgtccctgcggtcacgccggagacgctggataaaatcgaacaactgaccggcgtgcgcgatccggcgggcgttgcctgtgaaccgtttcgccagtgggtgatagaggatacgtttgtggcgggtcgtccgctgtgggaaaacgcgggcgcgacgttggtcgccgacgtggttccgtttgaagagatgaaactgcgaatgcttaacggcagtcattcattcctggcttatctggggtatcttgccggctatcagcatattaatgactgcatggctgacgacaactatcgtctgaccgcgcaggcgttaatgttacgcgagcaggcgcccacgctgaaagtccagggggtagatttacagcgttatgccgatcagttgattgcgcgttaccgtaatccggcgctgcgtcatcgtacctggcagattgcgatggatggcagccagaaacttccgcagcgtatgctggactccgttcgctggcatcttgctaatcatagcgattttgatttgctggcgctgggcgtggcggggtggatgcgttacgttggcggcgtggatgagcagggtaaggcgatcgacgtcagcgatccgctattgccggttattcagcgcgccgtggcaaacagtgaagaaggcgccagtcgtgttaaggcgctgctgggaatggctgaaattttcggcaacgatttgccgcaggcggagcggtttacgcaaaaagtgcaagaagcctatgacagtttactgacatatggcgcgaaagcgagcgtggcgaaatatgccgagcgcttgaaatag

SEQ ID NO: 369584 - DNA, 204 bp, Salmonella enterica
atgatgacatacgatcgtaaccgtaacgcaatcactaccggtagccgggtcatgataagcggcacgggtcataccgggattatcaaagccattgagagcgaaggtctggatgcaggtcaaattcgccgcggcaaaacggtgattgtcgaaggttgtgaaggtaaattcgcgccggttgaattgattcgtcttggcatgaactga

SEQ ID NO: 369585 - DNA, 687 bp, Salmonella enterica
atgaccgtcgaaacgcagcttaaccctacacagcctgtcaaccagcaaatttaccgtattcttcggcgtgatatcgtgcattgtcttatcccgcctggcacgccgctatcagaaaaagaggtctcaacccgttttaacgtttcgcgtcaaccggtgcgcgaggcttttataaagctggcggaaaatgggttgattcagatccgccctcagcgcggtagttatgtgaataagatttcgctttctcaggtacagaatggctgctttgttcggcaggcgatcgaatgcgcggtggtccgccgtgcggcggcgatgatcaccgacaaccagtgctatcaactggcgcaaaacctgcacctgcaacatattgctatcgagcgcaaacagattgatgattttttccagcttgatgacgatttccaccaaaagctggcgcagatcgccgattgccagttagcgtgggataccattgaaaatatcaaagcgacaatcgaccgggttcgctatatgagtctggatcatgtttctccgccggagatgttgttgcgccagcaccatgatattttctccgcgctggaaaatcgtgacggcaatgcggttgagagcgcaatgacccagcatttgcaggaaattagcgaatccgtccagcttatccgtcaggaaaacagcggctggtttagcgaagactaa

SEQ ID NO: 369586 - DNA, 747 bp, Salmonella enterica
atgatcgttttagtaactggagcaaccgcagggtttggcgagtgcattgcacgccgttttgttgagaatggacataaagtcattgccacgggacgtcgtcatgaacgcctgcaagcgttaaaagatgagcttggcgagaacgtattgaccgcccaactggacgtgcgcaaccgcgcggccatcgaagagatgatggcctctctgcctgcgcagtggcgcgatattgatgtgctggtcaataacgccggtctggcgctgggtcttgaaccggcgcataaagccagcgtagaagactgggaaactatgatcgatactaataataaaggcttaatttatatgacccgcgccgtgctgccaggaatggtcgaacgtaatcgcggtcatatcattaacatcggttcaaccgccggcagttggccttatgctggtggcaacgtctatggcgcgacgaaagcctttgtgcgccagtttagcctgaatttgcgcacggatttacacggcacggcggttcgcgtgaccgacattgaaccgggcctggttggcggtaccgagttttccagcgttcgtttcaaaggcgacgatgagaaagcgggtaaaacctacgaaaataccaccgcgctcacgccagaagacattaccgaagcggtatggtgggtggccacactccccgcgcatgtgaatattaataccgttgaaatgatgcctgttacccaatctttcgcagggctcagcgtccaccgtagctaa

SEQ ID NO: 369587 - DNA, 2043 bp, Salmonella enterica
atgtcgacgaatcctttgttagaccagagtatgttgccctatcaggcaccgcgttttgatcggatcaaagattgccattatcgtcctgcttttgatgagggcgttcggcaaaaacgcgtggaaatcgaggccatcgtcaatcatccggcggcccctgactttacgaatacgcttctggcgctggagcaaagcggggcgcttctgtcacgcgtcaccagcatttttttcgcgatgacggccgcgcacactaacgatgaactccagcggttggatgaggccttttctgccgagctggcggcgctctccaacgatatttatctgaatagcgcgttattcgctcgcgtggatgccgtctggcaacagcgtcactcactggggctggatgatgagtcgctacggttggtcgatgtgatccatcagcgttttgtgttggcaggcgcgcagcttgccgaagaggataaagcgcaactgaaggtattgaatactgaatccgcgaccttaatgagtcagtttaatcagcgtctgctggcggcaagtaaagcgggcgggctggcggtcgatgacgcgcattgcctggcaggattaagcccggaagaaatgaccgtcgctgctgaagcggcgcgtgaaaaaggcctggaggagcgctggttcattccgctccttaatacgacgcaacagcctgcgcttgctacgctgcgcgatcgccagactcgcgaaaatttattcgcagcgtcatggactcgggcggaaaaaggagatgcccacgatacccgcgctatcgttcagcgtctggtagagattcgtcgctgtcaggcaaaactgctgggtttccccaattatgccgcatggaaaatggccgatcagatggcgaaaacgccgcaagccgcactgagctttatgcgtggcattgtgccgccagcgcgtcagcgtgtactcaatgaacaggcggaaattcagaacgtcattgatggtgagcagggcggctacaccgttcaggcctgggactggatgttctatgccgaacaggtacggcgggaaaaatatgcgttagatgaagcgcaactgaagccctattttgccttaaatacggtgttgcaagagggggttttctggaccgccaaccagctattcggcatcaccttcgtcgagcgttttgacattccggtgtatcaccctgatgttcgggtgtgggagattttcgattccgatggtgtcggcatggcgttattttatggcgacttcttcgcgcgggactcgaaaagcggcggcgcgtggatggggaattttgtcgagcaatccacactcaatgaaacccggcccgttatatacaatgtatgtaactatcagaaaccggttgatgggcagcctgcattactgctttgggacgacgttattacgctcttccatgagtttggtcatacgttacatggtttgtttgccgttcagcgctatgccacgctttcaggtaccaatacgccccgcgactttgtcgagtttccctcccagattaatgagcattgggcgagccatccacgcgtgttcgaacgctacgcgcgtcatgtcgacagcggtgaaaaaatgcccgctgatttacaggaaaaaatgcgcaaggcgagtttatttaataaaggttacgatatgactgaattgctcggcgccgcattgctggatatgcgctggcatatgctggaggagagcgtagcagagcagtctgtcgctgagttcgagcagcaggcgctggccgccgagcatcttgatttaccggcagtgccgccccgctatcgcagcagttattttgcccatatcttcggcggcggctacgcagcgggatactacgcctacctgtggacgcaaatgttagcggatgacggttatcaatggtttgtagagcagggcggcctgacgcgtgaaaacgggcagcgttttcgtgatgctatcctttcccgggggaatagtactgatttagaaacgctttattcagcctggcgtggacatgaaccgcatattgaccccatgttgcaatatcgtgggctcgatcgctaa

SEQ ID NO: 369588 - DNA, 183 bp, Salmonella enterica
atggcagaacatcgcggcggttccggtaattttgcagaagataaagagaaagcctcagaagcaggtcgtaaaggcggccagcatagcggtgggaactttaaaaacgacccacaacgtgcatctgaagcgggtaaaaaaggtggccagaataaccacagtggcggacggaaatccggcaattaa

SEQ ID NO: 369589 - DNA, 528 bp, Salmonella enterica
atgagattagaacagcacgatattgtcacccttgatgaagccgaatccgtcgatagcctgacaaaaaaacttggtgatttactggttaaccagaaactccgtctgaccactgcagaatcctgcactggcgggaaactggcttcagcattgtgcgcagcagaagatacgccctcattttacggtgtggggtatgtcacctttactgatgaagccaaagcaaaaatcttacgcgtacaacgccacagccttgccgaacataccgccgtcagcgaagcggtcgttactgaaatggcacagggcgctaaggatcaggctgaggtcaatatcagcatagcgatcagcggctatggcggtccggaaggcggcgaagatggcacgccggcgggcaccgtttggtttgcctggaatattaacaatacaacttttacaagccgacaacatttcaacggagattgtcaggaagtattagaaaaatgcgtacacttcgccctcgctgaattgctttttctgttaacgaagaaagcataa

SEQ ID NO: 369590 - DNA, 393 bp, Salmonella enterica
atgaaactacaggtggctgcatttttaagttttctgataatgccttacgcgctagcggaagatcaggggggattaaaaaaagacgtggcaccgccgccgcctcatgctattgaggatggttatcgcggtacggatgatgcagaaaaaatgaccatcgaacaggcaaaaaccctgcatgatggcgcgaccgtttcgctgcgcggcaaccttattgatcataaaggtgacgatcgctatgtatttcgtgataaatccggcgagattaacgtgataattccttccgccgtatttgatgggcgggaagttcagccggatcaaatgatcaacattaacggtagtctggacaagaaagcgaaggaaccgcttgtccgcgtgaaccgactgcaaaaataa

SEQ ID NO: 369591 - DNA, 1188 bp, Salmonella enterica
atgaatccaggattgagacgttcgacgttggctctactcgcctcatcgctgttattgacaattggacgcggtgccacgctcccctttatgaccatctatcttaaccgtcagtacggtttaggcgtggatctgattggctacgcgctgaccagcgcgttaacgatcggcgtcatctttagtcttggctttgggattctggcggacaagtttgataaaaagcgctacatgttactcgcgattatcgccttcgcctgcggatttatcgccatcccaatggtgcataatgtcgtactggttgtcctgctttttgcgcttattaactgcgcctattcggttttttctaccgtcctgaaggcctggttcgccgataacctcaccgcgacaacaaaaacacggattttttcgctcaattataccgtactcaatatcggctggacggttggcccgccgctcggcacgctgctggtgatgcaaagcatcaatttacccttctggcttgccgccatctgttccgcattcccgctggtctttattcaggtatgggtgacacgatcggttgccgccagcgaggggaaaaatgccgctatctggtctccctccgttctgctgcgcgacaaagcattattgtggtttacgctttcggcatttctggcctcctttgtggggggggcctttgcgtcctgtatttcacagtacgttatggtcgttgccgatagcggcttcgcggaaaaagtggtagccgtcgtcctgccggttaatgcggttattgtggtcagtttgcaatacgccgtgggccgtcgacttaccgccgtcaatattcgaccaatgatgacgaccggcaccgtcttttttatcgccgggctcatcggatttattttttcaggcgacaatctgtttttttgggggctttcagcggcagtattcacgattggcgaaattatttatgcccccggcgaatatatgttaattgacaacattgcgcctgccgggatgaaagccagctatttttcagcgcaatcgctgggctggctgggtgcggcggtaaacccgctggtcagcggcgtcatcctgacgacgcttcccgcctggtcgcttttcgttgtcctgataatcgccattgtgttcgcatgggcactgatgttaaaaggaatgcggattacccctacgcaacaggctatcacctgttaa

SEQ ID NO: 369592 - DNA, 903 bp, Salmonella enterica
atgatgtcgcgtaaagacggttttttggcgttactggtggttgtcgtatgggggctcaattttgttgtcatcaaagtaggcctgcaccatatgccgccattattgctggcaggattacgatttttactggtggcgtttccggcaattttctttgtcgcccggcctaaagtcccgcttacgctgttgctgggctatgggctgacgataagctttgggcagttcgcctttctcttttgcgcgataaagtttggtatgcccgcaggactggcgtcgttggtattacaggcgcaggccttttttaccatggctttgggggcgtttgtttttagtgagcggttacaacgtaagcagttagcggggatcgccctggcgattataggtgtactggtattgattgaagccagtctcaacggacagcatatagcgatgtcgggatttatgctgactctggcggcggcatttagctgggcctgcggcaatatctttaataaaaaaattatgcaacatagtccgcgcccggcggtgatgtcgctggtggtctggagcgcgctgatcccgatcctgccgttcctgctgtcatcgctgctactggagggggcggatcacattacgcaaagccttattaccatcgatatgacgacgatattgtcgctgctttatctggcttttgtcgccactatacttggctacggcatctggggcgcgttactggggcgctatgagacctggcgcgtggcgccgttatcattgctggtgccggtagtcgggctggcgagcgccgcggtgttactcggggaaacgttgaccgggatgcagcttgcgggcgcagtactgattatggctggactctatatcaatgtgtttggatttcgtgtgcgccgtactgcccgcgtcaggggatga

SEQ ID NO: 369593 - DNA, 210 bp, Salmonella enterica
atgctgtttcccgccctgccgggtctgttacttatcgcctccggatatggcattgcagaacaaactttgttacctgtggcgcaaaatagccgcgatgtgatgctgctgccctgtgtaggcgatccgccaaatgaccttcaccccgtgagcgtgaacagcgataagtcagatgaattaggcgtgccctattataacgaccaacacctttaa

SEQ ID NO: 369594 - DNA, 384 bp, Salmonella enterica
atgtccagacgcaacactgacgctattactattcatagcattttggactggatcgaggataacctggagtcgccgctctcactggaaaaagtgtctgagcgttcaggatattccaaatggcacctgcaacggatgtttaaaaaagagaccggtcattcattaggccaatacatccgcagccgtaaaatgacggaaatcgcgcaaaaattaaaagagagcaacgagcccattctctatctggcggaacgctatggctttgagtcacagcaaacattgacccggacgttcaaaaactactttgatgtgccgccacacaaataccggatcaccaatatgcatggcgaatcacggtatatgctgccgctgaaccatggcaactactag

SEQ ID NO: 369595 - DNA, 435 bp, Salmonella enterica
ttgaaaagcaccagtgatctgttcaatgaaatcattccgctgggtcgcttgatctacatggtaaatcaaaaaaaagatcgcctgttaaataactatttatccccgctggatatcaccgcaacacagtttaaagtgctttgctcgatacgctgcgcgggatgtattaccccggttgaacttaaaaaagtgctgtctgtcgatctcggcgcattgacgcgaatgctcgaccgcctgctgtgcaaaggctggatcgaaagactgccgaatcctaatgacaaacgcggcgtactggtgaagctaacgccggacggcgcggcaatttgtgagcaatgtcatcaacgaccagggcaagacctgcatcaggaattaacaaaaaacttaacggcggacgaagtggcaacgcttgagtatttgctcaagaaaattctgccgtag

SEQ ID NO: 369596 - DNA, 666 bp, Salmonella enterica
atgatggatttgtttaaagcgattggattggggctggtcgtactgctcccgttagccaatccgctaaccaccgtggcgctgtttcttggccttgcgggcaatatgaatagtgcggaacgcaaccggcagtcctatatggcttcggtttatgtcttcgctattatgatggtggcgtactacgccgggcagttagttatgaacaccttcggtatttcgattccagggctacggatcgccggggggttaatcgtggcgtttatcggcttcagaatgcttttcccgcagcagaaggcgcatgagtcgccggaagcgaaaagcaaatcggaggagctggcagacgaaccgacggctaatattgcatttgttccactggctatgccaagcaccgcaggaccggggaccatcgcaatgatcatcagttccgcttccacggtgcgtcatggcggcgagtttcccgactgggtcattatggtcgcgccgccgattatttttcttgccgtggcggtgatcctgtggggatgcttacgcagttctggcgctattatgcggctggtgggtaaaggggggattgaagcgatctcccgcttaatgggattcctgctggtgtgtatgggcgtgcaatttattatcaacggcgtgttggaaattattaaaacgtaccactaa

SEQ ID NO: 369597 - DNA, 1191 bp, Salmonella enterica
atgacaatcaatccagtttcccgcaaggtcgcgtggctacgggtagttacgcttgctattgccgcttttattttcaataccacagaatttgtgccggttggtttgctatcagacattgctgaaagctttcatatgcaaaccgcgcaggtcggcatcatgctaaccatttacgcctgggtagttgccgtcatgtcgctgccttttatgcttcttaccagtcaaatggagcgccgtaagctactaatttgtctgtttgttttgtttattgccagccatgtgctctcctttctggcatggaactttaccgtgctggtcattagccgtattggtatcgctttcgcccacgctattttctggtcgataaccgcctcgctggcgatccgcctggcccctgccgggaaacgcgcgcaggcattaagtctgatagcgaccggcaccgcgttggccatggtgcttgggctgccgataggtcgcgttgttggtcagtattttggctggcgcaccaccttttttgccatcggcatgggcgcattaattacgctgctatgtctgattaagcttctaccgaaattgccgagcgagcattccggctcactaaaaagtttacctttgctattccggcgcccggcgctgatgagcctctatgtgctgaccgtcgttgtggtgactgcgcattacacagcttatagctatattgaaccgttcgttcagaatgtcgccgggctcagtgcgaattttgctaccgtcctgttactgatcctcggcggcgccgggatcatcggcagcctcgtgtttggtaaactgggtaatcgccatgcctcgtcgctcgtcagtatcgctattgccctgctggttgtctgtctgcttctgctgctgcctgcggcggatagcgaagcgcatctggccatactgagcattttctggggcatcgcgattatggtgatagggctcggtatgcaggtgaaagtactggcgctggccccggacgcgaccgatgtcgcaatggcgctattttcaggcatctttaatattggtattggcgctggcgcgctggtaggcaatcaggtgagtttgcactggtcaatgtcggccatcggctatattggcgccatacccgcctgtgccgcgctggtatgggctgtgctcatattccgcaaatggccagtgacgctggaagaacaaccgcattaa

SEQ ID NO: 369598 - DNA, 873 bp, Salmonella enterica
atggacctgacgcaactggaaatgtttaacgctgtcgctctgacgggcagcattacgcaggcggcggcaaaagtacaccgcgttccgtccaacctgaccacgcgtatccgccagcttgaagccgacctgggcgtctctctgtttattcgcgaaaaccagcgactcaggctgtcaccagccgggcataactttttacgttacagccagcagatcctggcgctggtcgatgaagcccgcatggtggttgccggagaggaaccgcaaggactgttttcactcggcgcgttagaaagtactgccgccgtacgtatccccgcgctgctggcgggttataaccagcgttaccctaaaattcagttcgcgttaacgaccggtccttccggcgccatgctggatggcgtgctcgagggaaagctgaacgccgcctttattgatggcccgctaatgcatccggggctggaaggtataccggcttaccaggaagagatgatgatcgtcgcgccacacggccattccgtcgtttcgcgggccagcgaggtgaatggttataacatctatgcttttcgcgccaactgttcttaccgacggcatttcgaaagctggtttcatgccgatggcgcgacccccggtacgattcacgaaatggagtcatatcatggaatgttggcgtgcgtaattgccggcgcaggtattgcgctgatgccagcaagtatgctcaacagtatgccaggacatcatcaggtggaagcctggccgctggcggagaagtggcgctggcttaacacatggctaatgtggcggcgcggggcgatgacgcgtcagcttgaggcctttatcgagttacttaacgcccaactggcgagcgtcgactga

SEQ ID NO: 369599 - DNA, 1389 bp, Salmonella enterica
atgaccatgatgactgcaacacaggcgttatccgttaatcctgcgaccggccagacgctggcggcaatgccctgggctaacgcgcaagagattgaacatgcgctgagtctggcggcgagcggtttcaaaaagtggaaaatgacatcagtagcgcaacgggcgcaaacattacgcgatattggtcaggcgcttcgcgctcatgcagaagagatggcgcaatgtattacgcgtgaaatgggtaaacccataaagcaggcgcgtgcggaagtgacgaaatccgccgcgttatgcgactggtatgcggaacatggcccggcaatgctgaatcctgagcctacgctggtagaaaatcagcaggcggtgattgaataccgtccgctgggcgtcattctggcgataatgccgtggaattttcctttatggcaggtgttacgcggggcagtgccgatactgttggcggggaatagctacttgttaaaacatgcgcccaatgtcacgggttgcgcgcagatgatagcccgaatcttgacggaagccggtactcccgctggcgtctatggatgggtgaacgccaataatgagggcgtgagtcagatgattaacgatccgcgaatcgcggcggtgacggtgaccggtagcgtgcgcgccggcgcggcgattggcgctcaggctggggcggcgctgaaaaagtgcgtactggaactggggggctcggatccgtttattgtactcaatgatgccgatctcgagctggcggtaaaagctgcggttgcaggacgctatcaaaacaccggacaagtctgcgccgccgccaaacgttttattgtcgaagagggcattgcgcaggcgtttaccgatcgttttgtggcggctgccgcagcattaaagataggtgatcctctggttgaagagaatgacctggggccgatggcgcgctttgatttgcgtgatgaactccatcaacaggtgcaggcttccgtcgccgaaggcgcacggctactgttgggcggggagaaaatcgccggggagggcaactattatgccgcgaccgttctggcggatgttacacctgacatgactgcatttcgtcaggaactttttgggcctgttgccgccattaccgtcgcaaaagatgcggcgcacgccctcgcgctggcgaatgacagtgagtttggcctgtcggcgacgatctttaccgccgacgatacgctggccgcggagatggcggcgcgtcttgagtgcggcggggtattcattaatgggtacagcgccagcgatgcgcgtgtggcattcggcggggtgaagaaaagtggcttcggtcgcgagctttcgcactttggtttacacgaattttgtaatgtgcagaccgtctggaagaaccgcgtctaa

SEQ ID NO: 369600 - DNA, 927 bp, Salmonella enterica
gtggcctgggccatggataatgcaattttagagacgattttacagcgcgttcgccccctcattggccagggcaaagtcgctgactatattccggcattagcgtccgtcgagggttcaaagctggggatagcgatttgtaccgtggacgggcagcattatcaggcgggcgatgcgcacgaacgcttctctattcagtctatttcgaaagtgctcagtctggtggtggcgatgcgtcattatccggaagaggagatctggcagcgcgtcggaaaagatccttccggctcgccgttcaattcgttggttcagttagagatggaacaaggcatcccgcgtaatccatttattaatgcgggcgcgctggtggtatgcgacatgttgcaaggccggcttagcgcgccgcgtcagcggatgctggaagttgtgcgcgcgctttgcggcgtatcggatattacgtatgacgctacggtcgcgcgctctgaatttgagcattccgcccgtaacgccgctattgcttggctgatgaaatcattcggtaattttcatcatgatgtgcctaccgtgttgcaaaattacttccactactgtgcgttgaaaatgagctgcatggaactggcgaggacgtttgtctttctggcgaatcagggcgaggcgtttcatctcgacgagccggtagtgacccccatgcaggcccggcaaattaatgcgctaatggcgaccagcgggatgtatcagaatgccggagagtttgcctggcgggtaggattgcccgctaaatccggcgtgggcggtggtattgtcgccattgtgccgcatgaaatggcgattgccgtctggagtccggagctggatcctgcgggaaactctctggcaggtatcgccgcgcttgaacaattaacacaaacgttaggacgttcggtatactga

SEQ ID NO: 369601 - DNA, 360 bp, Salmonella enterica
atgaatgcgcttgaaccgctctttgcccgcctggcgcgatcgacatttcgttcgcgttttcgtctcgggataaaagaaagacaatattgctgggataaaggcgcggaggtgattgataaacacgccgccgattttatcgcccagcgactggcgccagctcacccggcgaatgatggtaagcaaacgccgatgcggggccatccggtatttatcgcgcaacatgcgacggcaacctgctgtcgcgggtgcctggcgaagtggcaccagattcctcagggagaaccgctgagcgaagcgcagcaacagtatattgtcagcgttatccattactggctggtcatacaaatgaatcagcggtag

SEQ ID NO: 369602 - DNA, 948 bp, Salmonella enterica
atgacagtgcttttttacctgctgaagataatcatgatcgttagaccacaacagcactggattcgcctgatatttgtctggcatggttccgtgttatctaaaatcttttcacgactgctccttaactttcttctttctatcgccattattatcatgctgccctggtacacaatgctgggtattaagtttacccttgcgccgtttagcatactgggcgtcgctatcgccatttttctggggtttcgcaataatgcctgttatgcgcgttacgtcgaagcgcgacatttgtgggggcagttgatgatcgcttcacgctcaatactgcgtgaggtgaaaacaaccttgcctgatgaacgcggtatcgaggattttgttcggttacaaatcgcttttgcccactgtttgcgtatgacattgcgtcgacagcctcaaacgcaagttctgggcaactatcttgaccaggaggcgttacagaaagttgtcgcttcccattcccctgctaaccgtatcttattgctgatgggagagtggctggcgattcgccgccgcagcggaaagctttccgatattttatttcatagcctcaacaaccgtttaaatgatatgtcgtcagtgttggccggctgtgaacgcatcgccaacacgccggtgccttttgcctatacgttaattttgcatcgtacggtttatcttttctgcattatgttgccatttgcactggtggttgatctgcactatatgacgccgtttatttcggtgcttatttcttatacgtttatcgcgttggatgcgttagcggaagagttggaagatccgttcggtactgaaaataatgatttaccgctggatgcgatatgcaatgcgatagaaatcgatttactgcaaatgaatgatgaaagggatattccggaaaaacggataccggataagcgctatcaactgacctga

SEQ ID NO: 369603 - DNA, 528 bp, Salmonella enterica
atgcaaaaaacgtcactattgttttcggccgccgcgataacgttaactctgatggtgtcatcggcatcagcggcaacgccaaccgccgcacaaaatgaagctacgtcgaccgttaaacaagaaattacagaaggcattaaccgttacctttattcaatagataaggcagacccaacgttaggcaagcagctcttttatgtttcaccggaaaccagttttattcatccacgcggtcacgaacgcggatggtcgcagatcgctgaaaatttttatggcaccactatgggtaaaactttcagtaaacgcacattaaaactggacgctccccctgctattcatgtgtatggcaatgccgccgttgcagagttcgactggcattttaccgcggtacgccgtgataatgggcagactcaacacacgacaggccgcgaaagccaggtgtgggcgaagataccaaacacaggatggcgaatcgttcatgtccactactccggtccagccaaaaccggcgttggagaaggctattaa

SEQ ID NO: 369604 - DNA, 207 bp, Salmonella enterica
atgctcaacccgacctacaaattacacaatatcaatatgttgtggcaatattttgtaggcctaaaaatagctgaacgctatcaggtgcgagagctgtcctgtcacgttttatcgagggaactctgcttttattttcagcaagaagcaggtgttatttttgtatcgataagtcatgagctatttcagtggcgcgccgctgtctcgtga

SEQ ID NO: 369605 - DNA, 2058 bp, Salmonella enterica
gtgagcagaaaacgtgaaatgccggatggcggcgtgaaaaacgccttatccgacctacggttcgggcgctttgtaggccggataaggcgaagccgccatccggcgttgctgttattggcgctgtttgttgccgcctgctggctgacatgggttaacttctccgttgcgctaccgcgcagccagtggcaacaggctatctggtcaccggatatcgacatcattgagcagatgatttttcattacagcctgctgccaagactggcgatttcgctgctggtgggcgcggggcttgggctggtaggcgtcctgttccagcaagtattgcgtaacccgctggcggaaccgaccacgctgggcgtggcgaccggcgcgcaattggggatcacggtgactacgctatgggcgattcccggcgcgctggcgacgcagtttgccgccctgacgggagcctgtatcgtcggcgcgctggtgttcggcgtggcgtggggcaaacgtctgtcgccagtgaccctgatcctcgccgggctggtggttagcctctattgtggcgcaatcaaccagttactggtgattttccaccacgatcagttgcaaagcatgtttttatggagcaccggaacgctaacgcaaaccgactggagcggcgtgcagcgtctgtggccgcagttgctgggcggtgtgatgctcacgttattgttgttacgcccgatgacgctgatggggctggatgacggcgttgcgcgtaatctgggtctggcgctgtcgttagcgcgtctggcggcgctgtcgctggcgattgtgttgagcgctctgctggtcaacgcggtgggcattatcggttttatcggcctgtttgcgccgctgctggcgaaaatgcttggcgcaagacgtctgctggcgcgcctgatgctggcgccgctcattggggcgcttattttgtggctatccgatcagattatcctttggctaacccgcgtatggatggaggtttccaccgggtcagtgacggcgttaatcggcgcgccgctgctcctgtggctgctgccgcggcttaaaagcatgagcgcgccggatatgaacgccagcgatcgtgtggcggcggaacgtcggcacgttcttgcttttgccgttgccggtggcgcgctcctgctgctggcaacatgggtcgccctctcttttggtcgcgacgcgcacggctggacgtgggcgagcggaacgctgcttgaagaactgatgccgtggcgctggccgcggatactggcggcgttaatggcgggcgtcatgctggcggtggcgggctgcattattcagcgtctgaccggtaatccaatggccagcccggaagtgctggggatcagttccggagccgcgtttggcgtggtgttgatgctgtttttggtgccggggaatgccttcggttggctactgcctgccggaagcctgggcgcggcggcgacactgctgattattatgatagccgccgggcgcggcggtttctcgccgcaacggatgttgctggcggggatggcgctcagcaccgcgtttaccatgctgctaatgatgctccaggcgagcggcgacccgcggatggcggaagtattgacctggctctcaggatctacctataacgccactggcgggcaggttacgcgaaccgcgatcgtaatggtgattttgctggcacttgtgccgttgtgtcgccgctggttaacgattttgcccctgggcggcgatgccgcgcgtgcggtgggcatggcgcttacgccgtcgcgtatcgcgctgctggcgctggcggcgtgtttgacggcaaccgcgacgatgaccattgggccgctgagtttcgttggactgatggcgccgcatattgcgcggatgctcggttttcgccggacgatgccgcatatggtcatctcggcgctggcagggggcgttttactggtctttgccgactggtgcggcaggatggcgctatttccgtatcagatcccggcgggactgctttcaagctttattggcgcgccgtactttatctatttgctacgtaaacagagtcggtaa

SEQ ID NO: 369606 - DNA, 891 bp, Salmonella enterica
atgcgtgatttatatcctctgactcgccgccgtttattaacggcgatggcgctctcgccgctgctgtggcaaatgaatacggcgcaggctgccgctatcgatccccgccggattgtggcgctggagtggctgccggttgagctgctgctggcgctcggtattacgccttatggcgtggcggacgtgccaaattataagctgtgggttagcgaaccgccgttgccggattcggtgattgatgtgggtcttcgcactgaacccaatctcgaactactgacggagatgaagccgtcgtttatggtctggtcggcaggttacggtccctcgccggaaaaactggcgcggatcgcgccggggcgcgggttcgattttagcgacggcaaaaagccgctggcggtagcccgacgctcgctggttgaactggcgcagacgctgaatctggaagctgcggcagaaaaacatctggcgcaatacgatcgcttcatcgccagccagaagccgcattttatccgccgcggggggcgtccgttactgatgacgacgcttatcgatccgcggcatatgctggtgctcggcccgaattgcctgttccaggaggtgctggacgagtatagcattgtcaatgcctggcagggtgaaaccaacttttggggcagtacggcggttagcatcgatcggctggcgatgtataaagaagcggatgtgatctgcttcgatcacgggaatagcaccgatatgaacgcgctgatggcaacgccgctgtggcaggccatgccgtttgtccgcgccgggcgctttcaccgggtgcccgccgtttggttctatggcgcgaccctctccacgatgcattttgtccgcatcctgaataacgtgttgggaggcaaagcgtga

SEQ ID NO: 369607 - DNA, 798 bp, Salmonella enterica
atgcaggaaaaccacattcattccgataccacctttgcgctgcgaagcgtcgcctttcgtgtgccgggccgcacgcttttacaccccctctcgttaacgtttcccgcaggtcgagtcaccggacttatcggccataatggttccggtaaatccacgctgttaaaaatgctgggccgccatcagctgccttccgaaggggatattctgctcgacaatcagccgctggcgagctggagcagcaaggcgtttgcccgcaaagttgcctatctgcctcaacaattgccacaggcggaaggaatgacggtgcgcgaactggtggcgattggccgctatccgtggcacggcgcgctgggacgctttggcgtcgcggaccgggaaaaagtagacgaggcgattacgctggtcggcttaaaaccgctggcgcatcgtctggtggacagtctttccggcggtgaacgccagcgcgcgtggattgccatgctggtcgcgcaggacagccgttgtctgctgctggatgagccgacgtcagcgctggatatcgcccatcaggtggacgtgctggcgctggtgcatcgtttaagccagcagcgcgggctgacggtggttgcggtgctgcacgatatcaacatggcggcccgctactgtgattatttagtcgcgctacgcggcggtgaaatgattgcgcaaggaacgcctgcggaactgatgcgcagtgacactctggaacagatttacggtatcccgatgggtatccttccgcatccggcgggcgcggcacctgtgagttttgtgtattaa

SEQ ID NO: 369608 - DNA, 2244 bp, Salmonella enterica
atggcgcgtcttaaaactgctcagccaaactcctcactgcgtaaaatcgcagttgtagtagccacagcggttagcggcatgtctgtctatgcacaggcggcggttcaaccgaaagaagaaaccattaccgtaaccgcagcgcctgccgcgcaggaaagtgcctggggaccggcggcaaccatcgctgcaagacaatccgccacggcaaccaaaacggacacgccgattcaaaaggtgccgcagtctatttccgttgttaccgccgaagagatggcgttgcatcagccaaagtcggttaaagaagcgttgagttatacccctggcgttgccgtgggcactcgtggcgcgtccaatacttacgactacctgatcattcgcggtttcgccgctgatggccaaagccagaataactatctgaatggcctgaaaatgcagggtaacttctataatgatgcggtgatagacccttatatgctggaacgcgcggaagtgatgcgtggtccggtttccgttctgtacgggaaaagtagccctggcggtttgctgaatatggttagcaagcgcccgacgacggagccgctgaaagaaattcagttcaagatgggtactgacagcctgttccagactggttttgacttcagcgacgcgctggatgaagagggcgtatattcttatcgtttgacaggtctggcgcgttccgccaatgcacagcaggatcgcgcggaagagcagcgctatgcgattgcgccagcgttcacctggcgtccggatgacaagacaaactttacgtttctctcttacttccagaatgaaccagagacgggttactacggctggctgccgaaagagggaacggttgagccgctgccaaacggtaaacgtctgccaacagatttcaacgaaggggcgaaaaacaatacctattctcgtaatgagaagatggtagggtacagcttcgatcatgaattcaacgacacctttaccgtgcgccagaatttgcgctatgccgagaataaagtctcgcaaaatagcgtctatggttacggcgtttgttccgatccggcaaaccgtgacagcaagcagtgcgcggcattagcgccagcggacaaaggtcattatctggctcgtaaatatgttgttgacgacgagaaactgcaaaacttctccgttgatactcagttgcaaagtaaatttgccaccggtgaggtggatcacacgctgctgaccggcgtcgactttatgcgtatgcgtaatgatatcaatgcctggtttggctacgacgactccgtacctctgcttgacctctataacccggtgtacactgatttcgactttgcttcgcgagatccagcaacatccggcccgtaccagattttgaataagcaaaagcaaacgggtctgtacgtccaggaccaggcacagtgggataaagtcctggtaacattgggtgggcgttatgactgggccgatcaagagtctctgaatcgcactactggcatcacatctaaacgtgatgataagcagtttacctggcgtggtggtgttaactatctgtttgataatggaataacgccttacttcagttatagtgagtcgtttgagccggcttcacagacgggagagaacgggaaaatatttgcaccttcgaaaggtaagcagtatgaagcgggggttaaatatgtaccgaatgatcggccgatagtcattaccggtgcggtctatcagttgaccaaaaccaacaacctgatggctgatccggcggggtctttcttctcggttgaaggcggtgaaattcgcgcccgcggcgtggaactagaagcgaaagcggcgctttctgcaagcatcaacgtcgtgggttcttacacctatactgacgccgaatacacgacggatacgacctataaaggtaatactcctgcacaggtaccaaagcatatggcgtcgttgtggggcgattacactttctttgatggtccattgtctggtttaacgctggggaccggcgggcgtttcacggggtcaagctatggcgatccggcaaactcctttaaagtagggagttatacggttgtcgatgcattggtacgttatgaccttgcgcgcgtaggcatggcaggctccaacgttgcccttcatgtcaataatctgtttgatcgcgaatacgtcgccagctgcttccagacgtacggctgtttctggggcgcagaacgtcaggtcgttgcaacggcaaccttccgtttctaa

SEQ ID NO: 369609 - DNA, 2523 bp, Salmonella enterica
atggcggggaatgaccgcgagccgattggacgtaaggggaaaccgtcacgtcctgtgaaacaaaaggtgagccgtcgtcggcagcatgacgacgattatgatgatgactatgaggatgaagaaccgatgccgcgtaaaggtaagggcaaagggcgtaagcctcgtggcaagcgcggctggctgtggctattgctaaaactgtttatcgtttttgtggtgctgttcgccatttacggcgtctatctggatcaaaaaatccgcagccgtatcgatggcaaggtctggcagcttccggcggcggtatatggccggatggtgaaccttgagccagacatgcctgtcagcaaaaacgagatggtaaaattgctggaagcgacgcagtatcgtctggtgacgaagatgacccgtcccggcgaatttaccgtgcaggccaatagcattgagatgatccgtcgtccgtttgacttcccggacagcaaagaagggcaggtgcgcgcgcggctgacgttcagtgacgggcgtctggaaaccatcgtcaatctggataacaaccgccagtttggcttcttccgtctcgatccgcggcttatcaccatgctttcttcgccaaatggcgagcagcgtttattcgtcccgcgcagcggtttcccggatctgctggtcgatacgctgttggcgacggaagaccgtcatttctatgagcatgatggcattagtctttactctatcgggcgtgcggtgctggccaacctgacggcgggacgcacggtgcagggggccagtacgctgacccagcagctggtgaagaacctgttcctctccagcgaaagatcatactggcgtaaagcgaatgaagcctacatggcgctgatcatggatgcccgttacagtaaagatcgtattcttgagctgtacatgaacgaggtctacctcggtcaaagcggggacaatgaaattcgcggttttccgctggcgagcctgtattactttggtcgtccggtagaggaactgagcctcgatcagcaggcgttactggtggggatggtaaaaggggcgtcgatttataacccgtggcgcaacccgaaactggcgctggagcgtcgtaacctggtgttacgcctgttacagcagcagaaaatcatcgatcaggaactctatgacatgctgagcgcgcgtccgcttggcgtacagccgcgcggcggcgttatttcaccgcagccagcgtttatgcagatggttcgtcaggaactgcaggcgaagctgggggataaaattaaagatctctccggcgtgaagatcttcaccacctttgactccgtggcgcaggatgccgcagaaaaagccgttgtcgaaggtattccggcgttgaagaagcagcgtaaattgagcgatctggaaaccgcgatggtggtggtggatcgctttagcggcgaggtgcgcgcgatggttggcggggcggagccgcagtatgccggctataaccgtgccatgcaggcgcgccgttccatcgggtcgctggcgaaaccggcgacctatctgaccgcgttaagtcagccgaacttataccgtctgaacacctggattgccgatgcgccgatttctctgcgccagccgaatggtcaggtctggtcgccgcagaacgacgatcgtcgctacagcgaaagcgggaaagtgatgctggtggatgcgttaactcgctcaatgaacgtaccgacggtcaatctggggatggcgttaggtttaccggcggtaaccgatacctggacgaagctcggcgtgccgaaagatcagctcaatccggttccggctatgctgttaggggcgctgaacctgacgccgatcgaagtggcgcaggcgttccagactatcgccagcggcggaaatcgcgcgccgttatcagcgctgcgttcagttattgcggaagatggtaaagtgctgtaccaaagttatccgcaagctgaacgcgctgtaccggcacaggcggcttacctgacgctctggacaatgcagcaggtcgtccagcgtggtacggggcgtcagcttggcgcgaaatatccgggtctgcatctggcgggtaaaaccgggacgacaaacaacaatgtcgatacctggtttgccggtatcgacggcagccaggtgactatcacctgggtaggccgtgataacaaccagccgacgaaattgtacggcgccagcggcgcgatggcgatttaccagcgctatctggcgaaccagacgccgacgcctttagttctgacgccgccggaagatgtggtggatatgggcgttgattacgacggtaattttgtctgtagcggcggtatgcgcactctgccggtctggacggacgatccaaatacgctgtgccagcagggcgagatgatgcagcagcaacagcagccgtcaggcaatccgttcgatcagtcgtctcagccgcagcagcctgcgcagcaacagccgccgaaagaagagaagagcgacggcgttgccggctggattaaggagatgttcggcggcaattaa

SEQ ID NO: 369610 - DNA, 2475 bp, Salmonella enterica
atgctacaatgcggcgcaaagaaagttaaccccgtggagccgtttgtgacgtcattgcccgttgccgccgtattgcctgaattgttgacagccctaaaaaccgcgccgcaggttttgttgtccgcgcctaccggggcggggaaatccacctggctgccgttgcaactcctgcaacaggggccggttgctggaaaaatccttctgcttgaaccgcgtcgtctggcggcgcgtaatgtcgcgcagcgtctggcggaagcgttgaatgaaaagcctggcgaaacggtaggttaccggatgcgcgcgcaaagctgcgtggggccgcgtacccggctggaagtggtgacagaaggcgtattgaccagaatgattcagcgcgatcccgaattacgcggcgtggggctggtgatactggatgaatttcatgagcgcagtttacaggcggatttagcgttagcgctgttgctggatatccagcaagggctccgtgacgatctcaggctgttaatcatgtctgcgacgctggataacgacaggctttgtcagcgactgcctgatgcgccgacgatcgtctcggaggggcgcgcgtttcccgtggagcgacgttatcagccgcttgcggcgcatttgcgttttgatgaagccgtcgcgatggcgacagcggaactgctgcgcaatgaaaacggttcgctgctgctatttttacccggcgtaggcgaaatacagcgcgttcatgaacatctggcgtcgcgggtaggcagcgatgtcctgctttgtccgctgtatggcgcattgtctctggaagcgcaacgcaaagcgattgttcccgcacccgccgggatgcgtaaagtggtattggcgactaacattgccgaaaccagtttgacgattgaagggattcgtctggtcgtcgatagcgctcaggagcgcgtggcgcgatttgacgcgcgaacgggactgacgcggctggttacgcagcgtatcagtcaggcgtcaatgacgcagcgcgcggggcgcgccggacgactggcgccgggtatctgtttacatctgctggccaaagaacaggcggagcgggcggcggcgcaaagcgatccggaaatcttacacagcgacctttccggtttattgatggaggtgttgcagtggggatgtcacgatccggcatcgcttttctggctggacaggccgccggaggtgaatcttcaggccgcccgccgtttattattgatgttaggcgcgctggagggcgagcggttaagcgcgcggggccggaaaatggcggcaacaggtaacgatccgcgcctggcggcgatgttagtcaacgccggcgagggcgatagcgccgccactgccgccatgctcgcggccatccttgaggacccgccgcgcggcggcggtacggatttaagcgtagtattttcgcggcgacagccgggctggcagcagcgtagccagcagcttttaaaacggctgcaggtgcgtaatggcgagccggatagcgcgcttattatgccgctgttggccagagcgtttagcgaccgcatcgcgcggcgtcgtggtcaggaagggcgctatcagttagccaatggtatgggcgcgatgttagatgcggatgacgcgttgggacgtcatgaatggctgatcgcgccgctgttactgcaaggtagcgcctcgccggacgcccgaatattgttggcgcagccgctggatattgcctcgctgattcaggcgtgtcctgatttactgcgccagtccgacacggttgaatgggacgaggcgcagggaacgttgaaagcatggcgcagaatgcgtattggacagttgacggttagcgttcagccactggcgaagccgtctgaagaggagcttcatcaggcgatgctgaacggcatccgcgataaaggtctgtccgtccttaactggacgccggaagcggagcagttccgtctgcgtctgcactgtgcggcgaaatggctgccggaatatgactggcctgccgtggatgaggcgtcgctgctggcgactctggaaaattggttgctgccgcacatgacaggcgtacagtcgttacggagtctgaaatctctgaatgtgactcaggcgttacggggactgcttgactatgccatgctgcaacgtctggatagtgaactgcctgggcattacactgtgccgacgggaagccgaataacgattcgttatcatgaagataacccgcccgcgctggcggtcagaatgcaggaaatgtttggcgaagcgaagaccccaaccatcgctcagggccgcgtgccgctggtgctggaactgctttcgccagcgcagcgaccgctacagattacgcgcgatttaagcgctttctggcagggggcgtatcgcgaagtgcaaaaagagatgaagggccgttaccccaaacatgtctggccggacgatccggcgaatacggccccaacgcggcgcacgaagaagtattcgtga

SEQ ID NO: 369611 - DNA, 531 bp, Salmonella enterica
atgtctgagccaaaacggctgttttttgcgattgacttacccgacgacgcgcgcgcacaaattatcgcctggcgcgccgcccattttgcgtctgaagacggacgccccgtcgcagcggcgaacctacacctgacgctggcctttttaggcgacgtcagtagcgataagcagcgcgcgcttgcgcaactggccggacgaattcgccagccgggctttacgctacatctggatgacgccggtcagtggctgcgttcgcgcgtggtgtggctggggatgcgccagccgccgcgcgggttgttgcagttggctaatatgctgcgcgcgcaggccgcccgcagcggttgttaccaaagcccgcagccttttcacccgcatattacgctgctgcgcgacgccagccatacggtggctatcccgccgccgggcttttgctggtcatttccggtcacgtcgtttgcgctttacgcctcttcgtatgggcaaggccgtacccgctatgccgagctgcagcgctggacgctgggcgaataa

SEQ ID NO: 369612 - DNA, 705 bp, Salmonella enterica
atgctattctcaccccctttacaacgcgctacgctgattcagcgctataaacgttttttagctgatgtcatcacccctgacggtacaacgcttacgctgcactgtcctaataccggcgcgatgaccggctgcgccacgcctggcgataccgtctggtattcgacatcagaaaatactaaacgcaaatatccgcatacctgggaattgactgaaacgcaatccggcgcattcatttgcgtgaatacgctgcgggcgaaccagctaacgaaagaagcaattcaggagaatcgcctgccggcgctggcggggtacaatattctgaaaagtgaagtcaaatatggcgccgagcgcagccgtatagattttatgttacaggcagatttccgcccggactgctatattgaagtgaaatcggtcacgttagcggaaaaagaaaacggttattttcccgacgccatcaccgaacgagggcaaaaacatcttcgggaattgatgggcgttgcggcggcaggtcatcgcgcagtggtggtgttcgcggtgctgcactccgccattacacgtttttcacccgcacgtcatatcgatataaaatacgcgcagctattgagcgaggctcagaataaaggcgtggaagttttagcttataaagcagaactttcagcccaaaaaatggaactgaacgaaccagtacccataacgttgtag

SEQ ID NO: 369613 - DNA, 456 bp, Salmonella enterica
atgcaagaagggcaaaaccgtaaaacatcgtccctgagtattctcgccatcgctggggtggagccgtaccaggagaaaccgggcgaagagtatatgaacgaagcccagctatcgcacttcaagcgtattcttgaagcatggcgtaatcaactccgggatgaagtcgatcgcactgtgacgcacatgcaggacgaagccgccaacttccccgatccggtcgatcgcgccgcgcaggaagaggagtttagcctggagttacgtaatcgtgaccgtgagcgcaaactgatcaaaaagatcgagaagacgctgaagaaagtggaagatgaagacttcggttattgcgagtcctgcggggtggagattggtatccgccgcctggaagcgcgtccaacagccgatctgtgcatcgactgcaaaacgctggctgaaattcgcgaaaaacagatggcgggttaa

SEQ ID NO: 369614 - DNA, 942 bp, Salmonella enterica
atgacaggcgggagttttcccgccttattctttattgcccgcagcatgactgactcacactatattggccgtttcgcgccgtcgccatccggcgaactgcatttcggctcgttaatcgccgccctcggcagctatctacaagcccgtgcgcaacgcggaatttggcgcgttcgcatcgaggatatcgaccccccacgtgaagttcccggtgccgcagcgaccattctgcgccagctggaacattacggcctgcactgggatggcgaggtcttatggcaatcacagcgtcatgaggcttatcgcgaggcgctggcctggcttcacgagcagggactgagctactactgcacttgcccccgctcgcgcattcaacgtctgggcggtatttacgacggccattgtcggacgttatgccacgggccggagaatgccgccgtcagaattaaacagcagcatccggtgatgcatttccatgatgccttgcgcggcgacatccaggctgacccgcagctggctagcgaagattttattatccaccgccgcgacggactgtttgcttataatctggccgtggtggtcgacgatcattttcagggggtaacggagatcgtccgcggcgcagatttaatcgaacccactgtccgacaactttcgctgtataaacagtttggctggcgtgtgccaggctacgtgcaccttccgctggcgctcaacgaacaaggcgctaaactttccaagcaaaatcatgcccctgcgcttgcgacaggcgatccgcgcccggtactggtccaggcattgcgctttttaggccaacgcgccgtcgtagcgtggcaggagatgtctgttgaggagttgctgcgctttgcggtggcgcactggaggcttacagccgtacccacatcggctaatgtaaatccggcattctcaaatgcgtctcgctga

SEQ ID NO: 369615 - DNA, 1419 bp, Salmonella enterica
atgacactaccgaggtgcgctatttttacccgagtcgctaatttttgccgtaaggtgttaagccgcgaggagagcgaggcagaacaagccgtcgcccgtccacatatgacgattatcccgcgtgaacagcacgctatctcccgcaaagatatcagtgaaaatgccctcaaggtactgtacaggctgaacaaagcgggctatgaagcctacctggtcggcggcggcgtccgcgatctcctgctcggtaaaaagccgaaggatttcgacgtgaccaccaacgcaacaccggatcaggtacggaaattattccgcaattgccgtctggtggggcgccgtttccgcctggctcacgtgatgtttggcccggaaattatcgaagtggcaacgtttcgtggtcatcatgaaggcagtgaaagcgaccgtacgacctcccagcgtgggcaaaacggtatgctgctgcgcgataatatcttcggctctatcgaagaagatgcccagcgccgcgatttcaccatcaacagcctttactacagcgtagcggattttaccgtgcgcgattacgtcggcggaatgcaggatctgcaagaaggcgtgattcgcctgatcggcaatccggaaacgcgctaccgcgaagatccggttcgaatgctgcgcgccgtgcgtttcgctgcgaagctcaatatgcgtatcagccctgaaacggctgagccaatcccgcgtctggcaaccttgctaaacgacattcctcccgcgcgcctgttcgaagagtcgctgaagctgttgcaggcggggaacggttatgaaacctatcaacaactgcgggaataccacctcttccagccgttgtttcctaccattacgcgttatttcaccgaaaacggcgacagcgcaatggaacgcatcattgcgcaggtgttgaagaatacggataaccgcatccgtaacgagatgcgcgttaacccggcatttttgtttgccgccatgttctggtatccgctgctggagatggcgcaaaaaatcgctcaggagagcggccttgcctattacgatgctttcgcgctggccatgaatgacgtgctggatgaagcctgccgttcactggcgatcccgaaacgccttaccacgcttacccgtgatatttggcagcttcagttacgcatgtcccgtcgtcagggcaaacgcgcctggaaactgatggaacatcccaaattccgcgccgcgtttgatttgctggagctgcgcgctcaggtggaaaataatactgaactgcaacgtctggcgcagtggtgggccgagtttcaggcttccgcgccgccggaacaaaaagggatgctcaacgagctggacgacgatcctgctccacgccgccgtcgttcacgtccgcgcaaacgcgcgccgcgccgcgagggcaccgtatga

SEQ ID NO: 369616 - DNA, 480 bp, Salmonella enterica
atgacgatcgcgtatatcgcgcttggcagtaatctggcctctccgctggagcaggtcaatgccgccctgaaggctatcgccgacattcccgatagccgtatcgtcgcggtttcttcgttttaccgcacgccgccgcttggcccacaggatcagcccgattacctgaacgctgcggtggcgctggataccgctctcgcccccgaagaattgcttaaccatacccagcgcattgagctgcaacagggccgggtgcgcaaggccgaacgctgggggccgcgcacgctggatctcgacattatgctgtttggcgatgaagtcattaacaccgaccatctgaccgtgccgcactacgacatgaaaaaccgcggttttatgctgtggccgttattcgaaatcgctcctgatctgatctttccggatggtatcagcctgcatcagcatctcacccatcttggtgctgcaaaacccgcccactggtaa

SEQ ID NO: 369617 - DNA, 792 bp, Salmonella enterica
atgaaacccaccaccatttcactgctgcagaaatgcaagcaagagaaaaaacgcttcgcgacaattaccgcctacgactacagcttcgctaagttatttgccgacgaaggtatcaatgtgatgctggttggcgactcactgggcatgacgattcaggggcacgactccaccctgccggtcaccgtggaagatatcgcttaccacactcgtgccgtgcgacgtggcgcgcccaactgtctattgctctccgacctgccgtttatggcttacgccaccccggaacaggcatgtgaaaacgcggctatcgtgatgcgtgcgggggccaatatggtcaaaattgaaggcggcgcctggctggttgatacggtgaaaatgctcaccgaacgcgccgtgccggtttgtggtcatctggggctaacgccacagtcggtgaatatcttcggcggctataaaattcagggccgcggcgatgcagggcaagtgctgctggatgacgcgctggctttagaagcggctggcgctcaactgctggtgctggagtgcgtgccggttgagctggcgaagcgcgtcacggaagcgctgtcgattccggtgatcggcatcggcgcaggcaacgtcaccgacggtcagatcctggtgatgcacgatgcgtttggcatcaccggcggccatattcccaaattcgcgaaaaatttccttgccgaggcgggcgacatgcgcgccgccgtacagcagtatatggctgaagtggagtccggcgtttatccgggcgaagaacacagctttcactaa

SEQ ID NO: 369618 - DNA, 855 bp, Salmonella enterica
gtgctaatcattgaaaccctgccgctgctgcgccagcatattcgtcgtctgcgtcaggaaggtaaacgcgtcgcactggttcccaccatgggcaacctgcacgacggccatatgaagctggtcgatgaggcaaaagcccgggctgatgtggtgatcgtcagcattttcgtcaacccgatgcagtttgaccggccggacgatctggtgcgttatccgcgcacgctgcaggaagattgtgaaaagctgaacaaacgcaaagtcgattatgtctttgcgccagccgttgaggaaatctacccgcaggggctggaaggccaaacgtacgttgatgttcccggcctctctaccatgctggaaggcgccagccgtccgggtcatttccgcggcgtctcgaccatcgtcagcaagctgttcaacctgatccagccggatatcgcctgctttggcgagaaggatttccagcaactggcgctgatccgcaaaatggtggcggatatgagttatgacattgagatcgtcggcgtgccgattattcgcgctaaagacggtctggcgctcagctcacgtaacgcttatctgaccgcagagcagcgcaaaattgcgccgggtctatacaacgtgatgaatagcatcgctgaaaaactgattgcgggtaatcgtgagctgcaagagattattgccattgccgaacaggaactgaatgaaaaaggcttccgtgccgacgacattcaaatccgtgatgccgacacgctgcaggagctgacggaaaccagcaaacgcgcagtgattctggccgccgcctggctgggtcaggcgcgtctgatcgataatcaaagcgttacattagcccagtag

SEQ ID NO: 369619 - DNA, 381 bp, Salmonella enterica
atgattcgcaccatgctgcaaggcaagctccaccgcgtaaaagtcacgcaggcggacctgcactacgaaggttcttgtgccattgaccaagatttccttgatgcctccggtattctggaaaacgaagcgattgatatctggaacgtgaccaatgggaaacgtttctcaacctatgcgattgcggctgaacgcggctccagaatcatctcggtgaacggtgcggcggcgcactgtgctgaagttggcgacattgtgattatcgccagcttcgtcaccatgtctgatgaagaagcgcgtacatggcgtccgaaagtggcctattttgaaggcgacaacgaaatgaagcgcaccgcgaaagctattccggtacaggttgcctga

SEQ ID NO: 369620 - DNA, 1230 bp, Salmonella enterica
atggttatgcgcgttgttcttatcttgctgttctttttcgccggtaatgtgttggctgccttgcccgctcgttatatgcaaacgacgaaagatgccgccatctggtcgcagattggcgacaaaatggtgaccgtagggaatatccgcgccggacaaattctttccgtaacgcctgttgcggctgattattatgcctttaaattcggcttcggtgtgggctttatcgataaaggccatctggagtccgtgcagggaaaacaaaaagtggaagatggcctgggcgatcttaacaagccgctcagcaatcagaatctggtgacctggaaggacacgccggtgtataacgcgccggacatcagtagcgccccgtttggcgtattggtggataatttgcgttaccccattattagcaagctgaaaggccggctacatcaaacctggtatcagatccgtattggcgacaggctggcttatgtcagcgccatggatgcgcaggaagacaacggcattccgattttgacctatcatcacatcttacgtgatgaagagaatactcgttttcgccatacgtccaccacgacttcggttcgggcattcagcaaccaaatgacctggcttcgcgatcgcggctatgccacgttgacgatgtaccaactggaggattacatctataaccgcgctaatttcccggcgcgcgcggtggctatcacctttgatgatggccttaaatcggtgagtcgctatgcgtatccggtattaaagcagtacgatatgaaagcgacggcatttattatctcatcgcgtattaagcgccatccgcaaaaatggaatcccaggtcgctgcaatttatgagcgtgtccgaattgcgcaagataagcgatgtttttgattttcagtcgcatacccattttttacaccgggtagacgggcatcgccgcccgattttatatagccgcagctaccataatattctgtttgattttgaacgttcgcggagggcgctcacacagtttactccgcacgtattttatctttcttatccctttggcggctataacgcgaccgcgatcaaagcagcaaaagacgccggtttccatctggcggtcaccacggtgagagggaaggtgaagccgggagataatccgatgctgctcaaaaggctgtatattttacgcacggattcgctggaaacgatgtcgcggctgatcagcaaccagccgcagggataa

SEQ ID NO: 369621 - DNA, 441 bp, Salmonella enterica
atgctgggatgggtcatttcctgtcatgacgatcgggcgcaggaaatgctcgaaggtcttgaaaagaagtatgggccgttggcgcagtgtcgggcggtcaatttctggcgtgggttaagcgtaaatatgctcagccgcatgatgtgtgacgccctccatgccaccgactccggtgaaggcgtgatatttttaaccgacatttccggcgcggcgccttatcgtgtagcgtcgctgatgagccataaacattctcaatgtgaagttatttccggtgttagctattcattgatggaggaaatgattacctggcgagagtcaatgagcagttcagcatttcgcgaccagattgtcgcgcttggcgcgccggatgtcaccagtctctggcatcagcagcagaaaaatccgccttttgtattgctgcatgattcgtatgagttttga

SEQ ID NO: 369622 - DNA, 540 bp, Salmonella enterica
atgaaactctccttaaaaacactcactgtggcactggccgccatcaccctctcccccgccgcgctggcagacaccgccaaagacggcaccgtacatatcaccggcctcattaagcaaaacgcctgtacggtaaaaacggattcagtagaggtgacattacaggaagaatttgcctctcttttcactgccgcagggcagacggcaggggatacagacttcaccatcgaactcgaaaactgcgacgcaaacgtctacagcagtgtacaggcgcgctttgaaggcacactcgacggaaccgatgcgaccatcctgaaaaatgaggatgatgctgagaatattggcgtgcaaattcttgataaaactagcacccctatgacctttaacgatcttcaggcatggtctgccgcagtcgcgctccctacagcagagggggtgacggaactctcaatgcctttcaccgcccgctatatcgccaccgcggttcccgttaagtcgggaacggtcgatgcaaccgcaacattctatctgcaatataactga

SEQ ID NO: 369623 - DNA, 684 bp, Salmonella enterica
atgaattcattggctaaagcagggttgctttgttgcctgttgtgcggttcgctggcgcatgccgcagggataaacatcggcacaacgcgggttatttttcacggcgatgccaaagatgcgtccatatcgataagcaatagcgacaacgttccctatttaattcagtcctgggcgcaatcgatcagtgaaaccggggcgagcggtgatgcgccgtttatggtcaccccgccgctttttcgccttaatggcgggcaaaaaaacgtactgcgaattatccgtaccggcggtaatttgccggaagatcgcgagtcgatgtactggctggatattaaatcgattcccagcagcaatccggacaataaacacaacacactcatgctggccgttaaagcggaatttaagctgatttaccggccaaaagcgttaacccaaaaaccagaagaggttgccgatcgattaacgtggtcgcgtcagggtcgcacgctcaccgtgaagaaccccacgccctattatatgaacttcgccaccctttccgttggcagtcaaaaagtgaaagccccgcgctatgtggcgcctttcggcaacgcgcagtacacgctgcctgccgccgccagcggcccgatcgcctggtctatcatcaacgattttggcggtactggccccgaacataaacaaacgccttga

SEQ ID NO: 369624 - DNA, 2559 bp, Salmonella enterica
atgagagtgccgatgcgcaaaaggcaacaccgggtattttatttatcgcgctgcgctgtgtgtatcgcgctgggcagcacgttcacacacgttgcatgggcgcgcgactatttcaatccggcatttattgaaaaccatgggcaggcgagtcgcacaagcgtcgatctgtcgacatttgataacgacaaaagccagctgcctggcacctattacgtcactatcaatatcaataaaacagaaatcggcgcacgaaacgttgattttcaactcgcgacgctcagtgacggtcaacaggcattacagggctgtttacggctccaggaactaaaagataacggcgtcaaaaccgacctttttccaacgctggagagtgaaaaaggctgcgtcgatctcagcgttatccccggcgccagccagcggtttgattttcagcaacaggcattatcagtaagcatcccgcaactctacatcgccaacaacgcacgcggctacgtaccgccggaaaagtggcaggaggggattaccgcgctgatgctgaactacagcttcagcggctataaagagtacggttccagtgaggattccgacgatgcggaatcgaagtatctcgctctccagccgggttttaacctcgggccgtggcgttttcgcaactacagtaactggagttcaaataacggcgagagcggtagctggaacagcgtttataactatttacagcgcgacattatcgcgctgaaaagccagttcaccgccggagacagcaatacgccatccgacgtgttcgacagcgtaccttttcgcggcctccagctcacctctgacgatcaaatgcagcccaacagccagcgtggttacgccccgacgattcgcggcatcgcccgctcaaacgcgcaggttatcgtgcggcaaaacggctatatcgcctatcagaccgccgtttcgccgggcgaatttgaaatcaacgatatgtttcccaccggcagcaacggcgactatgacgtgacggtaaaagaaaccgacggcagcgaacagcactttatcgtgccctactcttcgctgccgattctgcagcgcaccggacgggcaaaatacagcgtgaccgtgggtaaatatcgcgattataacaaccacacgctggacgacttcggccaggcgaccctgctgtacggcctgccgtggggcatcaccctgtacggcggcagccagattgccggcgataaataccagtccgtcgccttcggcgtcgggcaaaatatgcagatgctgggggccatttccctggacggcatctggtcgcacgccaaatttgactatggccgcaaagaaatcgggcaatcctggcgcgtccgctacagcaagggcgtcgtcagtacgggcaccacgttttcgctggccggctatcgttacgccagcgaaaactacaattcgctgagcgaggtgatcaacccggacgacgatttttatgataactacggcaagcgccataatcgtttcgaagcttcggtcaaccagcaaattagcaatacgctcggttccttaacgctaagttgggtcaaagaagattactggcacagcgcgcagcagatggaatccctgagcgccagctacaacaatagctggggtccggtgagctatacgctgagctacagctataacaaaaacacctaccagtaccgttcggacaatgacgatgatgacaacgacgacgatcgttataaccagaacgatcggctgttcacgctgtcgctgcacgttccgtttacggtgttcgattccaggctatacgccagctatatgctgaacacgcgtaagcacgatgccacggtgaacagcaccacccttagcggcaccgcgctgcgtgacagaaacctgaactggtcgttacagcaaagccacagcacacaagacggtgattccggcggggtaaacgccagctataaaggcacttatgccaacctcaacgccggttacaatcagtcgccagatagccaacaagtcagctacggcatcagcggcggcattctggcgcacgaaaacggtattaccctgagccagccgattaccggcgcggcgattttaattaaagcgcccggcgccagcggcgtttcggttgaaaaccagaccggcgtcgccaccgacttccggggttatacggtgatccccaacgtcacgccgtattatcgctacgatatctcgctcgacagcagcacgtttgctgacaacgtggatattccgctcaacaaccagaccgtctacccgacgcgtaatgcggtggtgcgcgcggcgtatgacacgcataagggctatcgcgtgttgttaacgctgacgcgcagcaatggcgagcccgtgccctttggcgcgacggcaagcgtcgatgggcaggatgcgaacctggccagtatcgtcggcgataaaggccaggtcttcctcagcggcctgccggaagagggcctgctgctggtgaactggggaagcgcctcttgccgcgcggattaccacctggatatcagcaaaaatatgaacggcatagtgatggcgaacgccgtctgccagtga

SEQ ID NO: 369625 - DNA, 1080 bp, Salmonella enterica
atgaagaatttatggatgctgctggcgctgtcgctattttcaggccatgcgctggcagacggaacgatgggcaacggaagcggctggtgtcaacccaccagcggcacgcataatttcttttttccccttgaccagaccattaccgatacggatgagaaccaggcagggaaaatagtcaaagagagttggtcggtcggcggcgaatacagcgccaggtgcgactgcgataataaagattatcagggcgttaactatttcaccgccacgaccggcgatttaacacaaaaaggaacgtacagcgaagcgggtagcaatgggcaacagatggatttttatgttctggtcgcgggtaagctggagattggtacggaaacctacatcgtcggtaacctgaaacagtatatccccgttcccttttcagcgatcagtaatcaggaccccaccgcaggcgggtgtacgggcgcggacataaacaaaatgtccgcagggaataagggtaacgtgcgtatttatattactcacccactggtaggtgaaatcaccattcctgagacgacgattatgaatctctatttgtcaaaaacgccgggcagcagcggagataatattcccccttccgttccaccgatggcgcacgtcaccatgtccgggaccattaccgtgccgcagtcctgctccatcaacgccgggcaggttatcgaggtcaggctaccggatattgagggcaaagatattcgtcacctcggcgacagtccgcagaactcgcacgtcaccactcaggtaaactttacctgtagtaacgtggcggacggcaccaacctgtcgatgtcattaaatggcgcaaccgatccgcacaacccggactacctgaaaactgacaatgagaatttggggatacggatttccgataaatacgataataccatcgttcccggcggcagcgccgaattgccgattgaagattacgccgacggtaaaggcagcaccgagttcaccgccgcgccggtcaataccaccggacatgttccccacaccggagaataccaggctaccgccacgctggagattcagattcgctga

SEQ ID NO: 369626 - DNA, 771 bp, Salmonella enterica
atgatgcagctttactgggttgcccttaaaagcatctgggcgaaagagatccaccgctttatgcggatctgggtgcaaacgctggtgccgcccgtcatcaccatgacgctctattttattattttcggcaacctgattggttcgcgcatcggcgaaatgcatggttttagctatatgcaatttattgtgccgggcctgattatgatggcggtcattactaactcctacgcgaatgtcgcgtcgtcattttttagcgccaagtttcagcgcaatattgaggaactgctggtcgcgccggtaccaacgcatgtgatcatcgccggatttgtcggcggcggcgtagcgcgcgggctgtgcgtagggattctggtgacggcgatttcgctctttttcgtgcctttccaggtgcattcctgggtatttgtcgcgctaacgctgattctgaccgcgattctgttctcgctggccggactgctgaacgccgtgtttgcgaaaacctttgacgatatcagcctgatcccgacctttgtgctgacgccgctgacctacctcggcggggtattttactcgctgacgctgctgccgccgttctggcaagggctgtcgcacctgaacccgatcgtctacatgatcagcggcttccgctacggcttcctgggtatccatgatgtaccgctggtgacgacgtttggcgtactggtgatctttatcgccgctttctacctgctgtgctggtcgctgatccagcgtgggcgcgggttgcgcagttaa

SEQ ID NO: 369627 - DNA, 927 bp, Salmonella enterica
atgaccattgcgctggaacttcaacaacttaaaaaaacctatcccggcggcgttcaggcgttgcgcggcatagatttgcaggtcgaagcgggggatttttacgcgcttctggggccaaatggagcagggaaatcgaccaccatcggtattatcagctcattggttaataaaacgtccgggcgcgttaacgtttttggttacgacctggaaaaagacgtggttaacgccaagcgacagcttggactggtgccacaggagtttaactttaacccgtttgaaacggtgcaacagatcgtagtgaatcaggcgggttattacggcgtggaacataaagaggcggttttacgtagcgaaaagtatttaaaacagctcgatctgtgggaaaaacgtcatgaacgcgcgcggatgctctccggtgggatgaagcgccgcctgatgatcgcccgcgcgctgatgcatgagcctaaactattgattctcgatgagccgacggcgggcgtcgatatcgaattgcgtcgctcgatgtggggattcctgaaagacttaaacgccaaaggcaccaccattattctcaccacccactatctggaagaggcggaaatgctgtgccgcaatatcggtattattcagcacggcgagctggtggaaaatacctccatgaaaaatctgctttcaaagctgaaatcggagacgtttattctggatttagcgccaaaaagcccgctacctaagcttacgggttatcaatatcgtctggtggatacctcgactctggaggtggaagtgttacgcgagcagggggttaacagtgtctttagccaactgagcgagcagggggttcaggtattaagtatgcgtaataaagccaaccgtctggaagaactgtttgtgtcgctggtgcatgaaaaacaaggagatcgcgcatga

SEQ ID NO: 369628 - DNA, 663 bp, Salmonella enterica
atgaaagacatagatacactcatcagcaacaatgcactatggtcaaaaatgctggtggaagaggaccccggattttttgagaaactggcgcaagcgcaaaaaccgcgctttctatggattggatgttccgacagccgcgttcccgcagagcgtttaaccgggcttgaaccgggcgaattgtttgttcaccgtaatgtggctaacctggttattcacaccgatctgaactgtctctccgtggttcagtatgcggtagatgttctggaagttgagcatattatcatttgcggccactccggttgcggcggtatcaaggctgcggtagaaaaccctgagctgggcttgattaataactggctgctgcatatccgcgacatctggcttaaacatagctcgctgttgggaaaaatgcccgaagagcaacgtctggacgcgctctatgaattgaacgtcatggaacaggtctataacctggggcattccaccattatgcagtcagcgtggaaacgcggtcagaatgtgaccattcacggctgggcgtacagtatcaatgatggcctgctgcgcgatcttgacgtcaccgccaccaacagagaaacgctggagaacggctatcataagggtatttccgccctaagtctgaaatacattccccaccaataa

SEQ ID NO: 369629 - DNA, 537 bp, Salmonella enterica
atgaaacatactgttgaagtcatgatccccgaagcggagatcaaagcacgtattgccgagctgggtcgtcagattaccgaacgttataaagacagcggcagtgaaatggtgctggtaggtctgttgcgtggctcatttatgtttatggcggacctgtgccgtgaagtccaggttcctcatgaagtcgattttatgaccgcctccagttatggtagcggcatgtccaccacacgcgacgtgaaaatcctcaaagatctggatgaagatattcgtggtaaagacgtgctgattgtcgaagacattattgattccggtaatacgctgtcgaaggtccgtgaaatcctgggcctgcgcgagccgaaatcgctggcgatttgtacgctgctggataaaccttctcgccgcgaagtggacgtgccggttgagttcgttggcttttcgattccggacgaatttgtagtcggttacggtatcgactacgctcagcgttatcgccatctaccgtatgttggtaaagtggtggtgctggacgagtaa

SEQ ID NO: 369630 - DNA, 2391 bp, Salmonella enterica
atggcagaaaataacgcacgatcgccacgattactcgtgacgctgacggccctctttgcagcactttgtgggctgtatcttcttatcggaggtgtctggctggttgctattggcggttcctggtactaccccatcgcgggcctcgtgatgctggttgtggccggattgctatggcgcagtaaacgtgccgcgctgtggctgtatgccgccctgctgctggcgacaatgatttggggcgtgtgggaagtcgggttcgacttctgggcgctcacgccgcgtagcgatatcctggtgtttttcggcatctggctaatattaccgtttgtctggcatcggctggtggttccttccagtggcgcagtggcggcgctggtcgtggcgttgctgattagcggcggcattctgacctgggccggcttcaacgacccgcaggagatcaacggtacgcttcgcgccgacgccacgcccgccgcaacaagttcgtcgatcgccgacgaagactggccggcctatggacgtaatcaggaaggccaacgctattcgccgctgaaacagatcactgcggataacgttcaccaactgaaagaagcgtgggtcttccgcaccggcgatctgaaacaacccaacgatccgggtgaaatcaccaacgaagtgaccccgattaaagtcggcgatacgctttatctgtgtacagctcaccagcgtctgttcgcgctggacgccgccagcggtaaagagaagtggcattttgatcctcagttgaagaccgattcgtctttccagcatgtgacctgccgcggcgtctcttatcatgaggccaaagcggataccgcctcgccggaggtcatcgccgactgtccgcgccgtattatcctcccggtcaacgacggtcgccttttcgcggtgaatgccgaaaccggcaagctgtgtgaaaccttcgccaacaaaggcgtcctgaatctgcaaaccaatatgccggacaccacgccgggactgtatgaaccgacgtcgccgccgattatcaccgataaaacgattgtcattgccggttcggtcacggataacttctctacccgcgaaacgtccggcgttatccgtggttttgatgttaatagcggtaaactactgtgggccttcgatccgggggcgaaagatccgaacgcgattccagccgatgagcacgcttttacctttaactcgccgaactcctgggcgcctgccgcctatgatgcgaaactggatctggtctatctgccgatgggcgtgaccacgccggatatctggggcggtaaccgcacgccggagcaggaacgttatgccagctccatcctggcgctgaatgccaccaccgggaaactggcctggagttatcagaccgtccatcacgatctgtgggatatggacctgccggcacagccgacgctggcggatattaccgttgacggtactaccgttccggttatctatgcgccagcgaaaaccggtaatatctttgtgctggacagacgtaatggcgagctggtcgtgcccgccccggaaaaaccggtcccgcagggcgcggcaaaaggcgattacgtcgccaaaactcagccgttctctgatttaaccttccgcccgaaaaaagatctctccggcgcggatatgtggggcgcgaccatgttcgaccaactggtgtgccgcgtcatgttccaccagttgcgctatgaaggtatcttcaccccgccgtccgagcagggaacattggtattccctggcaacctggggatgtttgaatggggcggtatttccgtcgatccagaccgtcaggtcgctatcgctaacccgatggcgctgccgtttgtctcgaagctgatcccacgcggcccgggtaatccgatggagccgccgaaagacgcgaaaggtactggtacagaagcgggtattcagccacagtacggcgtaccattcggcgtcacgctgaatccgttcctttcgccgtttggcctgccgtgtaaacaaccggcctggggctatatttccgcgttggatctgaagaccaatgaaatcgtgtggaagaaacgtatagggacgccgcgcgacagtatgccgttcccgatgccggttccggtgccgttcaacatggggatgccaatgctgggcgggccaatctcaaccgccggtaacgtgctgtttatcgccgcgaccgccgacaactacctgcgcgcttataacatgagcaacggggaaaaactgtggcagggacgtttacccgccggaggccaggcaacgccgatgacctatgaggtaaacggtaagcagtacgtggtcgtttctgccggaggccacggttcgtttggtacgaagatgggcgactatatcgtggcctatgctttgcctgacgacgcgaaataa

SEQ ID NO: 369631 - DNA, 1611 bp, Salmonella enterica
atgttacgccgtgatttcttaaaatattcagtggcgctgggggttgcatcagcgctgccgctgtggagccgcgccgcttttgccgccgaacgtcccgcgttgcctattcctgacctgttaacggcagatgcgagcaaccgtatgcagttaattgttaaagccggacagtcgacattcgccggtaagaacgcgacaacctggggctacaacggtaatttgctggggccagcggtacagcttcacaaaggaaaaagcgtgaccgttgatatccataaccaactggccgaagacacgacgcttcactggcatggtctggagattccgggcatcgtcgacggcggtccgcaggggattattcccgcaggcggaacccgcacggtgacgtttacgccgcagcaacgcgccgcgacctgctggattcatccgcacaaacacggcaaaaccgggcgccaggtggcgatgggccttgccggactggtgctgattgaagatgacgagattcgcaaattgcgcctgccgaaacagtggggcatcgacgatgtgccggtgatcattcaggacaaacgcttctccgccgatggccagattgattatcaactggatattatgaccgccgccgtcggctggtttggcgatacgctgctgaccaatggcgctatctatccgcagcattccgcgccgaaaggctggctacgtctgcgcttgctaaatggctgtaatgcgcgttcgctgaatatcgccgccagcgataatcgcccgctttatgtgatcgccagcgacggcggcctgctggcggagccggtgaaagtcaccgaactgccgttattaatgggcgagcgttttgaagtgctggtggatatcagcgacgggaaagcctttgacctggtgacgctgccggtcagccagatgggaatggcgatcgctccgtttgataaaccgcatccggtgatgcgtatccagccgctgcggattaccgcctccggtacgctgccggatacgttgacgacgatgctggcgctgccgtcgctggaagggctgacggtgcgcaacctgaaactgtcgatggacccgcgtcttgatatgatggggatgcaaatgctgatgaagaaatatggcgctcaggcgatgagcggcatggatcatgacagcatgaacgcgcatatgcagggcggcaatatggggcatggcgagatggatcatggcaacatggatcacagcgggatgaatcatggcgcgatgggcaatatgaatcacggcggaaaattcgacttccataacgctaactttatcaacggccaggtcttcgatatgaacaaaccgatgttcgcggcgcaaaaaggccgacatgaacgttgggtgatttccggcgtgggcgacatgatgctgcatcctttccatattcacggcacgcagttccgtattctgtcagagaacggcaaagcgccagcagcgcacagaacgggctggaaggatacggtacgcgttgagggcggtatcagcgaagtgttggtcaagttcgatcacgacgcaccgaaggaacatgcctatatggcgcactgtcatctgttagaacatgaagatacgggaatgatgttaggatttacggtctga

SEQ ID NO: 369632 - DNA, 387 bp, Salmonella enterica
atgctaacgttgactttccctgatgccgtggtagaagcaatgaagacgtttttcagacccgtgttgtttggcagcctgatggccttatgcgcaaatagctatgcgcttactgaatccgaagctgaagatatggccgatttaacggcggttttcgtttttctgaaaaatgactgtggttaccaaaatttacccaacagtcagattcggcgtgcgctggtcttttttgcccagcaaaatcagtgggacctgagtaactacgacaccttcgatatgaaatcgttgggcgaagacagctaccgcgatcttagcggcatcggtattccggtcgctaaaaaatgcaaagctttggcccgcgattctctgagcctgttagcctacgttaaataa

SEQ ID NO: 369633 - DNA, 861 bp, Salmonella enterica
atggccgaaaatacgatgtggcatgaaacgctacacgaccagtttggtcagtactttgccgtagacaacgttctgtatcatgaaaaaaccgatcaccaggatttaatcatctttgaaaacgccgcttttggccgcgtgatggcgctggacggcgtggtacagaccaccgaacgcgacgagtttatttatcatgaaatgatgacccacgtcccgttgctggcgcacggtcatgcgaaacacgttctgattatcggcggcggcgacggcgcaatgctacgtgaagttacccggcataaaaacgtcgaaaccatcaccatggtagagatagacgctggcgtagtctcgttttgccgccagtatttacccaaccacaatgccggcagctacgacgatccgcgctttacgctagtgatcgacgacggcgtgaatttcgtcaatcagacccatcagacctttgatgtgatcatttccgactgtaccgatccgataggccccggcgaaagcctgtttacctccgccttttatgaaggctgtaagcgttgcctgaatccgggcggcatttttgttgcccagaacggcgtgtgcttcctgcaacaggatgaagcgctcgacagccaccgaaagctgagtcattacttcagcgatgtcggcttctaccaggcggcgattccgacctactacggcggcatcatgaccttcgcctgggcgacggacaacgacgctcttcgtcacctgtcgagcgaaattattcaggcgcgttttcatgccgccggcctcaaatgtcgctattacaacccggctattcatgccgctgcatttgcgctaccgcaatatctacatgacgcactgtccgcacagtga

SEQ ID NO: 369634 - DNA, 795 bp, Salmonella enterica
ttgaaaaagctgaaactgcatggctttaacaatctgacgaaaagcctgagtttttgtatttacgatatctgctacgccaaaaccgcagaagagcgcgatggctatatcgcctatatcgatgaactctataacgccaaccgactgaccgagatcctgtcggagacctgctccattatcggcgcgaacatcctgaacatcgcccgacaggattatgaaccccagggcgccagcgtcacgattctggtgagcgaagagccagtcgacccgaaacttatcgaccaaaccgaacatcccggcccgctgccggaaaccgtggtggcgcacctcgataagagccatatctgtgtgcatacctatccggaaagccatccggaaggcgggctttgcacctttcgcgccgacatcgaagtgtcaacctgcggggtgatttcaccgctaaaagcgctcaattacctgatccaccagctagagtccgatattgtcaccatcgattaccgcgtgcgcggctttacgcgcgacgtcaacggtatgaaacactttatcgatcatgagattaattctattcagaattttatgtcggaagatatgaaatcgctgtatgacatggtggatgtaaacgtgtatcaggaaaatattttccataccaagatgctgcttaaagagttcgatcttaagcactacatgtttcacaccaaaccggaagatctcactgaaaccgaacgccagcagatcaccgccgcgctgtggaaagagatgcgcgagatttactacggccgcaatatttctgcggtctga

SEQ ID NO: 369635 - DNA, 768 bp, Salmonella enterica
atgaaaggacaacaccgtctggatctcattgtggcgtatctgaaaaaccatacgctggttacggtagaacagctggttgaggcggttgacgcatcgccagccactatccgtcgcgatttgatcaagctggatgagcagggcgtgatcagccgtagtcatggcggcgtggcgctgcggcgttttgaacccgcccagcccaccaccaatgaaaaacaactgcgatcgcccgctgaaaaacgggcgatcgcacgcgttgccgcatcgctggtcaatgctggcgatgccgtcgtgctggatgccggtacgacaatgatggaactggcgaaatgcttaacccatcttccgctgcgggtcatcaccgtcgatctgcatattgcgctgtttttagctgagttccggcaaattgaagtgacgattgtcggcggtcgtatcgatgacagcagtcagtcctgtatcggtgagcatgggcgcaagctgttgcgcagcgtttacccgaacatcgcgtttatgagctgtaattcatggggggtaaaaacgggcgtgacgaccccaacggaagataaggccgggcttaaacaggagattattgctaatgcgcagcgcaaagtgttgctggcggacagcagtaagtatggcgcgcattcgctctttaatgtggtgccgcttgagcgctttaatgatgtgattactgacgtcaatctgccgccgtcagcgcaggttgaactgaaagggcgcgcttttgcgctaacgctggtgcagccggagtga

SEQ ID NO: 369636 - DNA, 984 bp, Salmonella enterica
gtggagactaaaaccgttgccattaccatgggcgatccagcgggcattgggccggaaattattgttaaagcgctaagcgaagacggtctcaacggcgcgccgctggtggttattggatgcctcgcaacgttgaaacgtttacaggcgaagggcatcacgccgaacgtcgagttacgggccattgaacgggtcgccgaagcgcgttttgcgcccggcatcattcatgtgattgatgagccgctggcgcagccggaggcgctggaggccgggaaagttcaggcgcaggcgggggatttagcgtatcgctgcgtgaagcgcgccaccgagttagcgttacggggcgacgtacaggctatcgctaccgcgccgctgaataaagaggcgctgcacctggcggggcacaactatccgggccataccgagctgctcgcgaccctgacccatagccgcgattacgcgatggtactttacaccgataaactaaaagtgattcacgtttcaacgcatatcgcgctgcgtaaattccttgatacgttaagtaccgcgcgtgtcgaaacggtgattggcattgctgatactttcctcaagcgtgtgggttacgttaaaccgcgtatcgccgtggcaggcgtgaatcctcatgcgggcgagaatggcctgtttggcgatgaagagacgcgtatcctgacgccagccattaccgatgcccgcgcaaaaggtatggacgtttatgggccgtgcccgccggatactgtatttctccaggcttatgagggacagtatgatatggtggtggcgatgtatcatgaccaggggcatatcccgttgaaattgcttggcttttatgatggcgtgaatatcaccgcagggctgccgtttatccggacttctgccgatcatggcaccgcatttgatatcgcctggacgggaaaagcaaaatctgagagcatggccgtatcgatcaaactggcaatgcaactggcataa

SEQ ID NO: 369637 - DNA, 1272 bp, Salmonella enterica
atgaaaatgatggttatcgccgatgattttaccggatcgaatgataccggcgtccagttggcgaagaagggggcgagaacggaagttatgttgagcgcgtcgcaaaaaccgtcccgccgcgccgatgtgttagtcattaacaccgaaagccgggcgatgcccgcagatcaggcggcatctgccgtttatgccgcgctttccccgtggtgtgagacatcgccagcgccgctggtgtacaaaaaaatcgactccacatttcgcggcaatatcggcgccgaagtgacggcggccatgcgcgccagtcagcgaaaactggccgttatcgccgccgcgatccctgcggccggacgcacgacgcttgaaggaaaatgtctggttaatggcgtcccgctactggaaaccgaatttgccagcgatccgaaaacgcccattgtctcttcccgcattgccgagatagtggcgttgcaaagtgagatccctgtgtatgaagtctttttgcaggatgtccgacgcggcgggttaagcgccttacttacggcttatgcggctgagggcgaagggattatcgtcgtggatgcggtggaagagcgggacctgacgttgattgcgcaagcggcgtgtgaacaaccgtcgatgccgctgctcgtcggcgcagcgggtctggcgaatgcgttgccggttgaactttttatgcaagaccggcagcggctgccggtgctggtggtggccggttcgatgagcgaagccacgcgacgtcaggtggataatgcgctgtgccggggacgtgcggaggtcgtggatatcgatgccgcgcgcatggtgtcggatagcgcggaacaggaaatcgcgtctgtcgtagagcaggcctgcgcgctgttaagtcagcatcgacatacgattttacgcaccagccgtcgcgcagaagatcgacagttaatcgacgcgttgtgcgaaaaatccgcgatgagccgtcagcaattgggcgagcgactgagccagcggcttggcgtcgtcacgttaaacattatcgagcaggcgcggattggcgggctgtttctgactggcggcgatatcgctaccgccgtcgccggcgcgcttggcgctgaaggttatcgcattcagagcgaggtggcgccctgtattccctgtggaacgtttgtaaacagcgaaattgacgatctgccggtcattaccaaagcgggcggattcggttcagacagtacgttgtgtgacgcgctttattatattgaggagatgtattgtggagactaa

SEQ ID NO: 369638 - DNA, 954 bp, Salmonella enterica
atgaacatcaaaaaagcaatagagcgcgtacccggcggcatgatggtcgtaccgctcgttattggcgcagtcattaacaccttcgccccgcaggcgcttgagatcggcggttttaccactgccttatttaaaaacggcgcggcaccgctgattggcgcttttctgctgtgtatgggagccggtatcagtgtgaaagccgcgccccaggcgttattgcagggcgggacgattacgctcactaagttgcttgtcaccatcggcattggcctgggcgtggagcatcttttcggcgcggagggtatttttggcctgagcggcgtggcgattatcgcggcgatgagcaattcaaatggcggactttatgctgcgctggtaggcgaattcggcaatgagcgcgacgtcggcgctatctctattttgtctcttaatgatggccctttctttacgatgattgcgctgggcgcggcagggatggcgaacattcccattatggcgctggtggcggtgctggttccgctggttatcggcatgatcctcggcaatcttgatcctcatatgcgcgattttttgactaaaggcggcccgctgctcattcctttctttgcttttgcgctgggggcgggcatcaacctggaaatgttactgcaaggcggacttgccggaattctgctcggcgtgctgacaacgttcgttggcggtttctttaatattcgcgcagatcgtctggttggcggaactggcattgccggggcggcggcctccagcaccgcgggtaatgccgttgcgacgccgctggctattgcgcaggccgacccttcgctcgccgaggtggccgctgctgccgctccgctgattgccgcctcggtgatcaccacggcaatcctgacgccagtgttgacctcctgggttgcaaaaaaacaggcgcgtcaggcttctttggagaaaaacgcatga

SEQ ID NO: 369639 - DNA, 363 bp, Salmonella enterica
atggattacgaatttctgcgcgacgttaccggaggggtaaaagtacgaatgtcgatgggccacgaggtggtcggtcactggtttaatgaagaggttaaagacaacctctcgctactggatgaagtagaacaagccgcgcgtacggtcaaaggcagcgaacgctcctggcaacgagcagggcatgaatacacgatctggatggacggcgaagaagtgatgattcgcgccaatcaactggatttttccggcgatgagatggaagaggggatgagttattacgatgaagagagtttatccctgtgcggcatggaggattttctgcgggtcgtcgccgcgtatcgggaattcgtcagtaaagcctga

SEQ ID NO: 369640 - DNA, 324 bp, Salmonella enterica
atgaatgtgcttttcatatgcagccgaaatcaatggcgcagccccacggcggagcaggtgttccgccgctatcctggccttagcgtccgttccgctggcaccagccgcaacgccaaaaaaagcgtgtcgtgcgggttacttcagtgggctgacgttatctgcgttatggagcagaaacataaagaccggttgatggctgaatatcgtcgtattattgaaaataagcccctgcacgtactcgatatccccgatgactaccgctatatggaccctgagctggtcaggcaactggaagagctggtgccggaagtgctggggatatag

SEQ ID NO: 369641 - DNA, 465 bp, Salmonella enterica
atgtctgtatttcgacgaataatttatcatagcggttggtttattctgtttggcccgttaataggcgcagccatcgcgataggtatcataaactttttacccgccattattggcggaccagactcatttttgttgtatttctgcagaacaataccagaattagtgattattaccggctggatatacagtctcctccccgcatggttaaccggtgtcgcctgcgcgctgatacccctgaaattatatcaaaaaataattaacaggatgatcctttgcgccattgcaggcggtctgatcacgacgttgtttaatttggtgcgatatggttttgacataagcatactaccattaatatatggtgaagtattgattatgcttattccagcgattgtagccggggcaataatgggcggggtaattacgtatttgccggggctacgggaagtgaagcgtaataataaataa

SEQ ID NO: 369642 - DNA, 2598 bp, Salmonella enterica
gtgctagaagaataccgtaagcacgtagctgagcgtgctgcccaggggattgtgccaaaacctttagacgcaacccaaatggctgcgcttgtcgagctgctgaagaccccgcctgtgggcgaagaagaattcctgttagacctgttgatcaaccgcgttcctcctggcgtagatgaagccgcttatgttaaagccggttttctcgctgctgtcgcgaaaggcgacaccacctccccgctggtctccccagaaaaagccattgaactgctgggcaccatgcagggtggttacaacattcatccgctgattgatgcgctggacgatgcgaaactggcgccgattgctgccaaagcactgtcccacaccctgctgatgttcgataacttctacgacgtagaagagaaagccaaagcgggcaatgaatatgccaaacaggtgatgcaatcctgggccgacgccgaatggttcctgagccgtccgccgctggcggaaaaaatcaccgtcaccgttttcaaagtgaccggcgaaacgaataccgacgatctctctccggcgccggatgcgtggtcgagaccggatatcccgttacatgcgcaggcgatgctgaaaaacgcccgtgaaggcattgagccggatcagccaggcgttgtcggccccatcaaacaaatcgaagcattgcagaaaaaaggctacccgctggcctacgtgggcgacgtggtgggcaccggttcttcccgtaaatccgcgaccaactccgtgctgtggttcatgggcgatgacatcccgaacgtgccgaacaagcgcggcggcggcctgtgcctcggtggcaaaattgcgcctatcttctttaacactatggaagatgcgggcgcactgccaatcgaagttgacgtttctaacctgaatatgggcgatgtgattgacgtctacccgtacaaaggcgaagtgcgcaatcatgaaaccgatgaactgctggcaaccttcgaactgaaaaccgacgtgctgatcgacgaagtgcgtgccggtggtcgtattccgctgattatcggacgtggcctgaccaccaaagcgcgtgaagcgctgggtctgccgcactctgatgtattccgtcaggcaaaagacgtggcagaaagcagccgtggcttctctctggcgcagaaaatggtcggtcgcgcctgtggtgtgaaaggtatccgtccgggcgcgtactgcgaaccgaaaatgacctccgtcggttctcaggatactaccggcccgatgacccgcgacgagctgaaagacctggcctgtctgggattctccgccgatctggtcatgcagtcgttctgtcacaccgcagcctatccgaagccggttgacgtcaccacgcaccacacgctgccagacttcattatgaaccgtggcggtgtctctctgcgtccgggcgacggcgtgattcactcctggctgaaccgtatgctgctgccagataccgtgggtaccggcggcgactcccatacccgtttcccgatcggtatctccttcccggcgggctctggtctggtggcgtttgccgccgcgaccggcgtgatgccgctggatatgccggaatccgtgctggtacgcttcaaaggcaaaatgcagccgggcatcaccctgcgcgatctggtccatgccatcccgctgtacgccatcaaacagggcctgctgaccgttgagaagaaaggcaagaaaaacatcttctctggccgcatcctggaaatcgaaggtctgccggatctgaaagtggagcaggcgtttgagctgaccgatgcttccgccgagcgttccgctgccggttgtaccatcaagctgaacaaagagccgattgttgaatacctgacctccaacatcgtcctgctgaagtggatgattgcggaaggctacggcgaccgtcgtacgctggaacgccgtatccagggcatggaaaaatggctggcggatccgcaactgctggaagccgatgctgacgcagagtacgcggcggtgatcgacatcgatctggcggatatcaaagagccaatcctctgtgcgccgaacgatccggacgacgcgcgtctgctgtctgacgtgcagggcgagaagatcgacgaagtgttcatcggctcctgcatgactaacatcggccacttccgtgcagccggcaagctgctggacaaccataaaggccaactgccgactcgcctgtgggtggcgccgccaacccgtatggacgccgcgcagctgaccgaagaaggttactacagcgtgttcggtaagagcggtgcgcgtattgagatccctggctgttccctgtgtatgggtaaccaggcgcgtgtggccgacggcgcgacggtggtttccacttctacccgtaacttcccgaaccgtttaggtaccggtgcgaacgtcttcctggcttctgcggagctggcggcggttgcggcgctgatcggcaaactgccgacgccggaagagtaccagacctacgtggcacaggtggataagacggcggtggatacttaccgttatctgaacttcgaccagctctctcagtacaccgagaaagcggacggcgtgattttccagactgcggtgtaa

SEQ ID NO: 369643 - DNA, 1623 bp, Salmonella enterica
atgacgttgccctttaaaccccatctcattgcccttgtgtgcagtgccgggttatttgccgcttcgggcgtactgtatgttaaaagccgcgctcccgaagcgcccgcgcaggcggcgactcccgcccctgagcaaacgcagaccgctgtgcccgcgcctgtcgcgaaaacgacctttaccactgcgcaaattgatcaatgggtcgcgcctgtcgcgctttatcccgatgccctgctttctcaggtgctcatggcctccacctacccggcgaacgtggttcaggccgtccagtggtcgcgagataaccccacgctgcagggcgatgccgctattcaggcggtggccagccaaccgtgggaccccagcgtcaaatcgctggtcgcctttccccagttgatggcgcttatgggcgagaatccgcaatgggtgcaaaacctgggcgatgcgttcttagcccagccacaggatgtgatggatgcggtgcaaaggctgcgtctgctcgctcaacaaaccggttcgctaaaatccacgccacagcaaaccgtcaccagcgtgccgaagtccagcgcttctaccgccgtcacgacgacaaccaccacatccgccagtacgccagcgacaccgtcgaccgttataaaaattgaacccgcgaatccgcaggtggtgtacgtgccgaactataaccccgcgacggtgtatggcgcctggcccaataccgcttatccgccggtgtatttaccgccccctccggggcagcagtttgccgacagttttgttaaaggttttggttatagtctgggcgtcgccaccacctatgcgttgttcagcagcatagactgggatgatgacgatcatcaccaccatgacgacgaccaccatgatgatgattaccatcatggtggtaacggttatcaacataatggcgataatatcaacatcaatgtcaataatttcaaccggatatccgggcaaaacctgccgggccaaacgatgggctggcagcataatcccgcctggcgcaatggcgtcccctatccgaataataccgttgcgcaacggttccatcccaccaatgttagcggcgggttaagcgcaacgcagcaagcgccagtgtctcgcgacagtcagcgccaggcggccatgacgcaatttcaacagcgcagccatacggccaacgcttctttgccagcgccaggcacccgcgatgcccagcgtaaggcggcatcgcagcagttaaatcaaattgcccagcgtaataattaccgtggctatgacggaacacaaaacagcagtcgtcgcgaggcggcgcagcagacactgaataaatccaccacgcagcagcatcgttccgagctgaaggctaaagcccagcagcaccctgtttcacaacagcagagagacaccgcccgccagcgtattgaatcctctacgccgcaacagcgtcaggcatttcgccagaatatgcacgccaatgtgtttagcgggaacgacagtcgatcgccgtcatggcaatcgcaacagctacgcggcctggaaagccgtcgcggcagtcacttaaacaccgagcaacgcgccgccgcgcgggaacatttttctgaacatcatgaatttcatcgccgttaa

SEQ ID NO: 369644 - DNA, 792 bp, Salmonella enterica
atgaaaaaggttatgttaagcgctctgttactgtcgttacccttgctgggctacgcgcaggaacggttcccctccccggaagcggccgccagcgccttcgccgcggcggtagccggaaaaaacgaaacgcagcttaccgcgctactgggcgatgactggcggcaatttctgccgccggaaggtgccgatcccgaggccgtggcccgcttcaatcgtgactggcgcgaaggccatcgcattgtacagaaagacaatacggcgcacctgaatgtcggacgagaagactggcagctcccggtgcccatgatgaaagagactggcggctggcgctttgatatggcggcagccgggaatgagatcctcacccgtactattgggcgaaatgaactttctaccttacaggccatgcatgcttacgttgatgcgcagcaggactattacttacaaaaccatcgctgggcgcacaggataatcagtagcgaaggccaaaaagatggcctgtactggccaaccaaagcaggcgacgtccccagtccgttaggcccaaactttagtcccgcagcgccagacgagggttaccacggctaccatttccgtattatcagcgataacgacggtcacggcgcggcgcttctggcctggccgatgcattacggcgaaaccggggtgatgagttttatggtcaaccaggacgatcgtatttatcaggcggatttaggcaaggagacggagagtaaagttcaggctatcacgcgttttgcgccagacgcgcagtggcaggtcgccgaataa

SEQ ID NO: 369645 - DNA, 285 bp, Salmonella enterica
atgaaactttttctgacaacagcagcgctaactgcgaccttgatttccggcatgacatttgccagcgatcccgtcatcccctgggcgactaacagcggcggtacggaaagcacgcatattgcggcaatgggcgaggatttgaatgcgcagcatcagcagatcacccacacgcatgaaggcgtatgggcggccaattccggcagcattcaggctgatgaagccgcgctgaccagcaacaagccgccggtacaaggccacccggaattgatgccgcatcagggctaa

SEQ ID NO: 369646 - DNA, 1425 bp, Salmonella enterica
atgagtactgaaatcaaaactcaggtcgtggtacttggggcgggcccggcaggctattctgccgctttccgttgcgctgatttaggtctggaaaccgtaattgtagaacgctacaacacccttggcggtgtttgtctgaacgtcggctgtatcccttctaaagcgctgctgcacgtagcaaaagttatcgaagaagccaaagcgctggctgaacacggtatcgtcttcggtgagccgaaaaccgatatcgacaagattcgtacctggaaagagaaagtgatcacgcagctgaccggcggtctggcgggtatggccaaaggccgtaaagtgaaagtggtcaacggtctgggtaaattcaccggggcgaacaccctggaagtggaaggcgaaaacggcaaaaccgtgatcaacttcgacaacgcgatcatcgcggcaggttctcgtccgatccaattaccgtttattccgcatgaagacccgcgcgtatgggattctaccgacgctctggaactgaaagaagtaccgaagcgtatgctggtcatgggcggcggtatcatcggtctggaaatggggaccgtataccacgcgctgggttcagagattgacgtggttgaaatgttcgaccaggttatcccggcggctgataaagacatcgttaaagtcttcaccaagcgcatcagcaagaaattcaacctgatgctggaaaccaaagtgactgccgttgaagcgaaagaagacggtatctacgtttcgatggaaggcaaaaaagccccggctgaagcgcagcgttatgatgcggttctggtggcgattggtcgtgtgccgaacggtaaaaacctcgacgcgggcaaagctggcgtggaagttgacgaccgtggctttatccgcgtcgacaaacagctgcgcaccaacgtgccgcacatcttcgctatcggcgatatcgtcggccagccgatgctggcgcataaaggcgttcacgaaggccacgttgccgctgaagttatcgccgggaagaaacactacttcgatccgaaagttatcccgtctatcgcgtacaccgagccagaagtggcatgggttggcctgaccgagaaagaagcgaaagaaaaaggcatcagctatgaaaccgccaccttcccgtgggcagcttctggccgtgctatcgcttctgactgtgcagacggtatgaccaaactgattttcgacaaagaatctcaccgcgtgatcggcggggcgattgtcggcaccaacggcggcgagctgctgggtgaaatcggtctggcgatcgaaatgggctgtgacgcggaagacatcgcgctgaccattcatgcgcacccgactctgcacgagtccgtcggtctggctgctgaagtgttcgaaggtagtattaccgacctgccgaacccgaaagcgaagaagaaataa

SEQ ID NO: 369647 - DNA, 1884 bp, Salmonella enterica
atggctatcgaaatcaaagtaccggacatcgggacagatgaagttgaaatcaccgagattctggtcaaagtgggcgacaaagtggaagctgaacagtcgctgatcaccgtagaaggcgacaaagcctctatggaagtcccgtctccgcaggctggcgtcgtgaaagagatcaaagtctctgtcggcgacaaaaccgagaccggtgcacttatcatgattttcgattccgccgacggtgcagctgacgctgcgcctgctcaggcagaagagaagaaagaagcgactccggcagcagcacctgctgcggcagcggcgaaagacgttcacgttccggatatcggcagtgacgaagttgaagtgactgaagtgatggtgaaagtgggcgacaccgttgaagctgaacagtcgctgatcaccgtcgaaggcgacaaggcctctatggaagtgccggcgccgttcgcgggcaccgtgaaagagatcaaagtgaacaccggtgataaagtgtctaccggctcactgattatggtcttcgaagtggcgggcgcagcgcctgccgcagcaccagcgaaagcggaagccgctccggctgctccagcagcagcgacgggcgtgaaagacgttaacgtaccggatatcggcggcgacgaagttgaagtcaccgaagtgatggtcaaagtcggcgataaagttgccgctgaacagtcgctgatcaccgtcgaaggcgacaaggcctctatggaagttcctgcgccgttcgcgggcaccgtgaaagaaatcaaaatcagcaccggcgataaagtgaaaaccggttctctgattatggtcttcgaagtagaaggcgcagcgcctgcggccgctccggctaaacaggaagcggcggcaccggctccggcggcgaaagctgagaagcctgctgccccggctgccaaagcggaaggcaaatctgagttcgctgaaaacgacgcttacgttcacgctaccccgctgattcgccgcctggcgcgcgagtttggcgtaaacctggcgaaagtgaaaggcaccggtcgtaaaggccgtattctgcgcgaagacgttcaggcttacgtgaaagacgcaatcaaacgcgcggaagctgcaccggctgctgcgggcggtggtatcccgggtatgctgccgtggccgaaagtggacttcagcaagtttggtgaagttgaagaagtggaactgggccgtatccagaaaatctctggcgcgaacctgagccgtaactgggtgatgatcccgcacgttacgcacttcgacaaaaccgatatcaccgatctggaagcgttccgtaaacagcagaacgccgaagctgagaagcgcaaactggatgtgaaatacacgccagtggtcttcatcatgaaagcggttgccgctgctctggaacagatgccgcgcttcaacagctctctgtccgaagacggtcagcgtctgaccctgaaaaaatacatcaacatcggcgtggcggttgataccccgaatggcctggtggttccggtctttaaagacgtgaataagaagagcgtgaccgagctgtctcgtgaactgaccaccatctccaaaaaagcgcgtgatggtaagctgaccgctggcgaaatgcagggtggttgcttcactatctccagcatcggcggcctgggaactacccactttgcgccgattgtcaacgcgccggaagtggctatcctcggcgtttctaagtcggcgatggaaccggtgtggaatgggaaagagtttgtgccgcgtctgatgatgcctatctctctttctttcgaccaccgtgtgatcgatggtgctgatggtgcgcgtttcattaccattatcaacaatatgttgtctgacattcgccgtctggtgatgtaa

SEQ ID NO: 369648 - DNA, 2664 bp, Salmonella enterica
atgtcagaacgtttccaaaatgacgtggatccgatcgaaactcgcgactggctacaggcgatcgaatcggtcatccgtgaagaaggtgttgagcgcgctcagtatctgattgaccaactgctttctgaagctcgtaaaggcggcgtgaaagtcgcggcaggcgcaggggccagtaattacatcaacactattgccgttgaagacgaaccggaatacccgggtaatctggagctggaacgtcgcattcgttctgcgatccgctggaacgccatcatgaccgtgctgcgcgcgtctaaaaaagaccttgagttgggcggccacatggcgtccttccagtcttccgccacgatctatgatgtctgttttaaccatttcttccgtgcgcgcaacgaacaggatggcggcgacctggtgtacttccagggccacatctctccgggcatctacgctcgcgcgttcctggaaggtcgtctgacccaggaacagatggataacttccgtcaggaagttcacggcaatggcctctcttcctatccgcacccgaaactgatgccggaattctggcagttcccgaccgtctctatggggctgggcccaatcggtgctatctaccaggcgaaattcctgaaatatctggaacaccgtggcctgaaagatacctctaaacagaccgtttacgccttcctcggcgacggcgagatggatgagccggaatccaaaggcgcgatcaccatcgccacccgtgaaaaactggacaacctggtctttgttatcaactgtaacctgcagcgtcttgatggcccggtcaccggtaacggcaagattgttaacgaactggaaggcatctttgcaggtgctggctggaacgttattaaagtcatgtggggcggtcgttgggatgaactgctgcgtaaagacaccagcggtaagcttatccagctgatgaacgaaaccgttgacggcgactaccagaccttcaaatccaaagacggcgcttacgtacgtgagcacttcttcggtaaatatcctgaaaccgccgcgctggtggccgactggactgacgagcagatttgggcgctgaaccgcggtggtcacgatccgaagaaagtctacgcggcactgaaaaaagcgcaggaaaccaaaggcaaagcgacggtaatcctggcccataccattaaaggttacggcatgggcgacaccgcggaaggtaaaaacatcgctcaccaggttaagaaaatgaacatggacggcgtgcgttacgtccgcgatcgtttcaacgtgccggttgccgatgctgatctcgaaaaactgccgtacattaccttcccggaaggttctgaagaacacaaatacctgcatgaacgccgtcaggcgctgcatggctacctgccaagccgtcagccgaacttcaccgagaagttagagctgcctcaactttcagatttcggcgcgctgctggaagagcaaagcaaagagatttccaccactatcgctttcgtgcgtgccctgaacgtgatgctgaagaacaagtcgatcaaagatcgcctggtgccgatcatcgccgacgaagcgcgtactttcggtatggaaggtctgttccgtcagattggtatctacagcccgaacggccagcagtacaccccgcaggaccgtgagcaggttgcttactacaaagaagacgagaaaggccagattctgcaggaaggtatcaacgagctgggcgcaggcgcatcctggctggctgcggcgacctcttatagcaccaacgatctgccgatgatcccgttctatatttactactctatgttcgggttccagcgtatcggcgacctgtgctggcaggctggcgaccagcaggctcgcggcttcctgatcggcgggacttccggtcgtacaacgctgaacggcgaaggtctgcagcacgaagatggtcacagccacattcagtcgctgactatcccgaactgtatctcttacgacccggcttacgcctatgaagtggctgtcatcatgcatgatggtctggagcgtatgtacggtgagaaacaagagaacgtttactactacatcaccaccctgaacgaaaactaccacatgccggccatgccagcaggtgccgaggaaggtatccgtaaaggtatctacaaactcgaaacccttgaaggtagcaaaggtaaagttcagctgctgggctccggttctatcctgcgtcacgtgcgtgaagcggcagagatcctggcgaaagactacggcgtaggttctgacgtgtacagcgtaacctccttcaccgaactggcgcgtgatggtcaggattgtgagcgctggaacatgctgcacccgctggaaaccccgcgcgtaccgtacatcgctcaggtgatgaacgacgctccggcagtggcatctactgactatatgaaactgttcgccgagcaggttcgtacttacgtaccggctgacgactatcgcgtactgggtacggatggcttcggtcgttccgacagccgtgagaacctgcgtcaccacttcgaagttgatgcttcttatgtggttgttgcagcgctgggcgaactggctaaacgtggcgaaatcgacaagaaagtggtagcggatgcgattaccaaattcaacatcgatgcagataaagttaacccgcgtctggcgtaa

SEQ ID NO: 369649 - DNA, 765 bp, Salmonella enterica
atggcctacagcaaaatccgccaaccaaaactctccgatgtgatcgagcagcagctggagtttttaatccttgagggaacattgcgtcccggagaaaaactcccaccggaacgtgaactggcaaaacagttcgacgtctcccgtccctccttgcgcgaggcgattcaacgtctcgaagcgaagggattgttgcttcgtcgtcagggcggcggaaccttcgtgcagagcagcctgtggcagagctttagcgacccgctggtggaactgctctccgatcaccctgaatcccagtttgacctgctcgaaacgcgccatgctctggaaggcattgcggcttattacgcggcgctgcgcagcaccgatgaagataaagaccgtattcgcgagctgcaccacgctattgagctggcgcaagagtccggcgatctggatgccgagtccgaagccgtgctccagtatcaaatcgccgtcaccgaagcggcgcacaacgtggtattgcttcatctgctaaggtgtatggagccgatgctggcgcaaaacgtgcggcagaacttcgaattgctgtatgcgcgtcgggagatgctgccgctggtgagtacgcatcgcacccgtatatttgaagccattatggccggaaaaccagaagaagcgcgtgaagcgtcacaccgacatctggcgtttatcgaagagattatgctggacagaagccgtgaggagagccgtcgtgaacgcgctttacgccgcctggaacagcgcaagaattag

SEQ ID NO: 369650 - DNA, 1371 bp, Salmonella enterica
atggacagtcagcagcacggcgagcagctcaagcgcggcctgaaaaaccgccatattcagcttatcgcattgggcggcgcgatagggacaggcttgttcctgggaagcgcctccgttattcagtcggcggggccaggaattatcctgggctatgcgattgcaggctttattgcctttctgattatgcgccagctgggggagatggtggttgaagaaccggtcgccggctcttttagccacttcgcctataaatactggggcggctttgccggattcgcttccggctggaactactgggtgctgtacgtattagttgccatggcggaactgaccgcagtgggtaaatatatccagttctggtatccggagatccccacctgggcttctgcggcagccttctttgtgattatcaacgccatcaacctgaccaacgttaaagtgttcggtgagatggagttttggttcgccattattaaagtgatcgccgtcatcgctatgattctgttcggcgcgtggttactcttcagcgataccgctggtccgcaggccaccgtgcgcaacctgtgggaacagggcggctttctgccgcatggctggaccgggctggtgatgatgatggccattattatgttttctttcggcggactggagctggtagggatcaccgccgctgaagccgataacccggaacagagcattcccaaagctaccaatcaggttatctatcgcatcctgattttttatatcggctcgctggcggttctgctttcgctgctgccatggactcgcgtcaccgccgataccagcccgtttgtccttatcttccatgagctgggcgatacgtttgtcgccaatgcgctgaatatcgtggttctcaccgccgcgctatcggtttataacagctgcgtttactgcaacagccgtatgctgttcggtctggcccagcagggaaatgcgccgaaagcgctgctgaacgtcgacaaacgcggcgtgccggtgagctccattttggtttccgccgtcgtgactgcgttgtgcgtgctgctcaactacctggccccagagtccgcattcggactgctgatggcgctggtggtctccgcgctggtcattaactgggcgatgattagccttgcccatatgatgttccgtcgcgcgaaacagcagcagggcgtgaaaacccgcttcccggccctgttttatccgttcggcaacgttctctgcctgctgtttatggcggcggtattgatcattatgctgatgacgccaggtatggcgatctccgtgtggctgattccggtatggctgcttatcctgggcgtcggctatctgtgtaaagaaaaaacggcaaaaacggtgaaagcccactga

SEQ ID NO: 369651 - DNA, 1407 bp, Salmonella enterica
atggataagggcagactttcggtaagagagaaaatcgggtatggcatgggtgacgccggatgtaacattatttttggcgctatcatgctgtttgttaattacttttatacggatatttttggtcttgccccggcgttagtcggtgttttactcctttcagtacgcgttatcgatgccgttaccgatccggtgatgggcgcgcttgccgatcgtacccaaagtaaatatggtcgtttccgcccctggctactgtggattgcatttccctacgcgctgttcagcgtgctgatgttcacgacgccggactggggctataacagcaaagttgtctatgctttcgtcacctattttctgctttccgtgacctacaccgccatcaatattccctattgctcactgggcggcgtgatcaccaacgatccaaaagagcgcgtggcctgtcaggcttatcgcttcgtgttagtcggcatcgcgacgctgttgctatcgttaacgctattgccgatggtggactggtttggcggcggcgacaaagccaaaggctatcagttggcgatgaccgtgctggcgattatcggcatgggtatgtttctgttctgctttgccagcgtccgcgaacgcgttcgccctgccgttccgacgcacgatgatatgaagaatgatttcaaagacgtgtggaaaaacgatcaatgggtacgcattctgctattgaccttatgtaacgtctgcccggggtttatccgtatggcggcgaccatgtattacgtcacctgggtgatgggacaaagcacccatttcgctacgctttttattagccttggcgtggtcggtatgatgatcggcagtatgctggcaaaagtcttaaccgatcgctggtgtaaattgaaggtatttttctggaccaatatcgcgctggcgattttctcctgcgcgttctatttctttgatccgaaagctaccgtgatgatagtggcgctctacttcctgctcaatattctgcatcagatcccttccccgttgcactggtcgctgatggcggacgtcgatgattacggcgaatggaaaaccggcaaacgcattaccggtattagcttctccggtaatctgttcttcctgaaactgggcctggcgattgccggggcgatggtcggctttttgctctcctggtacggttatgacgccagcgccaaagcgcaaagcgcctcggcgatgaacggtattatgctgttgtttaccgttatccccggcgttggctatctgattaccgcaggcgtggtacgtctgctgaaagttgaccgtgaactgatgaaaaaaatccaggacgatttggaaaaacgtcgcactaattaccgcgaattgagtgagttgcaggacctcaaagccgctgaaagcgtaaggaaagcctga

SEQ ID NO: 369652 - DNA, 951 bp, Salmonella enterica
atggcaaactggccaaacccgtttattgaacaacgtgccgatccgtttattttacgcgacggcagcgattactactttattgcctccgtaccggaatatgacaggctggaaatccgccgggctgattcgctggaagggttgcgcgccgccgaccccgttgtcgtctggcgcaaaccggaaagtggcccgatgagccagctcatctgggcaccggaaatgcaccgcatcaacggcaagtggtacatctattttgccgctacccatactcaagcgcttgataagctgggaattttccagcatcgcatgtttgccctggagtgcgccgatgccgacccactcaccggcaagtggacggagaaaggtcaaattaaaacaccgtttgataccttcgccctcgatgccaccactttttatcatcagggaaagcagtggtatctgtgggcgcaaaaagcgccggatattgccggtaactcaaatatttatctggctgaactggaaaatccgtggacgattaaaggcgagccggtaagactcagtaagccagagtacgactgggagtgtcggggtttttgggttaacgaaggtccggccgtcgtggtgcatggcgacaagctgtttatcagctattcggccagcgccaccgatgaaaactactgtatgggattactgtggattaacgtaaacgacgatccgcgcgatccggccaactggcataaatcaccgcgcccggtctttaccaccagctatgaaaatcgccagtatgggccgggacataacagctttacgcaaacgccggaaggtgaagatgtactggtgtaccacgcgagaaattacaccgaaattgaaggcgatccgttgtacgatcccaaccgccatacgcgtctgaaacgggtgcgctgggacgaaaacgggatgcctgattttggcgtgccgccagccgatacgatctaa

SEQ ID NO: 369653 - DNA, 855 bp, Salmonella enterica
atgacgctgtttacgacattactggtgctgattgtcgagcgcctgtttaagctgggcgagcactggcagctcgatcatcggctggaggcgctattccgtcggattacgcatttttcgatgttgcgcacgatgggaatgacggcgatcgcgatggtggtgacttttctactgctccaggcgttaaaagggctgctatttaacgtgccgacgctggtggtgtggattctcctgggcgtgctgtgtatcggcgcgggcaaagtgcgagtacattatcacgcctggctgaaagcggcgtcccgtaacgatccgcatccttgcgaggcgatggccagcgagcttacgctgattcacggcgtgccgccggattgtaatgagcgtgagtttttgcgtgagctgcaaaatgcgttgttatggataaatttccgtttttacctcgcaccgctattttggtttatcgttggcggtccatgggggccggtaacgctggtgggctatgcgtttttacgggcctggcagacttggctggcgcgctatcagacgccgcaccaacgtttgcaatccggcattgacgctattcttcatgtgctggactggattccggtacgtctggcgggcgtagtgtatgcattactggggcatggcgagaaagcgttgccggcctggtttgcctcgctggcggatctgcatacttcgcagtatcaggtgctcacacgtctggcgcagttctcactggcgcgcgaaccgcatactgacaaagtagaaacccccaaagcggcggtatcaatggcgaagaaggcctcgtttgtggtggtggtgattattgcgttgctcaccatttatggggcattagtgtag

SEQ ID NO: 369654 - DNA, 564 bp, Salmonella enterica
atgttgccagataagggttggttagtagaggcgcgacgcgtcccttctccgcattatgattgccgtccggatgacgaaaaaccgtccttgctggtggtgcataatattagcctgccccccggcgagtttggcggtccgtggatcgatgcattattcaccggaacgatagatccagacgcccatcctttttttgcagaaatcgctcatcttcgtgtttcggcccattgtctgattcgtcgcgacggtgaaatcgtccagtatgtgccttttgataagcgtgcgtggcatgcgggcgtatcaaactatcaggggcgggaacgttgtaatgatttctccattggtattgagctggaggggacagatacgctggcttataccgatgcgcagtatcagcagctagccgccgtgacgcgcacgcttatcgcttgctatccggcgatcgccgacaatatgaccggacactgcaacattgcgcctgaccgcaaaacggaccctggccctgcctttgactggccgcgctttcgcgctttggtagccctctcgtcgcacaaggagatgacatga

SEQ ID NO: 369655 - DNA, 894 bp, Salmonella enterica
atgccgcctcgccgttataacccagacgaccgacgtgacgcgctactggaacgcattaatctcgatatccctgccgccgttgctcaggcgctgcgtgaagatttaggtggagaagtcgatgctggcaacgatatcaccgcgcaacttttgccggcagatacgcaagcccatgccacggtgatcactcgtgaagacggcgttttctgcggcaagcgctgggttgaagaggtcttcatccaactggcgggcgatgatgtgcgcctcacctggcatgtcgatgacggcgacgccattcacgccaaccaaacagtgtttgaactgaacggcccggctcgcgtattgttgaccggcgagcgcacggcgctaaactttgtccagaccctttccggcgtcgccagtgaagtacgccgctacgttggactgttggctggcacccaaacccagttgctcgacacgcgtaaaacgctgccgggtctgcgcaccgcgctcaaatatgcggttttatgcggcggcggcgccaatcatcgtctgggcctcactgacgcgttcctgattaaagaaaaccatatcatcgcctccggttcggttcgtcaggcggtggaaaaagcgttctggctacatccggacgtgccggtagaagtcgaggtcgaaaatctggatgaactggacgatgcgctgaaagcaggcgcggatatcatcatgctggataatttcaacaccgaccagatgcgcgaggcggtgaaacgcgtcaacggccaggcgcggctggaagtatccggcaacgtcaccgcggaaaccttacgcgaatttgctgaaaccggggtggatttcatctccgttggcgcgctgaccaagcacgtgcgcgcgctcgatctctccatgcgtttttgctga

SEQ ID NO: 369656 - DNA, 438 bp, Salmonella enterica
atggaaaaacaacgcggtttcacgcttatcgaactgatggtcgttattggcatcatcgccattttaagcgccattggcattccggcttaccagaactatctgcgtaaagcggcgctgacggatatgttgcaaacgtttgtcccctaccgtactgccgtcgaactctgcgctctggaacatggtgggacgagcacatgcgatgcgggcgtcaacggtatcccctcgcccgtcatcacccgttatgtttcgggcatgagcgtggaaaaaggcgtcatcacgcttaccggccaggagagtctgagcgggcttagcgtcatcatgacgcccgcctgggacaatgctaacggcattactggctggacgcgtaactgcaatattcaaagcgacagcgcgttacaacaggcttgtgaagatgtcttccgttttgacgccaactaa

SEQ ID NO: 369657 - DNA, 1386 bp, Salmonella enterica
atgaaagacgctcagctcaacaccttgtgtcaacgtcatcaggctgtactgatcaatagcgccagcaacagtatcactgttgcggtggtcgacgcgccctctcatgcgttactggacgctctgcatttcgccacgcaaaaacagattgatattgtgtgctggactcgccagcaaatggaaaatcatcggcataagccggatcaggcaccctcggcaaacgccgcgaaaggcggagaaaccgcagcccagcttctcaatcagacattacgctcggcgatggcgaaacgcgcctctgatatccatctcgaacccggcgccagccgctaccgaataagactccgcatcgacggcgttcttcatattctgcaggacatcgccaaagagacggggcttgcgctgacggccagattgaaagtcctgggaaatttggacatcgctgaacatcgactgccgcaggacgggcaatttaccgttgacctggcgggcgacagcatctcttttcgtatcgccacgcttccctgtaaagaaggcgaaaaagtcgtcttacggttgttgcatcaggttgaacaaacgctggatctggacacgctgggcatgtacggggcacaacttaccgcttttagacaagccctacagcaacctcaggggctggtactggtgactggccccaccggtagcggaaaaacggtcacgctatacagcgcgctacaaacccggaatacgccgggtatcaacctctgtagcgttgaggatccgatagaaattccactggatgggattaaccagacgcagatccatccccgcgccgggctcacctttcaaaatgtgctgcgtgcgctattacgccaggaccctgacatcatcatggtaggtgaaattcgtgacggcgacaccgcagaaatcgccattaaggcggcacaaacgggccatctggtactttcaacgctacatacgaactccaccagtgaaaccctgatacgtttgcagcaaatgggcgtagcacgctggatgatctcatcggcgcttacgctggtggtagcgcaacgcctggtaaggaagctttgcccgcactgcaaacagcgcctgagcgatcccgtagtgctatcgcccaatctttggcccagcgcgctaccgcgctggcaggcaaacggctgtcagcattgctaccacggcttttatggccgaaccgcgttattcgaagtgttaaccgttaccccggcattacgtcagttaattgcgagcggcgcatcggcgcaagcactggaagcccacctccaacagaccggtacagggacgctttttgaaaatggctgtcgcgccgttgagcaaggcatgacgtcctttgaagagatactgcgcgttctgggaatgccccatgagcgttaa

SEQ ID NO: 369658 - DNA, 1203 bp, Salmonella enterica
atgagcgttaaacagctctggcgctggcaaggcgttaacgataaaggtcaactggaacaagacgttgtatgggtggacaatcgtctggcgctgatcatcaccctgcaacatcagcgcattatgccgcttcgcatcaagcgcataggcgttaacgccgcactgtggaaagaagagcaaagcgctgaaattattcatcagttggccacgctcattcatgccgggctgacgctttcagaagggctggaactccttgcgaaacagcatccccaccgacaatggcaagcgctgttgcgcacgctggctcacgagcttgaacagggcgtccctttttccagcgcattagtctcctggccgcaggtatttccgccgctctaccagacgatgatccgcaccggagaactgaccggcaaactggccgaatgctgctttgaactggcccgtcagcaaaaagcgcaacggcagattacggttagcgtgaaaaaggcgctgcgctatcccgcaattattctaacaatggccgccctggtcgttttcgccatgctgcactttgtcctgccggaatttgccgccatttaccgtagcttcaataccccgcttcctcttctgacgcgcggtattattgcgatagcgcaatgggggtcggcatggggttggctcatcttgttcctgacgatgctcgttgctatcgctcaccgcagggtaaaacaaaagccgtcctggcaagcgcagcggcagcgtcttctgctacggcttcccgttatgggtcgcctgataagaggccagaaactagcgcaaatattcaccgtactggcattaacccaaagcgcaggcattccttttcttcagggactggaaagcgctatcgagagtctcggctgcccttactggtcacagcgtttaacgcaggtacatcaggagatcgccgcgggcaatccggtctggttggcgctaaaaaatacccaggaatttagtccactatgcctgcaactggtcagaacgggcgaagcgtccggctcactcgatatcatgctgcataaccttgcccgtcaccacagtgaatctacgctggcgctggccgataatctggcgtcgctgttggaaccggcgttattgatcatcaccggcttaattatcggtacgctggtggtggcgatgtatttgccgatttttcatttgggagacgcgatgagcgggatgggataa

SEQ ID NO: 369659 - DNA, 1044 bp, Salmonella enterica
atgcgtattgaagaagatctgaagttaggtttcaaagacgttcttatccgtcctaagcgttctaccctcaaaagccgttccgatgtcgaactggaacgtcaattcacctttaaacactcaggtcagacctggtctggcgtaccgattattgcggccaatatggataccgtcgggacgtttgaaatggcgcaagcattggccgggtttgatattctgactgctgtacataaacattataccgttgaagagtgggcagcttttatcaacacggcttcggctgatgttctgaagcatgtgatggtttccaccgggacctctgatgctgatttcgaaaaaaccgtgcagattctggcgctgaatcctgcgctgaactttgtctgtattgatgtggccaatggctattcagaacattttgtgcagttcgtcgcgaaagcacgtgaagcatggccgacaaaaacaatctgcgcaggcaatgtggtaacgggcgagatgtgcgaagagcttatcctctccggcgccgatatcgtgaaagtgggaattggtcccggctccgtatgcacgacgcgtgtaaaaactggcgttggttatccgcaactgtcggcggttatcgaatgtgctgacgcggcgcatggcctgggcggcatgatcgtcagcgatggcggctgcaccatgccaggcgacgtagcaaaagccttcggcggcggcgcggatttcgttatgttgggcggcatgctggcgggtcacgaagagagcggcggcagcgtggtagaagagaacggcgagaaatttatgctgttctacggcatgagttcggaatctgcgatgaaccgtcatgtcggcggcgttgcgaaataccgcgcggcagaaggtaaaacggttaaattgccgctgcgtgggccggtgggcaataccgcccgcgatatcctgggcggtctacgctcagcctgcacttatgtcggcgcgtctcgcctgaaagagttgaccaaacgcaccacctttattcgggtgcaggaacaagaaaaccgcattttcaatagcctctaa

SEQ ID NO: 369660 - DNA, 621 bp, Salmonella enterica
atgaggtataccgtagccttaaccggcggtattggcagcggtaaaagtaccgtcgctgatgccttcgctgacctcggaataaccgtcatcgacgcggatattattgcgcgccagatggttgagccagggcagcccgccctgaacgcaatagcggaacattttggttctgaacttatcgccgccgacggcacgttacgtcgccgggcgctgcgtgagcgtattttttcgcatccggaagaaaaagcctggcttaacgctctgcttcatcccttaattcagcaggaaacccaacgacagtttcaacaggctacgtcgccctatgtgttatgggttgtgcctctgctggttgaaaacaggctgtatcaaaaagccaaccgcgtactggtggttgacgtgacgcccgaaacgcagctcatacgcacaatgcagcgtgatgatgttacgcgcgagcatgttgaacacattctcgctgcgcaggcgacgcgtgaagcgcgccttgccgtggcggacgatgttattgataataacggcgcaccggatgctatcgcatcagatgtggcccgcctgcacgccagttatcttaagctcgcgtcgcagtttgtctcacaggaaaaaccgtaa

SEQ ID NO: 369661 - DNA, 744 bp, Salmonella enterica
atgcacacccaggtcctatttgaacaccctctcaatgagaagatgcgtacgtggctgcgcatagagtttttaatccaacagctctccatcaacctgccaattgcagaccatgctggcgcactgcattttttccgtaacatcagcgatctactggatgtattcgaacggggcgaagtccgtaccgaactgctgaaagaactggagcgccagcagcgtaaattacaggcctgggttgaggttcccggcgtcgatcaagaccgtattgaagccctgcgccagcagttaaaatccgcgggcagcgtgctgatctccgccccgaggattggccagcagctacgcgaagatcgcttgattgcccttgtgcgtcaacgcttaagtattcctggcggctgttgcagtttcgatttacccactctgcatatctggttacacctacaacaggcgcagcgcgacgcccagattgaaagctggcttgccagcctgaatcccctcacccaggcgctgacgctggtgcttgatctgatccgtaattcagcgcctttccgtaagcaaaccagcctgaacggtttttatcaggataacggggacgacgccgatttgctgcgtcttatgctgacgctcgattcacaactttatccgcaaatttccggccataagagccgttttgccattcgctttatgccgctggatagtgaaaatggtctggtgccggagcgtcttgattttgaactggcctgttgctaa

SEQ ID NO: 369662 - DNA, 192 bp, Salmonella enterica
atgtctgacgtgaccgtcgtaaactgtccgacctgcggtaaaccggtcgtctggggggaaattagccccttccgcccattttgttctaaacgctgtcagttaattgatttgggcgaatgggccgccgaagagaaacgaatcgccagcagcggcgaccagtctgatagcgacgactggagcgaagagcgctaa

SEQ ID NO: 369663 - DNA, 924 bp, Salmonella enterica
atgcgtcatgatgtgatgtccatattgcatgctttttgcatgattgctgaaaaccatagcttcacgcgggcagcggcgcagttacatatttctacatcggcgttaagtcagaatatgcgccaactggaggatgaacttggcgtgaaattgttgaaccgaaccacccggcgtgtcggtttgacagaagcaggacatgcctttcttgccagtatcaggcccgcattaaaccatattgatgaggcgatggaacatgcccgccagagccgcgatatacccggagggacattacgcctgaccgtaccgcgcacggcggctacgcttctgttacaacctaatctcgccggtttcatgcgcgattatcccgatattcggctggatatcgatgtgaatgacggttttgtggatttaattaacgaacgctttgatgccggtattcgctttggcgatgcggtacaacttgatatgaatgtcgttccgctcggtgatgttttacgcccggcgatcgtagcatcccctgcataccttgcgcgttttggcacgccgctgcaccctcaggaactcatcaatcaccgctgcctttgccatcgttttacgcgtgagagcgggctatatcggtgggagtttgttcacggagcgcaacggctggaaattacgccggaagccgcgttaatggtgaatgataaagcgttgcgtctctccgccgcgcgtgatggggcagggctaacctatgtttttgaacaggatgtccacgaagacttacaggatgggcggttgtgttccgtacttgaggagtggctgcctgcggcggaccggttttatttgtattatcccggccgcgcgcatatggcgccaaaactacgcgtatttattgattatttttgtcataaggcgatattgccgtctcaacagagccatcaccgttag

SEQ ID NO: 369664 - DNA, 594 bp, Salmonella enterica
atgcaatatcgtacattaggcgcaaacggaccgcgagtgtcagccatcggactgggatgtatgggcatgagcgcattttacggcgctcatgacgacagcacctcaattaagacgctacattatgcgttagatcagggggtaacactgctcgataccgcagatatgtatggcccttataccaatgaaaggttagttggaagagccatcgccgatcgtcgcgatcgggtatttttagcgacgaaatttggtatcgttctcgaccctgctaaccctatggcgcgtggcgtcaatggcagaccggagtacgttcgccgtagttgtgagcaaagcctgcaacgcctgggggtcgatcatatcgatctgtactatcaacatcgcgttgatccatcagttcccatagaagagactgtcggtgcaatggcggacctggtgcgcgagggaaaagtgcgttatctcgggctatccgaagcatcaacgcaaacgctggaaccgcccataacgttcaccctattaccgcgctgcaaagtgagtattcgctttggtcccgcgaagcggaaatttcagcactttccacctgtgaacggttgggtatag

SEQ ID NO: 369665 - DNA, 291 bp, Salmonella enterica
atgggtgagaacttctcgcgcaatttacgtctggctgaagcaataaaacaaatggcacgcgaaaaagagtgtacccccgcacaattagcgctggcctggctgctggcccgcaacaggcacatcgttcccattcccggcacccgccactgcgccagggtggatgaaaacctcggcgcgttatcactgaccctaagcccgcaggagctgacggcaattgaggcggtttttcctcacgacgccgcggccggcccccgctactggccggaaattatgtcgacattaaatcgctaa

SEQ ID NO: 369666 - DNA, 396 bp, Salmonella enterica
atgaaaaaactgcaaatcgcggttgggattatccgcaacccgaacgacgaaatttttattacccaacgcgccgctgatgcgcatatggcgaacaagctggaatttcccggcggaaaaattgaagccggcgaaacaccagagcaggcgttgatccgggagctacaggaagaggtggggattacgccaacacaggtgacactattcgacactctggaatatcaattcccggatagacacattacgctgtggttttggctggttgaacgctgggatggcgaaccgtgggggaaagaaggacagccgggacggtggatcgcgcagaacgcgttgagtacggacgattttccgccggccaatgaaccgattattcgtaaattacgccaatttgcgctttag

SEQ ID NO: 369667 - DNA, 2706 bp, Salmonella enterica
atgctaatcaaattattaaccaaagtattcggtagccgtaacgatcgtacgctgcgtcgtatgcgtaaggccgtcagccttattaatgcgatggaaccggagatggaaaaactctccgatgacgaactgaaagcgaaaaccaacgaatttcgcgcccgtattgaaaaaggcgaaagcgtagagagcctgattccggaagcgttcgcggtggtgcgtgaagccagtaaacgcgtctttgggatgcgtcacttcgacgttcagctattgggtggtatggtgctcaacgatcgctgtatcgccgaaatgcgtactggtgaaggtaaaacgctgaccgcaacgctgccagcctacctgaacgcgctgtccggcaaaggcgttcatgtggtaaccgtgaacgactatctggcgcagcgtgacgccgaaaacaaccgcccgctattcgaattcctcggtatgtccgttggtatcaacctgccaggtatgcctgcgccagccaaacgtgaagcttacgctgccgacatcacttacggcactaacaacgaatacggttttgactacctgcgcgacaacatggcgttcagcccggaagagcgcgtgcagcgtaaactgcattatgcgctggtggatgaagtcgactccatcctgatcgatgaagcgcgtacgccgctgattatttccggcccggcggaagatagctcggaaatgtacaaaaaagtgaacaaaatcattccgcacctgattcgtcaggagaaagaagattctgacactttccagggcgaaggccacttctccgttgatgagaaagcgcgccaggttaacctgaccgaacgcggtctggtgctgatcgaagagctactggtgcaagaaggcattatggatgaaggcgagtcgctctactcgcctggcaatattatgttgatgcatcacgtcaccgccgcgctgcgcgcgcacgcgctgtttacccgtgacgtggattacattgtgaaagacggcgaagtcatcattgttgatgaacataccggtcgtaccatgcaggggcgtcgctggtctgacggtctgcaccaggcggtagaagcgaaagaaggcgttgaaattcagaatgaaaaccagacgctggcgtctattaccttccagaactacttccgtctgtatgaaaagctggccggtatgaccggtacggcggatactgaagccttcgaatttagttctatctataagctggacaccgtcgttgttccgaccaaccgtccgatgatccgtaaagatttgccggatctggtctacatgaccgaagcggaaaaaatccaggccattatcgaagatattaaagaacgtaccgcgaacggtcagccagtgctggtcgggacgatttctatcgagaaatctgaagtggtctccagagagctgaccaaagcgggcatcaaacataacgtactgaacgcaaaattccacgccaacgaagcaggcatcgttgcgcaggctggttatccagcggcggtcactatcgctaccaacatggcgggtcgtggtaccgatattatgctgggcggtagctggcaggcggaagtcgctgcgctggaagcgccgacggaagaacagattgcgcagattaaagcggactggcaggtacgccatgacgcggttctggctgccggcggcctgcatatcattggcaccgagcgccatgaatcccgccgtatcgacaaccagctgcgtggccgttccggtcgccagggcgatccgggttcttcccgtttctacctgtcgatggaagatgcgctgatgcgtattttcgcctccgatcgtgtctccggtatgatgcgtaaactggggatgaagccgggcgaagcgattgagcacccgtgggtgacgaaagctatcgctaacgcgcagcgtaaagtagaaagccgtaacttcgatattcgtaagcaactgctggaatatgatgatgtggcgaacgatcagcgtcgtgcaatttatacccagcgtaacgaactgctggatgtgtctgacgtgagcgacaccattaacagcattcgcgaagatgtctttaaggagactatcgacgcctacattccgccgcagtcgctggaagagatgtgggatatcccgggtttgcaggaacgcctgaaaaacgacttcgacctggagatgccgattgccgaatggctggataaagagccggagctgcatgaggagacgctgcgtgagcgcatcctggcgcagtccatcgaggtgtatcagcgtaaagaagaggtggttggcgctgaaatgatgcgtcatttcgaaaaaggcgtgatgctgcaaacgctcgattccctgtggaaagagcacctggcggcgatggattacctgcgtcagggtattcatctgcgcggctatgcgcaaaaagatccgaagcaggaatacaagcgcgaatccttcgctatgttcgccgcgatgctggaatcgctgaaatatgaagtgatcagtaccctgagcaaagtccaggtacgtatgcctgaagaggtcgaagcgatggaaatgcagcgtcgcgaagaggcggagcgcctggcgcagatgcagcagctaagccatcaggatgacgatgccgccgtggctgccgatctggccgcccaaaccggcgaacgtaagattggacgtaacgatccttgcccttgcggttccggtaagaaatacaaacagtgtcatggtcgcctgagctaa

SEQ ID NO: 369668 - DNA, 498 bp, Salmonella enterica
gtgagtggaatactgacgcgctggcgacagttaggcagacgatacttctggccgcatctcttattagggatggtcgcggcgagttttggtttgcccgcgctcagtaacgccgctgaaaccaatacgcctgcaaggacgaccgccagcaccgcgtctaaagttaactttagccattttgcgctgttagaagcctctaaccgtcgtcccaatttcaccgtagattactggcatcagcacgctattcgcacggtgattcgccacctttcttttgcaatggcgccgcaaacgctgcccgttgccgacgcgccgtcgccattacaggcgcatcatatcgccttactgaatacgctcagcgcgatgctcacgcaggagggcacgccgccggcgattgttcgtcgcctctccctggcgtattttgcgccacaaaccgcatttagcatcccggcctggataagtcaggcgcagggtatccgcgccggtccgcaacgtctcagctaa

SEQ ID NO: 369669 - DNA, 918 bp, Salmonella enterica
atgatcaaacaaaggacacttaaacgtatcgttcaggcgactggcgtcggtttacacaccggcaaaaaagtcaccctgacattacgccctgcgccggccaataccggggtcatctatcgtcgcaccgacttgaatccaccggtagatttcccggccgatgccaaatctgtgcgtgataccatgctctgtacgtgtctggtgaatgagcatgatgtacggatttcaaccgttgagcacctgaacgctgctctggcgggcttaggtatcgataacatcgttattgaggttaatgccccggaaatcccgatcatggatggcagtgccgctccgtttgtctacctgctgcttgacgccggtattgatgaactgaactgcgccaaaaaattcgtacgcatcaaagagactgttcgggttgaagatggcgataaatgggctgaattcagaccgtacaatggttttacgttggatttcaccatcgactttaaccatccggcgatcgattccagcagccagcgctacgcgatgaacttctctgcggatgcgttcatgcgccagatcagccgtgcgcgtaccttcggttttatgcgtgatatcgaatatctgcagtcccgcggcctgtgcctgggcggcagcttcgattgtgccatcgttgttgacgattatcgcgtattgaacgaagacggcctgcgttttgaagatgaattcgttcgtcacaaaatgcttgacgcgatcggtgacttgttcatgtgtggtcacaatattattggtgcgtttaccgcgtataaatccggtcacgcattgaataataaattgttacaggcagtcctggcaaaacaggaagcctgggaatttgtgaccttccaggacgacgcagaactgccgttggctttcaaagcgccttcgacggtactggcataa

SEQ ID NO: 369670 - DNA, 1152 bp, Salmonella enterica
atgtttgaacctatggaactaaccaacgacgcggtgattaaagtcatcggcgtcggtggtggcggcggtaacgctgttgaacacatggtgcgcgagcgcatcgaaggtgttgaattcttcgcggtgaataccgacgctcaggcgttgcgtaaaacggcggttggccagaccattcaaattggtagcggcattaccaaaggtctgggcgccggcgctaacccggaagtcggtcgtaacgcggcggacgaagaccgtgaagcgctgcgtgcggcgcttgaaggcgcagacatggtatttatcgcggcaggcatgggcggcggtaccggaaccggcgcggcgccagtggttgctgaagtggcaaaagatttaggtattctgaccgttgccgtggtgactaagcctttcaattttgaaggcaaaaagcgcatggcatttgcggagcagggtattaccgagctgtccaagcatgtggactcgttgatcaccatcccgaacgacaagctgctgaaagtgctgggccgtggtatctccctgctcgacgcgttcggcgcggctaacgacgtgctgaaaggcgcggttcagggtatcgcagagctgatcacccgcccgggcctgatgaacgtcgactttgctgacgtgcgtaccgtgatgtctgaaatgggctacgcaatgatgggctccggcgtggcgagcggtgaagaccgtgcggaagaagcggctgaaatggctatttcttctccgctgctggaagatatcgacctgtccggcgcgcgcggcgtgttggtcaacattacggcgggcttcgacctgcgtctggacgagtttgaaaccgtcggtaacaccattcgcgcgtttgcgtcggataacgccaccgtggttatcggtacctctctggacccggatatgaatgatgaactgcgcgtgacggtagtggcgaccggtattggtatggacaaacgtccggaaatcaccctggtgaccaataaacaggtgcagcagccggtgttggatcgttatcagcagcacggtatggcgccgctgacgcaggagcaaaaaacggtcgcgaaagtggttaacgacaatacaccacaggcggcgaaagagccggattatctggatatccccgcattcctgcgtaagcaagctgattaa

SEQ ID NO: 369671 - DNA, 1263 bp, Salmonella enterica
atgatcaaggcgacggacagaaaactggtagtaggactggagattggcaccgcgaaggttgccgctttagtaggggaagttctgcccgacggtatggtcaatatcattggcgtgggcagttgcccatcgcggggtatggataaaggcggggtgaatgaccttgagtcagtggtgaaatgcgttcagcgcgccattgaccaggcggaattgatggccgattgccagatctcctcggtatatctggcgctttccggcaaacatattagctgtcagaatgaaattggcatggtgcccatttccgaagaggaagtgacgcaagaagatgtggaaaacgtcgtgcatactgcgaagtcagtgcgcgtgcgcgatgagcatcgcgtgctgcatgtgattcctcaggagtacgccattgactaccaggaaggcattaaaaatccggtcggtctttccggcgtgcgtatgcaggcgaaagtacatttgattacctgccacaacgatatggcaaaaaacattgtcaaagctgttgaacgttgtggtctgaaagttgaccaactgatatttgccggactggcggccagttattccgtgttaacggaagatgaacgtgaactgggcgtctgtgtcgtggatatcggcggtggtacaatggatatcgccgtttatactggcggcgcgctgcgtcataccaaagtgatcccttacgcggggaacgtggtgaccagcgatatcgcttatgcctttggtacgccgccgagcgatgctgaagccattaaagttcgccacggttgcgcactgggctccatcgtcggtaaagacgagagcgttgaagtaccgagcgtgggcgggcgtccgccgcgcagcctgcaacgtcagacgctggcggaagtgattgagccgcgttacaccgagctgctcaatctggtcaacgaagagatattgcaattacaggaacagcttcgccaacaaggggtaaaacatcacctggcggcggggattgtgttaaccggcggcgcggcgcaaatcgaagggcttgctgcttgcgctcagcgcgtgtttcatacgcaggtgcgtatcggcgcgccgctgaatatcaccggtctgacggattatgcccaggagccgtattactcaacggcggtgggattgcttcactacgggaaagagtcccacttaaacggtgaagcagaagtggaaaaacgtgttacggcatcagttggctcgtggatcaagcgacttaatagctggctgcgaaaagagttttaa

SEQ ID NO: 369672 - DNA, 831 bp, Salmonella enterica
atgtcgcaggctgcgctgaacacgcgaaacagtgatgaagagacgccttcttcacgccgcaataatggaacgcgtcttgcaggaattttattcctgctgacggtactgtgcaccgtgtttgttagcgggtgggtcgtgttagggtggatggaagatgcgcagcgtttaccgttatcaaagctggtattaaccggcgagcgtcactacacgcgtaacgatgatatccgtcaggcgatactggctctgggcgcgccgggaaccttcatgacgcaggatgtgaacattatccagagccagattgagcgtttgccgtggattaaacaggccagcgtcagaaaacagtggcctgatgaattgaagattcatctggttgaatatgtgccgattgcgcgttggaatgatcaacatatggtcgatgctgaagggaacaccttcagtgtgccgtcagaccgcatcggcaaacaggttttacccatgttgtatggcccggaaggcagcgcgagtgaagtgttgcagggataccgcgagatggggcaggtgctggctaaggataaattcactctaaaggaagcggcgatgaccgcacgtcgctcctggcaattgacgcttaataacggcattaagctcaatctcggcaggggcgatacgatgaaaaggttggctcgctttgtagaactctatccggttttacagcagcaggcgcaaaccgatggcaaacggattagctacgttgatttgcgttatgactcaggtgcggcagttggctgggcgccgctcccccctgaggaatctaatcagcaacagaatcaggcacaggcagaacaacaatga

SEQ ID NO: 369673 - DNA, 921 bp, Salmonella enterica
atggctgataaaatcgcggtcctgttgggcggaacctctgcggagcgggacgtttcgttaaattccggcgcggcagtgttggccgggttacgtgaaggcggtattgatgcgcatcccgtcgatccgcaagaggtcgatgtcgcgcagcttaaagcaatgggctttcagaaggtctttattgcgttgcatggccgcggcggtgaagatggcaccttacagggaatgcttgagctgctcggcctgccttataccggcagcggcgtgatggcctcggcgctttccatggataaactgcgcagtaaattgctgtggcagggcgcgggcttaccggttgcgccgtgggtcgcattgacgcgcgctgagtttgaaaaaggccttagcgaagaacaaaaagcgcgaatttcggcgctgggtttaccgctgatcgtcaaacccagccgtgaaggctccagcgtcggtatgacgaaagtagtagaagaaaatgctttacagggtgcgttatcattggcttttcagcatgatgacgaaatactgattgagaaatggctgtgcggtccggaatttacggtggcgatagttggcgaagaaattttaccgtcaattcgtatccaaccggcaggaaccttctatgattatgaggcgaagtatctctctgatgagactcagtatttctgccctgccggtttagatgcgtcccaggaagccgcgctacagtctctcgtcctgcaggcatggaaagctttaggctgcacgggatgggggcgtattgacgtcatgctggacagcgatggtcagttttatctgctggaagccaatacttctccggggatgaccagccatagtctggtgccgatggcggcgcgtcaggcgggaatgagcttctcgcagttagtggtacgaattctggagttggcggactga

SEQ ID NO: 369674 - DNA, 1476 bp, Salmonella enterica
atgaatacacaacaactggcaaaactgcgttccatcgtgcccgaaatgcgtcgcgttcggcacattcactttgtcggcatcggtggtgctggtatgggcggtattgccgaagttctggccaatgaagggtatcagatcagtggttccgatttagcgccgaatccggtgacccagcagttgacgagcctgggggcgacgattttctttaaccatcgtccggaaaatgtgcgtgatgccagcgtggtcgtcgtttccagcgcaatttccgcggataacccggaaattgtcgcggcgcatgaagcgcgtattccggttattcgccgtgcggaaatgctggcggaactgatgcgttttcgccacggcatcgccattgccgggacgcacggaaaaaccacaacgaccgcgatggtgtccagtatttatgccgaagcggggctggacccgacttttgtgaatggcggactggtgaaagccgcaggcgttcatgcgcgtctgggccatagtcgttacctgattgccgaggcagatgagagcgacgcgtccttcctgcatttgcagccgatggtcgcgatcgtcaccaacatcgaagccgaccatatggatacctatcatggcgactttgaaaatttaaagcagacgtttattaacttcctgcataacctgccgttctacggtcgcgcggtaatgtgcgtcgacgatccggtcatccgcgagctgctgccgcgggtggggcgtcagaccacgacgtatggctttagcgaggatgctgacgtccgcgtagaagattatcagcagatagggccgcaggggcactttacgctgttgcgccagggaatgccggatctgcatgtcacgttgaatgcgccgggtcgccacaatgccctgaatgccgccgcagcagtggcggtagcgaccgaagaaggcatcgacgatgacgctatcctgcgcgcgctggaaagcttccaggggaccgggcgtcgttttgacttcctcggcgagttcccgcttgagccggtgaatggtaaagccgggacggcgatgctggtggatgactatggccatcatccgactgaagtagacgccaccattaaagctgcgcgagcagggtggccggataaaaacctggtgatgctgtttcagccgcaccgttacacgcgcacgcgcgatctgtatgacgatttcgccaatgtgctgacccaggtcgatgcgctgctgatgctggacgtttacccggcgggtgaagcgccgattccgggcgcggatagccgttctttatgtcgtacgattcgtaatcggggaaaaattgacccgattctggtttccgatccggctcaggttgcgacaatgttagcgccggtgctgacgggtaacgacttgatattagtgcaaggcgcaggaaatgttggcaaaattgcgcgttacttatctgaaatcaagctgaagccgcaaatccaggaggaagagcaacatggctga

SEQ ID NO: 369675 - DNA, 1068 bp, Salmonella enterica
atgagtggtcaaccgaagcggttaatggtgatggcgggcggtaccggcgggcacgtgttcccgggactggccgttgcgcatcatttaatgtcccagggctggcaggttcgctggctgggtaccgccgatcgtatggaagcggatttagtgccgaagcatggcatcgacattgactttattcggatctccggtctgcgcggtaaaggcgtaaaagcgcttctggcggcgccgctgcggatttttaacgcctggcggcaggcgcgggcgatcatgaagcggtttaagccggatgtcgtgctgggaatgggcggttatgtttccggccccggcggtcttgccgcctggtcattgggtattccggtcgttttgcatgagcaaaacggtatcgccgggctaaccaatcagtggctggccaaaatcgcgaccacggtgatgcaggcgtttcccggtgcgtttccgaacgcggaagtggtgggtaacccggtgcgtaccgacgtactggcgttgccgttgccgcaggtgcgtctggccggtcgtgacggcccgattcgcgtgttggtggtcggcggttctcagggggcgcgagtcctgaaccagacgatgccgcaggttgccgccagactgggcgatacggttacaatctggcatcaaagcggaaaaggcgtgcagcacacggtagagcaggcgtatgccggggtgggacaaccgcagcataaggtaacggaatttatcgatgacatggccgccgcctatgcgtgggcggatgtggtggtgtgccgttccggcgctttaacggtgagcgagatcgccgccgccgggttaccggcgatattcgtgccgtttcagcataaagacaggcagcagtactggaatgcgctgccgttagaaaacgccggcgcagctaagatttttgagcagccgcagtttactgtagaggctgtcgccgacaccctggcggggtggtcgcgcgaggcgttgttaaccatggcggagcgtgcccgcgcggtatccattccggatgctaccgagcgcgtcgccagtgaagtcagccgggttgcccggacataa

SEQ ID NO: 369676 - DNA, 1245 bp, Salmonella enterica
atgcgtttatctctcccccgtctgagaatgccgcgcgtaccaggctttggcctcctggcctggctgtttgcggcgcttaaaggctgggtgatggcttcgcgcgataaagacgccgacagtctgatcatgtatgaccgcacgctgctatggctgaccttcgggctggcggcgattggttttgtcatggtgacgtcggcctccatgccagtcgggcagcgcctggcgaacgatccgtttttgtttgccaaacgtgatgcgctctatatcttcctggcattttgtctggcgatggtcacgctacgtttgcccatgaccttctggcaaaaatacagcacgacgatgctgattgcgtcgatcattatgctgcttatcgtgctggtcgtcgggagctcggtcaacggggcgtcgcgctggattgcgctggggccgctgcgtattcagcctgcggagtttaccaagctgtcgctgttctgctacctcgcgaactatctggtgcgtaaggttgatgaagtgcgaaataacctgcgcggctttttaaaaccaatgggcgtgattctggtgctggcggtgttactgctggcgcagcctgacctcgggacagtggtcgtactgtttgtcaccacgctggcgatgctgtttctcgccggggcgaaattatggcagttcatcgccattatcgggatgggcatctcggcggtgattctgttaatcctcgccgaaccgtatcgtattcgccgtgttacctcgttctggaacccctgggaagatccgttcggcagcggttatcagctgacgcagtcgctgatggcttttggtcgcggtgagatatgggggcaagggctggggaattcggtgcagaaactggagtatttgccggaggcgcacactgatttcatcttcgccattattggggaagaactgggttatatcggtgtggtattggcgcttttaatggtattcttcgtcgcttttcgcgcgatgtcgattggccgtaaggcattggagattgaccaccgtttttccggatttttagcgtgttctatcggtatctggtttagtttccaggcgctggtaaacgttggcgcggccgcggggatgctgccgaccaaaggtcttacgctgccgctgatcagttatggcgggtcgagtctgttgattatgtcgacggccattatgtttttattacgtattgattatgaaacgcgtctggaaaaagcgcaggcgtttacacgaggttctcgatga

SEQ ID NO: 369677 - DNA, 1317 bp, Salmonella enterica
atggctgattaccaggacaaaaacgtcgtcattattggtctgggcttaaccggactctcttgcgtggacttttttctcgctcgcggcgtgacgccgcgggtgatggatactcgcgtgacgccgccgggtctggataagctgccgcaagaggttgagcgtcacgttggcggcctgaacgacgagtggctcttagcggcggatttaatcgtcgccagccctggtattgctctggcgcacccttcgctgagcgctgccgccagcgctggagtagaaattgtcggcgatatcgaactgttttgccgcgaagcgcaagcgccgattgtagccatcaccggctcgaacggcaaaagcaccgtgaccaccttagtgggcgagatggcgaaagcggcgggcgtcaatgtcggcgttggcggcaatatcggtcttccggcgctgatgctgctggatgccgatcgcgaattgtacgtgctggaattatccagtttccaactggaaactacctcaagtttgcaagcggcggcggcaacggtgctcaacgtcactgaagatcatatggaccggtatccgtttggtttgcaacagtaccgggcggcgaaactgcgcgtctacgagaaggcgaaagtgtgcgtagtgaatgccgatgatgcgttgacgatgccggttcgtggggccgatgagcgctgcgtcagctttggcgtcaatatgggcgattatcaccttaatcgtcagcagggcgaaacctggctgcgagtcaaaggcgagaaggtgctgaacgtgaaagagatgaagctttccggtcagcataactataccaatgcgttagcggcgctggcgctggcggatgccgtaggtctgccgcgcgccagcagtttgaaggcgttgacgacatttactggtctggcgcatcgcttccagctggcgttggagcataacggcgtacgttggatcaacgactcgaaagcgaccaacgtcggcagtaccgaagcggcgctaaacggtttgcatgtggacggtacgctacatctgctgctgggcggcgacggtaagtcggcagacttttctccgctgacacgctatctgaccggcgatcgtatccgcctgtattgctttgggcgcgatggcgcgcagcttgccgcactgcgtccggaaatcgcccaacagactgagacgatggaagaggcgatgcgtttgctggcgccgcgcgttcagccgggtgatatggtgctgctgtcgcccgcctgcgccagcctcgatcagtttaaaaattttgagcaacggggcgatgtctttacccgtctggcgaaggagttaggttga

SEQ ID NO: 369678 - DNA, 1083 bp, Salmonella enterica
atgttagtttggctggccgagcatttggtcaaatattattccggctttaacgtcttttcttatctgacgtttcgcgccatcgtcagcctgttgaccgcgctgttcatctctttatggatgggcccgcgtatgatcgctcgtctgcaaaaactctcttttggccaggtggtacgtaacgatggcccggaatcgcacttcagtaaacgcggtacgccgacgatgggcggcatcatgatcctgacgtcgattgtgatttccgttctgttatgggcttacccgtctaacccgtacgtctggtgcgtgctggtggtattgatcggctacggcattatcggttttgtcgatgactaccgcaaagtggtgcggaaagataccaaagggctgattgcgcgctggaaatatttctggatgtcggttatcgcgctcggcgtggcctttgcgctttatctcgtcgggaaagacacgcccgcgacccaactggtggtgccgttctttaaagatgttatgccgcaattggggctgttttacattctgctgtcctactttgttatcgtcggtacgggtaacgccgtaaacctgaccgacgggcttgatggcctggcgatcatgccgactgttttcgttgccgccggctttgcgctggtggcctgggcgaccgggaacatgaacttcgccaattacctgcatattccgtatttacgccatgcgggcgagctggtgattgtctgtacggcgattgtcggcgcgggattaggattcttgtggtttaacacctatccggcgcaggtttttatgggcgatgtcggatcgctggcgttgggcggtgcgttgggcattatcgccgtgctgctgcgtcaggaatttctgctggtgatcatgggcggcgtctttgtggtggaaactctgtcggtcatcctgcaggtgggctcctttaaactacgcggacagcgtattttccgtatggcgcctatccatcaccactatgaactgaaaggctggccggaaccgcgcgtgattgtgcgcttctggattatttcgctgatgctggtgctgattggcctggcaacgctgaaggtacgttaa

SEQ ID NO: 369679 - DNA, 1359 bp, Salmonella enterica
atgattagcgtaacgctcagcaaaattgccgatgtccttggcgccgaacaccgcggggcggatctcacgctcgatacggtcattaccgacacacggaaagtgacgccgggatgcctgttcgtggcgctgaaaggggaacgctttgatgcgcatgattttgctgataaagcaaaagcgaacggcgctggcgccctgctggtcagtcgtcctctggatatcgatctcccgcaggtgattgtaaaagacacgcgtcaggcatttggccaactggccgcctgggtacgtatgcaggtaccggcgcgggtggtggcgttaaccggttcgtccggcaaaacctcggtcaaagagatgaccgccgcgattcttagccagtgcggaaatactctgtataccgcaggcaattttaacaacgacatcggcgtgccgataacgctgctgcgcttaaaccatgattatgactatgcggtaatcgagttaggcgctaatcaccagggagaaatcgcctggaccgttagcctgacgcgcccggaagcggcgctggtcaataacctggcggcggcgcatctggaaggcttcggctcgttggccggcgtggcgaaagcgaaaggcgaaatctataccggtttgcctgagaacggtatcgcgattatgaatgccgataataatgactggctgaactggcaaagcattattggcgatcgtctggtgtggcgcttttcgccgaatgcggcaaacagcgactttaccgctgcgaatatccacgtgacgtcacacggtaccgaatttaccctgcaaacgccgatgggcagcattgatgtgctgctgccgttgccggggcggcacaatattgccaacgcgctggcggccgctgctttatcaatggcggtgggggcgacgctgacggcgattaaagcagggctggcggcgttaaaagccgtacccgggcgtctgttcccgattcagctaagtgaaaaccaactggtactggatgacgcttataacgccaacgttggttcgatgaccgccgcagtgcaggtcctttctgaaatgcccggctaccgcgtgctggtggtaggcgatatggccgagctgggcgcagaaagcgaagcgtgccacctccaggttggtgaggccgcaaaagcggcgggtattgatcgcgtgttaagcaccggaaaactcagtcaggctatcagccacgccagcggcgtcggcgaacattttgccgataaagccgcgctcattgcgcgtttacacgctctgcttcaggagcaaccaatgatgactattttagtgaaaggatcacgcagcgccgcgatggaagatgtggttcatgcgttacaggagaaaggttcatgttag

SEQ ID NO: 369680 - DNA, 1488 bp, Salmonella enterica
gtggcagatcgtaatttgcgcgaccttcttgctccgtgggtggctggactacccgcgcgagaactgcgagagatgacgctcgacagccgtgtggctgcggcgggcgatctctttgtggcagtggtgggtcatcaggcggacgggcgtcgatatatcccgcaggcgatagcgcaaggcgtagctgccattattgcagaggcgaaagacgaggcgagcgacggtgagattcgcgaaatgcacggcgtaccagtcgtctatctcagccagctcaatgagcgtttatctgcgctggcgggccgcttttaccatgagccatctgaaaacatgcgtctggtggcggtgaccggcaccaatggcaagaccaccaccacccaactactggcgcagtggagccagttgctcggcgaaaccagcgcagtgatgggaacggtaggcaacggactgttgggtaaagtgatcccgacggagaacacaaccggttccgctgtggatgttcagcatgtgctggccagtctggttgcgcagggcgcgaccttcggcgcgatggaagtctcttctcacggcctggtgcagcatcgcgtggcggcgttgaaatttgccgcctccgtgtttactaatttgagccgcgaccatctcgactatcatggcgatatggcgcattacgaggcggcaaaatggatgctttattccacccaccatcacggtcaggcaatcgtcaacgccgatgatgaagttggacgccgctggctggcgtcgctacccgatgcggtcgcagtatcgatggaagggcatatcaaccctaactgtcacggtcgttggctgaaagcggaggcggtggagtaccacgaccgcggagcgacgattcgttttgcttcaagctggggtgacggcgaaatcgaaagccgcctgatgggcgcgtttaacgtcagcaacttactgctggcattggcgacgctgctggcgctgggctatccgttaacggatttgctgaaaaccgccgcgcgtttgcagccggtttgcgggcgtatggaagtgttcactgcgccaggcaaaccgacggtggtggtggattacgcgcacacgccggatgcgctggaaaaagcgttgcaggcggcgcgtctgcattgcgccggaaaattgtggtgcgtctttggctgtggcggggatcgtgacaaaggtaagcgcccactcatgggggccattgccgaagaattcgcggatatcgtcgtggtgactgacgataacccgcgtaccgaggagccgcgcgccattatcaacgatattctggccggaatgctggacgccgggcaggtcagggtaatggaaggccgcgctgaggcggtaaccaatgccattatgcaggcaaaagacaatgacgtcgtgctgattgcaggtaaagggcacgaggattaccagattgtcggcacgcagcgtcttgattattcagaccgcgtgaccgcagcgcgtttgctgggggtgatcgcatga

SEQ ID NO: 369681 - DNA, 1767 bp, Salmonella enterica
atgaaagcagcggcaaaaacgcaaaaatcgaaacgccaggaagaacagaccaacttcatcagttggcgttttgcgttgctgtgcggctgtattttactggcgctggtttttttacttggacgcgcggcgtggctacagattatcgccccggatatgctggtgcgtcagggcgatatgcgttcgctgcgtgttcaggaagtctccacctcacgcggtatgattaccgaccgttccgggcgtccactggcggtcagcgtaccggttaaggcgatctgggccgacccgaaagaagttcatgacgccggcggcatcagcgttggcgatcgctggaaagcgctttctactgcgctcaatattccgctcgatcagctctccgcccgtatcaacgccaacccgaaagggcgttttatttatctggcgcgccaggtaaatcctgacatggcggactacatcaaaaaactcaaactgccggggattcatttgcgtgaagagtcccgccgctactacccgtcaggagaagtaaccgctcacctcatcggttttaccaacgtcgacagtcagggtattgaaggcgttgaaaagagctttgataagtggcttaccggtcagcctggcgagcgaatcgtgcgtaaagaccgctatggccgcgtgattgaagatatctcctccactgatagtcaggcagcgcacaacctggcgttaagcattgatgaacgcttacaggcgctggtttaccgcgaactgaacaacgcggtggcgtttaacaaggcggaatccggtagcgcggtgctggtcgatgtcaataccggtgaagtactggcgatggcgaatagcccttcctataaccccaacaaccttgccggtacgccgaaagacgcgatgcgtaaccgtaccatcaccgacgtgtttgaaccaggttctacggttaagccgatggtggtgatgactgcgcttcagcgcggtatcgtcaacgaaaatacggtgttgaataccgttccataccgaattaacggccacgaaattaaagacgtggcgcgctacagcgaattaaccctgaccggggttctacagaagtcgagtaacgtcggtgtatccaagctggcgttagcgatgccgtcctcagcgttagtagatacttactcacgttttgggctaggaaaggcgaccaatttggggttggtcggagaacgcagtggcttatatcctcaaaaacaacggtggtccgacatagagagggccaccttctctttcggctacgggctaatggtaacgccgttacaattagcgcgagtctatgcaacgatcggcagctatggcatttatcgcccgctgtcgattaccaaagttgatccgcctgtacccggcgaacgcatcttccctgaatccaccgtacgcaccgtggtgcatatgatggaaagcgtggcgctgccgggcggcggcggcgtgaaggcggcgattaaaggctaccgtatcgcgattaaaaccggtacggcgaaaaaagtggggccggacggtcgctacatcaacaaatacattgcttataccgcaggcgtcgcgcctgcgagtcagccgcgcttcgcgctggtggttgtcatcaacgatccgcaggcgggtaaatactacggcggcgccgtttccgcgccggtatttggtgccatcatgggcggcgttctgcgcaccatgaacatcgaaccggacgcgctggcaacgggcgaaaaaaatgaattcgtaattaatcaaggcgagggaacaggtggcagatcgtaa

SEQ ID NO: 369682 - DNA, 366 bp, Salmonella enterica
atgatcagcagagtgacagaagccctaagcaaagtgaagggatcgataggaagcaacgagcgccatgccttgcctggcgtgatcggtgacgatcttttgcggttcgggaagctgccactctgcttgttcatttgcatcattttaacggcggtgacggtggtcacgacggcgcaccatactcgtttactcaccgcgcagcgtgaacaattggttctggagcgcgatgcattggacattgaatggcgcaacctgatccttgaagaaaatgcgctaggcgatcacagccgggtggagcggatcgcaacggaaaagctgcaaatgcagcatgttgatccgtcccaagaaaatatcgtagtgcaaaaataa

SEQ ID NO: 369683 - DNA, 942 bp, Salmonella enterica
atgatggaaaattttaaacacactacggtactgttggatgaagccgttaatgggctgaatattcgtccggatggtatctatattgatggcacatttggtcgcggcggccactcgcgcctgatcctctcgcaactgggcgaagaggggcgcttgctggcgatcgatcgcgatccgcaggcgatcgccgttgcgcagaccattaatgatcctcgcttctccatcattcatggacctttttccgcgctggctgattatgtagccgagcgcgagcttaccggcaagattgacgggatccttctcgatcttggcgtatcttctccgcagcttgacgatgcggagcgcggtttttcatttatgcgcgacggtccgctggatatgcgaatggacccgacgcgcggccagtctgccgccgagtggttacaaacggcggaggaggcggatatcgcctgggtgctgaaaacattcggcgaggagcgttttgccaaacgtattgctcgcgccattgttgagcgcaatcgcgaacagccgatgacccgcaccaaagagctggcggaggtggttgcggcggcgaccccggtaaaagacaaattcaaacatcccgcgacccgtaccttccaggcggtgcgcatctgggtaaacagtgaactggaggagatagagcaggcgctaaaaagctcgctcagcgtactggctccaggcgggcggctttcaatcatcagtttccactcgctggaagaccgtattgtgaaacgctttatgcgtgagcaaagccgcggtccgcaggtaccggcgggattaccgatgacggaagcgcagctcaaaaaactgggcggtcgtgagttacgagcgttaggcaagttgatgccgggtgaaaaagaggtagctgaaaatcctcgggcccgtagttcagttctgcgtatcgcagagaggacgaacgcatga

SEQ ID NO: 369684 - DNA, 459 bp, Salmonella enterica
atgttccggggggcaacgttagtcaatctcgacagtaaagggcgcctgaccgtgccgacccgttatcgggagcaactgatcgagagcgctaccggtcaaatggtatgtaccattgacatccatcacccatgcctgctgctttaccccctgcctgaatgggaaattattgagcaaaagttatctcgtctgtcgagcatgaacccggtagaacgtcgcgtacagcgtttactgttgggccatgccagcgaatgtcagatggatggtgcaggtcgattactgatcgcgccagttctgcggcaacatgccggactgacgaaagaagtgatgctggttggacagttcaacaaatttgagctgtgggatgaaacgacctggtatcaacaggtcaaggaagatatcgacgctgaacagtcagctaccgaaacgttatcggagcggctgcaggacttgtctctataa

SEQ ID NO: 369685 - DNA, 1005 bp, Salmonella enterica
gtgaaactggatgaaatcgctcggctggccggtgtctcgcgcacaactgcaagctacgttataaacggtaaagcaaagcaataccgcgtgagcgacaaaaccgtagaaaaagtcatggcggtagtgcgtgagcacaattaccatcctaacgctgtggctgccgggctgcgtgctggacgcacacgttccattggtctggtgatcccggaccttgaaaacacgagctacacccgtatcgcaaactatcttgagcgccaggcacgccagcgtggctaccaactgctgatcgcctgttctgaagatcagccggataacgaaatgcgctgcattgagcaccttttgcaacgccaggtggatgcaatcattgtttcaacttcgttaccgccggagcatcccttctatcagcgctgggccaacgatccgttccccatcgtcgcgctcgaccgcgcgctggatcgcgaacatttcaccagcgtggtcggtgccgatcaggatgatgccgagatgttggcggaagagctgcgtaaattcccggcggaaacggtgctttatttgggcgcgctgccggagttgtccgtcagtttcctgcgcgagcaggggttccgcaccgcatggaaagacgatccgcgggaggtgaatttcttatatgccaacagctatgagcgcgaagccgccgcgcagctgtttgagaaatggctggaaacgcatcctatgccgcaggcgctctttacgacatcattcgcgctattacagggcgtgatggacgttacgctgcggcgcgatggaaaactgccttcggatttggcgattgcgaccttcggcgatcatgagctgctggattttctgcaatgcccggtactggcggtggcgcagcgtcatcgtgatgtcgcggaacgcgtgctggagattgtgctggcaagtcttgatgaaccgcgtaaaccgaaacccggcttaacgcgtattcggcgaaacctgtatcgtcgcggcattctgagccgtagctaa

SEQ ID NO: 369686 - DNA, 495 bp, Salmonella enterica
atgatgcgccggattttatcggtattactggaaaacgaatctggggcgttatcgcgggttatcggcctcttttcgcaacgcggatataatattgaaagcctgaccgtcgcgccgacagacgatccgacgttgtcgcgcatgactatccagacggtaggcgatgaaaaagtgcttgagcaaattgaaaagcaactgcacaagctggttgatgtgctgcgcgtcagcgagctgggacagggagcgcacgttgagcgggaaatcatgctggtgaaaatccaggccagcggctacggacgggaagaggtgaagcgtaatacggaaattttccgtggtcagattattgatgtcacgccaacgctgtataccgttcaactggcgggcaccagcgataaactggatgcttttctggcctcgctgcgcgacgtggcgaaaattgttgaagtggcgcgttcaggcgtcgtcgggctttcgcgcggcgataagattatgcgctga

SEQ ID NO: 369687 - DNA, 1725 bp, Salmonella enterica
gtggagatgttgtctggagccgagatggtcgtccgatcgcttatcgatcaaggcgtaaagcaggtgttcggctatcctggaggcgcagtgcttgatatttatgatgcgctacataccgttggagggatcgatcatgtgctggtgcgtcatgagcaggccgcggtgcatatggcggatggcctggcgcgagccactggcgacgttggcgtggtgctggtgacttccggaccgggagcgaccaatgcgattaccgggattgctacggcctatatggattccattccgctggtgattctttccggccaggtcgccacctcattgattggctatgatgcttttcaggagtgcgacatggtggggatttcccgaccggtggtcaaacatagcttcctggtcaaacagacggaagatattcccctggtgcttaaaaaggccttctggctggcggcaagcggacgtcctgggccggtggtcgtggatttgccgaaagatattttgaatccggcgaaaaaaatgccgtatgcctggccggagacggtcagtatgcgctcttacaatcccacaacatcaggacataaaggacaaattaagcgtgccttgcaaacgctggcgtcggcaaaaaagccggtggtctacgttgggggaggggcgataagcgcggcctgctatgcgccgttgcgccacatcattgaaacctttaacctgccggtggtctcttcattaatgggactgggcgtgtttcctgctactcatcgccagtcgttaggaatgctgggaatgcatggcacttatgaagccaatatgaccatgcataacgccgacgtgattttcgctgttggcgtacgatttgacgaccgcacgacgaataatctcgctaaatattgtccgaacgcgacggtattacacatcgacattgacccgacgtccatatccaaaacggttaacgctgatatcccggtggtgggcgatgcccgcctggtactggaacaaatgctggagctactggcgcaggatgcgccgtctcagccgcaggatgatattcgcgactggtggcagcagatagagagctggcgcgcccgtcagtgcctgaaatatgacgcggaaagcgaaagcattaaaccccaggcggtgattgaaaccctctggcgtctgacgaagggcgatgcgtacgtgacgtccgatgtaggacaacaccagatgtttgccgctctctattacccgttcgataagccacgtcgctggattaattccggcgggctcggcacgatgggttttggcctaccggctgcattgggcgttaaaatggccctgccgaaagaaatggtggtctgcgtgaccggcgatggcagtatacagatgaacattcaggagctgtcgacagccttacagtatgaactgccggtactggttctgaacctgaacaaccgttatctggggatggtaaaacagtggcaggatatgatctattccggtcgccattctcagtcttatatgcagtcgttaccggattttgtgcgcctggcggaagcatatggccatgtcgggctgcagattaaccacccggatgagctggaaagtaaactcagcgaagcccttgagcatgtgcgtaataaccgactggtgttcgtcgatgtcaccgttgatggcagcgagcatgtctatccgatgcagattcgcgggggcgggatggacgaaatgtggttaagcaaaacggagaggacctga

SEQ ID NO: 369688 - DNA, 945 bp, Salmonella enterica
atgccagaggtcaaaaccgaaaagccgcatcttttagatatgggcaaaccacagcttcgcatggttgatttgaacctattgaccgtgttcgatgcggtaatgcaagagcagaatattacgcgcgccgcccacacgctgggaatgtcgcagcctgcggtcagtaacgccgtagcgcgtctgaaggttatgtttaatgacgaactttttgttcgatatggacgaggaattcagccgactgcccgtgcatttcagttatttggttcagtccgtcaggcgttacaattggtgcaaaatgaattgccgggatcggggtttgagccgaccagcagcgaacgtgtattcaatctttgcgtgtgcagtccgctggataatatcctgacgtcacagatttataatcgtgtagaaaaaattgcgccaaatattcatgtcgtttttaaagcgtcgttgaatcagaatactgagcatcagttacgctatcaggaaaccgagttcgttattagttatgaagaattccgtcgtcctgagtttaccagcgtaccgctatttaaagatgaaatggttttagtcgccagccgaaaacacccgcgtattagcggcccgctactggaaggcgatgtttataatgaacaacatgcggttgtttctctcgatcgttatgcgtcatttagtcagccgtggtatgacacgccggataaacagtcgagcgtggcttatcagggcatggtgcttatcagcgttctgaacgtggtttcgcagacgcatttggtcgctattgccccgcgctggctggcggaagagtttgcggaatcgctggatctgcaaatattgccgttgcctttaaaactgaatagccggacatgctacctttcctggcatgaagcggctgggcgtgataaagggcaccaatggatggaagatttattagtttctgtttgtaagcgataa

SEQ ID NO: 369689 - DNA, 1572 bp, Salmonella enterica
atgagccagcaagtcattatttttgatacgaccttacgcgacggcgaacaagcgttacaggccagcctgagcgcgaaagagaagctgcagattgccctggcccttgagcgcatgggtgttgatgtcatggaagtgggcttcccggtctcttctccgggtgattttgaatccgtccaaaccatcgcccgcaccattaaaaacagccgcgtttgcgccctggcgcgttgtgtagaaaaagacattgacgtcgcggcacaggcgctgaaggtcgccgacgcgtttcgcatccatacttttatcgccacctcgccaatgcacatcgccaccaaactgcgcagcacgctggatgaggtcatcgaacgcgcggtatacatggttaagcgggcgcgtaattacactgatgacgtagagttctcctgcgaagatgctggccggacgcctgttgacgatctggcgcgcgtggtggaagccgctataaacgccggcgcgagaaccattaatattcccgataccgtgggctataccatgccgtttgagttcgcgggaatcatttccggcctgtatgaacgtgtccccaatatcgacaaagctatcatctccgttcatacccacgacgatttagggatagcagtaggcaactcgctggcggcagtacatgcgggcgcgcgtcaggttgaaggcgcgatgaacggtatcggagaacgtgccggtaactgcgcactggaagaagtgatcatggcgattaaagtgcgcaaagacatcatgaatgtacacaccaacatcaatcaccacgaaatctggcgcaccagccagaccgtcagccagatctgtaacatgccgatcccggccaacaaagcgattgtcggcagcggcgcttttgcccactcttccggcatccaccaggatggtgtcctcaagaaccgcgaaaactatgaaatcatgacgccagagtccatcggtctgaaccagatacagctgaacctgacctcccgctctggccgtgccgccgtgaaacatcgcatggaagagatgggttacaaggacacagactacaacatggatcacctgtacgacgcgttcctgaagctggcggacaaaaaaggccaggtgttcgactatgacctggaagcgctggcgtttattaataaacagcaagaagaaccagagcatttccgtctggattacttcagcgtgcagtccggctccagcgatatcgccactgcttccgtgaagctggcctgtggtgaagagatcaaggccgaagcggcgaacggcaacggcccggtcgacgccatctatcaggcgattaaccgcatcactggctacgacgttgagttggttaaatacgacctgaacgccaaaggccagggcaaagacgcgctgggtcaggtcgatatcgtcgtgaaccatcatggtcgccgcttccacggcgtcgggctggcgacggatatcgtcgaatcctccgccaaagcgatggtgcacgtactgaacaatatctggcgcgccgccgaagttgaaaaagaattgcaacgcaaagctcaaaataaagagaacaacaaggaaaccgtgtaa

SEQ ID NO: 369690 - DNA, 1092 bp, Salmonella enterica
atgtcgaagaactatcatattgccgtactgccgggcgacggtatcggcccggaagtcatggcgcaagccctgaaagttatggatgcggtacgcagccgttttgatatgcgtataaccaccagccactatgacgtcggcggtattgctatcgacaatcatggtcatccactgccgaaaaccaccgttgaagggtgcgagcaggcggatgccattctgtttggctccgtcggcggcccgaaatgggaaaatttgcccccggaaagccagccagagcgcggcgccctgctgccgctgcgcaaacatttcaaattattcagtaacctgcgtccggcgaaactgtatcagggactggaagcattttgcccgttgcgcgccgatatcgccgctaacggtttcgatatcctgtgcgtgcgcgagctgaccggcgggatctatttcggacagccaaaaggccgcgaaggcagcggtcagtacgaaaaagcctttgataccgaagtttatcaccgctttgagatcgagcgcattgcccgtatcgcctttgaatcggcgcgtaaacgccgccgtaaagtcacctctattgataaagccaacgtactgcaaagctctatcctgtggcgtgaaatcgtcaatgatgtcgcgaaaacgtatcccgatgtggaactcgcgcacatgtatatcgataacgccaccatgcagttgattaaagacccgtcgcagtttgacgtactgctgtgctctaacctgttcggcgacattctgtccgacgaatgcgccatgatcaccggctcaatggggatgttgccctccgccagcctgaacgagcaagggtttggcctgtatgaaccggctggcggctccgcgccggatatcgccgggaaaaatatcgccaatccaattgcgcagatcctgtcgctggcgctgctgctgcgctacagcctggatgccaacgatgcggcaacagccattgaacaggcgatcaatcgcgcattagaagagggcgttcgcaccggcgatttagccaggggcgctgccgcagtcagtaccgatgagatgggcgatattatcgcccgctatgtcgcagaaggggtgtaa

SEQ ID NO: 369691 - DNA, 1401 bp, Salmonella enterica
atggccaaaacgttatacgaaaaattatttgatgcccacgtggtctttgaggcgccaaacgaaacgccgctgctgtacatcgaccgccacctggtgcatgaagtcacctctccgcaggcgtttgacggtctgcgcgcgcaccatcgtccggtacgtcagccagggaaaaccttcgccacgatggatcacaacgtctcgacgcagactaaagacattaatgcttccggtgaaatggcgcgtatccagatgcaggagctgattaagaactgtaacgagttcggcgtcgagctgtatgacctgaatcacccatatcagggcatcgtccatgtgatggggccggaacagggcgtcaccctgccgggcatgaccatcgtctgcggcgactcccacaccgccacccacggcgcgtttggcgcgctggccttcggcatcggcacttctgaggtagaacatgtactggcgacgcaaaccctgaaacaggggcgcgctaaaaccatgaagattgaagtcacgggcaacgccgcgccgggcattaccgccaaagacatcgtgctggcgatcatcggtaaaaccggcagcgccggcggcaccgggcacgtggttgaattttgcggcgacgcgatccgcgcgctgagtatggaaggccgcatgacgctgtgcaatatggcgattgagatgggcgccaaagccggtctggtcgccccggatgaaaccacttttaactacgtaaaagggcgtttgcacgcgccgaagggccgcgattttgacgaagccgtcgagtactggaaaacgctgaaaaccgatgacggcgcgacctttgatactgtcgtcaccctgcgagcagaagagatcgcgccgcaggtgacctggggcacgaatccgggccaggtgatttccgtcaccgacatcatccccgatcccgcctcttttagcgatccggttgagcgcgccagcgccgaaaaagcgctggcttatatgggcttacagccgggcgtaccgttaacggacgttgctattgataaagtctttatcggctcttgtaccaattcgcgtattgaagatttgcgcgcggcggcggaagtcgccaaagggcgcaaagttgcgcctggcgtgcaggcgctggtggtgccgggttcaggtccggtgaaagcgcaggcggaagcggaaggtctggacaagatctttatcgaagcaggatttgaatggcgcttaccgggctgttccatgtgcctggccatgaataatgaccgcctgaacccgggcgagcgctgcgcctccaccagcaaccgtaactttgaaggccgtcagggccgagggggtcgcacgcatttagtcagcccggcgatggccgccgctgccgccgttaccggccacttcgccgacattcgcagcatcaaataa

SEQ ID NO: 369692 - DNA, 606 bp, Salmonella enterica
atggcagagaaatttacccagcataccggcctggttgtcccactggatgccgccaacgtcgataccgatgcaattctccctaaacagtttttgcagaaggttacgcgcaccggttttggcgcccatctgtttaacgactggcgcttcctggacgaaaagggccaacagccaaatccggaattcgtgttgaactttccggaatatcaaggcgcgtcgattctgttggcgcgggaaaactttggctgcggctcgtcacgcgaacacgcgccgtgggcgttgaccgattacggctttaaagtggtgatcgcgccaagcttcgccgacatcttctacggcaacagctttaacaaccaactgctgccggtaaccctgagcgacgcacaggtcgatgagctgtttgctctggtgaaagccaatccgggcattaaatttgaagtggatctggaagcacaggtggtgaaagcaggcgataagacctacagctttaaaatcgacgacttccgccgccactgcatgttgaacggtctggacagcattgggctgacgctgcagcacgaagacgcgattgccgagtacgaagacaagcagcctgagtttatgcgttga

SEQ ID NO: 369693 - DNA, 282 bp, Salmonella enterica
atgaaaaaggtttttttgcttgcagcgctttttgctatgtccaattcctctttcgcggcaatggctgaaagttgtcagcaatattttaatgatattgatgccctggttgagcaggctgcagcaacgagtgaacaggcaaaacagcaatttgacgcgatgaagcctcaactcgaagcgtcaaaaaaacagttggaaactgtagctgcatctgaccaggatgctgcgtgtaagcaggctctggcgtcaatggttcagattaaacaggctctgggattaaaataa

SEQ ID NO: 369694 - DNA, 123 bp, Salmonella enterica
atgcgccagttctggttgagatattttgccgcgacggaaaaaacgtcctggctggcttgcctgagcgcgccgcagcgcttaaaaatgctcgcggaactgatgcagtgggaggcgaccgattga

SEQ ID NO: 369695 - DNA, 1659 bp, Salmonella enterica
atgccctcaggtcgcctgcaacaacaatttatccgtctctggcaatgttgtgacggtaaaacgcaagacaccacgcttaatgagctggcggatctgctgaactgttcgcgtcgccatatgcgtacgctgctaaatacgatgcaggcgcgcggttggctaacatgggaagctgaggttggacgcggaaagcgttcgcgtctgacgttcctgtataccggactggcgctgcaacagcagcgggcggaagacctgctggaacaagatcgaatcgatcaactggtacaactggtcggcgataaaagcgctgtcaggcaaatgctgatttcccatctgggacgcagcttccgccaggggcggcatattctgcgggttctttactatcgtccgatgcacaatctcctgccgggaaccgcattacgtcgctcggaaactcatattgcccggcaaattttcagttcgctcacgcgggtaaatgaggaaaacggggaactggaagcggacattgcgcaccactggcagcaaatttcccctttactgtggcgcttctacctgcgccccggcattcattttcatcatggccgcgagctggagatggaagatgtcatcacctcgctgacgcgtatcaatacgcttccgctttactcgcacatcacaaagatagactcccctaccgcgtggacgctggatattcatctttcccagccggatcgctggttgccgtggctgctgggccaggtcccggcgatgattttgccgcgggagtgggaaacgctggctaatttcgccagccaccctatcggcaccgggccttatgccgtgcggcgtaatacgccaaaccagctcaagatactcgcctttgatgattacttcggctatcgggcgttgatagacgaagtgaatgtctgggtactgccggatatcagtgaagaaccggcctgcggcttgatgctggaagggccgatacaaggcggtgaaaaagcgatagaaagccgactggaagaggggtgctattacctgctattcgacgccagaacgccgcgcggcgcgcatctgcaggtcagagaatgggtaagccacgtcctctcccccaccaatttactctatcatgccgatgaaccgctacagcagctctggttcccggcctatgggcttttaccgcgctggcatcacgcccgtccaggcccgggcgaaaaacccgccgggctggaaaccctcacgctgaccttctatcgcgaacacattgagcaccgggttatcgcccgtatcatgagcgcgcttctggctgaacatcaggtgcatctgcatattcaggagatcgactacgatcaatggcacgccggcgacatcgaaagcgatatctggctcaatagcgctaactttacgctgccgctggatttctcgctgttcgcgcacttgtgcgaagtaccgctcttgcagaactgcattccgcgcgactggcaggacgacgccgcgcagtggcgcgctggcgagatgaacctggcgaactggtgccagcaactgctggccaacaaagcgattgtgccgttgatccaccactggctgattatccagggacaacgcagtatgcgcgggctgcgcatgaataccctcggctggtttgattttaaatcggcgtggtttgcgccgccagatccttaa

SEQ ID NO: 369696 - DNA, 984 bp, Salmonella enterica
gtgttaaaaaaatatcttccgcttttactcctgtgcgcggcgcctgctttcgccaaacccgttctcaccgtctatacctacgactcgttcgccgccgactgggggccaggcccggcggtgaaaaaagcgtttgaagccgattgcaactgcgagctgaaactggtggcgctggaggatggcgtttcgctgctcaaccgcctgcggatggaggggaagaacagcaaagccgatgtggtgttggggctggacaataatctgctggaagcggccacgcaaactaaactctttgccaaaagcggcgtggcgaatgaggcggtcaaggtgcccggcggctggaaaaacgacacatttgtgccgttcgattacggctatttcgcctttgtctacgataaaagcaagctgaaaaatccgccgaaaagcctgaaagaactggtcgagagcgatcaaaaatggcgggtaatttatcaggacccgcgtaccagtacgccagggctggggctgttactgtggatgcgcaaagtctatggcgataacgcgccgcaggcctggcaaaaactggcggccaaaacggtgacggtgacgaaaggctggagcgaggcctacggcttatttctgaaaggtgaaagcgatttggtgctcagttacaccacctctccggcgtatcacattattgaagagaagaaggacaattacgccgccgcgaacttcagcgaaggccattacttacaggtagaagtcgcggcgcgtaccgtcgccagtaagcagccggaactggcggagaaattcctcaaatttatggtttctccggcgtttcagaacgccatacccaccggcaactggatgtacccggtagcggacgtcgccttaccagcagggtttgaatcattggccaaacccgccacaacgctggaattcacgccgcaacaagtggcagcacaacgccaggcatggattagcgaatggcaacgcgccgtcagccgttaa

SEQ ID NO: 369697 - DNA, 1611 bp, Salmonella enterica
atggcaacgcgccgtcagccgttaattcccggctggctgattccggggctgtgcgccgccgcgctgatgataaccgtctcgctggcggcctttctggcgctttggctgaacgcgccgtcgggcgcgtggtcgacaatctggcgggatagctacctgtggcatgtggtgcgcttctcattctggcaggcgtttctgtccgcagtgctgtctgtggtcccggcggtttttctcgcccgcgcgctttatcgacgccgttttcctggacgtctggcgctgctgcgtctgtgcgccatgacgctgattctgccggtactggttgccgtgttcggtattcttagcgtgtatggccgtcagggctggctggcctcgctgtggcagatgctggggcttcagtggacattctccccctacggcttgcagggcattttactggcgcacgtcttttttaacctgccaatggcgagccgtttgttgctgcaatctttggaaagcattcccggcgagcagcgccagctcgccgcccagctcggtatgcgcggctggcattttttccgttttgtcgaatggccgtggctgcgccgccaaattccgcccgtcgcggcgctgatttttatgctctgcttcgccagtttcgcaacggttctgtcgctcggcggcggcccgcaggccaccactatcgaactggctatctttcaggcgcttagttatgactacgatcccgcccgcgcggcgatgctggcattaatccagatggtctgctgcctggcgctggtactgctaagccaacggctgagcaaagcgattgcgccggggatgacgctgacgcagggttggcgcgatcctgacgatcgtctccacagccgtctgacggacgccttattaatcgtgctggcgctgctgctgctgcttccgccgctggtcgccgtggtggtcgatggcgtcaaccgcagcctgccggaggtgctggcgcaacccattctgtggcaggctgtctggacatcgctacgcattgcgctggcggcgggcgttctgtgtgtggtgctgaccatgatgctactgtggagtagccgcgagctacgccaacgccagcaagtcttcgccggacaaacgctggaactcagcgggatgttgatcctcgcgatgccggggatcgtgctggcgacaggcttctttttactgctcaatagcagcgttggcttaccggaatccgccgacggcatcgtgattttcaccaatgcgctgatggcaatcccctacgcgctaaaagtcctggaaaacccaatgcgcgatattaccgcccgttatggaatgctgtgccagtcattaggaattgaaggctggtcgcggttaaaggtcgtggaactgcgggcgctgaaacgtccgctggcgcaggcgctggcgtttgcctgcgtactttctatcggtgattttggcgtcgtcgcgcttttcggcaatgacaatttccgcacgctgccgttttatctgtatcagcagatcggctcctaccgcagccaggacggcgcggtgaccgcgctgatactgctgctgctctgctttacgttatttaccctcatagagaaactaccgggccgacatgctaaaactgattga

SEQ ID NO: 369698 - DNA, 708 bp, Salmonella enterica
atgctaaaactgattgatatcacctggctttaccatcatttgccgatgcgttttacgctggcggtagaacgcggcgagcaggtggcgattcttggccccagcggcgcggggaaaagcacgttgttgaatttaattgccggttttcttgcgcctgccagcggtacgctactgattgccggcgacgatcatacgcttacgccgccctcacgccgtccggtctcaatgctgtttcaggagaataatttattcagccacctgaatgtgcagcaaaatatcggtctggggctaaaccctgggttaacgctcaacgccagccagcgggaaaaacgggacgctatcgcacatcagatgggcattgagagtctgatgacgcgtttaccgggcgaactgtccggcggccagcgtcagcgggtagcgctggcgcgctgcctggtacgtgaacagccggtactgctgctggatgaaccgttctccgcgctcgatcccgcgctgcgccaggagatgctgacgttggtcagcgatatctgccgcgagcgacagctcacgctgttgatggtctcgcacagcgtggaagatgcggcgcgaattgcgccccggtcaatcgtcgtggccgacggacgcattgcgtggcaaggcaaaacagacgagctactaagcggtcaggccagcgcctcagcgctattgggcatcaaatcccatcttttgtag

SEQ ID NO: 369699 - DNA, 768 bp, Salmonella enterica
atgcaagcactgctggaacattttatcacccaatccactctgtattcgcttatcgccgtgttgctggtcgccttcctggaatcgctggcgctggtggggttgattttacccggcacggtactgatggcggggctgggcgcgcttatcggcagcggcgagctcaatttttggcatgcctggctggtgggtattatcggctgtctgatgggcgactggatttcgttctggctggggtggcgctttaaaaagccgctacaccgctggtcttttatgaaaaaaaacaagtcgctgctggataaaaccgaacacgcgctgcatcagcacagtatgttcacgatcctggtcggacgttttgtcggtccgacgaggccgctggtgccgatggtggcagggatgctggatcttcccgtggcgaaatttattgggccaaacttgattggctgtttgctgtggccaccgttttatttcctgccgggcattctggcgggagcggcaatcgatattccttctgatatgcagagcggagatttcaaatggctgctgctggctacggcgttgctgctgtgggtcggaggctggctatgctggcggctgtggcgcagcggcaaagcggcagtcgatcgtttaaccgcgtatctcccccgcagccgtttgctgtatctggcgccgttgacgctcgggagcggcgtggtcgcgctggtggtgctgattcgccacccgctgatgccggtatatatcgatattctgcgcaaagttgtgggttactaa

SEQ ID NO: 369700 - DNA, 846 bp, Salmonella enterica
atggctgaaacgcaaaatgatccgctattgccgggatattcatttaatgcccatctggtcgccgggctgacgccaattgaagcgaatggatatctggatttttttatcgatcgtccgttgggcatgaagggatatattcttaacctgaccatccgcggagagggcgtcattaataataatggcgagcagtttgtctgtcggcctggagatatattattgtttccgccgggcgagattcatcactatggacggcatccggacgccagcgagtggtatcaccagtgggtttatttccggcctcgcgcctactggcaggagtggctgacctggccgacaatctttgcccagacaggatttttccgcccggacgaggcgcgccagccgcatttcagcgaactgttcgggcagatcatcagcgccgggcaaggggaaggccgctattctgagctactggcgatcaatctgctggagcagttgttgctcagacgtatggcggtaattaatgagtcgttgcatccgccgatggatagccgtgtgcgcgatgcctgccagtatatcagcgaccatctggcggacagccattttgatatcgccagcgtcgcccagcatgtctgcctgtcgccctcccggttatcgcatctgttccgccagcagttaggcattagcgtattgagttggcgcgaagatcagcgtatcagccaggcgaaactcctgcttagcaccacgcgaatgccgatagcgaccgttgggcgcaatgttggatttgacgatcagctctatttttcgcgggtatttaaaaaatgcaccggggcaagtcctagcgagttcagggccggatgtgaataa

SEQ ID NO: 369701 - DNA, 1710 bp, Salmonella enterica
atggcaattgcaattggcctcgattttggcagtgattcagtgcgcgctctggcagtggactgcgccaccggcgacgagatcgccaccagcgtagagtggtatccacgctggcaagaaggccgttattgcgacggcccgaacaaccagttccgtcatcatccgcgcgactacatggagtcaatggaggccgcgctgaaagccgttctggcacaattaagcgccgcgcaacgcgcaaatgtcgttggcattggcgttgacagcaccggttctacgccagcgccgattgacgccgacggtaacgtcctggcgctgcgtccggagttcgccgagaacccgaatgcgatgtttgtgctgtggaaagatcacaccgcggtggaagaggccgacgaaatcactcgtctgtgccataagccaggtaaggtcgactactcccgctatattggcggcatttactccagcgaatggttctgggcgaagattctgcacgtcacccgccaggatagcgccgtcgcgcaggccgccgtctcgtggattgaactgtgtgactgggtgccggcgctgctttccggcaccactcgcccgcaagatatccgccgtggccgctgcagcgccgggcacaaaacactgtggcatgcaagctggggcggtctgccgcccgcgagcttctttgatgaactcgatccgtgcattaaccgtcatctgcactacccgttatttagcgaaaccttcaccgccgatctgcccgtgggcaccctgtgcgccgaatgggcgcagcgcctcgacttgccggaaagcgtagtgatttccggcggcgcgttcgactgccacatgggcgcggtcggcgcgggcgcacagtccaatacgctggtaaaagtcatcggcacgtctacctgcgacattctgattgcggataaacagagcgtcggggatcgcgccgtgaaaggcatttgcggtcaggttgacggcagcgtggtgccgaactttatcggtctggaagcggggcaatctgctttcggcgacatctacgcctggtttagccgcgtgttgagctggccgctggaacaacttgccgcgcagcacccggaactgaaaacccagattaacgccagccagaagcagctactgccagcgctcaccgacgcctgggcgaaaaatccgtccctggatcacctgccggtggtgctcgactggtttaacggtcgccgcacgccaaacgctaatcagcgtctgaaaggcgtcattaccgatctcaatctcgccaccgacgcgccagcgctgtttggcggtctggtcgcctcgaccgccttcggcgcgcgcgccattcaggagtgttttaccgagcagggtatcgcggtcaataacgtgatggcgcttggcggcatcgcccgtaaaaatcaggtcattatgcaggtctgctgcgacgtactgaatcgtccgttgcagatcgtcgcttccgaccagtgttgcgcattaggcgccgctatctttgccgccgttgccgcgaaagtccatgccgatattcctgccgcccagcaaagcatggcgagcgcggtagaacgcactctgcgtccccgccctgaacaggcgcaacgcttcgaacggctttaccgccgctaccagcagtgggcgctaagcgcagaacaacattatcttccgactgccgcgccggcgccaacgaccccggccaatcaggcaatcctgactcattaa

SEQ ID NO: 369702 - DNA, 1503 bp, Salmonella enterica
atgacgatttttgataattatgaagtatggtttgtgattggcagccagcatttgtatggcgcagaaaccctgcgccaggtcacccaacatgccgagcatgtggtcaacgcgctgaataccgaagctaaactgccatgtaaactggtattaaaaccgctgggcacctcgccggatgagattaccgccatttgtcgtgacgccaattatgacgatcgctgcgcggggctggtggtctggctgcacaccttctccccggccaaaatgtggatcaacgggctgagtatccttaacaaaccactactgcaattccatacccaatttaacgccgccctgccgtgggacagcatcgatatggactttatgaacctgaaccagactgcgcacggcggccgcgagttcgggtttatcggcgcgcggatgcgccagcagcactcggtcgtcactggccactggcaggataaagaggcccatacgcgtatcggcgcctggatgcgccaggcggtctctaaacaggatacccgccagctaaaagtctgccgcttcggcgacaatatgcgtgaagtcgcagtgactgacggtgataaagtggccgcgcaaatcaaatttggcttttcggtcaatacctgggcggtcggcgatctggtgcaggtggtgaacgcaattagtgacggcgatatcaacgctctgattgacgagtatgaaagcagctataccctgacgcccgccacccggatccacggcgataaacgccagaacgtgcgggaagcggcgcgcattgaactcggtatgaagcgtttcctggaacagggcggattccacgcctttacgacgacatttgaagatttgcacggcctgaaacaacttccgggtctggccgtacagcgtctgatgcaacagggctacggctttgcgggcgaaggcgactggaaaaccgccgctctgcttcgcattatgaaagtaatgtcaaccggtctgcagggcggcacctcatttatggaggattacacctaccacttcgagaaaggcaacgatctggtgctcggctcgcacatgctggaagtgtgtccctccatcgcggtggaagagaaaccgatcctcgacgtccagcacctcggcattggcggcaaggaagatccggcgcgtttgattttcaatacccaaaccggcccggcgatcgtcgccagcctgatcgacctcggcgatcgttaccgcctgctggtcaactgcattgacaccgtaaaaacgccgcactccctgccgaaactgccggtggctaacgcgctgtggaaggcgcagccggatctgccgaccgcctccgaagcatggattctggctggcggcgcgcaccataccgtcttcagccacgcgctggatctgaacgatatgcgccagtttgcagaaatacacgatatcgaaatcgcggtgattgataacgatacccgtctgccagcctttaaggacgcgctgcgctggaacgaggtgtattacgggttcaaacgttaa

SEQ ID NO: 369703 - DNA, 696 bp, Salmonella enterica
atgttagaagatctcaaacgccaggtactggaagccaatctggcgctgccaaaacacaacctggtcacccttacctggggtaacgtcagcgccgtcaatcgcgaacgcggcgtactggtgattaagccgtccggagtcgattatagcgtcatgaccgctgacgatatggtggtggtcagcctggagaccggtgaagtcgttgaaggtcataagaaaccgtcgtccgatacgccaacccaccgtctgttgtaccaggcatttccgactatcggcggcatcgtacacacccattcgcgccacgcgactatctgggcgcaggcgggtcggccgattccggcgacgggaaccacccatgccgactatttctacggtacgattccctgcactcgcaaaatgaccgaggcggaaattaatggcgagtatgaatgggaaacgggcaatgtcattgttgaaacctttgaaaaacaaggtattgacgccgctcaaatgcccggcgtgcttgtccattcgcacggcccgtttgcctggggtaaaaatgccgaggatgccgtgcataacgccatcgtgctggaagaagtggcctatatggggatcttctgccgccagcttgcgccgcagttgcccgacatgcagcaatccctgctggataaacactatctacgcaaacacggcgcaaaagcctattacgggcagtaa

SEQ ID NO: 369704 - DNA, 420 bp, Salmonella enterica
atgaatgtgagtatgcaggcgcgtctggtagggagcgaccgttatcttttcgtcaatactcaacgcgctaacccttccataaaaaccgtgagtcgattttttgagtataaaacatggacagaacagatttggcgcaccgagattattgaaaacggcaatgctttttttcactggcaaggacacgacagaaaaaacggacatcgggataccattattaactatctgttaaatggacaacgctggcagtcaacaatcgaagattatattttcttccatgcgctggaaggaaaagcgtggcagggacattatgataatattattgaatatgtgagttctgatcattacgtctatcaaagcgcatttgctgaatatatcaccgaccagattcatcaacgcgccccccatgggacgcgtttttag

SEQ ID NO: 369705 - DNA, 621 bp, Salmonella enterica
atgaaatatcgctacatcatcagaatcgcggcaggcataattctcattatggctacggtgtttatccataatgccatcgctatttatcagttcagtcagcaaaaccagacgcgcgtagctgactgcgcgattgtcgcaggagcaggcgttagcggaaaaacgccttctcccgtttttcaggccagactggatcatgccatctggctttaccaacaacacattgtccgcgcgttggtattaaccggcggctacggcgctggcgcaacggtttccgacgcggcgatagcccgtcaatacgttctggaaaaaggcattccggctaaggcgatttttattgaagagcgctctaccgtgacgcgcgaaaatattcgttacgcaaaacagatactgcgacaacaacaatggcgcacagcgttactggtcagcgatccgctgcatatgctgcgtctgaaaactatcgctcaggataatggtatcgatagccgctcatcacccacgcgatccacccgctataaatcctggtgggcgcaaacccgcttcttactgcgagaaactttttattacagcggatatcggcttttacgttatatgcctgtacaaaataacagtattaccccctaa

SEQ ID NO: 369706 - DNA, 2352 bp, Salmonella enterica
gtggcgcaggcaggtttcattttaacccggcactggcgggatacgccgcaaggaacggaggtctctttctggctggcgacagacaacggccctgtgcaggcgacgctggccccgcaagagtccgtggcgtttattccgaccagccagacctcccgcgccgcctcgctgctacaggcggaaaaagactatcgcctgacgccgctccagctgcgagactttcatcgtcagccggtctccggtctgtattgccgtactcaccgccagcttatgcggatggagaaactgctgcgcgaaaacggcgtcaccgtttatgaagcggatgtccgcccgccggaacgttacctgatggaacgttttattacgtcgcccgtttgggtagacggcgagatgcgcaacggcgttatccgcaatgcgcgtcttaaaccccaccccgactatcgaccgccgctaaaatgggtctcgctggatatcgaaaccacgcgacacggcgaactgtattgcattggtctggaaggctgcggccagcgtaccgtttatatgctgggcccggcgaatggcgatgaccgccaactggacttcgagcttgtgtatgtcgccagccgcccgcagctgctggaaaaactcaacgcctggtttgccgaacatgatcctgacgtcatcatcggctggaacgtggtgcagttcgacctgcgtatgctgcaaaaacatgccgaacgctaccgtatccctttacggctggggcgagacaatagcgaactggagtggcgcgaacatggcttcaaaaacggcgtttttttcgcccaggccagagggcgagtcattatcgatggtatcgacgcgcttaaatccgcgttctggaatttttcgtctttttcgctggaagccgtctcgcaggaactgctcggcgaaggaaaatccattgataatccctgggatcgtatggatgagatcgatcgccgctttgcccaggataaacccgccctcgccacctacaacctgaaagactgcgagctggtcacgcgcattttccataaaaccgagatcatgccgtttttgctggaacgcgcgacgatcaacggcctgccggtcgatcgccacggcggttcggtcgccgcattcgggcatctttactttccgcgaatgcaccgcgccggctatgtcgcgcccaatctcggcgaagtgccgccgctggcaagtcccggcggctacgtaatggattcacaacccggattatacgattcagtactggtgctggattataaaagcctgtacccgtcgattatccgcacgtttttgattgatcccgtcgggctggtcgaaggcatggcgcagccggatccggaacacagtaccgaaggtttccttgacgcctggttttcacgagaaaagcactgcctgccggaaattgttagccaaatctggcactggcgcgatgaagccaaacgtcagggcaataaaccgctctcgcaggcgcttaaaatcattatgaacgccttttatggcgtactcggcaccacggcctgtcgctttttcgatccccgtctggcgtcgtcaatcaccatgcgcggtcatgcgattatgcgccagaccaaagcgctgattgaggcgcagggttatgacgtgatttatggcgataccgattccactttcgtctggctccggcgcgcgcattcagaagccgatgcggcggaaatcgggcacaggctggtgcgtcacgtgaacgaatggtgggcgcagacgttacaacagcaaaatttgaccagcgcgctggagctggagtttgaaacccacttttgccgttttctgatgccgaccatccgcggcgcggatactggcagtaaaaaacgctacgcgggcctgattcaggaaggcgacagccagcgcatggtatttaaaggtctggaaacggtgcggaccgactggacgccgctggcgcagcgctttcaacaggagctgtatctgcgcgtttttcgcaatgaaccttatcaagactatgtgcgcgagactatcgataaactgatggcgggcgaactggacgcgcagctggtttatcgtaagcgtctgcgtcgccctttacatgagtaccaacgtaacgttccgccgcacgttcgcgccgcccggctggcggatgaacaaaacctgaagcagggtcgtccgacgcagtatcagaatcgcggcgccataaaatatgtctggactgttaacggccccgagcccgtggattaccagcagtcgccgctggattacgaacactatcttacccgccagctacaacccgtggcggaaggaattcttcccttcgttgaagataattttgctacactactgaccgggcaactggggctattttga

SEQ ID NO: 369707 - DNA, 2907 bp, Salmonella enterica
atgccttttacacttggtcaacgctggatcagcgatacagaaagcgagctgggacttggaaccgttgttgcgatggatgcgcgaaccgtcaccttacttttcccgtccacgggggaaaaccgcctgtatgcgcgcagtgattctcccgtgacccgcgtcatgttcaaccctggcgatacgattacaagccatgaaggctggcagctacatatcgatgaagtaaaagaagaaaatggcctgcttgtttatgtcggcacccgcctggataccgaagagaccaatgtgacgttgcgcgaggttctgctcgacagcaagttggttttcagtaagccccaggatcgtctgttcgccggtcaaattgatcgaatggatcggttcgcgctgcgctatcgcgcccgtaaatttcagagcgagcagtaccggatgccgtacagcggcctgcgcggtcagcggaccaacctgatcccgcatcagcttaatatcgctcatgatgtgggtcgtcgccacgcgccacgcgtactgctggcggatgaagtgggcttaggtaaaaccattgaagccgggatgattctgcatcaacagttattatccggcgcggcggaacgcgtattgatcattgttccggaaaccctgcaacaccagtggctggtagaaatgctgcgccgtttcaacctgcgcttcgcgctgttcgatgacgaacgctataccgaagcgcagcacgacgcgtataacccgtttgaaaccgaacaactggtgatctgctcgctggatttcgcccgccgtaataagcagcgtctggaacatttgtgcgacgccgagtgggatctgctggtggtcgacgaagcgcatcatctggtgtggagtaccgatgcgccgagtcgtgaatatatggccatcgaacagttagctgaacgcgtgccgggcgtgctgctgctgaccgccacgccagaacagctggggatggaaagccatttcgcccgtctgcgcctgctcgatccgaaccgtttccacgatttcgaacagtttgtcgaagaacagaaaaactaccgtcctgtcgccgatgcggtggccatgctgctggcgggcaataaactcagcaacgacgaactgaacaggctgggcgatctgatcggcgaacaggatattgaaccgctgttgcaggccgctaatagcgatcgcgacgacgcgcaggccgcccgtgatgagctggtgtcgatgctgatggatcgccacggcaccagccgcgttctgttccgcaacacccgtaacggcgtcaaggggttcccgaaacgtgaactgcatacggtaaaactgccgctgccgacccagtatcagaccgccattaaggtctccggcattatgggcgcgcgtaaaagcgcggaagatcgcgcccgcgatatgctctatccggaacaaatttatcaggagttcgaaggcgatactggcacctggtggaacttcgacccacgcgttgagtggctaatgggctatctgaccagccatcgttcgcaaaaagtgctggtgatctgcgccaaagcgaccaccgcgttacagctggagcaggtgctgcgcgaacgcgaaggcatccgcgccgccgtgttccatgagggcatgtcgattatcgaacgcgaccgcgccgccgcctggttcgccgaagaagataccggcgcgcaggtgctgttatgttccgaaatcggctccgaaggacgtaacttccagtttgccagcaatctggtgatgttcgacttgccgtttaacccggatctgctggaacagcgtattggtcgtctggatcgcatcggccaggcgcatgatatccagatccacgtcccgtacctggaaaaaaccgcccagtcggtgctggttcgctggtatcacgaagggctggacgcctttgagcacacctgtccaaccggccgcgcgatttatgattcagcctacgccagtctgattaactatctggccgcgcctgaagaaaccgacgggtttgacgatctgatcaaatcctgccgcgagcaacatgaagcgctaaaagcccagttagaacagggccgcgaccgcctgctggagatccactccaacggtggtgaaaaagcccaacagcttgcacaaagcattgaagaacaggacgacgacaccaacctgatcgcgttcgccatgaacctgttcgatatcgtcggcattaaccaggacgatcgcggcgacaacctgatcgtgctgacgccgtccgaccacatgttggtgccggatttccccggcctgccggaagacggctgtactatcacgtttgaacgtgacgtagccctgtctcgcgaagatgcgcagtttattacctgggaacatccgctcatccgtaacggactggatctgatcctctccggcgataccggcagcagcaccatttcgctgttgaaaaataaagcgctgccagtcggcacgctgctggtcgaactggtttacgtcgtggaagcgcaggcgccgaaacagctacaactgaaccgcttcctgccgccgacgccggtacgtatgctgttagataaaaacggcaacaatctggccgcccaggtcgagtttgaaaccttcaaccgccagctcagcgccgtgaatcgccacaccggcagcaaactggtgaacgccgtgcaacaggacgtccacgccattttgcaactgggcgagacgcagattgaaaagtccgccagagcgctgattgataacgcgcgtcgcgaggcggatgaaaaactgtccggggaactgtcgcgtctggaagcgctgcgcgccgtcaacccgaacattcgcgacgacgaacttgccgctatcgacagcaaccgtcagcaggtactggaaagcctgaatcaggcaggctggcgtctggacgcgctgcgtcttatcgtcgtcacgcaccaataa

SEQ ID NO: 369708 - DNA, 660 bp, Salmonella enterica
atggggatggaaaactacaatccgccgcaggaaccctggctggttatcctgtatcaggatgagcacattatggtggtcaataagcccagcggcctgttgtccgtgccggggcgtctggaagcgcacaaagacagcattatgacgcgtatccagcgcgactacccgcaggcagagtcggtgcatcgtctggatatggccaccagcggcgtgattgtagtggcgctgaccaaagccgcggaacgggagctaaaacgccagttccgcgaacgggagccgaaaaagcagtatgtggcgcgcgtatgggggcatccctccccggcggaaggactggttgacttaccgctcatctgcgactggccgaaccggccaaagcagaaagtgtgttatgaaaccggcaaaccggcgcaaacggaatataacgtggtggagtttgcggcggataataccgcccgcgtggtgctcaagccgatcaccggacgttcgcatcagcttcgtgtgcatatgctggcgttaggccacccgattttaggcgatcggttttacgcctcgccggaagcgttgtcactggcgccgcgtttgcagttacacgccgaaatgctgaccattacccatcccgcttacggcaccaacatgacgtttaaagtcccggcagatttttaa

SEQ ID NO: 369709 - DNA, 813 bp, Salmonella enterica
atgcagtactggggaaagataattggcgtcgccgtagccctgatgatgggcggcggcttttggggcgtggtcctgggtctgctggtgggccatatgttcgacaaagcccgcagccgaaaaatggcgtggtttgccaaccagcgggaacggcaggcgctgttttttgccaccacctttgaggtgatgggccacttaaccaaatcaaaaggacgggtgacggaagcggatattcatatcgccagtcagttgatggatcgtatgaatttacacggcgattcacgtactgccgcgcagaacgcctttcgggtcggaaaagcggataattacccattacgtgaaaagatgcggcagtttcgtagcgtctgcttcgggcgttttgatctgatccggatgtttctggaaattcagatccaggcggcgtttgccgatggctcgctacaccctaatgagcgggaagtgctgtatgtgattgcggaagagctaggtatttcccgcgtacagttcgatcagtttctgcgcatgatgcagggcggcgcgcagtttggcggcggttatcatcaacagtccggcggcggctggcagcaggcgcagcgcggcccgacgctggaagatgcctgtaatgtgctgggggttaaaaccaccgacgatgcaaccaccattaaacgcgcttatcgcaaactgatgagcgagcatcatccggacaaactggtcgcgaaaggtttaccgccggaaatgatggaaatggcgaagcaaaaagcgcaggaaattcagaaagcgtatgagctaatcaaagaacagaaaggcttcaagtga

SEQ ID NO: 369710 - DNA, 2361 bp, Salmonella enterica
atgaaaaaacgtattcccactcttctggccaccatgatcgccagcgccctttatagtcatcaggggctggcagccgatctcgcctcacagtgtatgttgggcgtgccgagctacgatcgtcctctggtaaaaggcgataccaacgatctgccggttactatcaatgccgataacgctaaaggtaactacccggacgatgccgtttttaccggcaacgtggacattatgcaggggaatagccgcctgcaagcggatgaagtgcagcttcatcagaagcaggcggaaggtcagccggaacctgtacgcaccgtcgatgcgctgggtaatgtgcattatgatgataatcaggtcatccttaaagggccgaagggctgggcgaacctgaacaccaaagacacgaacgtctgggaaggcgattaccagatggtgggccgtcaggggcgcggtaaagccgatctcatgaagcagcgcggcgaaaaccgttataccattctggaaaacggcagctttacctcctgtctgcctggctccgatacctggagcgtggtggggagtgaagtcatccatgaccgtgaagaacaggttgcggagatctggaacgcccggtttaaagtaggtccggttccgatcttttatagcccctatttacagctacccgtcggtgacaaacgtcgctcaggtttcctgatcccgaacgcgaaatacacgaccaagaactatttcgagttctacttaccgtattactggaacatcgcgcccaatatggacgccaccatcaccccgcactatatgcaccgccgcggcaatattatgtgggagaacgaattccgttatctcacgcaggcaggcgccgggttgatggaattagattatctgccttctgataaagtctacgaggacgatcatcccaaagagggcgataagcaccgctggttattctactggcagcactcaggcgtgatggatcaggtgtggcgttttaacgtcgattacaccaaagtcagcgactccagctactttaacgatttcgacagtaagtacggttccagtaccgacggttacgcaacgcagaaattcagcgtcggctacgccgtacaaaactttgacgctacggtgtcgaccaaacaattccaggtctttaacgatcaaaacaccagcagctattcagcggagccgcagttagacgttaactactaccataacgatctcggcccgtttgatacccggatttacggccaggcggtgcactttgttaacaccaaagacaatatgccggaagcaacccgcgtccacctggagccaaccatcaatttgccgctctccaaccgctggggcagcctgaacaccgaagcgaagctgatggcgacgcactatcagcaaacgaatctggacagctataacagcgatccaaacaataaaaataagctggaagattcggttaaccgcgtcatgccgcagtttaaagtcgacggtaagctcatcttcgaacgcgatatggcgatgctggcgccggggtatacccagacgctggaaccacgcgtgcagtacctgtatgtgccgtaccgcgaccagagcggcatctataactacgattcttctttgctgcaatccgactataacggcctgttccgcgaccgcacttatggcggtctcgaccgtattgcttccgccaaccaggtcacgaccggcgtcacaacacgcatttatgatgatgccgccgttgaacgttttaacgtttctgttggtcaaatctactatttcacggagtctcgcaccggcgatgacaacattaaatgggagaatgacgacaaaaccggttcgctggtttgggcaggcgacacttactggcgtatttcagaacgctgggggctgcgtagcggagtgcagtacgatacccgtctggatagcgtcgctaccagcagcagcagcctcgaataccgtcgggatcaggatcgtctggtacagttgaactaccgctatgccagcccggaatatattcaggctacgttgccttcgtattattccacggcagagcagtataaaaacggcatcaaccaggtgggcgcggtggcaagttggccgattgccgatcgctggtcgattgtcggcgcgtactacttcgataccaattcgagcaaacctgcagaccagatgctcggcttgcagtacaactcttgctgctatgcgatccgcgtcggatacgaacgtaagctgaacggttgggataacgataaacaacacgcgatttatgataacgcgattggcttcaacattgagctgcgcggtttgagctctaactacggcctcggcacgcaagaaatgttgcgttcgaacattctgccgtaccaaagctctatgtaa

SEQ ID NO: 369711 - DNA, 1287 bp, Salmonella enterica
atgaagaactggaaaacgctgcttctcggtatcgccatgatcgcgaataccagtttcgctgccccccaggtagtcgataaagtcgcagccgtcgtcaataatggcgtcgtgctggaaagcgacgttgatggcttaatgcaatcagtcaaactcaacgcgggtcaggcaggtcagcagcttccggacgacgccacgctgcgtcaccagatcctggaacgtttgattatggatcaaattatcctgcagatgggtcagaagatgggggtgaagatcacggatgagcagttggatcaggccatcgccaacatcgccaaacaaaacaatatgacgatggatcagatgcgcagccgtctggcttacgatgggctgaactattcaacctaccgtaaccagattcgtaaagagatgattatctctgaagtgcgcaacaacgaggttcgtcgccgtatcaccgttttgccgcaagaagttgacgcgctggcaaaacagattggcacccaaaacgacgccagcaccgagctgaacctgagccatatcctgattgctctgccggaaaacccaacctccgagcaggttaacgacgcacagcgccaggcggaaagcattgttgaagaagcgcgtaacggcgcagatttcggcaaactggcgattacctactctgccgaccagcaggcgttaaaaggcggtcagatgggctggggccgtatccaggagctgccggggattttcgcccaggcgctgagcaccgcgaagaaaggcgacattgtcggcccgattcgctccggcgtcggtttccacattctgaaagtaaacgacctgcgcggtcagagccagagtatctccgtgaccgaagttcacgctcgtcatattctgcttaagccgtcgccgatcatgaacgatcagcaggcgcgcctgaagctggaagaaatcgcggctgacattaagagtggtaaaaccacatttgccgctgcggcgaaagagtactctcaggacccgggctccgctaaccagggcggtgatttgggttgggctacgccagatattttcgatccggcgttccgcgacgcgctgacgaagctgcataaaggccaaataagcgcgccggtacactcctctttcggctggcatctgatcgaattgctggatacgcgtaaggtagacaaaaccgatgcggcgcagaaagatcgcgcttatcgtatgctgatgaaccgtaagttctcagaagaagcggcgacctggatgcaagaacagcgcgccagcgcttacgttaagattttgagtaactaa

SEQ ID NO: 369712 - DNA, 990 bp, Salmonella enterica
atgagcagtgcgcaacgcgttgttatcactcccggcgaacccgccgggattggccccgatcttgtcgtccaactggcgcaacgcgcgtggccgattgaactggtcgtctgtgcggacggcgcgctcctgacggagcgggccgccatgctcggcctgcccctctcgcttctcccttactcgcctgatgtccccgctgcgccgcagcccgcgggaacgctgaccctattgccggtctcgctgcgcgcgcctgccatccccggtcagttgacggtagaaaatggcccctacgtggtagagacgctggcgcgagcgtgtgatggctgtctgaacggtgaatttgccgcgctgatcacaggccccgtgcacaaaggcgttattaacgacgcaggcattccgtttaccggtcataccgagtttttcgaagagcgttcgcaggcgaaaaaagtcgtgatgatgctggcaaccgaagaacttcgcgtggcgctggcgaccacgcatctgccgctacgggcgattgcagacgccatcacccctgcgcttttgcacgaagtgattgctattttgcatcacgatttgcggaccaaatttggtattgccgaaccgcgcattcttgtctgtggcctgaatccgcacgcgggcgaaggcggtcatatgggcacggaagagatagacaccatcattccggtgctcgacgagctgcgggcgcaggggatgaaactcaacgggccgctacctgctgatacgctgtttcagcccaaatatctcgataatgccgacgcggtgctggcaatgtaccacgatcagggcctgcccgtgctaaaataccagggattcggtcggggagtgaatattacgctcggcctaccttttattcgaacctccgttgaccacggcaccgcgcttgaactggcgggccgtggaaaagcggatgtcggcagttttattacggcgcttaatctcgccatcaaaatgattgttaatacccaatga

SEQ ID NO: 369713 - DNA, 822 bp, Salmonella enterica
atgaataatcgagtccatcagggccatttagcccgtaaacgcttcgggcaaaactttctcaacgatcggtttgtgatcgacagtattgtttctgctattaatccgcaaaaaggccaagcgatggttgaaatcggccccggtctggcggcgctgacggagccggtcggcgaacgactggataagctcacggtcattgaacttgaccgcgatctggcggcgcgtttgcaaacccatccgtttttagggccgaagctgactatttatcagcaggacgccatgaccatgaactttggcgaactgtctgcgcagttgggccaaccgctgcgtgtgttcggcaatctgccctataatatctccaccccgctgatgttccatctctttagctatactgatgccattgccgacatgcactttatgttgcaaaaagaagtggtaaatcgtctggttgcagggccgaacagcaaagcgtatggtcgtttaagcgtgatggcgcaatattactgtcaggtgatcccggtgcttgaagtgccgccatccgccttcacgccgccgcccaaagtggactccgccgtggtgcgtctggttccacacgcaacgatgccttacccggttaaagatattcgcgtgttgagccgtattaccaccgaggcctttaaccagcgccgtaaaacgatccgtaatagtctcggcaatctttttagcgttgagacgttgacggaaatgggtattgacccggcaatgcgcgcggaaaatatctctgtcgcgcagtactgccagatggccaactatctgtcggaaaacgcgcctttgaaggagagttaa

SEQ ID NO: 369714 - DNA, 378 bp, Salmonella enterica
atgatcaattcgcccagagtgtgtattcaggtgcaaagcgtctacattgaggcgcaatcctcacctgacgatgaacgttacgtttttgcctataccgtaaccatccgcaatctgggccgggcgccagtgcagctattgggccgctactggctgattaccaatggtcatggccgtgaaaccgaagtccagggcgaaggtgtggttggcgtccagccgcgcattgcgcctggcgaagagtatcagtacaccagcggcgcggtaattgaaacgccgctgggcaccatgcagggtcattacgaaatgatcgatgaaaatggcgacgcctttaccatcgacattcccgtgtttcgactcgccgtccctacactcattcactaa

SEQ ID NO: 369715 - DNA, 849 bp, Salmonella enterica
atggcaacttatctcatcggcgacgttcacggttgctacgacgaactgatcgccttattacagcaagtggaatttacgccagatacagacactctatggctgactggcgatttggtcgcccgcggtcccggttcgctggacgtgttacgctacgtcaaatcacttggcaatagcgtgcgtttggtgctggggaatcacgatttacacctgttggccgtattcgccgggattagccgcaacaaacctaaagaccggctgaccccgcttcttgaagcgccggacgccgatgagctgttgaattggttacgccgtcagccgctgttgcaggtagatgaagagaaaaagctggtcatggcgcatgcgggtattaccccgcagtgggatttgcagacggcaaaagagtgcgcccgcgatgttgaagcggtgctgtcgagcgactcgtatccgtttttcctcgacgcgatgtatggcgatatgccgaataactggtcgccggagttaagcggtctggcgcggctacgctttattactaatgcctttacccgtatgcgttactgctttcctaacggtcaactggatatgtacagcaaagcgtcgccggaaaatgcccctgcgccgctgaagccgtggttcgccattccggggccggtgagcgaggcttacagtattgcgttcgggcactgggcgtcgctggaagggaaagggacgccggaaggtatttacgcgctggataccggctgctgctggggcggggagttgacctgtttacgctgggaagataaacagtattttgtgcagccgtcaaaccgccagatggatatgggcgaaggcgaagcggtcaacgcctga

SEQ ID NO: 369716 - DNA, 480 bp, Salmonella enterica
atgatcagtctgattgcggcgttagcggtggatcgcgtcatcggtatggaaaacgccatgccgtggaacctgcctgccgatctcgcctggtttaaacgtaacacgttaaataaacctgtcgtcatgggacgtcacacctgggagtccatcggacgccccttaccgggacgtaaaaatattgttatcagcagccagccaggcaccgacgatcgcgtgcagtgggtgaagtctgtcgatgaggcgattgccgcttgcggcgatgcgccggaaattatggtcattggcggcgggcgcgtgtacgagcagttcctgccaaaggcgcagaagctttatctgacgcatattgatgcggaagtcgaaggcgatacccattttccggattatgaaccggatgactgggaatcggtattcagtgagtttcacgatgccgacgcgcagaattctcacagctattgtttcgagattctggaacgtcgttaa

SEQ ID NO: 369717 - DNA, 1863 bp, Salmonella enterica
atggatagccatactctactgcaggcgctgatctatcttggttcggcggcgttgattgtgccgattgcggtacgtttgggcttaggatcggtgctggggtatctgattgcgggttgcattatcggcccctgggggctacggctggtaacggacgccgaatctattctgcattttgcggaaatcggcgtcgtgctgatgttgtttgttattgggcttgaactggacccgcaacggttatggaagctgcgcgcctcggtatttggcggcggcgcgttacagatggtggtctgcggcggactgattggtctgttctgtatgtttcttggcctgcgttggcaggtggcggaactgattggcatgacgctggcgctttcgtccacggctatcgccatgcaggcaatgaatgagcgtaacctgaccgtttcacaagtagggcgtagcgcatttgcagtgctcttgttccaggatatcgcggcgatcccgctggtggcgatgattccgctgctggccgccagcggcgcatccaccacgcttggcgcgtttgcgctatcggcgttgaaagtcgcaggcgcgttggcgctggtggtgttgctgggacgctacgttacgcgcccggcgctgcgctttgtcgcgcgttctggtttgcgggaagtgttcagcgccgtggcgctatttctggtgtttggtttcggcctgttgctggaagaggttgggctgtcaatggcgatgggcgcgttcctggcgggcgttctgctggcgagttcggaatatcgtcatgcgctggaaagcgatattgaaccctttaaggggctgctgctggggctgttctttattggcgtcggcatgtcgattgatttcggcacgctggtggagaatccgctgcgcattctgctgttgttggccggttttctggcaatcaaaatcgtcatgctgtggctggtcgcgaggccgctgggcgtaccggcaaaacagcgtcgctggtttgccgtcttattaggccagggaagtgagtttgcgtttgtggtttttggcgcggcgcaaatggcggatgtacttgagccggaatgggcaaaagcgctgacgctggcggtcgcgctgtcgatggcggcaacgccgatttttctggtgctgctgacgcgcatggagaagaccgcgacgggggaagcgcgcgaggcggatgaaatcgacgaagagcaaccgcgggttattgtggccgggtttggacgatttgggcagatagccgggcgtttgctgctgtcgagcggggtgaagatggtggtgctcgatcacgaccccgatcatatcgaaacgctgcgtaaattcggcatgaaggttttttatggcgatgcgacgcgtatggatttactggaatctgccggagcggcgaaggcggaggtattgattaacgccattgacgatccgcaaaccaatttgcaactgagtgaactggtgaagtcgcatttcccgcatctgcagattatcgcccgcgcccgtgatgtcgatcattacattcgcctgcgccaggctggtgtggcgatgccagaacgtgaaaccttcgaaggcgcgctcaaaagcgggcgacaggcgctggaagcgctggggctggggcgttatgaagcccgcgagcgcgcggatctgttccgtcattttaatacccggatggtggaagagatggcgaaaggggaaaacgatccgttatctcgcgccgccgcctataaacgtaccagcgcgatgttgagcgaaattattaccgaggaccgggagcatctgtcgttgattcagcgccacggctggcagggaacggctgagggcaaacattccggggaggccgctgatgaacccgaggtcaaaccgtcaatctaa

SEQ ID NO: 369718 - DNA, 531 bp, Salmonella enterica
atgatcctcattatttatgcgcatccgtatccgcatcattctcatgcgaataagcagatgcttgaacaggcagggacgctggaaaacgtcgaaatacgttcgctttatcacctctatcccgatttcaatattgacgttgccgccgaacaggaggcgctgtcgcgcgcgagtcttatcgtctggcagcatccgatgcagtggtatagcgtccctcctttactcaaattatggatggataaagtcctcacccacggctgggcttacggtcatggcggtacggcattgcacggtaaacatctgctgtgggcggtaacgaccggcggtggtgaaaaccattttactatcggttcacatccgggatttgacgtcctttctcagccgctacaggcgacggcgctctattgcggcctcaaatggctgccgccgttttccatgcactgcacgttcatttgcgatgacgacaccttacaggcgcaggcgcgtcagtataaacagcgtttactggcatggcaggaggtgaatcatggatag

SEQ ID NO: 369719 - DNA, 1890 bp, Salmonella enterica
atgagtaataaaaaaaatctgtccgcagaagagacggatcttacgcgtaggaaactgttaaccagcgccggtattcttgccgccggcggtatgctatccggcgcggtaaaagctgatgaaaaatgtgccgtcaaggcgaaaccggcgtgggataaaccgtttaccggcgaaatcccggaaaaattgccagaaggatataatattctgttagtcgtgaccgaccaggagcgtttttttcctacgtttcctttcccggtacccggcagagagcggctcatgaaaacgggggtgacattctgtaatcatcagaataccagtaatgtctgtacgccttcccgctccgtattgtataccggcttacatatgccccagacaaaaatgtttgataatctgggcttaccctggatgccttatgaccttgaccccgctcttggaaccacaggccatatgatgcgggaactgggatactatacggcctataaaggtaagtggcatcttacagaaaaactggagaagcctttgcctgacgaaaaagatgaggatattgatgtcggggatattcctgaaccagaattacataaaattatggaaaaatatggttttgctgactatcacggcatcggcgatattataggccatagtaaaggcggctatttttatgattcaaccaccacgtctcagactataaattggttaagatgcaaggggcagcccttgaatgaccaacacaagccctggttcctggccgttaacctcgttaatcctcatgacgtcatgtttattgataccgataaagagggagaaaaggtacagtggcgtggcgagttggatcaggatgataataccctggcgcccacgcagccgccggaaaacgagctttatcaggcaagctggccgaactatccgctgccggcaaacaggcatcaatcattcaatgagcagggaagaccgccggcgcatcttgaataccagacggcgcgcgctgcgctggaagggcagtttcctgatgaagatcgtcgttggcgtaaactgcttgactactatttcaactgtatccgcgattgtgatactcaccttgaccggatattaaatgaactggatgccctcaagttaactgataaaacgattgttgtatttactgccgatcatggcgaattaggcggaagccatcagatgcacggtaaaggcgcttccgtttataaagaacagatccatgtaccgatgattatttctcacccggcgtaccccggtaataagaaatgtcaggcgttgacctgtcatcttgatattgcgccgacattagttgggctgaccggtttgccggaagaaaaacagcaccaggcgttaggcaaccgcaaaggcgttaattttagcggattgctaaaaaacccggagagcgttgcggttaatgcggtgagaaatgccagcttatattgctatggcatgatcttgtataccgatgcccattatctccaccgtgttatcgcgctacaaagagataaacaaaaaacggtggcgcaaatcaagcaggaaatatcccatttgcatcctgattttagccatcgttcagggacgcggatgattaacgatggtcgttataagtttgcgcgttatttctcgctaagggagcataatacgccggaaacctgggaggatcttattaagtacaacgatcttgaactttacgatcttaaaaatgatcccgatgagaaccataaccttgctgctgataaacagaaatatcaggatctcattcttacgatgaatgaaaaactgaataaaattatcaaagacgaaattggcgtggatgacggcagttttatgccggatgcggcccatgagccgtgggatcttactattgagcaatttaaccgcatggcgaaagattaa

SEQ ID NO: 369720 - DNA, 291 bp, Salmonella enterica
atgaaaaaacgcattattgccgccgcattactggcaacggttgcttcattcagcacacttgcggcagagcaggtctctaaacaagaaatcagccacttcaaactggttaaggtcggcaccataaatgtgtcccagagtggcgggcagatttcctcaccctctgatctacgcgaaaaactgtcagaattagccgatgcgaaaggcggaaaatattatcatattatcgctgcacgtgagcatggtccgaattttgaagccgttgccgaagtttataacgatgcgacgaaataa

SEQ ID NO: 369721 - DNA, 423 bp, Salmonella enterica
atgaaactgaaaccaatacctttttatttgctcgcgctattttctgccgcctccggggctacggagataaacgcctgcaaagacctgatcggaacatggaaaaccacggcagataacccgccttataccatgacaatattgccgccagtagaaagctgcggggaaaaatgtgtgaaactgaacgtgcagtatgaacttgacgtgactcaccgcaatgcgctttattgccatgaaggacacgagggggtaaaagggcagggacccatggtgatagcatttgaaggggcgtatggtggacacgctattggaacctataaccgacagctgcaattactttgggctggcgtaataccgaaaaataaaaaggggaaatggataacgaaaatggaaaattactggttcaggcaggtaaaagcgcactaa

SEQ ID NO: 369722 - DNA, 231 bp, Salmonella enterica
atgcaaaaacgtcttatgaccgcactgtttaccgcagcaacactattcaccgtcgcaggatgctcttctaaccaggcggttgaaaccacggatggcaaaactattgtcaccgacgggaaacccgaggtcgataacgataccggtatggtgtcttacaaaaacgccgccaccgggaaaaccgaacagattaaccgcgatcagctgaaaaatatgagcgagctggataattaa

SEQ ID NO: 369723 - DNA, 1341 bp, Salmonella enterica
atgcagcagcccaggaactttgatgaccttaaattctcctccattcatcgcagaattatgctgtggggaagcggcggcccgttccttgatggctacgtgctggtgatcattggcgtggcgctggaacaactgacgccgctattgcaccttgatgctgaatggattggcgcgctcggcgcggctacgcttgccggactgtttatcggcacctcgttgtttggctatatttgcgataaagtcgggcggcgtaaaatgttcctgcttgatattatcgctatcggcgttatctccgtggcgaccatgtttgtttccacgccgcttgaattactggtgatgcgcgttttaattggcattgttatcggcgcggattaccctatcgctacttccatgattacggagttttccaacacccgccagcgcgcgttctccatcggttttatcgccgcgatgtggtacgtcggcgcgacctgcgccaacctggtgggctactggctgtatgacatggaaggcggctggcgttggatgcttggcagcgcctttatcccgtgcttaatcattttgattggccgctttgacctgccggaatcgccacgctggctattgcgaaaaggacgggtaaaagagtgcgaacaaatgatgatcaaactgttcggcgaaccggtctgctttgacgatgagccgccgcaggagacccgcttcctgcagttgtttaaccgccgtcattttccgtttgtactgttcgttgcggctatctggacctgtcaggtaatcccgatgttcgctatctatacctttgggccgcagatcgtcgggttactcggctgggagcaggggcgcaacgcggcgctcggcaatgtggtgattagcctcttttttatgctgggctgtataccggcgatgttctggctaaacagtattggccgtcgccctctgcttattggcagcttcgccatgatgactatcgcgctggcgctgctggggctggtgtcaaatctgggcatcatactggtcgtggtggcgtttgcggtatacgccttcttttccggcggaccgggcatactgcaatggctttatcctaatgaactcttcccgacggatattcgcgcttcggccgtgggggttatcatgtcgttaagccgcatcggaaccattgtctccacctgggcattaccgatttttattactcgttacggtattaataacgtcatgctgattggcgcgttgatttcgttagtcgggcttggcgtatcggtgatgtttgccccggaaactcgcggcttgacgctaacacagaccggaaacatgactttgcgcggaacgccatcggataaccctcattaa

SEQ ID NO: 369724 - DNA, 288 bp, Salmonella enterica
atgacatctcccgttaatgtggacgtcaaactgggcgtcaataagttcaatgtggatgaagacagcccgcacatcattctcaaaaccgatcctgataaacaggcgctggaggtgctgattaaggcctgcccggcgggactgtataaaaagcaggacgacggcagcgttcgttttgattacgccgggtgcctggagtgcggaacgtgccggatcctcggccttgatacggcgctggaaaaatgggaatacccgcgcgggacgtttggcgtggagttccgctacggctaa

SEQ ID NO: 369725 - DNA, 1287 bp, Salmonella enterica
atgtccgaagatatctttgatgccatcatcgtgggtgcaggtctggccggttcggttgcggcgctggtgcttgctcgcgaaggtgcacaggtgctggttatcgagcgtggcaattctgctggcgcgaagaatgtcaccggtgggcgcttgtatgcacatagcctggaacgcatcattcccggctttgcggatcaggcccccattgaacgcatgatcacccacgaaaaactcgcctttatgaccgacaaaggggcgatgacgatggattattgcaacggcgaggacgccgcatcgtcgcaggtttcttattccgttttgcgcagtaaatttgacgcctggctgatggagcaggccgaagaggcgggggcgcaactgatcaccggtattcgcgtggataacgttgttcagcgtgatggcagagtcgtgggcgtggaagccgatggcgatattctggaagccaaagtcgtaatcctcgctgacggggtgaattctctgctggctgaaaagctgggcatggcaaagcgtgttgaggcatcgcatgttgctgtcggcgtgaaggaactgatcgaattgccgaagtcggtcattgaagatcgtttccagttacagggcaacgaaggtgccgcctgtctgtttgccggggcgccaaccgatggtctgatgggcggtggcttcctgtatacgaatgaaacaaccctttccctggggctggtctgcggtcttcatcatctgaaagacgcgaaaaaatcggtcccgcaaatgctggaagatttcaaacagcatccggcagttgcgccgctgatcgccggtggcaagctggtggaatatgccgcgcacgttgtacccgaggcgggaatgaatatgcagcctgaactggtgggcgatggcgtgctgattgccggagacgctgccggcatgtgtatgaacctcggctttaccattcggggtatggatctcgccatatccgcaggcgaagcggcggcgaagacggtgctttcggcgatgaagagcgacgattttagcaagcagtcgctggatgaataccgtcagcatctggacgaaggtccgatgcgcgatatgcgtatgtatcagaaactgccagcttttcttgataatccccgcatgtttaccgcttatcccgaaatggcggtcagtatcgcgcacgacctgttcaccgtggatggctccgctccggtgccgatgcgtaaaaaaatcctgcgccatgcgaagaaagtgggcttcatcaacctgatgaaagatggcctgaaaggagtgaccgtattatga

SEQ ID NO: 369726 - DNA, 942 bp, Salmonella enterica
atgaacaaattttccagtgtctgggtattcagcgataccccttctcgtctgcccgaactgatgagtggcgcgcaggctgtaggtgaaaaagttaacgcgttcgtactgaacgaagcggatagcgcgacagcatgtcatttgggcgccgatcatgtctggctgctcagcggcaaaccagaagaccgcatgatcgaagactacgctgctgcgatggctgagactattcgtcagcatagtgagggcggcgcggtgctgctgccgaatacgcgtcggggcaagctgttggcggcaaagctgggctatcgcttgtcggctgcggtttccaacgacgccagcgaagtctccctgcaggatggaaaagcggcggtcaaacatatggtctacggcggtctggcgataggggcagaaaccatcgcttcgccgtttgccgtgatcacgctcagcagcggaacgtttgacgcacaagacccggacacttctcgcagcggcgagatgcataccgtgcagtggcaggctccggccactgccgtgacccgcaccgcaacccaggcgcgtcagagcaacagcgttgacctcgacaaagcgcgtctggtggtcagcgtgggacgcggcatcggcagcaaagagaatatctcgctggccgaagcgctgtgccagaccatcggcgccgagctggcctgttcccgcccggtagcggaaaacgagaagtggatggagcacgagcgctacgtcggtatctccaacctgatgctcaaacctgaactgtatctggcagtggggatctccgggcagatccaacacatggtcggcgccaacggcgcgcagacgattttcgccatcaacaaagataaaaacgcgccaatcttccagtatgcggattttggcatcgttggcgatgcgctgaagatcctgcctgcgctgacggctgccttagcgcgataa

SEQ ID NO: 369727 - DNA, 771 bp, Salmonella enterica
atgaagataattacttgctacaaatgcgtacctgatgagcaggatattgcgattaataatgctgacggaacactcgatttcagcaaagcggatagcaaaatcagccaatatgatctgaatgcaattgaagctgcttgccagttaaaacagcagttgggagacgctcaggttgtcgccatgagcgttggcggcaaagcgctgaccaatgcaaaagggcgcaaagatgtcctctctcgtggccctgatgaactgattgtggtcattgacgatcaatttgagcaggcgctgccgcaacacaccgctaccgcgctggccgccgcggcgcaaaaatcaggtttcgatctacttatctgcggcgacggttcttccgatctttatgctcagcaggttggtttgctggtgggcgaagcgctgaacattccggcgattaacggcgtgagtaaaatcctctctcttaccgacagcacattgacagtagaacgcgaactggaagatgaagttgaaacgctgagcatcccgctcccggcggtgatcgcggtttccaccgacattaacaccccacaaatcccttcgatgaaagccattcttggcgcggcgaaaaaaccggttcaggtctggtcgcctgcggatatcgggctgaacagcgtatccgcgtattccacacaacaggttgccgcaccgaagcagcgcaagcgtcagcgtgtggtgattgaaggtgacggtgaagaacaaatcgccgcgtttgtcgagaatctgcgcaaaatcatttaa

SEQ ID NO: 369728 - DNA, 1518 bp, Salmonella enterica
atgaaaaatgaaaagaaaaaatcgggaattgaaccgaaggttttttttccgccattaataattgtcgggatactttgctggctaacagtcagagatcttgatgccgctaacgtcgttattaatgcggtattcagttatgtcaccaacgtctggggttgggcatttgaatggtatatggtcgtcatgctcttcggctggttctggctggtttttggcccctatgccaaaaagagattaggtgacgaaaaaccggagtttagcaccgccagctggattttcatgatgttcgcctcctgtacatccgctgcggttctgttctggggctctattgagatctactactatatctccaccccgccgttcggcctggaaccaaattccacgggcgcgaaagagataggcctggcgtacagcctgttccactgggggccgctgccgtgggcaacctatagcttcctttctgtggccttcgcctacttcttctttgtacgcaagatggatgtcatccgccccagctccacgctggtaccgctcgtcggtgaaaagcatgcgaaagggttgttcggtaccatcgtcgataacttctacctggtggcgctgatcttcgcgatgggcaccagcctcggtctggctaccccgctggtcaccgagtgtatgcaatggctgttcggtattccgcatacgctgcaattggatgccatcatcattacctgctggatcattctgaacgcgatttgcgtggcctgcggcctgcaaaaaggggtcagaatcgccagcgatgtgcgtagctacctgagcttcctgatgctcggctgggtgtttatcgtcagcggcgccagcttcatcatgaactacttcaccgactccgtcgggatgctgttaatgcatctgccacggatgctgttctataccgacgccatcggtaaaggcggcttcccacagggctggaccgttttctactgggcgtggtgggttatatacgccatccagatgagtatcttcctggcccgtatttcccgtggtcgtaccgtacgtgaactgtgcttcgggatggtgatgggtctgaccgcgtctacctggatcctgtggacagtgctgggcagcaacacgctgctgctgatggataaaaacatcctcaacattccgcaactgattgagcaacacggcgtggcgcgcgccattatcgaaacctgggccgccttgccgctcagcaccgccaccatgtggggcttcttcatcctctgctttattgccaccgtcacgctgattaacgcctgctcttacaccctggcgatgtcgacctgtcgtgaagttcgcgatggtgaagagccgcctctgttagtgcgtatcggctggtcagtgctggtcggcatcatcggtatcgttctgctggcgctgggtgggttgaagccgattcagaccgcgattatcgccggaggatgtccgctgttcttcgtcaacattatggtgacgctgtcctttattaaagacgccaaggtgcactggaaagacaagtaa

SEQ ID NO: 369729 - DNA, 1143 bp, Salmonella enterica
atggatttcaacttaaatgacgaacaggagctgtttgtcgccggtattcgcgaactgatggccagtgagaactgggaagcttattttgccgagtgcgatcgtgacagcgtctaccctgagcgttttgtaaaagcgctggcggatatgggtattgatagcctgctgatcccggaagaacacggcggtctggaagcgggttttgttaccgtcgccgccgtctggatggagctgggacgtcttggcgcgccaacttacgtgttgtaccaattgccaggaggttttaacactttcctgcgtgaagggactcaggagcaaattgataaaatcatggcgttccggggcaccggtaagcagatgtggaactctgctatcaccgaaccgggagcgggatcggatgttggtagtctgaaaaccacttatacacgcaaaaatggtaaggtttatcttaatggcagtaagtgctttatcaccagtagcgcctataccccgtacatcgtggtcatggcgagagacggtgcatcgccggataaaccggtttacaccgagtggtttgtggacatgagcaaagcgggtatcaaggtcaacaaactggagaaactcggtctgcgcatggatagctgctgtgaaatcacctttgacgacgttgaactggacgagaaagacatgttcggtcgggaaggtaacggcttcaaccgcgtgaaagaagagtttgaccatgaacgcttcctcgtcgcgctgaccaactacggtaccgcaatgtgcgcttttgaagacgctgcgcgttacgcgaatcagcgcgtgcagtttggtgaagctattggccgtttccagctgattcaggagaagtttgcgcatatggcgatcaaactgaactccatgaaaaatatgctgctggaagccgcgtggaaagcggataacggcacgattacctccggcgacgcggcaatgtgcaaatacttctgcgccaacgccgcgtttgaagtggtagacaccgccatgcaggtactgggaggtgttggtatcgcgggcaaccaccgcatcacgcgtttctggcgtgacctgcgcgttgaccgtgtttctggtggttctgatgaaatgcagatcctgacgttgggtcgtgcggtacttaagcaataccgctaa

SEQ ID NO: 369730 - DNA, 1218 bp, Salmonella enterica
atgaatcatttaccaatgccaacctttggcccgcttgctggggtacgcgttgttttttcaggaatcgaaatcgccggtccattcgccggacagatgttcgccgaatggggcgccgaggttatctggattgaaaacgtcgcatgggccgataccatccgcgtacagcctaactacccgcagctctcacgccgcaacctgcacgccctgtcgctgaatattttcaaagatgaaggtcgggaagcgtttctgaaactgatggaaactaccgatattttcattgaagccagtaaaggcccggcctttgcccgccgtggtattactgatgaagtgctgtgggaacataacccgaaactggtcattgcccacctttccggcttcggccagtatggtaccgaggagtacaccaatcttccggcgtataacaccatcgcgcaggcattcagtggttatctgatccaaaacggcgacgttgatcagccgatgccagccttcccgtataccgccgattacttctccgggatgaccgcgacgacagccgcgctggcggccctgcacaaagtacgcgaaacgggtaaaggtgaaagcatcgatatcgccatgtacgaagtgatgctgcgcatgggtcagtacttcatgatggactacttcaacggcggcgaaatctgtccacgtatgacgaaagggaaagacccctactacgctggttgcggcctgtataaatgcgccgatggttacatcgtcatggagttggtcggcatcacgcaaatcaacgagtgttttaaagatattggcctggcccatattcttggtacgccggaagttccggaaggcacgcagctcatccatcgcgtggaatgcccttacggcccgctcgtcgaagagaaactggacgcctggctggcaacacacactatcgccgaagttcaggcgcgctttgctgagctgaatatcgcctgtgcgaaggtgctcaccattccggaactggaaggtaacccgcagtacgttgcccgcgaatcgattactcagtggcaaacaatggacggtcgcacctgtaaagggccgaacatcatgccgaaatttaaaaacaacccggggaaaatctggcgtggcatgccgtcacacggcatggataccgccgccattctgaaaaacattggttatagcgaagcagatattaaggaactggtcggcaaaggcctggccaaagttgaggattaa

SEQ ID NO: 369731 - DNA, 1554 bp, Salmonella enterica
atggatatcgttggcggacaaaacttacgtcagatgtgggacgacctggccggggtgtacggagataaaacggcgttaattttcgaatcctgtgagggaatcgttcggcagtttagctatgcttcgctcaatgaagagattaaccgcacggcgaaccttttttactccttagggatccgcaagggtgatagggtcgcgctgcatctggataactgtccggaattcatcttttgctggtttggactggcaaaaatcggcgctattatggtaccgattaatgcccgcttactgggcgaagaaagcgcctggatcctgcaaaacagccaggtgagtctgctggttaccagcgtccagttttatcctatgtaccgtgaaatacgccaggacaatagcactccgcttaatcatatctgtctgattggcgagcagcttccggctgacgatggcgtgagccacttttcccaactgcaagcacgtcaatcggccacgctgtgctatacgcccgcgttatccactgacgatacggcggaaattctgtttacctccggtaccacctcgcgtccaaaaggggtggtgattacccactataacctgcgttttgcaggctactactctgcctggcaaatcgccctgcgcgatgatgacgtgtacatgacggtgatgcccgcttttcatatcgactgccagtgtaccgccgcaatgccagccttttccgccggcagcacctttgtgctcctggaaaagtacagcgcccgggcattctgggatcaggtacgtaaatatcaggcgacggtgaccgagtgcattccgatgatgatccgcacgctgatggtccagcccgccgcaccaacggacaggcagcatcacctgcgcgaagtgatgttctatctcaatttatccgagcaggaaaaagacgattttaccgaacgctttggcgtcaggctgctgacctcctacggtatgactgaaaccatcgtcggtattatcggcgaccgtcccggagacaaacgacgctggccctccattggccgcgtgggatttagctatgaagccgaaatccgtgacgatcaaaatcgcccgctgcccgccggagaaattggcgaaatctgtattaaaggcatccccggcaagactatcttcaaagagtattacatgcagccggaggcaaccgccagggcgctggaaccagagggctggttacataccggtgattcgggttaccaggatgaggatggctatttctattttgtcgacagacgctgcaacatgattaaacgcggcggggaaaatgtctcctgcgtcgagctggaaaatattatttctgcacatccgaaaattcaggacattgtggtggttggtattaaagacgcgatccgtgatgaggccattaaagcgtttatcgtccttaatgaaggtgaaacattaagcgaagccgagtttttcagcttttgcgaaaacaatatggcgaaattcaaggttccctcttttatggagatcagaaccgacctgccgcgcaactgttcaggaaaaataatcaaaaaaaatctgaaataa

SEQ ID NO: 369732 - DNA, 786 bp, Salmonella enterica
atgagtgagtcattacatctgacccgtaacggcccgatcctggaaattaccctcgaccgacctaaagcgaatgccattgacgccaaaaccagctttgcaatgggtgaagcttttcttaatttccgtgacgatccggaattacgcgtagcaatcattaccggcggcggggagaaattcttttctgctggctgggacttaaaagcggcagcggaaggtgaagcgccggatgctgattttggttccggcggctttgctggtttaaccgaaatatttgacctcgataagccggttatcgccgcggtgaacggctacgcgtttggcggcggttttgagctggcgctggcggcggactttattgtctgcgccgaaaacgccagcttcgcgctgccggaagcaaagctaggcatcgtgcctgacagcggcggcgtattgcgtctgcctaagctgctgccaccggctatcgtcaacgaaatggtaatgaccggcagacgaatgagcgccgaagaagcgctgcgttggggagtcgtgaaccgcgttgtcagccagagcgaactgatggatagcgcgcgcgaactggcgcaacaactggtcaatagcgccccgctggctatcgcggcgctgaaagagatttatcgcgcgaccagcgaaatgccggtagaagaaggctaccgctacatccgcagcggcgtgctgaagcattatccgtcggtactgcattcagaagatgcgctcgaaggaccgcaggcatttgccgaaaaacgcgatccggtgtggaaaggtcgttaa

SEQ ID NO: 369733 - DNA, 597 bp, Salmonella enterica
atgagctattacgcctttgaaggactgatcccggtggtgcatccggacgcgtttgtccatcccagcgccgtgctgattggcgatgtcatcgtgggcgccggtgtttatattggcccactcgcgtcattgcgtggggattatggtcgcctgatcctggaggcaggctctaatctgcaggatggctgcattatgcatggctactgcgataccgataccatcgtgcatgaaaacggccatatcggccacggcgctattctacatggctgcgtggtgggacgggacgccctggtcggcatgaatagcgtcattatggacggcgcagtgattggcgaagagagcattgtcgccgccatgagttttgtcaaagccggatttcagggtgaggcaaggcaactgctggtggggtcacctgcgcgcgtactacgccaggttacggaccaggagctgcactggaaacgcctcaataccaaagaatatcaggatcttgcgatccgttgtcgaacggggttatctgaaacgaagccgttaacgcaggtcgaagaaaaccggccgcgcctgaaaggcacgacggacgtgaagccaaaatcagcacagtaa

SEQ ID NO: 369734 - DNA, 396 bp, Salmonella enterica
atgtgtgaaaaatatgttgaaagaccgctttatttgttaattgctgactggatgatggcagagaaccgatggatcactgccagggagatttcccgtcaatttgatattgaacattgcaaagcaattaatacgctctcctatattctgtcagaagtgggggaaattgtttgtgaagtgaagatgatccctaaccaaattgcaggacgaggctgccagtgccagcgtctggtgaaagtcgtgagtatcgactctcaactctatcgccgattgaatcataatttgcaggaaagaaaagtgagcgtggcgaaagcgccgcgactgtctgccgttccccccacagagctaaaccgtgagcagaaatggcagatgatgctgtcaaaaagtatgcgtcgctaa

SEQ ID NO: 369735 - DNA, 3228 bp, Salmonella enterica
atgccaaaacgtacagatataaaaagtatcctgattctgggcgcgggcccgattgttatcggtcaggcgtgtgagtttgactactccggcgctcaggcgtgtaaagccctgcgcgaagaaggctatcgcgtcattctggtgaactccaacccggccaccatcatgaccgacccggaaatggccgatgccacctacatcgagccgattcactgggaagtggtgcgcaaaatcattgaaaaagagcgtccggatgcggtgctgccaaccatgggcggccagacggcgctgaactgcgcgctggagctggagcgtcagggcgtacttgaagagttcggcgtcaccatgattggcgccaccgccgacgccattgataaagccgaagaccgtcgtcgcttcgatatcgcgatgaagaaaattggtctcgacaccgcgcgttccggtatcgcgcacaccatggaagaagcgctggcggttgccgctgacgtgggcttcccgtgcatcatccgtccgtcctttaccatgggcggcaccggcggcggtatcgcttacaaccgtgaagagttcgaagaaatctgcgaacgcggtctggacctctcgccaaccaacgagctgctgattgatgaatcgctgatcggctggaaagagtacgagatggaagtggtgcgtgataaaaacgacaactgcatcatcgtctgctctatcgaaaacttcgatgcgatgggcatccataccggcgactccatcaccgtggccccggcacagacgctgaccgacaaagaataccaaatcatgcgtaacgcctcgatggcggtactgcgtgaaatcggcgtcgaaactggtggttctaacgtccagttcgccgtgaacccgaaaaacggccgtctgatcgttatcgaaatgaacccgcgcgtctcccgctcctcggcgctggcgtcgaaagccaccggtttcccgattgccaaagtggcggccaaactggcggtgggttataccctcgacgagctgatgaacgacatcaccggtggccgtacgccggcgtcgtttgagccgtctattgactacgttgtcaccaaaattccgcgctttaacttcgagaaattcgccggtgccaatgaccgtctgaccactcagatgaaatcggtcggggaagtgatggcgattggtcgcacgcagcaggaatccctgcagaaagcgctgcgcggcctggaagtgggcgccaccggtttcgacccgaaagtgagcctcgacgacccggaagcgctgaccaaaatccgccgcgagctgaaagacgcgggcgcagatcgtatctggtacatcgccgatgctttccgtgcgggcttgtctgtggatggcgtctttaacctgaccaacattgaccgctggttcttggtacagattgaagaactggtgcgtctggaagagaaagtggctgaagtcgggattactggcctcaacgccgacttcctgcgccagctgaaacgcaaaggctttgccgatgcgcgtctggcgaaactggcgggcgtgcgtgaagcggaaatccgcaaactgcgtgaccagtatgacctgcatccggtctacaagcgtgtggatacctgcgcggcggaattcgccaccgataccgcctacatgtactccacctatgaagacgagtgcgaagcgaacccgtccgttgaccgcgataaaatcatggtcctcggcggcggcccgaaccgtatcggccagggtatcgaatttgactactgctgcgtacacgcctcgctggcgctgcgcgaagacggttacgagaccatcatggtcaactgtaacccggaaaccgtctccaccgactacgatacttccgaccgtctgtacttcgagccggtgacgctggaagacgtgctggaaatcgtgcgcatcgagaagccgaaaggcgttatcgtgcagtacggcggccagactccactgaagctggcgcgcgcgctggaagcggcaggcgtgccggttatcggcaccagcccggacgccatcgaccgtgcggaagaccgtgaacgcttccagcatgcggttgaccgtttgaagctgaagcaaccggccaacgccaccgtcaccgccattgaacaagcggttgagaaggcgaaagaaatcggctacccgctggtggtgcgtccttcttacgtgctgggcggccgggcgatggaaattgtctacgacgaagccgacctgcgtcgctacttccagaccgcggtcagcgtctctaacgatgcgccggtactgctggaccgcttccttgatgacgcggttgaagtggacgtggacgctatctgcgacggcgaaatggtgctgattggcggtatcatggagcacatcgagcaggcgggcgtacactccggcgactccgcctgttccctgccggcctacacgctgagccaggaaattcaggacgtgatgcgccagcaggtgcagaagctggccttcgagttgcaggtgcgcggcctgatgaacgtgcagtttgcggtgaaagacaacgaagtctatctgattgaagttaacccgcgtgcggcgcgtaccgtaccgttcgtctccaaagccaccggcgtgccgctggcgaaagtggcggcgcgcgtaatggccggcaaatcgctgaccgagcagggcgtgacccaagaaattatcccgccgtactactcggtgaaagaagtggtgctgccgttcaacaaattcccgggcgttgacccgctgttagggccagaaatgcgctccaccggggaagtgatgggcgtgggccgtaccttcgcggaagcgttcgctaaggcgcagctgggcagtaactccaccatgaagaaacagggccgtgcgctgctctccgttcgcgaaggcgacaaagagcgcgtggtggacctggccgctaagctgctgaaacagggcttcgagctggatgctacccacggtacggcgattgtgctgggcgaagccggtatcaacccgcgtctggtgaacaaggtgcacgaaggtcgtccgcacattcaggaccgcatcaagaatggcgaatatacctatatcatcaacaccaccgcaggtcgccgggcgattgaagactccagggtgattcgccgcagcgcgctgcagtacaaagtgcattatgacaccacgctgaacggcggttttgccacgacgatggcgttgaatgccgatgccaccgagaaggtaacttcggtgcaggaaatgcacgcgcagatcaaaaagtcgtaa

SEQ ID NO: 369736 - DNA, 1149 bp, Salmonella enterica
ttgattaagtcagcgctattggttctggaagacggaacccagtttcacggtcgggccataggggcaacaggttcggcggttggggaagtcgttttcaatacttcaatgaccggttatcaagaaatcctcactgatccttcctattcccgccaaatcgtcactcttacttatccccatattggtaatgtcggcaccaatgaagccgatgaagaatcttctcaggttcatgcgcaaggtttagtgattcgcgatctgccgttgattgccagcaactttcgtaacacagaagacctctcttcttacctcaaacgccataacatcgtggcgattgctgatatcgatacccgcaagctgacccgactgctgcgtgagaaaggcgcacagaacggctgcatcattgcaggcgatagcccggatgcgaagctggcgctggaaaaagcgaaagcatttcctggacttaacggtatggatctggcgaaagaagtgaccacggcggaaacttaccgctggacgcagggtagctggacgctgaaagacggtttaccggaagcgaaatctgaggatgacctgccgttccatgtggtggcctatgatttcggcgcgaagcgcaacatcctgcgtatgctggtggatcgcggctgccgcctgacggtggtgccagcgcaaacctctgctgaagaggtgctgaaaatgaatccggacggcatcttcctgtcaaacggccctggcgacccggctccgtgcgactacgcgattactgctattcagaaattcctcgaaaccgacattccgctatttggcatctgcctcggtcatcagctactggcgctggcgagcggtgcgaagaccgttaagatgaagttcggccatcacggcggcaaccatccggtaaaagatatggacagaaacgtggtaatgatcaccgcgcagaaccacggctttgcggtggatgaagactcgctgcccgccaacctgcgcgtgacccacaagtcgctgttcgacggcaccctgcagggtattcatcgtaccgacaaaccggcgttcagcttccagggccacccggaggcgagccccggcccgcacgatgcggcgccgctgttcgaccactttatcgagcttattgagcaataccgtcagtccgcgaaataa

SEQ ID NO: 369737 - DNA, 822 bp, Salmonella enterica
atgcatgaagcacaaatccgcgtcgccattgccggcgccggtggccgcatgggacggcagttaatccaggccgccatggcgatggaaggtgttcagctgggtgccgcgctggagcgcgaaggctcttccttgctgggcagcgatgctggcgaactggcaggggggggaaagtccggcgtgatcgttcaaagcagccttgaggcggtaaaagatgattttgacgttttcatcgattttacccgtccggaaggcacgttgacgcatctggcgttttgccgccagcatggtaaagggatggtgattggtactaccggctttgacgacgccggtaaacaagccattcgcgaggcgtcacaagagattgcgatcgttttcgccgcaaactttagcgtcggcgttaacgtcatgctcaagctgctggagaaagccgcgaaggtaatgggcgactatagcgatattgaaattattgaagcgcaccaccgccataaagtggatgcaccgtcgggtacggcgctggcaatgggcgaggcaatcgccggggcgctggataaaaatctgaaggactgcgcggtctactcgcgtgaaggttataccggcgagcgcgtaccgggcacgattggctttgcgaccgttcgggcgggcgacatcgtcggcgaacataccgcgatgtttgccgatattggcgagcgcgtagagattacgcataaagcttccagccgcatgacgtttgcaaatggcgcgttgcgatcggcgttatggctaaaaacgaagaaaaatgggctatttgacatgcgggatgtgctggggctggatgtattatag

SEQ ID NO: 369738 - DNA, 909 bp, Salmonella enterica
atgaacgtgagcgttgtgactgaacggcgtacgccagcgtactcatcgctggcggctggcgaacttaatgggttggttgcaagagcgctgctgacggaagccaggctgacaccaaaacccggtctggtcgatattcgtaattcgggagcgcatagggatatggatctggcggcatttgaacgtagcactaccgccattgctccgtggatggaaaagttttttatcatgggcaacaacacggcggcgctggcggcagaaaatgtcctggtgatgctgcgtccgctggggatggcctgtgagaacgatatgctacaggcgaccaatggtgtgaatacccatcgcggggcgattttcgcttttggcctgctgagcgcagcgattggccgacttctcgcgcggggagaaccgttggagcaaaatcgtatctgcgaccaggttgctcgcctgagtcggaatattgttgcccacgagctctcagcaaaaaaagcgggaaaactgacaaagagtgaaacccatttccagtgctatggcctgtcgggcgcgcggggagaagcggaaagcggttttcgaaccgtcagaacgcaggctttgccggtgtttaaccgggtcgtgcaggagcatgacgatacccatcttgccctactgcaaacattgttgcatctgatggcgtggaatgatgataccaatctggtgtcgcggggaggcctggaagggctttactacgtgcagcagcaggcacaaaaattgttgtggcaagggggcgtattggttgaggggggcattgaagcgatgcagtccctcgatgatgaactcatcctgcgtaacttaagccctggcggtagcgcggatttactggcagtgacctggtttttaagtcattttcctgccggttccctctatcctgagtaa

SEQ ID NO: 369739 - DNA, 552 bp, Salmonella enterica
atgaagggcacagacctgctgtaccagggccaggcagttacgctggaggagatgctacaagcgcgcgataaacgtgccgccaggcagcgtcaggcgttgaactgctatcggctaccgttgatttccctcacgctggttgcaccgggcgccgttaaaaactcagcggtctggcggcgtgtcgccgattacgcaattgccgaaatactggcgctttgcgaacagaaggagtgggtcaacgtctgggaaatgcaggtaaatgaacgcagcggcccggaatggatggcagcggtctgtgcgccggcaatggcgttgaaacagcacatgtcgacactagagatgagccatccgttagggcggctttgggacatcgacattattgatagcgacggtaagtcgctatcacgccgtgaactcgggcatcctgcccggccatgtttgatatgccagcaggatgctcatctctgtgcccggggcaagcatcacacccttgaccttttgttggatgaaattgcacgaaggattgaatgctatgaacgtgagcgttgtgactga

SEQ ID NO: 369740 - DNA, 1521 bp, Salmonella enterica
atgaaagagactgtaaccatgctcaaccagcaatatgtcgtaccggaaggattacagccctaccagggggtaacagcgaacagcccgtggcttgccagtgaaacggaaaagcgtcggcgtaaaatttgtgactcgcttgaagaggctattcgtcgttccgggcttaaaaatggcatgacgatatccttccaccatgcgtttcgtggtggcgacaaagttgtcaatatggtgatggcgaagctggcggaaatgggattccgcgatctgacgcttgcctccagctcattaattgatgcccactggccgcttatcgaacacattaaaaatggcgtggtgcggcagatttacacctccgggctgcgcggcaagttaggggaagagatctccgctggcctgatggaaaacccggtacagatccactctcacggcggccgcgtaaaactgattcagagcggtgagctgaatattgatgtcgctttcctcggcgtgccgtgctgcgatgaatttggtaatgcgaacggctttagcggcaagtcacgctgcggctctttgggatatgcgcaggttgatgcgcagtatgctaaatgtgtggtgctcctgactgaagagtgggtcgaatttcccaattatccggccagtatcgcgcaggatcaggttgatttgatcgtacaggtggacgaagtaggggatccggaaaagatcaccgcgggcgcgattcgtctgtccagcaacccgcgtgaactgttgatcgcccggcaggcggctaatgtgatcgaacactcaggttatttttgtgacggtttctcgctgcaaaccggcaccggtggcgcatctctggcggtcacccgtttcctggaagacaaaatgcgtcgccacaacattacggcgagttttggcctgggcgggatcaccggcaccatggtggatctgcatgagaaagggttgatcaaagcgctgctggatacgcaatcattcgatggcgatgcagcccgttcgctggcgcagaatccacatcatattgaaatctcaaccaatcaatacgcgaaccccgcctctaaaggcgcggcatgcgaacgcctgaatgtggtgatgctgagcgcgctggaaattgacgtgaatttcaacgttaacgtgatgaccggttcaaacggcgtactgcgtggcgcatcgggcggccatagcgatacggcagcaggggccgatctcaccattattaccgcaccgctggtccgtggccgaatcccatgtgtggtggaaaaagtgctgactaccgtcacgcctggggcaagtgttgatgtgctggttaccgaccatggtattgcagtgaaccctgcgcgtcaggatctgcttgataacctgcgtgctgcgggcgtggcgctgatgaccatcgaacaactgcaacagcgcgctgagcaactgaccggtaaaccgcagccgattgagtttaccgatcgggtggtggctgtggtgcgttatcgcgacggttcagtgattgacgtgattcgccaggttaaaggctga

SEQ ID NO: 369741 - DNA, 870 bp, Salmonella enterica
atgagacctcgtcgcagtatgttgtttatccccggcgcaaatgcggccatgttgagcacctcgtttgtctatggtgcggacgcggtgatgttcgacttagaagacgccgtagcgttacttgagaaagataccgcccgtcttttggttcatcacgcgcttcaacatccgttctatcaggatgttgaaaaagtggtgcgcattaatccactgaacacgccgtttggtctggccgatcttgaggccgtcgtgcgtggtggcgcggatatcgtgcgtctgccgaaaaccgacagcaaaaacgatgtgctggagctggaagcgcaggttgaacggatcgaacgtgaatgtggacgtgaagtcggcagtaccaggctgatggcggcgatcgaatcagcgaaaggcgtggtcaatgccgtcgacatcgccacctccagcccgcgcatggtggcaattgcgctggcggcatttgattacgtgatggatatgggcaccagccggggcgatggcaccgagctgttctacgcccgctgcgcagtgctgcatgcggcgcgcgttgcgggtattgccgcctatgatgtcgtttggtcggatatcaataatgaagaaggcttcctgaaggaagtgcagttggcgaaagggcttggttttaacggtaagtccttagtgaacccacgtcagattgagctgttacatcaggcttattctccgacacgtaaagaagttgagcatgcgtatgaggtgattgccgccgctgaagaggctgagtctcgcggtctgggcgtcgtttcactcaacggcaaaatgattgacggcccgattatcgaccacgcgcgcaaagtggtggcgctgtcggcttccggtattcgtgattaa

SEQ ID NO: 369742 - DNA, 294 bp, Salmonella enterica
atgaaaatcattaaagatgccctggcaggcacgctggaatccagcgatgtgatgatcaggattggtccatccagcgagccaggaattcggctggagctagagagtctggtgaagcagcagtttggcgcggcgattgagcaggtggttcgggaaacgctggcgaagctgggcgttgaacgcgcgctggttagcgtcgatgacaaaggcgcgctggagtgtattttacgcgcccgagtgcaggcggcggcgttacgcgctgcagaacaaacggaaattcaatggagtgcgttatga

SEQ ID NO: 369743 - DNA, 969 bp, Salmonella enterica
atgtttctggagggcgtgggactagccctggaagacgattgtgaaatcgcggtatgcgcatattggcagggtgagatagtcgggtgcggttctctggccgggaacgtactgaaatgcatcgccgtttccccggttttacaaggggaagggctcagcctcaaactgctgaccgagctgcttacattggcctacgagttaaaccgcagcgagcttttcctgttcactaagccgcaaaatcggttgctgttttctggcgcggggttttggcccattgcgcaggcaggtgagctggcggtgttaatggagaacagcagtgaacggttagcgcgcttttgtcgccaactggcgctttatcgtcaaccgggaaaaacgatcggcgccatcgtcatgaacgccaatccgtttacattgggccaccgttatctggtggagcaagcggctgcggcctgtgactggttgcatctgtttgtagtcaaagaagatgcttcatttttttcctataccgaccgttgggcgctgatcgaacaaggaatcgggggcattgacaacgtcacgttgcattccggctccgcttatatgatctcgcgtgcgacgtttcccggctatttcctcaaagaaaaaggggttgtggacgactgccattgccagatcgatctgcaactcttccgtgaacatctggctccagcgctggggattacccatcgttttgtcggcagtgaaccgttttgtcctctgacctgtgcctataaccagcgaatgcacgacattttacacgatccgaagcgcagcggcccggttattgaggtcgtcgagctggcgcgggtggagaaaaacggcgcggctatttccgcctctcgcgtcagaaaactgtatagcgaacgtaattggccggcaataagcgcgctggtgcctgctggcaccctggcatatctgcagcggcatgccgccagacacactgaaaccatatga

SEQ ID NO: 369744 - DNA, 1341 bp, Salmonella enterica
atgaccaacatgacccaagcttcggcgacggagaaaaagggggctagcgatttactcagattcaaaatctttggtatgccgctaccgctttatgcctttgcattaattactttattactttctcatttttataatgctataccgactgacttagtcggtggttttgcccttatgtttgtgatgggggccatttttggtgaaatcggcaaacgtttaccgatcttcaataaatatattggcggcgcaccggttatgatatttctggttgcagcttattttgtctatgctggcatatttacgcagaaagaaattgatgcgatcagcaacgtaatggataaaagcaacttccttaacctgtttatcgcagtgttgatcacaggcgcgatcctgtcggtaaaccgtaagctgctattaaaatcactgctgggctatatcccaaccatcctcgccgggattgtcggcgcgtcccttttcggtatcgtcattggtctgtgcttcggtatcccggtcgaccgtatcatgatgctgtacgttctgccgattatgggcggtggtaacggcgcgggcgccgtgcctctgtctgaaatttatcactcggttaccggacgttctcgcgaagagtattactcaacggctattgctattctgaccattgcgaatatcttcgccattattttcgccgccctcctcgatatgataggcaaaaaatacacctggcttagcggtgaaggtgagttggttcgtaaggcttccttcaaaaccgaagatgatgaaaaggccggtcagattacccatcgtgaaacggcggttggcatggtgttatccaccacctgcttcctgctggcctatgttgttgccaagaaaattctgccaagcatcggcggcgtctctattcactacttcgcctggatggttctgattgttgctgcgctgaacgcatcaggtctttgctcaccggagattaaagccggggcgaaacgtctttctgacttcttctccaaacaactgctgtgggtgctgatggtcggtgtgggtgtttgctacaccgatctgcaagagattatcgatgccctgacgttcgcgaacgtagttatcgccgcaatcattgtggtcggcgcagtcgttggcgcagctatcgggggctggttgattggcttctacccgattgaatcatccattactgcgggtctttgtatggccaaccgcggcggctccggcgatctggaagtgctctccgcctgtaaccgtatgaacctcatttcatatgcacaaatttcctctcgtctgggcggcggtattgtgctggttatcgctagcatcgtgttcagcatgatggtgtaa

SEQ ID NO: 369745 - DNA, 240 bp, Salmonella enterica
atgaatgaagctgtactactgggtgaaggtttcaccctgatgtttttagggatggggttcgtactgagctttctgttcctgctcatctttgccatccgcggcatgtccgccgtgattactcgcttcttcccggaacccgtcgccgcgcccgcaccgcgtgccgttcccgtcgtggacgacttcacccgcttaaagccggtgattgccgccgccattcaccatcaccgccaccacgtttaa

SEQ ID NO: 369746 - DNA, 516 bp, Salmonella enterica
gtgcgccggactggtggtgtaggagagcgtgccctgggcgtgcgccccgtggctacgtaccgcctgcagggcggctttcatattgcgcgggtcgttcatggcatcgaagacgcggaacacgtccatgccgtttttgacggcgcgttcgacgaagcgttccaccacgtcatcggcgtaatggcgataaccgagcaggttctggccgcgcagcagcatctgcagtggggttttgggcatggcttttttcagttcgcgcaggcgcagccacgggtcttcgccgagaaagcggatacaggcgtcaaaggtggcgccgccccagcactccagcgacccgtagcccacgtcatcgagcgcggcggcaatcggcagcatgtcatcaaggcgcaggcgggtggcgaacagggactggtgggcgtcacgcaggacgacgtcggtaatggcaatggtcatggatccctccgggaattaaacgtggtggcggtgatggtgaatggcggcggcaatcaccggctttaa

SEQ ID NO: 369747 - DNA, 2166 bp, Salmonella enterica
gtggtcagcagatttgaactgctcaggacgctcgcgtatgccggatgggaggaaagcattcattccggccagcacggggaaaattacttctgtattctggatgaagacagtcaggagatattgtcagtcacccttgatgatgccgggaactataccgtaaattgccaggggtacagtgaaacacatcgcctcaccctggacacagcacagggtgaggagggcacaggacacgcggaaggggcatccgggacattcaggacatccttcctccctgccacaacggctccacagacgccagcagagtatgatgctgtctggtcagcgtggagaagggctgcacccgcagaagagtcacgcggccgtgcagcagtggtacagaaaatgcgtgcctgcctgaataatggcaatgcagtgcttaacgtgggagaatcaggtcttaccaccttgccagactgtttacccgcgcatattaccacactggttattcctgataataatctgaccagcctgccggcgctgccgccagaactgcggacgctggaggtctctggtaaccagctgactagcctgccggtgctgccgccaggactactggaactgtcgatctttagtaacccgctgacccacctgccggcgctgccgtcaggactatgtaagctgtggatctttggtaatcaactgaccagcctgccggtgttgccgccagggctacaggagctgtcggtatctgataaccaactggccagcctgccggcgctgccgtcagaattatgtaagctgtgggcctataataaccagctgaccagcctgccgacgttgccgtcagggctacaggagctgtcggtatctgataaccaactggccagcctgccgacgctgccgtcagaattatataagctgtgggcctataataatcggctgaccagcctgccggcgttgccgtcaggactgaaggagctgattgtatctggtaaccggctgaccagtctgccggtgctgccgtcagaactgaaggagctgatggtatctggtaaccggctgaccagcctgccgatgctgccgtcaggactactgtcgctgtcggtctatcgtaaccagctgacccgcctgccggaaagtctcattcatctgtcttcagagacaaccgtaaatctggaagggaacccactgtctgaacgtactttgcaggcgctgcgggagatcaccagcgcgcctggctattcaggccccataatacaattcgatatggcgggagcctccgccccccgggaaactcgggcactgcacctggcggccgctgactggctggtgcctgcccgggagggggaaccggctcctgcagacagatggcatatgttcggacaggaagataacgccgacgccttcagcctcttcctggacagactgagtgagacggaaaacttcataaaggacgcggggtttaaggcacagatatcgtcctggctggcacaactggctgaagatgaggcgttgagagcaaacacctttgctatggcaacagaggcaacctcaagctgcgaggaccgggtcacattttttttgcaccagatgaagaacgtacagctggtacataatgcagaaaaagggcaatacgataacgatctcgcggcgctggttgccacggggcgtgagatgttccgtctgggaaaactggaacagattgcccgggaaaaggtcagaacgctggctctcgttgatgaaattgaggtctggctggcgtatcagaataagctgaagaaatcactcgggctgaccagcgtgacggcagaaatgcgtttctttgacgtatccggcgtgacggttacagaccttcaggacgcggagcttcaggtgaaagccgctgaaaaaagcgagttcagggagtggatactgcagtgggggccgttacacagagtgctggagcgcaaagcgccggaacgcgttaacgcgcttcgtgaaaagcaaatatcggattatgaggaaacgtaccggatgctgtctgacacagagctgagaccgtctgggctggtcggtaataccgatgcagagcgcactatcggagcaagagcgatggagagcgcgaaaaagacatttttggatggcctgcgacctcttgtagaggagatgctggggagctatctgaacgttcagtggcgtcgtaactga

SEQ ID NO: 369748 - DNA, 150 bp, Salmonella enterica
atggaagtactggatcacctgaatgcaaagaagggctggggaaagctgtactttgccggggagggtatccagcaacagtgggctatgaagagaaacatactgtcatcccgatataccacccgctatgaagacctgcttcaggttaagtga

SEQ ID NO: 369749 - DNA, 1761 bp, Salmonella enterica
atggtaactcatcgtcagcgctaccgtgaaaaagtctcccagatggttagctgggggcactggttcgctctgttcaatatactgttggctacgttgctcggcagccgttacctgtttgtcgccgactggccgacaacgcttgcgggtcgcatatactcctacctgagcattgtcgggcactttagctttctggtgttcgccacctatttgcttattctttttccgctcacgtttatcgtgatgtcccagcggctgatgcggtttatatcagccattctggcgaccgcgggtatgacgttgttgcttatcgacagcgaagtctttacccgttttcacctgcatcttaatcccattgtctgggagctggtcatcaaccctgaccagaacgaaatggcgcgcgactggcagcttatgtttattagcgtgccggttatcttattgattgagatgctatttgcgacatggagttggcaaaagctgcgcagtctcacgcgccgtcgccatttcgcaaggccgcttgcggcattctttttcgtctcctttatcgcatcgcatcttatctacatctgggcagatgctaatttttaccggccgattaccatgcagcgggcaaacctgccgctctcttatccgatgacggcgcgacgttttcttgaaaaacacggtctgctggatgcgcaggaatatcagcgccgtctggtagagcaaggcaatccggaagcggtctccgttcagtacccgctcagcaatttgcactatcgcgatatgggcaccggtcagaatgtgctgctcattaccgtagacggcctgaactattctcgctttgagaagcagatgccggagctggctacatttgccgagcaaaacatcgacttcacccgtcatatgagttcagggaataccactgataacggtattttcggcctgttctatggcatatcgccaggctatatggatggcgtgttatccaccagaacgcctgcggcgctcattaccgcgttgaatcagcaaggctaccaactgggactgttttcttcggatggcttcgccagcccgctttatcgtcaggcattactgtccgatttctcgatgccggcagcgcaaacgcagtctgatgcgcaaacggccagccagtggatagactggcttgggcgctacgcacaggaagataaccgctggttctcatggatatcgtttaacggtactaatattgatgacagtaaccagaaaaattttgttaagcgttacgccagtgccgccagcgacgtggatgcgcaaatcaatcgggttctgaacgcgctgcgagaggccggtaaattcgagaatactgtcgtgatcattaccgcaggacgcggcataccgttgacgccggaagaaaatcgcttcgactggtcgcaaggtcatctgcaagtaccgctggtgatccactggccggggacgcctgcgcagcgtattaatgtgcttaccgatcataccgatgtgatgaccacgttgatgcaacgcctgttacatgtcagcacgccagcgaacgaatattcacagggccaggacatctttaccgttccacgtcgtcataactgggtaacggcggcagacggcagtacgctggcaatcacgacgccgcaaatgaccctggtgctcaataataacggtcattatcagacctatgacttacacggcgagaagatcaaagatcagaagccgcagctcagtctgctgctgcaagtgctaacagaagagaaacgttttatcgctaactga

SEQ ID NO: 369750 - DNA, 228 bp, Salmonella enterica
atgccacaactctcccgctatagtgatgaacatgttgaacaattgctgagcgaactgctcagtgtactggaaaaacataaggcgccgaccgatctttccctgatggtgctgggaaatatggtcaccaaccttatcaacaccagcgttgcgccagctcaacgccaggcgattgcgaactcttttgcccgcgccttgcagtcttcgattagcgaagacaacgcgcactaa

SEQ ID NO: 369751 - DNA, 1008 bp, Salmonella enterica
atgagtctggatatcaaccagattgccctgcaccagcttatcaagcgcgatgagcaaaatcttgagctggtcttgcgcgattcattgctggagccgacaaccaccgttgtcgagatggtggctgaactgcatcgggtctatagcgccaagaataaggcgtatggcctgtttaatgaagagagtgaactggcgcaagcgctgcggttgcaacgtcagggggaagaagattttcttgcctttagccgggcggcgaccggacgcctgcgtgacgaactggcgaaatatccctttgcggacggcggcattgtattgttctgccattatcgttacctggcggtggagtatctgctggttacggtactgaacaacctgagcagtatgcgggtcaatgaaaatctggacattaacccgacgcattatcttgatatcaatcatgcggatatcgtggcgcgtatcgatcttaccgagtgggaaactaatccgcaatcgacccgctacctgacgtttctcaaaggtcgggtagggcgcaaggtcgctgacttctttatggatttcctcggcgccagcgaagggttgaacgccaaagcgcagaatcgcggcctgttgcaggcagtggatgatttcaccgcagaagcgcagttggataaagcagaacgtcagaacgtgcgtcagcaggtgtacagctactgcaacgagcagttacaagccggggaagagattgagctggaatcgctgtctaaagagctttccggcgtcagtgaagtcagcttcagcgaatttactgccgaaaaaggctatgagctggaagagagcttcccggcagatcgcagtacgctacgccagttaaccaaatatgccggcagcggcggcgggttaacgattaactttgatgcgatgctactgggcgagcggattttctgggacccggcgaccgataccctgactatcaaagggacgccgccgaatctgcgcgagcagttgcagcgacgcacgtcgggcgagaaataa

SEQ ID NO: 369752 - DNA, 621 bp, Salmonella enterica
gtgagtaaaggaatacgacagaagccgcctgttaatttcagtttatttcggcaggttttgtatgcgcacattgtcgcatttttgatgatgttggtgctcggcatggtgttcaccgttctctcgttggtactgttttatacttatggtgccaactggttactgagcttgttcatatgcccgctgttcttgttaagtggtttattcattactggatttgcttttaaatcaacttggtccagcatacgttactattacgacaaggggcagttgaaacggtatggactcaatcttgatgcaactttgacgcataaagagaaggtggaaatacgcatcgataatgcaaagcgtcaagtgcgtgtagatgaactggagctccatgtcttatttgattttcagtttgatagcaagacatggagctgcggcgacttactgaccaatgaaaaggtatttgatgcgttgaatgacgggcaaactataccaatacgaattttgccatggaaaccggaaagtgccagcgttcgtcaacgggcattattcaatcggcttaaaggtatgaataccgcggcggaaactacagattctcgattaggggaggcgctaattgaatgtggcgaggtgtaa

SEQ ID NO: 369753 - DNA, 285 bp, Salmonella enterica
atgtttactatcaacgcagaagtacgtaaagagcagggtaagggtgcgagccgccgcctgcgcgccgctaacaagttcccggcaatcatctacggcggttctgaagccccgattgctatcgaactggaccacgaccaggtgatgaacatgcaagctaaagctgaattctacagcgaagttctgaccctcgttgttgacggtaaagaagtaaaagttaaagctcaggctgtacagcgtcacgcttacaaaccgaagctgactcacatcgacttcgttcgcgcgtaa

SEQ ID NO: 369754 - DNA, 1761 bp, Salmonella enterica
atgatttttacactccgcccctaccagcaagaagccgtagacgccacgctcagccactttcgccgccaccgtacgcccgccgtgattgttctgccgaccggcgcaggtaaaagcctggtgatcgccgaactggcgcgcgtcgcccgcggacgggtactggtgctggcgcatgtgaaagagctggtcgcgcagaaccacgccaaatattgcgcgctggggctggaagcagatattttcgccgccggactcaaacgtaaagagagtcagggcaaagtcgtgttcggcagcgtacagtcggtggcgcgtaatcttgacgccttccaggaggagttttcgctgttgattgtcgatgaatgccaccgcatcggtgacgatgaagacagtcagtatcagcaaatcctcactcacctgagtaaagttaatcctcacttacgtctgcttgggctaaccgccacgcccttccgcctcggaaaaggctggatttatcaatttcattaccacggtatggtgcgcggcaacgacaacgcgctgtttcgcgactgtatttatgaactgccgctgcgctatatgattaaacacggctatctgacgccgcctgagcggcttgatatgccagtggtccaatacgatttcagccgcctgcaggcccaaagcaatgggctgttcagcgaagccgacctgaaccgtgagctgaaaaagcagcagcggattacgccgcacatcatcagccagattatggaatttgcgcaaacgcgcaaaggcgtgatgattttcgccgccacggtcgaacatgcgaaagagattgtcggtctgcttccggcggacgacgcggcgctgattaccggcgatacgccagggcccgagcgcgacgcgctgattgataatttcaaggcgcagcgttttcgctatctggttaacgtctcggtgctgaccaccggctttgacgccccacacgttgatctcatcgcgattctacgtcccaccgagtcagttagtctttaccaacaaattgtcgggcgtggtctgcgccttgcgccgggaaagaccgattgcctgattcttgattacgcaggcaacccgcacgacctgtatgccccggaggtcggtagcccgaagggaaaaagcgataacgtccctgtccaggtattttgcccggcctgcggctttgccaacaccttctgggggaaaaccactgccgacggcacgctgattgaacactttggccgtcgctgccagggctggtttgacgatgacgacggccatcgcgagcagtgcgattttcgctttcgcttcaaaaactgcccgcagtgtaatgccgaaaacgatattgccgcccgacgctgccgggaatgtgacgctattctggtcgacccggacgatatgttaaaagcggcgctcagactcaaggatgcgttagtcctgcgctgtagcggaatgacgatgcagcatgggcaggatgagaaaggcgaatggctgaaaatcacttactatgacgaggacggcgcggatgtcagtgagcgcttccgcttgcacacgcccgcccagcgtaccgctttcgaacagctatttattcgcccgcatacccgcacgcccggcgttcctttacgctggatcacggcggcggatattgtcgcgcagcaggcgctgttgcggcatcccgattttgtggtcgcgcggatgaaaggccagtactggcaggtgcgtgaaaaagtgttcgactatgaaggccgcttccgccgggcgcacgaattacgtggttaa

SEQ ID NO: 369755 - DNA, 696 bp, Salmonella enterica
atgcgacttgataaatttatcgctcagcagcttggcgtcagccgcgctattgccgggcgtgaaattcgtggtaaccgcgttaccgtcgatggcgacatcattaaaaatgcggccttcaaactgctcccggaacatgcggttgcgtatgacggcaatcccttagcgcagcaacacgggccacgctattttatgcttaacaagccgcagggatacgtttgttcaaccgatgatcccgatcatccaacggtactgtatttcctggatgagccggtggcgtataagctgcatgccgcaggacgtctggatatcgatactaccggtctggtgttaatgacagatgacggtcagtggtcgcaccgcattacgtcgccgcgccatcactgtgaaaaaacctatctggtgaccctggagtcgccggtggccgacgatacggtagcgcaatttgcgaaaggcgtgcagttgcataatgaaaaagatctcactaaacccgctacgctggaggtgataacgcctgtgcaggtccgtctgaccatcagcgaaggccgttatcatcaggtgaagcggatgtttgccgcagtaggcaatcgcgttgtggaactgcaccgcgaacggattggcgccattacgctggatgagaatctggctcccggcgagtaccgcccgttgactgaagaagaaatcgccagcgtcggctaa

SEQ ID NO: 369756 - DNA, 1191 bp, Salmonella enterica
gtgaccacccggcagcactcttcctttgccattgtctttatccttggcctgttggccatgttaatgccgctgtcgattgatatgtatcttcctgcgctgccggtgatttctgcgcaattcggcgtgcctgccggtagcacgcagatgacgctcagtacctatattctggggtttgcgctgggtcagcttatctatggaccgatggcggatagcctcgggcgtaagccggtcatcctgggcgggacgctggtatttgctgctgcggcggtcgcctgtgcgttggcgcagactatcgatcaactgatcgtgatgcgtttctttcacggtttggcggccgcggcggcaagcgtcgtcatcaatgcgctgatgcgggatatttatccaaaggaagagttttcgcgcatgatgtcatttgtcatgctggtcactacgatagcgccgttaatggcgcccattgtcggcggctgggtgttggtatggttaagctggcactatatcttctggatactggccattgcggcgattctggcgtcagtcatgatctttgctctgattaaagagacgctgcccgttgagcggcgtcagccttttcatattcgtaccacaataggtaactttgccgcgttgtttcgccacaaacgcgtactgagctatatgctggcgagcgggtttagttttgccggtatgttctcttttttgagcgcggggccgtttgtttatatcgaaattaatcatgttccgccgcaggatttcggctactacttcgcgttgaacatcgtatttctgtttgtgatgacgattatcaacagccgttttgtcagacgggtaggggcgctaaacatgtttcgggccgggctatggattcagtttgcgatggcggtgtggatggttttcagcgcgctgatgggcattggattctgggcgctggtggtcggcgttgcggcgtttgtcggctgtgtgtcgatggtttcgtccaatgcgatggcggtcattttggatgagtttccgcatatggccggaacggcgtcttcgttggcgggcactttccgctttggtattggcgctatcgtcggcgcgttgctgtcgctggctacctttaccagtgcgtggccgatgatctggtcgattgcgctttgcgccgcctgttccattctgttttatctctacgccagccgtcccaaaaaacggtga

SEQ ID NO: 369757 - DNA, 345 bp, Salmonella enterica
gtgaatacattacagctctcaattgttcaccgtctgccgcaaaactatcgctggtcggcgggttttgcggggtcaaaggttgaaccgattccgcaaaacgggcagagcaccgagaatagtctggtggcgcttaaactgttgagtccggcaggcgatagcgcgtggtcagtgatgcataagctcagccaggcgctaagcgatattgaagttccttgctccgtgctggagtgcgaaggggaaccgtgcctgttcgttaatcgtcaggatgagtttgccgccacctgtcggctgaaaaatttcggcgtggcgatagcggaacctttttctaacaataatcctttttag

SEQ ID NO: 369758 - DNA, 1590 bp, Salmonella enterica
atgacatctccattgcttgcgattgaaaatttatcggtaggtttccgtcagcaacagcacgtgcgtcctgtcgttaacgccatttcgttacaggtgaacgccggggaaacgctggcgctggtcggcgagtccgggtcagggaaaagcgtgacggcgctttccattctgcgtcttttgcctacccctcccgccgtctacctctccggcgatattcgctttcacggcgaatcattgcttcatgccagcgagcagacgctacgcggcgtgcgcggcaataaaatcgccatgatttttcaggaaccgatggtttcacttaacccgctgcatacgctggaaaaacagctctatgaagtgctgtcgctccatcggggaatgcgtcgggaggcggcaagggcggagatgatcggttgtctggatcgggtcggtatccgccaggcgagccagcgtctgcgcgattatccgcatcagctttccggcggcgaacgccagcgcgtcatgatagccatggcgctgttaacacggccggaattactgatcgccgatgagccgaccaccgccctcgacgtctccgtacaggcgcagatcttatctctactgcgggaactccagcgcgagcttaatatgggattgctgtttatcacccataacctcagcattgtaaaaaaactggcggattcagtggcggtaatgcaacacggcaagtgcgtagagaaccaacgcgccgacacgctgctctccgcgccgacccatccgtacacgcaaaaactactcaacagcgaacccacaggcgatccggttccgctccccgccgggcaggcgccgttgctggaagtggacaagctgcgcgtcgccttcccaatccgcaaaggcattctgaagcgcgtcgtggatcataatgtggtggttaacaatatcagtttcaccctgcatccaggcgaaacgctgggtctggtcggcgagtcaggatcgggaaaaagcaccaccggtctggcgctgttacggcttatccgctccgaaggccgcatcgtgtttgacggtcaatcgctggatacgttaaaccgccgccagcttttacctgttcgccaccgtatccaggtcgtattccaggacccaaactcatcgctaaacccgcgtttaaacgtgttgcaaattatcgaagaaggcctgcgcgtccaccagcctacgctttcaggcgcgcagcgagaacagcaggtgaaagcggtcatgatggaagtcggcctggacccggaaacgcggcatcgttaccccgctgagttttccggcggccagcgtcaacgtatcgccgtcgccagggcgctgattttaaaaccgtcgcttattattctggatgaaccgacctcatcgctggataaaaccgttcaggcgcagattcttgccctcctgaaatcgctccagcaaaagcaccgtctggcctatatcttcattagccacgatctgcatgtagtacacgcgctgtgccatcaggttatcgtgctgcggcagggggaggtggttgaacaggggcaatgcgagcgcgtgtttaccgcaccgcaacaggcctatacgcgtcagctactcgcgttaagctga

SEQ ID NO: 369759 - DNA, 1026 bp, Salmonella enterica
atgccgcgattaagcccggtcaatcaggcccgctgggcgcgtttccgccataatcgccggggctactggtcactatggattttcctggtcgtgttcagcctgagcttatgcgcggaactgattgctaacgataagccattgctggtgcgctatgaaggccagtggtattttccgctggtaaaaaattacagcgagcgcgatttcggcggcccgctggcgacaacggcagattatcaggacccctggctacaacggcaacttgagaatcggggctgggtgttgtgggcccccgtacgctttggcgccaataccattaattttgccaccacgcagcctttcccctccccgccttcggcgaaaaactggctgggcaccgatgcgaatggcggcgacgttttcgcccgcatcctgtacggcacccgcatttctattttattcggcctgatgttaacgatttgctccagcgtcatgggcgtactggcgggcgcgctacagggctattatggcggcaaagtcgatttatgggggcaacgtctcatcgaagtctggtcggggatgccgaccctgtttctgattattttactttccagcgtagtgcagcctaacttctggtggctgctggccataaccgtgttgtttggctggatgagtctggtgggcgtagtgcgcgccgagtttttacggacccgcaattttgactatatccgcgccgcgcaggcgcttggcgtcagcgatcgtgacattatcctgcgccatatgttgcctaatgcgatggtcgctaccctgacatttttaccgttcattttatgtagctccatcaccaccctgacgtcgctggattttctgggattcggtctgccgcttggctccccttctctcggcgaacttcttttacaggggaaaaacaacttacaggctccctggctggggatcgccgcctttctgtctgtcgccattctgctatcgctgctgatttttatcggcgaagcggtacgcgacgcctttgatcctgctaaggcggtataa

SEQ ID NO: 369760 - DNA, 1095 bp, Salmonella enterica
atgggcgcctatcttatccgccgtctgttactggtgatccccacgctatgggccattattaccattaacttttttatcgtgcagatcgctcccggcggccctgtcgatcaggcgattgccgcgattgaatttggccagggcggcgcgttgcccggcgccagcggcgaaggcgttcgcgccagtcatgcgcaaaccggcgtcggcaatatcagcgacagccattatcgcggcggccggggactcgatccggaggtgatcgcggagatcacccatcgctacggcttcgacaaaccgctgcatgagcgttatttcaagatgctacgggactatctctcttttgacttcggcgacagtctgtttcgcagcgcatccgtactgacgctaatcaaagacagccttcccgtctccattaccctgggattatggagcacgctgattatttatctggtgtctatcccgctggggattcgcaaagccgtccataacggcagtcgctttgatgtgtggagcagcgcgtttatcattattggttatgcgatccccgcctttctgtttgctattttattaatcgtcttttttgccggcggcagctactacgatatttttccgctacgtggcctggtctccgccaactttgacacattaccgtggtaccagaaaatcaccgattatttgtggcatattacgctgccggtgttggcgaccgtcatcggcggttttgccgccctgacgatgctgacgaaaaattcgtttctcgacgaggtgcgtaaacagtatgtcgttaccgctcgcgcgaaaggcgtgagtgaaaaaaacattctctggaaacatgtttttcgtaacgccatgctgctggtgatcgccgggtttcccgccacttttatcagtatgtttttcaccggctcgttgctaattgaagtcatgttctcgctcaacggcctggggctgctgggttatgaagcaaccgtttcgcgcgactatccggtgatgttcggtacgctttatatctttaccctgattggcttattactgaatatcctgagcgatatcagctatacgctggtcgatccacgcattgattttgagggacgataa

SEQ ID NO: 369761 - DNA, 1806 bp, Salmonella enterica
atgattgcgcgcgtaatgcttctgcttgtcgcactggttagcgctggcgcccaggcccaggaaatcaaagaaagctacgctttcgccgtactcggcgaacctaagtatgcttttaactttgatcactttgattatgtgaatcctgctgcgccgaaaggcggtcagatgacgctttccgccattggtacgttcgataatttcaatcgctattcgctgcgcggcaatcccggcgtacgtaccgaagccctttacgatacgctttttaccacctcggatgatgaacccggaagctattacccgctgattgccgaccatgcccgctatgccgccgactattcctgggtggaaatctcgattaatccccgcgctcgttttcacgatggcacgcccattaccgcccgcgatgtggcctttacctttcataagtttatgaccgaaggcgtaccgcagttccgtctggtctataaaggtactaccgtgaaggcgattgcgcctttaaccgtgcgaattgagctggcgaagcctggtaaagaagacatgcttagtctgttttcattaccgatcatgcccgaaaaattctggaaaaatcacaagctcagcgatccgctttcaacgccgcccttagccagcggcccataccggattactcagtggaaaatgggccagtacattgtctattcacgcgtcaaaaactactgggcggctaatctgccggtcaatcgtggacgttttaacctcgacactatccgctacgattactaccttgatgacaatgtcgctttcgaggcgtttaaagcgggcgcatttgatctacggctggaaaacgacgctaaaaactgggcaacgcgctacatcggtaaaaatttcgataatcattacatcattaaagaagagcagaaaaacgagtcggcgcaggacacacgctggctggcctttaacattcagcgcccggtatttaaagaccggcgggtacgtgaagctgtcaccctggccttcgattttgagtggatgaataaagcgctgttctataatgcctgcagccgaaccaacagttacttccagaataccgagtacgccgccagaaattatcctgacgccgatgagctggtattactcgcgccgatgaaaaaagatcttcctcctgaagtcttcactcagatctatcagccgccggtctctaacggcgacggctacgatcgcgaaaatcttcttaaagctgacgccttgttgacgcaggccggatgggtgatcaacggacagcaacgggtcaatagcgtcaccggtaagcctctgacgtttgaacttctccttcctgccagcagtaatagccagtgggttctgcccttccagcataatcttcagcgtctgggcattacgatgactatccgtcaggttgataattctcagctcaccaaccggatgcgcagccgcgactatgacatgatgccgaggctatggcgggcgatgccctggcccagctccgatctacaaatctcatgggcgtcggaatacattgactccagttataacgctcccggcgtacaaagcccggtggtggataaactgatcgcgcaaattatcgcagcgcagggtgataaagcgaaactggtgccgctgggacgggcgctggatcgcgtgctgacctggaactattacatgctgccgatgtggtatatggcgcaagacaggctcgcctggtgggataaattctcccatccggcgattcgcccggtatataccatcgggttagatacctggtggtatgatgtcaacaaagccgccaaactaccggcagccaggaggtag

SEQ ID NO: 369762 - DNA, 1557 bp, Salmonella enterica
atgcttacacgcgactcctcttccggtcggaaaatcctgcttacctgtatcattacggggatagcggcagcattacttattggtagcctgcaatttttcctgtcgtggcataaacgggatgttaaatacaatacgctcctttctgatgtacaacattacctggccagctatttcgccgacctgaaagccaccaccgatattcttcagccgttgacgatcaacacctgtcagcaggttggcgcagaactcacctcaagagccgcttttagccttaatgtccgcgccttcttattgattaaagataaaaaagtgttctgctcttccgccactggcgccatgaatatgccgcttcagcaactggtaccggatatagatatccgcaaagacgttgctatggcgattctgcccggcacgccaatgatgcccaacaaaccgacaatggtgatttggtatcgaaacccattattaaatgacagcggcgtattcacatcgctgaatattaacctgacgccctacttactctataccacgcgccaggatgattttaacggcatcgcgctgattgtcggcaataccgcgctgtcgaccttttcttcgcgtctgctgaccgtcgcggagctgccgggcacgccttcacgacaggcaactatcaacggcctgccgcttaaaatacagctttatgccgatagctggacctacaatgacttgtggtatgcgttgatgctgggctgcattagcggcatcgtagcggggtttatctgttactttatctatgccctccggacgcgaccgggcaaagagattttaacggcgatcaaacacgagcagttttatgtggtttatcagcccgtcgtcgatactcgtacgctgagcgtcaccgggcttgaagtcttactgcgctggcgtcaccctacggcaggagagattccgccggatgcctttatccactatgccgaagcgcagcaacttatcgtaccgttaacgcagcatctgttcgagctgatcgcccgcgacgcgcccacgttacagaaggtgatgcccgtcggtgccaaatttggcattaacatcgcgccggaacatctgcacagcgacagttttaaagaggatatgcaccggctcagggacgccctgcccgcgcaccattttcatatcgtgctggaaatcactgaacgcgatatgctccagcagtatgaagcggccaaactgttcgaatggctgcattccgccgggtttgaaatcgctatagatgatttcggtacaggccatagcgccctgatttatctggagcgatttactttagattatctgaaaatcgatcgcggttttatccaggcgatcggcacggaaaccgtcacgtctccggttctggataccgtgctgacgctctccagacgcctgaatatgctgacggtggccgagggcgttgaaacgccggagcaggcccgttggctacgcgatcacggtgttaattacttgcaggggtactggattagtcgtcctttacccctacaagatttcgtgctgtggatgtcggcgccttctgtgcctgaatggtag

SEQ ID NO: 369763 - DNA, 573 bp, Salmonella enterica
atggtcaaatctcaaccgattttgagatatattttgcgcgggattcctgcgattgcagttgcggttctgctttctgcttgtagcacaaccaccaataccgcaaagaatatgcattctgagacgcatgctgtgggcaatagcgatagctcttcactgcaagcctctcaggatgaatttgaaaatatggtgcgtaacctcgacgttaagtcgcggattatggatcagtatgctgactggaaaggcgtgcgttaccgcctgggcggcagtaccaagaaaggcgtcgactgttccagctttgtacagcgcaccttccgtgaacagtttggtttagagcttccgcgttcaacctatgaacagcaggaaatgggcaaagcagtttcacgcaataacctgcgtacgggcgatctggttctgttccgcgccggttccactggtcgtcatgtcggtatttatatcggcaataaccagtttgtccatgcgtctaccagtagcggcgtcattatctccagtatgaacgaaccgtactggaaaaaacgctacaatgaagcgcgtcgagttctgagccgcagttaa

SEQ ID NO: 369764 - DNA, 720 bp, Salmonella enterica
atgacgatgaaaacccgctattccttgataattctgcttaatgccgccggtctggcgctgtttttgtcatggtatcttcccgtcaatcacggtttctggttcaccattgattccggcatattccacttctttaaccagaaactggtggaaagccacgcgttcctctggtgggtcgctattaccaataatcgggcgtttgacggctgttcgctgctggcgatgggcggactgatgctcagtttctggctaaaagaagacgcgtcgggccggcggcgcattgtgataatcggattggtcatgctgctaacagcggtggtgcttaaccaactcggtcaggcgctgatccccgtcaagcgcgccagcccaacgctctcttttgagcatatttatcgcgtcagcgagttgctgcacatcccgacaaaagacgcgtcaaaagacagtttcccaggcgatcacggtatgatgctgctgatattttccgcctttatgctgcgttatttcggcaaaacggcggggattatcgcccttattatatttgtggttttcgcgtttccgcgcgttatgattggcgctcactggttcaccgatattgtggtcgggtcgctcacggttattttgattggcctcccctggtggctgatgaccccgctcagcgaccgggcgatagcgctttttgagaattatctcccgggcggaaataaacaaattttaaacaaataa

SEQ ID NO: 369765 - DNA, 987 bp, Salmonella enterica
gtgaccaaaaccaatcttattactggatttctcggtagcggaaaaaccacctctatccttcatttattagctcataaagatccggctgaaaagtgggccgtcctggttaatgaatttggtgaagtgggtattgacggcgcgctgcttgccgacagcggcgcactgctaaaagagatccccggcggctgcatgtgctgcgtcaatggattgcctatgcaggtggggctcaacacgctgctgcgccagggcaaacctgaccggttgctgattgaaccaaccggactggggcacccaaaacagattctggatttattaactgcgccggtttatgagccgtggattgatttacgcgctacgctctgcatccttgaccctcgcctgctactggaccaacagaacgtcgccaatgaaaatttccgcgatcagctcgcctcagccgatattatcatcgccaataagaccgatcgcgccacggcgcagagcgatgccgccctgcaacagtggtggcgacagtacggcggcgatcgtcaactgattcatgccgaacatggacagatagacggtaagcttctggatttaccgcgacaaaatctggcggaactgccggccagcgccgcgcattctcacactcatgccagtaaaaaaggactcgccgcgctaaatctgcccgcccagcagcgctggcgacgcagccttaatagcggacagggtcatcaggcctgcggctggattttcgatgccgataccgtgtttgacaccattggcctcctcgaatgggctcgtctggcgccggtgggccgggtgaaaggcgttatgcgcatacaagaggggctggtacgcatcaatcgccagggcgatgacctgcacatcgaaacacagagtgtcgcgccgccggatagccgggttgaacttatctcaaacacagaaaccgactggaatacgttacagacggccttgttgaagcttcgtttagcgacgcacgcgtaa

SEQ ID NO: 369766 - DNA, 573 bp, Salmonella enterica
atgccaagagcgaacgaaatcaaaaaaggtatggtactgaactacaacggcaaattgctgattgtgaaagatatcgacattcagtcgcctaccgcccgtggcgccgccacactgtataaaatgcgtttttccgatgtccgcaccggtctgaaagtggaagaacgtttcaaaggcgacgatatcgttgataccgtcaccctgagccgtcgcggcgttgacttttcttatgtcgatggcaacgaatatgtgttcatggataaagaagactatacgccgtataccttcaccaaagatcagattgaagaagagttgctgtttatgcctgaaggcggaatgccggatatgcaggttctgacctgggacggccaactgctggcgctagagcttccgcagaccgtggatctggaaatcgtcgaaaccgcgccgggtattaaaggagcgtccgccagcgcacgtaacaaacccgcgacattaagcaccggtctggtgattcaggttcccgaatacctgagcgcaggagagaaaatccgcattcatatcgaagagcgccgttatatggggcgcgcggattaa

SEQ ID NO: 369767 - DNA, 255 bp, Salmonella enterica
atggactgtcgtagcggttgtggtgcttgctgtattgcgccttcaatttcgtcgccgatacccggaatgccgaatggcaagccgatgaataccagatgcgtgcagctttcggaagataacttgtgccttatctttggctcgcctttacgcccaaaagtgtgctctggtttgcaaccgacaggggacatgtgtttaacgacccgggaagaggccattatttatttgctggaactcgaacagaaaaccttaccatga

SEQ ID NO: 369768 - DNA, 666 bp, Salmonella enterica
atgcggggagaaaatagtgaaattgatttagtcgacgtttccttattccttataagaaaatggctaagtatcgtgatcgttacctttatttttgtcgccattggctatgtttttgtgagcgtgcagcatgatacaaaggttgtgagtattacaatcaaacctaatctggatacgcctgctacctatgcgttatgtggctatactaatgatattcaatgtaaaacaacggttatccttaaccagtttagccgtttcttgcctgcggaatataaaaataaaataagttttgacgcgaaaaatcagcttgttctttttaaggcgcaggggagggaagaaagcgtcaataatattatttccaccctgaaaaatagtgtcgataaaatggcggcatggtatatcgatgatggtgacattaaacgttatagcgtgcataaaaatatgttacaaacggaaacatatgcaaagctatccttgttgtcggaggcggttaaaaataatgctaacattgaagtgatagatgttgctgtcacaccaaaatataagatgcggctggtgttggttctttgcggactgatgggcgtaattttctcaataaccggtcttttatgtaggagggcgcttacagaatatcgttttgagaaaaagacaatgaatgaccgcgcatga

SEQ ID NO: 369769 - DNA, 1182 bp, Salmonella enterica
atgcacaacagtcccgccgccgctgcgcctaaatcgtttgacctgacgtctaccgcctttttgatcgtcgcttttctcaccggtattgccggtgcgctacagacgccgacgctcagtatttttctgacggatgaggttcacgcccgccccggcatggtgggattcttttttaccggcagcgcggttatcggcattatcgtgagccagtttctggccggtcgctcagataaaaaaggcgatcgcaaaaaactgatcgttttctgttgcgtgctgggcatgttggcctgcgtgctgtttgcctggaaccgcaactactttattttgctgtttatcggcgtctttctcagtagcttcggctctaccgccaacccgcagatgtttgcgctcgcccgtgaacatgccgatcgtacaggtcgtgaagcggtgatgttcagctcaatcctccgcgcccaggtctcattggcctgggtcattgggccgccgctggcctatgcgctggcgatgggttttagctttacggtgatgtatttgagcgcggcggtagcttttatcgtctgcggcgtcatggtgtggttctttttaccgtcaatgcgcaaagatgcgccgctggcaaccggcacgctggaagcaccgcgtcgtaatcgccgcgatacgctgttgctgtttgtcatctgtacgttaatgtggggaactaacagcctgtatatcattaatatgccgctgtttatcatcaatgagctgcatcttccggaaaaacttgcaggcgtgatgatgggcaccgccgccgggctggagattcccacaatgctgattgcaggttacttcgccaaacggttgggaaaacgcctgttaatgtgcatcgccgttgtcgccggactgtgcttttatgcggggatgttgctggcgcacgcgccggcaacgttactcggcttgcagttgctgaacgcgatttacatcggcattcttggcgggattggcatgctctattttcaggatctcatgccaggccaggcgggttcagccaccacgctgtataccaataccattcgcgtcggctggatcattgccggttcgctggcgggaatcgccgcagaaatctggaattatcatgcggtcttctggtttgcgttagtcatgattgtcgccaccatgttctgcctggcgcgtattaaagatgtttaa

SEQ ID NO: 369770 - DNA, 1131 bp, Salmonella enterica
atgttccagttatcggttcaggacattcatccgggcgagcaggccggaaataaagaagaggccattcggcaaatcgccgccgcgttagcgcaggcggggaatgtggcgggcggctatgttgacggtatgctggcgcgcgaacagcaaacctcgacctttcttggcaatggtattgcgattccccatggcacaacagacacgcgcgatcaggtgctgaaaaccggcgttcaggtctttcaatttccgcagggcgttacctggggagaaggccaggtcgcctacgtggcgattggtattgccgccagttcggacgaacacctcggcctgctgcgtcagctgacgcatgtgctgagcgatgactccgtggctgaacagctgaaatccgcgataacggcggaagagctgcgcgcattgctgatgggcgagaagcaaagtgaacaattaaaacttgataacgagacgatgacgctggatgtcatcgccagctcgctggtcacattgcaggcgctaaatgcggcgcgtctgaaagaggcgggagcggttgatgcggcgtttgtcgcaaaaacgattaacgatagtccgatgaatctgggacaaggcatctggctgaacgacagcgcggaaggcaatttgcgcagcgctgttgcggtaagccgtgcgacccaggcgtttgacgtagagggtgaaaaagcagccttattagtcactgtcgcgatgaacgacgagcagccgattgccgtgttaaaacgcctcggcgacctgttgctgaacaataaagccgatcgtctgctgagcgccgacgccgcgacgctgctggcgttgctgaccagtgatgatgcgctgacggatgacgtactgagcgcggaatttgtagtgcgtaatgagcatggtctccatgcccgtccgggcaccatgctggtgaatacgattaaacaatttaacagtgaaattaccgtgacaaaccttgatggaaccggcaaaccggcaaacggacgtagtctgatgaaagtggtggcgttaggcgtgaagaaaggccatcgtctgcgctttaccgcgcagggtgaagatgctgaacaggcgctgaaagcgattggcgatgcgatcgccgccggtctcggggagggcgcataa

SEQ ID NO: 369771 - DNA, 939 bp, Salmonella enterica
atgagcaggcgtgtcgccaccattacccttaatccggcttacgatctggttgggttttgccctgaaatcgaacgcggcgaagtgaacctggtgaaaaccacgggtctgcacgcggcgggcaaaggcattaacgttgccaaggtgctaaaagacttaggcatcgacgtcaccgtcggcggttttctcggtaaagataaccaggacggttttcagcaattgttcagcgaactgggcatcgctaaccgctttcaggtggttcagggccggacccgcatcaacgtgaagctgacggaaaaagatggcgaagtgaccgacttcaacttttccggctttgacgtgacccccgcagactgggaacgctttgttaacgactccctgagctggctgggccagttcgatatggtctgcgtcagcggtagcttaccggctggcgtgagtccggaagcgttcaccgactggatgacgcgtctgcgcagccagtgtccatgcattatctttgatagtagccgtgaagcgttagtcgccggtcttaaagctgcgccgtggctggtgaaaccgaatcgccgcgaactggaaatttgggcgggtcgtaagctcccggaaatgaaagatgtaattgatgcggcgcacgcgttacgcgaacagggtatcgctcatgtggtgatttcgctgggggcggaaggcgcgctgtgggttaacgcctcaggagaatggatcgctaaaccaccggcagttgacgtggtaagtaccgtcggcgcaggcgattccatggttggcggattgatttacggcctgctgatgcgcgagtccagcgaacatacgctgcgtctggcgacggcggttgccgcgctggcggtcagccagagcaatgtgggtattaccgatcgtcctcagttggccgcaatgatggcgcgtgtcgacttacaaccgtttaactga

SEQ ID NO: 369772 - DNA, 1689 bp, Salmonella enterica
atgaaaacgctgctgataattgacgctaatctcggccaggctcgcgcttacatggcgaaaaccctgcttggagcggcggcgcataaagcaaatctggaaattatcgacaatccgaatgatgctgagctggcgatcgtgctgggcgaatctctgccgaacgacaatgctctgaacggcaaaaaggtttggctgggggatattggtcgcgccgtcgcgcatccggaactgtttctgagtgaagccaaaagccatgcgaccctttacagcgcccctgctgcggctgctcctgcggcgagcggcggtccgaaacgcgtggtcgcggtaacggcctgcccgaccggcgtcgcccatacttttatggcggctgaagccattgaaacagaagcgaaaaaacgcggctggtgggtaaaagtcgaaacgcgcggctccgtgggggccggcaatgccatcaccccggaagaggtggcggaagcggatttagtgattgtggcggcggatatcgaagtggatctggcgaagtttgccggtctcccgatgtaccgcacgtcgaccggcctggcgctgaaaaagacggcgcaggagctggataaagccgtagcggaagcgacgccgtatcaaccggcgggtaaggcatcgcaagcggcgaccgaagggaagaaagagagcgctggcgcataccggcatctgttgacgggcgtttcttacatgctgcctatggtggttgccgggggactgtgtattgcgctttccttcgcctttggtattgaagcctttaaggtgccgggcacgctggcggcggcgctgatgcagattggcggcggttcggcgtttgcgctgatggtgccggtactggcgggttatatcgctttctccatcgcggatcgcccaggccttacgccaggtctgattggcggtatgctggcggttagcaccggttctggttttatcggcgggatcattgccggcttccttgccgggtatatggcgaagcttatcagtaccaaactgaaacttccgcaaagtatggaagcgctgaagccaatcctgatcatcccgttaatttccagtctggtggtggggctggcgatgatttacctgatcggtaaaccggttgccgggattctggaagggctcacccactggctgcaaaccatggggaccgcaaacgcggtgctgctgggcgcgattctcggcgggatgatgtgtaccgacatgggtggcccggtgaacaaagcggcgtatgcgtttggcgttggtctgctgagtacgcaaacttacgcgccgatggcggcgatcatggccgcaggtatggtaccgccgttagcgctgggtctggcaacgatggtggcgcgtcgtaagttcgacaaagcgcagcaggaaggcggtaaagcggcgttggtactggggctgtgctttatcactgaaggcgctattccgtttgcggcgcgcgacccgatgcgtgtactgccgtgctgtatcgttggcggcgcgttgaccggggctatttctatggcggtaggcgcaaaattgatggcgccgcatggcggtctgtttgttctgcttatcccaggcgcaattacgccggtattgggatacctgctggcaattgtggccggtacgctggtggcaggactggcttatgccgtcctgaaacgtccggagacggaagtcgcggcaaaagcggcataa

SEQ ID NO: 369773 - DNA, 858 bp, Salmonella enterica
atgaaatacatcggagcgcacgtcagcgctgctggcggtctggctaacgcccctgcccgcgcggctgaaattggcgcaacggcctttgcgcttttcacaaaaaaccagcgtcagtggcgtgccgccccccttactccccaggtcattgatgactttaaaatcgcctgtgaaaagtatcatttctcggcggcgcaaattcttccccacgatagttacctgattaatctgggccatccggtcagtgaagcgctggaaaaatcacgcgatgcctttctcgatgaaatgcagcgctgtgaacaactcggcttaaccttgcttaattttcatcccggtagccatctgatgcagattgcacaggaggattgcctggcgcggatcgcggaatccatcaatattgccctcgcgcagaccgagggcgttacggcggttatcgaaaatacagccggtcagggcagtaatctggggtttgagtttgaacagttagccgccatcatcgacggcgtggaagataagtcgcgcgttggcgtctgtatcgatacctgccatgcctttgccgccggatacgatctgcgtacgccagaggcgtgcgaaaaaacattctccgaattcgggaaaattgtcggatttcagtatttgcgcggaatgcacctgaacgacgccaaaagcgccttcggtagccgcgttgaccgccatcacagtctgggtgaaggcaatatcggccacgatgcgtttcgttggattatgcaggatgggcgttttgacggtattccgctgatactggagaccatcaatcctgatatctgggcggaagagattgcgtggttaaaagcccagcaaattgccgaagcgatggcctga

SEQ ID NO: 369774 - DNA, 1050 bp, Salmonella enterica
atgacagaactcaccttgcagaatcatcgtcgtacaatgtggcattttataccggggctcgctctgagcgccgtcattacaggagtcgccctgtggggcggcgctatccctgccgttgcaggcgcggggttcagcgccctgaccctggctatcctgctgggtatggttatcgggaataccgtctatccacaaatatggaaacaatgcgacggcggcgtgctgtttgcaaaacaacatctgctgcgtttagggattatcctttacggcttccgccttaccttttcacaaatcgccgacgtgggtattagcggtattgtgattgacgtattaacgctttccagcacgttcatgctggcctgcttcttaggccaaaaagtctttggtctggacaggcataccagctggctgattggcgccggtagcagtatctgcggcgcggcggcggtactggcgacagaaccggtggtaaaagcggaagccagtaaggttactgtagccgtcgcgactgtcgttattttcggcaccatcgctattttcctttacccggcaatgtatccgctgctggcgcactggttcagcccggaaacttacggcatctatatcggctcaaccatgcatgaagtcgcgcaagtggtcgcagcgggtcatgccgttagcccggatgcggaaaatgcggcagttatcgctaagatgctgcgtgtcatgatgctggcgccgttcctgatcattctggcggcacgcgttaaacagctttcaccggcgaccggcgcggaaaaaagcaaaattaccattccgtggtttgctattttcttcatcgtagtggcgatcttcaactctttccacctgctgccgaaagccgtggtggatatgctggtgacgctggacacagtgctgctggcgatggcgatggcggcgttgggtctgaccactcacgttagcgcattgaaaaaagcgggggcgaaaccgctgctgatggcgctggcactattcgcctggctgattattggcggtggcgccattaacgtcctaatccatagccttatcgcataa

SEQ ID NO: 369775 - DNA, 864 bp, Salmonella enterica
atgcatattacgctacgacaacttgaagtgtttgctgaagtactgaaaagcggttcaacaacccaggcgtcggtcatgctgtcattatcgcagtccgccgttagcgccgcgctcaccgatctggaaggtcagctcggcgtacagttgtttgatcgggtggggaaacggctggtggtcaacgaacatgggcgcttgttatacccgcgcgcgctggcattgctggagcaagcggtagaaattgagcagctatttcgtgaagataacggcgcgatacgggtttatgccagtagcaccatcggcaattacattttacccgccatgattgcccgctatcgccagcattatccggccttgccgctggaactcagcgtgggaaacagccaggacgtgattaacgcggtgttggattttcgggttgatatcggcctgattgaagggccgtgtcacagtacagagattatctctgagccgtggctggaagatgagctggtggtctttgccgcgccgtcctcgccgctgacgcaggggccggtgacgctggaacagcttgcggcatccccatggattttacgcgagcgcggttccggtacgcgggaaattgtcgattatttgctgttgtcgcatttgccgcgctttcatatggcgatggagttggggaattcagaagcgatcaaacatgcggtgcgtcatggactggggataagctgtttatcgcgccgggtgattgctgaacaactccaggcgggaaccctgggcgaagtcgcggtgccgttaccgcgcctggtgcgcacgttgtggcgtgttcatcatcggcagaaacatctttctaacgcgttgcagcgttttttgagttactgtgaataa

SEQ ID NO: 369776 - DNA, 1470 bp, Salmonella enterica
atgggttccaaaactaaaaccacagaagcgcccgcgctacgtcgcgaattaaaggcgcgtcacctgacgatgattgccattggcggctccatcgggacaggtcttttcgttgcatctggtgcgacaatttctcaggcggggccaggcggcgcgctgttttcttatattctgattggtttgatggtctacttcctgatgaccagtcttggcgagctggcggcctatatgccagtatctggctcgtttgcgacatatggtcagaactatgtggaagaaggctttggtttcgcgctgggctggaactactggtacaactgggcggtgactatcgctgttgacctggttgccgcgcaattggtgatgggctggtggttcccggacacgccgggctggatctggagcgcgctattcctctgcgtcattttcttgctgaactacatttctgtacgcggttttggcgaggcggagtactggttctcgttaattaaagtcgcgaccgttattatcttcatcatcgttggcgtagcgatgattatcggtatctttaaaggtgtcgagccggtcggctggagcaactggacgacgggcgatgcgcctttcgctggcggttttgcggcaatgattggcgtcgcgatgatcgtgggcttctctttccagggaactgagctgattggtattgccgccggggaatctgaaaacccggagaagaatattccacgcgcggtgcgtcaggtgttctggcgtattctgctgttttatgttttcgcgattttgattatcagcctgatcattccttataccgatccaaacctgctgcgtaacgacgtcaaagacattagcgtcagtccgtttaccttagtgttccagcatgcgggcttgttgtctgcggcggcgataatgaatgcggttatcctgacggcggtactgtctgcgggtaactccgggatgtatgcctcgacccgtatgctctacaccctggcctgtgacggtaaggccccgcgtatttttgcgaaattgtcccgcggcggcgtaccgcgcaatgcgctttatgccaccaccgtgattgccggtctttgctttttgacctcaatgtttggcaaccagacggtctatctgtggctgttgaacacctccggtatgacgggcttcatcgcctggctggggattgccattagccattatcgcttccgtcgcggttacgtgttacaagggtatgatgtgaatgatttgccgtaccgttccgggttcttcccgctggggccgattttcgcctttgtactgtgcctgattattacgttggggcagaactatgaagcgttcctgaaagataccatcgactggggcggcgtcgcggcgacctatatcggtattccgctgttcctgcttatctggttcggctacaagctgataaaaggtacgcatttcgtgcgctatagcgaaatgcacttcccggaacgcgttaaaaagtaa

SEQ ID NO: 369777 - DNA, 1992 bp, Salmonella enterica
atgtttaggtttaaccctttcgttcgggtagggctttgtatgtccgcagttacgttggcctggccggttgccgcggcaacggatgatggtgaaaccatggtcgttaccgcgtccgccatcgaacaaaatctgaaagatgcgccagcaagtatcagcgtcattacccagcaagatttacagcgcaggcccgtgcaaaacctgaaagatgtcctgaaagaggtgccgggcgtacagctcactaacgaaggggataaccgtaaaggcgtgagtattcgtggtctggacagcagttatacgctgatcctgatcgacggtaagcgcgttaactcccgtaacgcggtcttccgccataatgattttgatctgaactggataccggttgacgctatcgaacgcattgaagtggtgcgtggccccatgtcctcgctgtatggttccgatgcgctgggcggcgtggtcaacattatcaccaaaaaaattggtcagaaatggcacggcagcgtcacggttgactccactattcaggaacatcgcgaccgtggcgatacttataacggtcagttctttaccagcggtccgctgatcgacggcgtgctgggaatgaaagcctacggtagcctggcgaaacgcgaaaaagacgagcagcagagttccgccaccaccgctacgggtgaaacgccgcgcattgaaggatttaccagccgggatggaaacgtcgagtttgcctggacaccaaacgaaaatcatgacgttaccgcaggctacggttttgatcgccaggaccgggactccgactcgctggataaaaaccgtctggaacggcaaaactatgcgttgagccataacggacgttgggatctcggcaatagtgagctcaaattctacggcgaaaaagtggaaaacaaaaaccccggcaacagtagccctatcacgtcagaaagcaattcgattgacgggaaatacgttctgccgttagcggctgtcaaccagttccttaccttcggcggcgaatggcgtcacgataaactgagcgatgcggtcaacctgaccggcggttccagtactaaaacctccgccagccagtatgctctgttccttgaagatgagtggcgcatcttcgaaccgctggcgctgaccaccggtattcgtatggatgatcatgaaacctatggcgatcactggagcccgcgtgcttatctggtctataacgcaacggataccctgacggtgaaaggtgggtgggccacggcctttaaagcgccgtcgctattgcaattaagtccggactgggcgaccaactcctgccgtggcggatgccgcattgtcggtagcccggatctgaaacctgaaaccagtgaaagctgggagctcggcctttattaccggggcgaagaaggcatactggagggcgtggaagcgagcgttaccacgttccgtaacgatgtggacaatcgcatcagcattagtcgtacccctgacgttaacgccgcgcccggctattccaactttgtcggtttcgaaaccaacagtcggggacagcgcgttccggtcttccgttattacaacgtgaataaagcgcgtattcagggcgtggaaaccgagttgaaagttccgtttaacgaggcgtggaaactgtcgttgaattacacctataacgacggacgcgacgtcagtaatggcgggaacaagccgctttccgatctgccgttccacaccgcgaacggtacgctggactggaaaccggcgcagctcgaagactggtcattctacgtatcagggaagtataccgggcgtaagcgggccgacagcgcaacagcgaaaacgccgggcgggtacgtggtctgggataccggcgcggcatggcaggcgacgaaaaacgttaaactgcgtgcgggcgttctgaacgtgggcgataaagatctcaaacgcgacgactacggttataccgaagacggacgtcgttactttatggcggtggattaccgtttctga

SEQ ID NO: 369778 - DNA, 1323 bp, Salmonella enterica
atgagtataaaaacatttattttcagccagcccgataagccgattgtaaaagagaaaaaagagatagaccagacctataaaaaatttcgttttgagattatcgcctcggtctttatctcttatgccgtcttttatcttacccgtaaaaacttctccgccgcgatgccggccatgctgacggaaacgtcgctgaccgcagaagacttcgccattatgtcttctattttttacattctttatggcgcgatgaagtttgtcggcgggatgctggtcgataaaattaacccgaaagccatgaccggcccggtgctgattggcgtggggattgtaaatattctgttcggcttttccgatagtgtggcggcattctacgtactgtacagcctcaacgcgatcttacagggcaccagctttccgccgatggcgaaaattatggcctcgtggttttcgaaaaacgaacggggacgctggtgggctatcgttgaagcggcgcacaatatcggcggcagcctcgcgccgctgctgaccagctttgctatcgcctttagcggtagctggaaaatggggttttatgttcccggcgccatttcgctgctgatggggatagtggcgctatttaccattaaagatcgtcccggtacgttaggtttgcccaacgtggggcagtggcgtaacgacccgacagaactggcccaggtcaaggccagcccggtcaacctgagcttctggcagatttttgtaaaatatatcctgaccaatccactggtatggatcattattatcggcgatatgtcagtttatattgcgcgcaccatccttaacgactggccgcagatttactattcgcaggttcacggctggagcctgataaaagcgaactcgattatttcctggtttgaggcgggcggactggcaggtgggttgctggcaggctacttgtctgactttatgttcaaaagtaaccgctggatgaccggattaatcttcgcgttagcgctgtgcatatgcatcgtgctggtgccgctggttcaggatacctcttacaccctcaccgcgattctgttcaccatcatgggcttcgccttatacggaccgcatatgctttttgccgtcggctgtctggatgtgacccataaggatgcggcgggatcgattaccggctttcgaggattgttcagctatgtcggcgcggcaatggccggtgtgccggtaattatggtgaaaaatagctgggcgtggtcgggcgtttatatctatgcggtgatcgccattctgctaacgactctgtcgctggcgctgctctccaggctgcatcggttataa

SEQ ID NO: 369779 - DNA, 888 bp, Salmonella enterica
atgagcattatttattttattactacacaggatatcgatacgtttcagaaaaaattacaggaaacgttatttaatgccgtcaccatgccgtttccgctattatttgataaacgttatgccgcgcttatcaataccgcttatttaaagcttacgctgccagcggaatgtctgacgcctgaattttatcgctatttacgcgaactctcattgcaatggcagtttgatttttttattaagccgcagccactgcctgctaacggtattatcgcgtttgatatggactcgacatttattgcggaagaaggcgtggatgaaattgcccgcgagcttggcatgtcgacgcaaatcaccgccattacccaacaggcgatggagggcaagcttgattttaacgccagttttacccgacgtatcggaatgttgaaaggcacaccgaaagcagtgctgaacgccgtatgcgatcgcatgaccctttcgccaggcctgttaactattctgccagtcatcaaggccaaaggatttaaaaccgcgattatctccgggggactggatatattcacccagcgtctaaaagcgcggtatcaactggattatgccttttcgaatacggttgaaatacgcgataacgttctgacggataacattaccttgccgattatgaatgccgcaaacaaaaaacagactctggttgacctggctgcccggttaaatattgccacggagaatattattgcctgcggtgatggcgccaacgatctgccgatgttagaacatgctggcaccggtattgcctggaaagcgaagccggttgtacgggaaaaaatccaccatcagattaattatcacggtttcgaattgcttctttttcttattgaagatgaattataa

SEQ ID NO: 369780 - DNA, 1368 bp, Salmonella enterica
atggagagttgccttgatatattcaaaatagtaataggtccatccagctcacgtaccgtagggccgatgcgcgccgcctgtcactttatttcattgctcagagaacaagagacgttgccgctaattcgggaaattgaaatcgagctgtatggcgcgttatcgttaagccgcaagtgccacaatgtggataccgccctttatcttgggctgctgggttgccagccggagaatgtcgatctccgttcgcatatggcggtgattaagcgtgcggaaaatgaaaacaaaatcgaactcccgctctccgacgcgggcggaatcacgataaaagtcaagattatcgccaatcaccaggcgcatccaggccatccttatgccatgacgtttcgcgccagagatgattatttcacggtgtatgaagagacctggttttcgaccggcgccggacaggttcgcaaacatggcgagccgctgacgccatcgcttcctttgcgtacagtgtcgccctttgaatttagtcatgccgcgcagttgctggcgctgtgccgacgtaatggcctgtccgtggcggcgctgatgatgaaaaatgagctgtgccgccactcgccacagacgttgcagaattatctggcgcaaatatgggacgtgatgcagcaggcggtttatcgcggcctgcatactgagggggtattacccggtccctatcaggtaccgcggcgcgcctgtgcgttacataagacgttacaggctaaccgctccgccagcgattttttaaccgcgctgaactgggtcaatgccttcgcgattgcggtaagcgaagaaaatgccagcggcggacagattgttaccgcgccaactaatggcgcgtgcggcatcattccggcagcgctctgctggtatgataaatttgtcacgccgctggagcccggtgctctgacccgtttcttcctgaccgccgccgctatcgcgatattgtttaaacaaaacgcctctattctgggatctgaagttggctgtcagggggaaatcggcgtggcgtgctcaatggcggcggcgggcctggctgaactgatgggcgcatccgtggagcaaacgctgagcgccgctgaaattgccatggaacatcatctgggattgacctgcgatccgctgggcgggcaggtacaaattccctgcatagagagaaatgccatctctgccgtgaaagcgataaacgcggcgacgatggcgatgagtcgcgtaagcgaaccctgtatttcgctcgatgagatcattgctgcgatgtacgagaccggtaaagacatgagcgctaaataccgtgaaacgtatcatggttcgctggggaaaattcagccgcgcaagagagggtaa

SEQ ID NO: 369781 - DNA, 390 bp, Salmonella enterica
gtgaaatacaatacgatgaataacgacgagattatcctgtcgttgtgcgcccgcttaaaggagacgcgtctgtctctttcgatgacccagcagcagcttgccgatcgcgcgcacgttggcatcgccaccatcaagcgtatcgagaaggggggagggctcaatcttgatacgctaatttctctcctgcgggcgctggataagttgcataatcttgatgcggtgctgtttgaatccgagctgcgtaattttcacgaaagttatgaaggcggagagggcagcggccgccttcaggtacgccagcaggccgcggatttaaataataaatcttccgcgccgcagtcggaggaggtgaactacagcgcggcgctggaaaattcattatgttggtga

SEQ ID NO: 369782 - DNA, 858 bp, Salmonella enterica
atggaaatgctcgaagagcaccgatgttttggcggctggcagcagcgctggcgtcatcatgccgccacgctaaactgcgccatgacattcagcatttttcttccgccgactcaggataatgaaccgcctccggtactgtactggttgtccgggttgacctgcaatgatgagaactttaccaccaaagcaggcgcgcagcgtatcgcagcagaactgggcattgtattggtgatgccggataccagtccacgcggtgaacaggtcgccgacgatagcggatacgatttaggccacggcgccgggttttatctcaatgccacacagccgccctgggccagccattatcgcatgtacgattacctgcgcgatgagcttccggcgcttatccagacacagtttaacgtcagcgaccgttgcgccatcagcgggcactcgatgggcggccacggcgcattaatcatggcgctgaaaaatccgggcaaatacaccagcgtctctgcttttgcgcctatcgtcaaccccagccgcgtgccgtggggaatcaaagcgcttaccgcttatctcggcgaagatgaatcagcctggactgagtgggatagctgcgaattaatgctggccagcgagccgcaggacgccattcctgtgctcatcgatcagggcgacagcgatcaattcctcgccgatcagcttcagcccgccgtactggcggaagccgcgcggcaaaccgcctggccgatgacgctacgaatccagcctggttacgatcatagctattattttattgcgtccttcatcgaggaccatctgcgctttcatgccaggtatttacgggacgagcgtgagacgtcaccaacataa

SEQ ID NO: 369783 - DNA, 669 bp, Salmonella enterica
atgccatcactcagtaaagaagcggccctggttcatgacgcgctggttgcccgggggctggaaacgccgctgcgcccgcctatggatgaactggataatgaaacgcgaaaaagccttatcgcagggcatatgactgagattatgcagttgctgaatctcgatttgagcgatgacagtctgatggaaacgccgcatcgtatcgctaagatgtacgttgacgagattttcgccggcctcgactatgccaatttcccgaaaattaccctcattgaaaataaaatgaaggtggatgaaatggtcaccgtccgcgatatcacgctgaccagcacctgtgaacatcacttcgtgaccattgatggcaaagcgaccgtcgcgtatatccccaaagattccgtgatcggcctgtcgaaaattaaccgcatcgtgcaattcttcgcccagcgtccacaggttcaggaacgtttgacccaacaaattctgacggcgctgcaaaccttgctcggcaccaataatgtagcggtatcgattgatgcggtgcattactgcgtgaaagcgcgcggtattcgtgacgcaaccagcgccacgacgacgacgtcgctgggtggattgtttaagtccagccagaatacgcgccaggagtttctgcgtgccgttcgccatcatccatga

SEQ ID NO: 369784 - DNA, 1161 bp, Salmonella enterica
atgattaaggcggagacgatggagcgtaatgtcacgctggattttgtacgtggcgtcgctatcctcggtatcctgcttcttaacattagcgcctttggattgccgaaggcggcttatctcaatcccgcctggtacggcgcgatcgttcccgaagacgcctggtcctgggcgattctcggtattgtggcgcaggctaagtttcttacgctgttcgcgttgttgtttggcgcggggctacaaatgctgcttccgcgtggtaaacagtggattcagtcgcgcttaacgctattggtactgttaggttttatccatgcgttattcttttgggacggcgacattctgctggcctacggtctggtcgggttaatttgctggcgactgatacgcgatgcgccttcggtaaaaagcctgttcaataccggcatactcctttatctggtagggattggcgtgctactgctgctgggcgtggtatcgagtagcgaaaccagccgcgcctggacgccggatgcgtcggcaatattgtatgaaaaatactggaagctgaacggcggcatggaggctatcagcaaccgggcagagatgctgtcgaatagtttactggcgctcggcgcgcagtatggctggcaactggcgggtatgatgctgctgggcgccgcgctaatgcgtagcggctggctgaaaggtcagtacagtctgcggcactatcgccgtaccggggctctgctggtggcgttagggctactgatcaacctgcctgcggtcattttacaatggcggctggactgggcgtaccgctggtgcgcctttttattgcaggcgccgcgtgaactgagcgcgccgttgcaaacgctgggctatgccgcgctgatgtttggcttctggccgcagcttagccgatgcagactgacgcttgccattgcctgcgtagggcgaatggcgctgaccaattatctgctgcagacgatcatctgtaccacgctgttttatcagtttggcttatttatgaaattcaatcgactggaactcttgttctttgtcgttccggtatgggcaataaaccttctcttttccgtcatctggctacgtttctggcgacagggaccggtcgagtggttatggcgtcaactcacgttgcgcgcgtcaggatcgctcagataa

SEQ ID NO: 369785 - DNA, 1023 bp, Salmonella enterica
atgatcaccattcgtgatgtagcgcgccaggctggcgtgtctgtagcgaccgtttcccgcgtactgaataacagcgcgttggtcagtcccgacacccgtgacgccgttatgcaggccgtcaccctgctgggatatcggccaaatgcgaatgcgcaagcgctggccacccaggtgagcgataccatcggcgtcgtggtcatggatgtttccgatgcctttttcggcgctctggtgaaagccgtagatctggtcgcgcagcagcaccagaaatatgttctcattggcaacagttatcatgaggcggaaaaagagcgccatgcgattgaagtcttgatccgtcagcgttgtaacgcattgattgttcactcaaaagccttaaccgatcgcgagctgagcgactttatggatcagatccccggtatggtgctgattaaccgtatcgtgccgggttatgcgcatcgttgtgtttgtctcgacaatgtgagcggcgccagaatggcgacccgaatgttgctgaataatggacatcaacgcatcggctacctggcctccagccaccgtattgaagatgacgcgatgcgcagagaagggtggttacacgcgctgcaagagcaggggattgctgcgtcggagagctggataggcaccggcacgccggacatgcagggcggcgagtcggcaatggttgagttgctgggacgcaatctgcaactgacggcggtatttgcctataacgataacatggcggcgggtgcgctgacggcgttaaaagataacggcatcgccattcccttgcatctgtctgtcatcggtttcgacgatatccctattgctcgttataccgatcctcagttgactaccgtgcgctatcctattgcttctatggcgaaaatcgcgaccgagctggcgttacagggggctgcaggcacgctggatatcacggcgacgcactgcttcatgccgaccctggtacggcgccattcggtggcatggcgacagaatgcggtactgatcactaactga

SEQ ID NO: 369786 - DNA, 999 bp, Salmonella enterica
atgaataagaaggtactgaccctttctgccgtgatggcaagtctgttattcggcgcgcacgcgcaggcggctgatactcgtattggcgtgacgatttataaatatgacgataactttatgtccgtggtgcgtaaggctattgaaaaagatggcaaatccgcgccggatgttcagctactgatgaatgactcgcaaaacgatcaatctaaacagaatgatcaaattgacgttttattggcgaaaggggttaaagctctggcgattaacctggtcgacccggcagccgccggtacggtgattgagaaagcgcgcgggcaaaatgtgccggtggtgttctttaacaaagagccttcccgcaaagcgctggacagctatgacaaggcgtattatgtcgggactgactctaaagaatccggtgtgattcagggcgacttgattgccaaacactggcaggcgaatcagggttgggatctgaataaagacggtaaaattcagtatgttctgctgaaaggcgagccggggcacccggatgctgaagctcgtacgacgtatgtggtgaaagagttaaatgctaaaggtattcagaccgagcaactggcgttagacaccgccatgtgggataccgcgcaggcaaaagataagatggatgcctggctatctggcccgaacgctaacaagattgaagtggttatcgcgaataacgatgcgatggcgatgggcgcggtagaggcgctgaaagcgcataataaatcatcgattccggtctttggcgtcgatgcgttaccggaagctctggcgctggtgaaatcgggcgcgatggccggtacggtactgaatgacgccaacaatcaggcgaaagcgacattcgatctggcgaaaaacctcgccgaaggcaagggcgcggctgacggcaccaactggaagattgagaacaaaatcgtgcgcgtgccttatgtcggcgtggacaaagacaatctgagcgaatttacccaaaaataa

SEQ ID NO: 369787 - DNA, 1521 bp, Salmonella enterica
atgggcagcacgatctctccgtcgtcgggtgaatatttgttggaaatgcgtggcattaacaaatcatttcccggcgtgaaagcgcttgataatgtcaacttaaacgttcgtccgcactctattcatgcattaatgggcgaaaacggcgcaggcaaatcaacattattaaaatgtcttttcggtatttatcaaaaagactccggcagcattgtatttcagggaaaagaagtggacttccattcggcgaaagaagcgctggagaatgggatttcgatggtacaccaggagttaaacctggtattacaacgttcggtcatggataacatgtggctggggcgttatcctaccaaaggtatgtttgtcgaccaggataaaatgtaccaggataccaaagcgatatttgatgagctggatatcgatattgacccgcgcgcgcgcgtaggaacgttatccgtttcgcaaatgcagatgatcgaaattgcgaaggcgttttcctataacgctaagatcgttattatggatgaaccgacctcatcgttaactgagaaagaggttaatcatctgttcaccattattcgcaagctgaaagaacgcggctgcggcattgtttatatctcgcataaaatggaagaaatttttcaattgtgcgatgaaattactattttgcgcgacggtcagtggattgccacccagccgctggaagggctggatatggataagatcattgcgatgatggtcgggcgttccctgaaccagcgctttccggataaagaaaataagccgggcgacgtgattctggaggttcgtcacctgacctcgctgcgccagccttccattcgcgatgtctcctttgatttgcacaagggcgaaattctgggcattgccggtctggttggggcaaagcgtaccgatatcgtcgaaacgctgtttggcattcgtgagaagtcgtccgggacaatcactttacatggcaagaaaattaataatcacactgcgaacgaagcgattaaccacggttttgcgctggtgacggaagaacgtcgttccaccggaatttacgcctatctggatatcggatttaactcattaatttcgaatatccgtaattataaaaataaagtggggttactggataattcccggatgaaaagcgacacccaatgggtcattgattccatgcgggtaaaaacgccggggcatcgcacgcaaattggttcgctttccggcggcaatcagcaaaaggtgatcattggtcgctggctattaacgcagccggaaatattaatgctggacgaaccgacccgcggcattgatgtcggcgcaaagtttgaaatttatcagcttattgcggaactggcgaaaaaaggcaaggggatcatcattatctcttctgaaatgccggagctgttagggattaccgatcgtatcctggtgatgagtaacggtctcgtttccggcattgtcgatactaaaacaacaacgcaaaacgaaattttgcgtcttgcttctttgcacctttaa

SEQ ID NO: 369788 - DNA, 1011 bp, Salmonella enterica
atgagtgcgttaaacaagaaaagctttttgacctggctgaaagagggcggaatttacgtcgttcttttagtgttgctggcgattattattttccaggacccgacttttttaagtttgctgaatttaagtaatattctgacgcaatcttcggtacgtattattatcgcgctgggcgtggcgggactcatcgtcacccaggggacagacctgtcggcggggcgtcaggtagggctggcggcggtcgtggcggcaacattactgcaatcaatggaaaacgccaacaaagtgtttccggaaatggcgaccatgccgattgcgctggtcatcctgattgtctgcgcgattggcgcggtgattggcctggtgaacggcatcatcattgcttacctgaacgtgacgccgtttattaccacgcttggcacgatgattatcgtttatgggatcaactccctttactatgactttgtcggcgcttcgcccatttccggctttgacagcggcttttccacctttgcgcagggctttgtggcgatgggcagtttccggctctcatacatcaccttttacgctctgattgcggtagcgtttgtctgggtgctgtggaataagacccgttttggtaaaaacatttttgctattggcggcaacccggaggcggcgaaagtttctggcgtaaacgtggcgctgaacctgctgatgatttatgcgctctccggcgtgttttatgccttcggcggcttactggaagcagggcgtattggttctgccaccaacaacctcggctttatgtatgaactggatgcgattgccgcgtgcgtggtcgggggcgtatcgtttagcggcggagtggggacggtcttcggcgtggtgaccggcgtcattatctttaccgtcatcaactatggcctgacctatataggggtaaacccgtactggcagtacattatcaaaggcggcattatcattttcgccgtggcgctggactcgctgaaatacgcgcgtaagaagtag

SEQ ID NO: 369789 - DNA, 1236 bp, Salmonella enterica
atgttaacaaaagatttgtctgttaccttttgcggcgttaagtttcccaatccgttttgtctttcttcttctccggtaggcaattgttatgagatgtgcgccaaagcctatgataccggctggggcgggatcgtttttaaaaccattggtttttttattgccaacgaagtctctccacgttttgatcacctgacgaaagaagataccggttttattggtttcaaaaacatggagcaaattgctgagcatccgctggaagagaatctggccgccattcgacggctaaaacaggattatccggataaggtgctgattgcttccatcatgggggaaaatgagcagcagtggcaggaactggcgcgtctggttgaagaagccggcgcggatatgattgagtgtaacttctcttgcccgcagatgacctcgcacgccatgggaagcgatgtagggcaaagcccggagctggttgaaaaatactgccgcgccgtaaaacgcggttcatctttgccaatgctggcgaaaatgacgccgaatattggcgatatgtgcgaagtcgcgctggccgccaaacgcggcggagccgacggtatcgccaccatcaacaccgtgaaatccattactaacatcgacctgaaccgcaaaatcgggatgccggtggttaacggtaaatccagtatctccggttattcaggaaaagcggtgaaacccattgcgctgcgttttatccagcagttgcgaatgcaccctgaactgcgcgatttcccgattagcggtatcggcggcattgaaacctgggaagacgctgccgaatttctgctgctgggcgcggcgaccctacaggtgacgacaggcattatgcaatacggttaccgcattgtagaagatatggcgagcggcctcagccactatctggccgatcagggatttgcctcattacaggagatgatcgggctggcgaatggcaatattatcccggcggaagacctggatcgcagctatatcgtctatccgcggattaatcaggagaaatgcgtcggctgcggacgttgctatatctcctgctatgacggcggtcatcaggcgatggagtgggatgaacacagccgcacgccgcattgcaatacggaaaaatgcgtcggttgtctgctgtgcggtcatgtctgcccggtcgcctgtattgatttaggcgaggtcaaatttaaaaaaggcgaaaaagaacacgcgttaacgctgtag

SEQ ID NO: 369790 - DNA, 1242 bp, Salmonella enterica
atgccgcaacaaaattatctggatgaactcacgcctggttttacgccattactggcaataaaagaggcttcacgttgtttattatgtcacgatgcgccctgtagtcaggattgcccggcgcaaaccgatccggggaaatttattcgttctatttactttcgcaattttaaaggcgcagcggaaactatccgggaaaataatgcgcttggtgctgtctgcgccagagtctgtccgacggaaaaattatgccagcgcggatgtacacgttccggaatagataaacctattgatattgcacgcctgcaacgttttattaccgattttgaacagcagactgccatgcagatttatcagcccgggagtaaaacacgcgggaaagtcgcgattattggcgcgggtccggcaggtttgcaggcaagcgtgacgctcacacatttaggctatgacgtcaccatttacgaaaaacagccgcagcccggcggatggctgcgtcacggcatcccggcatttcgtctgccgcaaagcgtactcgatcaggaaattgcccgcattgtagaaatgggcgtcaatattaaatgtaattgtgacgtgggcgggtcgctatcacttgcgcaactcaaagccgaatatcgcgccgtgctgatgaccgtcgggatgtcctgtggctctgatttaccgttatttgagcaagccagtcacgtagagattgccgttgattttttacagcgcgcccgtcaggccgacggcgatattagcgttccgcgtagtgcattaattattggcggcggcgacgtagcgatggatgtcgccagtacgttaaaaattctcggctgcccttccgtcacctgcgtggcgcgggaagaattagcccaatttcccgccagcgaaaaagaatttaccagcacgcaggcattaggcgtatcgattattgatggctttacgcctgtcgccgtcagcggaaataaagtgaccttccaccatgtacgccactcaggagaactgacgctggaagcggaaaatattattttggccgtggggcagcacgcgcgactggatacctttgcggagataaaagcgcagcataatattatcgacacgcataattatcaaaccgacgacccggcgatctttgccgctggcgatattgttaaaggtgataagaccgtcgtttatgcggtaaaaaccggaaaagaagccgctcaggctattcatcattatttagaggaggcctgctcatgttaa

SEQ ID NO: 369791 - DNA, 240 bp, Salmonella enterica
atggatgtacagacgatatttgtcatattagcctttctgctactcccgcttttttgcttccgtgaggcctggaaaggctggcgaaccggcgcggtagataaagttgtcaaaaatgcgcgaaaaccggtttatgtctatcgccatgccgatcccgtacaatattggtcttatctttttctttataccggttgcggttttttatttactggaatgattatttatcttcttttttatcgttaa

SEQ ID NO: 369792 - DNA, 720 bp, Salmonella enterica
atgttaaagcgcgtgttttacagcctgttggtcctggtaggcttgctgctgttgacggtgcttggcctcgatcggtggatgagctggaaaacagcgccctatatctatgacgagctacaggatctcccctaccgccaggttggcgtcgtgttagggacagccaaatactatcgcaagggtgtcattaatcagtactatcgttatcgtatccagggcgcgttaaacgcttacaatagcggtaaagtcaattacctgctgctcagcggcgacaatgccctgcaaagctataacgaaccgatgaccatgcgcaaagaccttatcgcggcgggcgtcgatcctgcggacattgtgcttgattacgctggcttccgtacgcttgactccattgtgcgtacccgcaaagtgtttgataccaacgactttattatcatcactcagcgcttccactgcgaacgcgccttgtttattgcgctgcatatgggcattcaggcgcagtgttacgcggtaccttcgcccaaaaatatgctgacagtgcgcctgcgcgaatttggcgcccgctttagcgcgctggcggatctctatatttttaaacgcgaaccgcgttttttaggcccgctggtacctattcccacgcagcatcaggtgccgaatgacgcccaggggtatccggcagttacgccggaacaattgcttgaactggaaaagaaaaaagggaaatga

SEQ ID NO: 369793 - DNA, 885 bp, Salmonella enterica
atgcatccacgttttcaaactgcttttgcccagcttgcggataatttgcaatcagcgctggcccctatcctggcggaccaccattttcccgccatgctgaccgcagagcaggtctcgacgcttaaaaatacggcgggactggacgaagacgcgctggctttcgcactgttacctctggcggcggcctgcgcccgtaccgatttgtcccattttaacgtcggcgcgattgcgcgcggcgtcagcggcaactggtatttcggcgcgaatatggagttcctgggcgccaccatgcaacaaactgtgcatgctgaacaaagcgcgattagccacgcctggctacgcggcgaaaaagggctcgccgccgtcaccgttaactacacgccttgcggccactgtcgccagtttatgaacgagctgaacagcggtctggatctgcgcattcatctgccgggccgcgcgccgcatacgttacgcgattatctgcctgacgctttcgggccaaaagatctggagatcaaaacgctgctgatggacgagcaggatcatggctttacgttaacgggcgatacgctaacgcaagcggcgataacggcagccaataagagccatatgccttatagccactcaccgagcggcgtggcgctggaatgtaaagatggccgtattttcaccggcagctatgcggaaaacgccgcctttaaccctacgcttcccccgctgcaaggcgcgctaaacctgctgagtctcaatggctatgactatgcggatattcagcgcgcgattctggcggaaaaaggcgatgcagcattaattcaatgggatgccaccgccgcaacgctgaaagcgttaggttgccataatattgaccgcgtccttctcggctaa

SEQ ID NO: 369794 - DNA, 696 bp, Salmonella enterica
atgatgacatatatctggtggtcgttaccgctgacgctggcggtatttttcgccgcccgccgactggcggcgcattttaaaatgccgttgctgaatccgctgctggtggcaatggtagtcattattccttttctgttgctgaccggtattccctacgagcactacttcaaaggcagcgaagtacttaacgatctgctgcaaccggcggtagtggcactggcctatcccctttatgaacaattgcaccagattcgcgcgcgttggaaatccattattagcatctgttttgtcggcagtctggtagcgatgattaccgggacatccgttgccttgctgatgggcgcaacgcctgaaatcgcggcatcggtactgcctaaatccgtgactacgcctatcgcgatggcggtgggcggcagcatcggcggcatccccgcgatcagcgcggtatgcgtaatttttgtcggtattctgggcgcggtgtttggccacacgctgttaaacgcgatgcacatccgtactaaggccgcacgcgggctggcaatggggaccgcctcacatgcgctcggtactgcgcgctgcgccgagctggattaccaggaaggcgcgtttagctccctggcgctggtgatctgcggcattattacctcgctggtagcgccctttttgtttccgctcattctggcggtaatgcgctaa

SEQ ID NO: 369795 - DNA, 399 bp, Salmonella enterica
atgagtaagtcactgaatattatctggcaatatatacgcgcttttgtattgatttatgcctgtttgtacgcaggcatttttcttgcatcactgcttcctatcactattcccggcagcattatcgggatgttaattctgtttgtattgctggcgctgcaaattctgccggcaaagtgggttaaccccggctgttatgtgctgattcgttatatggcgttgctgtttgtgccgattggcgttggggtcatgcaatattttgacttactgcgcgcgcaattcggcccggtggtggtctcttgcgctatcagtacgctggtcgtttttgtggtcgtaagctggagttcacatctgatacacggtgagcgtaaagtggttgggcagaagggaacgaaaaaatga

SEQ ID NO: 369796 - DNA, 909 bp, Salmonella enterica
atggcgaactgggcgcagaaattgaaattacatcacctgcaaacgctggttgcgctgggcgaacagggcaacctgacgcacgtcgcccggatgatgaatatctcccagccggcgctatcgaagtggctatctcaactcgaagatgagataggcatcacgctttttgagcgccacagtaaaggactacgcccctcggaaggcggtaaattactgctccagcacgcccagcgcctaattaacgatctggagcgttcacagtatgaaatcgcccgtttcaagcagggcggcctggttggcagcctgaagatcggctgttcgcccgtggcgactgactgcgtatcacaggcgattctgagcctgcttaacgaaatgccgacgctgcatctgaatattgaagagaaggtaatgacgccgctgctgcacgatttgcttgccggtcaggtggatgtggtggtagggcgtgtcggcggccgcgccctgcaactgccgcttaattatcaggtactttataccgagccggtctgctttgtggcgcgtccgcaccatccgctggccgcgcgagcgcagatcgcctggagcgatctggcgcactggcggtggatagtctggccaaccggcacccctattcgcatcagtattgataacgccctcgtcgataatggcgtcatgctcccggaaaacaccattgaatcggcgtcaatgaacgtcagcaccaatttgctgcaaagcagcgatatgatctctattctttctttacggctggcgcaacgctatgccagccaggggcaactggcgattttaaacttgccaaaaattgagcaaaaaggcagcgtagggatgttctggcgtaagaatgagacgccgtctttggccctgagtcgctttttgtattttttagcccaggtttaa

SEQ ID NO: 369797 - DNA, 1359 bp, Salmonella enterica
atgactcaacgacgtgatctacaagcccttattgatgccgcgcccgtcggcaaaatgcagtggcgcgttatcatctgctgttttctggtggttatgctcgacggttttgacaccgccgcgattggcttcatcgccccggatattcgtactcactggcagctaagcgccagcgaacttgcgccgctgtttggcgcagggctgctggggcttacggccggcgcgctgctatgcgggccgctggcggatcgttttggccgcaagcgggtcattgagctttgcgtggcgctattcggcgcattgagcctgctttccgctttctcgccggatatagaaaccctggtgttgctgcgcttcttaaccggtctgggactgggcggagcgatgccgaataccatcaccatgacgtcggaataccttcccgctcgtcgacgcggagcgctggtcacgctgatgttctgcggttttaccctggggtcggcgatgggcgggattgtgagcgcgcaactggtgccgctgattggctggcacggaattctggcgctaggcggcatcttgcctttgatgctgtttttcggcctgctgttcgcgctgccggaatctccccgctggcaggtacgccgccaactaccgcaagccgttgtcgcccggacggtcagcgccattaccggcgagcgctatcacgatacgcaattctttctgcatgagacggcagccgtcgccaaaggcagtattcgccagctttttgccgggcgacagcttgtcattaccctgatgttatgggtggtgttctttatgagcctgctcattatctatctgctttccagctggatgccgacgttacttaaccatcgcggtattgatctgcaacaggcgtcgtgggtgactgccgcattccaggttggcggcacgcttggcgcgctgttactcggcgtgttgatggatcggcttaacccgttccgggtactggcggtgagctatgcgctgggcgcggtttgcattgtcatgataggcctgagcgaaaacggcctttggctgatggcgctggcgatttttggtaccggcatcggtattagcggttcacaggtcgggcttaatgctctgacggcgacgctgtaccccacccaaagccgggcgacgggcgtgagctggtcgaacgccattggacgctgcggggcgattgtcggttcgctctccggcggcatgatgatggccctcaatttctctttcgatacgttgttttttgtcattgctattccggcggctatcagcgcggtaatgcttaccctgctgacggtggttgtccgcctttcgatttctgtacctgacgacctgccgcgtgccagcgtcgtaaacgaataa

SEQ ID NO: 369798 - DNA, 1038 bp, Salmonella enterica
atgtatgaaataaatcagaacgtaaaagatagccgtcagcagtattaccagcatatttccgggcagaatctgacgccgctgtgggaatcgttacatcacctggtaccgcagacgccaaacgccaactgcgcgccggcctactggaattatcaggaaattcgtccgctactgatggaaagcggcaatgtcattggcgcgaaagaggcgatccgccgggtgctggtgctggaaaatccggcattgcgcggtcagtcgtcgatcacggcgaccttatacgctggtttacagctgatcctgcccggcgaagtcgcgccgagtcatcgccataaccagtcggcgctgcgttttatcgtcgaaggtaaaggcgcatttaccgcggtggacggcgagcgcacgccaatgcataccggcgattttatcctgacgccgcagtggcgctggcacgatcatggtaatccggggtcagagccggtggtatggctggatggtctggatctgccgttagtcaacctcctgggctgtgggtttgcggaagactatcccgaagatcagcagccggtgacgcgaaaagagggcgattatctgccgcgctatgcagcgaatatgctgccgctgcgccaccagcgcgggaactcgtcgccgattttcaactaccgttacgaccgcagtcgcgaggcgttgcacgatctgacccgtatgggcgatccggatgagtgggaaggctacaagctgcgttacgttaatcccgtcaccggcggttatccgatgccgtcgatgggcgcgttcctgcaactgctgccaaaagtctttgcctcgcgtgtggcgcggagcaccgacagcactatctaccacgtcgttgaaggggcagggcaggtcactatcggcaacgaaacttttcatttttccgcaaaagacatttttgtggcgccgacctggcatgaggtgtcgtttcgcagcagcgaagacacggtgttattcagtttttcggacaagccggttcaggaagccctggggctgttccgcgaagcacgttattaa

SEQ ID NO: 369799 - DNA, 702 bp, Salmonella enterica
atgaccaaatatgtattccagccgcaggctccggtaacagtacccgtggcgggcagtgatgagcagtttccggtacgtcgcgtttactgcgtgggtcgcaactatgccgcccatgcccgtgaaatgggctttgatcccgaccgcgaaccgccgttcttcttttgtaaaccagcggacgctgtcgtcccggtagcggcgggggataccctagaactgccgtatccggcgcagactgataactaccattatgaaattgagctggtggtggcgattggtaaaaaagggagcgatattccgctggaaaaagcccatgaatatgtctggggatacgccaccggtctggacatgacgcgtcgcgatcgtcagatggaaatgcgtcagatgggacgcccgtgggaaatcggcaaagcgttcgatctctccgcgcccattgcgccattacacaaagccgctgaaacgcataatgtggataacgcccctatttggctacaggttaacggcgaagaccatcagcgcagcgatattcgtcacctgatttggtcggtgaatgaaaccatcagctatttgtccggcttttttgaattgcagccaggcgatttgattttcaccggtacgccagagggggtgggcgccgtggtgaaaggggatgtcatcaccgggaacgtagaaggtctgacgccgattgctgtgaaaattgtctga

SEQ ID NO: 369800 - DNA, 645 bp, Salmonella enterica
atgaagctgtacagtttctttaatagttcggcgtcttatcgtgtacgtattgcgctggcgttaaaggggattgattaccagacggtgggcgtcaatattcgtatcggccagcagaatgcgctggcctaccgacggatgaatccggtaggcctggtgccgacgctggtcactgatgacggcgaatcgttggggcaatcgctggccatcgtcgactggctggaccgacattttccgcaaacgccgctgctgccgacgagcgacccggcgcgcagccaggcgctggaaattgtctacgctatcgcctgcgatatacacccaatcaataacatgcgcgtgttgcgctacctgaccgatgagctgaaggttagcgaagaggataaaaaacgctggtacgcccactggatacagcaagggttaagcgcggtagagcagctattgcgtaaaagtcagtccggacgattctgcgtgggcgacgcgccaggacttgcggactgctgcctgattcctcagtgggcgaatgcgctcaggatgggctgcgatttatcaggctatccgcgctgtaaagccgtttatgacgcctgcgtacagctaccggcgtttattgccgccgcgccggaaaatcaacaagataaaatcccggcctga

SEQ ID NO: 369801 - DNA, 1194 bp, Salmonella enterica
atgactcacgtgacaagcgcaattattgtaggtggcggaattggcggcgcggcgaccgcgctgtccctggcgcgccagggaataaaagtcatgctgttggaaaaagcgcacgaaattggcgagattggcgcgggtattcagcttgggccgaacgctttttcggcgctggatagtctcggtgtgggcgatgttgcccgccagcgtgcggtgtttaccgatcacattaccatgatggatgccgtgaatgccgaagaagtggtatgcattgaaaccggacaggcgttccgcgaccattttggcgggccgtatgcggtaattcaccgggtagatattcatgcaacggtatgggaagcggtgctgacgcaccctggcgtggagtatcgtacctcgacccatattgtcgatatccgccagacgccggatgacgttacggtgtttgatgagcagggaaatagctggacggcggatattctcgtgggctgcgacggcgttaaatcggtcgtgcggcaaagtttactcggcgatgcgccgcgcgtaacggggcatgtagtttatcgggcggtgattgattgcgacgatatgccggacgatttacgtattaacgcaccggtgctgtgggcaggcccgcattgtcacctggtccattatccgctccgtggaggtcaacagtacaatctggtggtgacattccacagccgccagcaagaagagtggggcgtgaaagacggcagtaaagaagaggtgctctcttattttgccggcattcatccccgcccgcgccagatgctggataagccgacctcctggcgccgctggtcgaccgccgatcgcgagccggtcgcgaaatggggaaccgagcgtatcactctggtgggcgacgccgcgcatccggtggcgcaatatatggcccagggcgcctgtatggcgctggaagacgccgtcacgctgggcaaagcgctggaacgctgcgacggcgacgcgcagcaggcatttgcgctgtatgagtcggtgcgtattccccgcacggcgcgtatcgtctggtctacccgcgagatgggacgtctctatcacgccgccggggtggagcgtcaggtgcgtaatctgctgtggaaagggaaatcgcaggaggcgttttatcgcggtatcgaatggctgtacggctggaaagaagataactgtcttgagccgcgttga

SEQ ID NO: 369802 - DNA, 939 bp, Salmonella enterica
atgcgtgttttactggcgccgatggaaggcgtgctcgacgcgttagtgcgcgagctgctgaccgaagtgaatgattacgatctctgcatcaccgaatttgtgcgcgtggtggatcagctgctgccggtaaaagtgtttcatcgcatctgcccggagttgcatcacgccagccgcacgccgtccggcacgccggtgcgtattcagcttctgggccagcatccgcagtggctggcggaaaacgccgcgcgggcgacggcgttgggatcgtatggcgtggacctgaactgcggctgtccgtcaaaagtggtgaacggcagcggcggcggcgcgacattgctcaaagatcccgaactcatctatcagggcgcgaaagcgatgcgggccgcggtaccgtcgcatctgccggtgacggtaaaagtgcgtctcggctgggatagcggcgatagaaaatttgaaatcgccgatgcggtgcagcaggccggcgccagtgaactggtggtgcatggtcgtaccaaagcgcagggctaccgcgccgagcatatcgactggcaggcgatcggcgaaatacgccagcgtttgactattccggttatcgcgaatggcgaaatctgggactggcagagcgcgcaggcatgtatggcgaccagcggctgcgatgcggtgatgattggccgtggggcgttaaatattcctaacctgagtcgggtggtgaagtataacgaaccgcgtatgccgtggccggaagtggtgacgttattacaaaaatatacccgactggaaaagcagggcgataccggtttataccatgtcgcgcgtattaaacagtggttgggatatttacgtaaggaatatattgaggcgatagaactttttcagtcgattcgggcgttaaaccgttcgtccgagattgcgcgggcgattcaggctattaaaatctaa

SEQ ID NO: 369803 - DNA, 1437 bp, Salmonella enterica
atgaatcgtaattctttccttgccgcgacagcgagcttaccgctttttattttgctggcgggttgcgcccccatgcacgatacccgccagtcgctgacccagcagacgccctcttctcatgttgattccagcctgccggcggcattgaaaaacggttggccggatagccagtggtggaaggcgtatcacgatgcgcagcttgacgcgctgatcgataatgccatacagcattcgccggatatgcaggtggctgaacagcgtattcaactggcggaagcgcaggcgaaagcggttgaggcgcaggacggcccgcagctcgacttttctgccgacattgagcgccagcgaatgtccgcggaagggctgatggggccattcgcgattaccgaccccgcggcgggaacgaccgggccgtggtataccaacggtacattcggcctgacggcgggctgggatctggatttatgggggaaaaaccgcgctgaagttaccgcgcggatcggggcggtcaaagcgcgcgaagcggagcaggagcagacccgacaattgctggcaagcggcgtggcgcgactctactgggagtggcaaacacaggcagcgctgaaaaatgtgctgatgcaaatcgagcatgagcagcaaaacgtggtggcggtaaaccgggagttgtatcaacacggtattacttcttctgttgaaggggtcgagaccgatatcgacgccagcaaaacccagcagcagttgaatgacgttaacggtaaaatgaaggttattgaagcgcggctcagcgcgttaaccaatacgcaatcggcggcgctcaagctgcgtcaggtgagtctccccgccgttgaaagccagttaccgtcgcaactggggtattcgttgctggcgcgccgggcggatctacaggccgcgcactggtacattgaatcctcgttgagcagcattgacgccgcgaaggccgcgttttatcccgatatcaatctgatggcttttttacagcaggatgcgttacatctgagcgatctgttccgccattccgcacagcaatatggcattaccggcgggctgacgctgccgattttcgacagcggcaggctgaatgccaacctcgatatcgccaaagcgcaaagcaacctttctatcgccaactacaacaaagcggtggtagatgcggttaatgatgtggcgcgcgccgccagtcaggtagagacgctggcgcagaaaaatcagcatcagcagcagattgagcatgacgcgcagcgtgtggtcggtctggcgcaagcgcgctttaatgccggcattattgcgggttcccgcgtgagcgaggccaaaatcccggcactgcgcgagcagtgtaacggcttgctgttgcagggccagtggctggatgcctctattcagcttaccagcgcgctgggcggcggttatcattcctga

SEQ ID NO: 369804 - DNA, 762 bp, Salmonella enterica
atgaccaaagtcgcaattgtaacggcatcagattcgggaattggcaaagcgtgtgcgttgttattagcacaaaacggttttgatattggtatcacctggcattccgatgaacgcggcgcgcaggagacggcgaaaaaagcggcgcagtttggtgtgcgggcagagaccattcatcttgacctgagccagttacccgagggcgcgcaggtcattgaacatcttatccagcgcctggggcgcgttgacgtgctggtcaataatgccggggcgatgaccaaatccgcgtttattgatatgccgtttacgcagtggcggcaaatttttaccgtggatgtcgatggcgcgtttctctgcgcgcagatcgccgcccggcatatgattaaacaaggagagggagggcgcattatcaacatcacctccgtccatgagcatacgccgcttccgcaagccagcgcctataccgcggcgaaacatgcgttggggggattgactaaatccatggcgctggaactgattgagcatcatattttggtcaacgccgtcgcgccaggcgctatcgccacgccgatgaatgatatggatgacagcgacattgagccgggatcggaaccctcgatccctatcgcccgaccgggttctacgcatgaaatagccagcctcgtcgcctggctgtgttcggaaggagcaagctataccaccggtcagtcgctgattgtcgacggcgggtttatgctggcgaatccgcaattcaacgccaaataa

SEQ ID NO: 369805 - DNA, 570 bp, Salmonella enterica
atggatatcaacacgcttattacgcattatggctatgcggcgctggttatcggcagtatggccgaaggtgaaaccgttaccctgttggggggcgtcgcggcgcatcagggattactcaagtttccgctggtggcggcggccgtcgcgctgggagggatgatgggcgatcagctactttacctgttaggacgatgctatggcgggaagatcctgcgtcgtttcccgcgttatcatacgaagattcgtcgcgcgcagaaaatgatccaacgccatccgtatctgtttgtgatcggcacgcgttttatgtacggcttccgggtggttggcccgctgctgattggcgccagccgcctgccgcctaaaatttttctgccgctgaatattgtaggcgcgctgatctgggcgctgctgtttaccacgctgggatatcttggcggcgaggtgatcgcgccatggctgcacgacctcgatcagcatctcaggcacggggtctggctgattctggccatcgtcctggtggtgggcgtgcgctggtggctgaaaagacgcggcaaagcggaggcccgttaa

SEQ ID NO: 369806 - DNA, 588 bp, Salmonella enterica
atgaaccatgtatgggggcttttttcccatcccgatcgggaaatgcaggtgatcaaaagcgaaaacgaaaccgtttcgcatcactatacgcaccatgttttgctgatggcggcgattcccgtcgtctgcgcctttatcggcacgacgcaaatcggctggaattttggcgacggcaacgtgttacaactctcgctgtttaccgcttttgcgctggcggtcttgttctacggcgtgatgctggcgggcgtcgcggtgatgggacgcgtcatctggtggatggcgcgaaactatccgcaacggccatcgcttgcgcgctgtatggtttttgccggctatgtcgcgacgccgctgtttttaagtggtctggtggcgctctatcccctggtatggctatgcgcactggtcggcgctgtcgcgctcttttacaccggctatttgctgtatttgggtattccgactttccttaacattaatagagaggaaggattaagcttctccagttcgacgctcgctatcggcgtactggtcctggaggtgctactggcgatcaccgtgatcctgtggggatacggctaccgcctgttctga

SEQ ID NO: 369807 - DNA, 909 bp, Salmonella enterica
atgttggccgttccttttgccccgcaggctgtggcgaaaacggcagcgacaaccgcggcgtctcaacctgagattgcctccggtagcgcaatgattgttgatctcaacaccaataaagtgatctattcgaaccacccggatctggtgcgtccgattgcctcgataaccaaattaatgacagcgatggtcgtgctcgacgcgcgattgccgctggatgaaatactgaaggtcgatatcagccagacgccggaaatgaaaggggtttactcccgcgtgcgcctgaacagcgaaattagccgcaaaaatatgttgctgctggcgttgatgtcatccgaaaaccgtgcggcggcaagcctggcgcactattatcctggcggttataacgcgtttattaaagcgatgaatgcgaaggcgaaagcgctgggcatgacgcatacccgcttcgttgagccgacggggctgtcgattcataacgtctcgaccgcgcgggatttaacaaaattgctgattgccacgaagcaatacccgctgattggccagctaagcaccacgcgcgaagacatggcgacattctcgcatccggcgtatacgctgccgtttcgcaataccaaccatttggtctaccgtgataactggaatatccagttaacgaaaaccggctttactaatgcggcggggcattgcctggtgatgcgtaccgtgatcaataacaaaccggtcgcgctggtggtcatggacgcgttcggcaaatatactcactttgcggacgccagtcgcctgcgtacatggattgaaaccggtaaagtcatgcccgttccggctgccgcgctgagctataaaaagcaaaaagccgcgcaaatggcggcagccagcgccagcgccggagcgcaaaccgcacagaacgattaa

SEQ ID NO: 369808 - DNA, 1731 bp, Salmonella enterica
atgtcttccataacaatgactgataataaaacgttcctgaatgagctggcccgcctggtaggccattctcacctgctgacagaccccgccaaaaccgcccgctatcgcaagggtttccgttccggtcagggcgacgcgctggccgttgttttcccgggttcgttactggaactgtggcgcgtgctcaacgcctgcgttaacgctgacaaaattattctgatgcaggccgccaacaccggtctgacggaaggctccacgccgaacggcaacgactacgatcgcgatattgtgattatcagcacccagcgactggataagctgcacttactggataacggccaacaggttctggcctggcccggtacgacgctctatgcgctggaaaaagcgcttaaaccgctgggccgtgaaccgcactcggtgattggttcgtcgtgcatcggcgcgtcggtcatcggcggtatctgtaataactccggcggctcgctggtgcagcgcggcccggcctataccgagatgtcgctttttgcccgtattgacgaccaaggcaaactgcaactggtcaatcatctgggtatcgatcttgggcatacgccggagcagatcctgagcaagctggatgacgaacggattaaagatgaggatgtgcgccacgatggtcgtcatgcgcacgatcacgactacgtgacgcgggtacgagatatcaacgccgatacgcccgcccgctataacgccgacccggaccgtttgtttgaatcttccggctgcgccggaaaactggcggtttttgccgttcgccttgatacctttgcagcggaaaaaaatcagcaggttttttatatcggcaccaatcagcccgcggtactgactgaaatccgtcggcatattctggcgaacttcgacaatctgccagtggcgggagaatatatgcatcgcgatatctacgatattgcggagcagtacggtaaagatacctttctgatgatcgataaactcggcaccgacaagatgccattctttttcacgctaaaaggccgaaccgatgcgatgctggaaaaagtaaaatttttccgtccgcatttcaccgaccgcgcgatgcagaaattcggccatctgtttcccagccatctgccgccgcgaatgaaaaactggcgcgataaatatgagcatcatctgctgttaaaaatggcgggagacggcgtcgcagaagcgcaacgctggctgaatgaattttttaaatccgctgagggcggtttcttcacctgtacgccggaagaaggcagcaaagccttcctgcaccgcttcgccgctgctggcgcggcgattcgttatcaggccgtacacgctgatgaagtggaagatatcctggcgctggatatcgctctgcgccgcaacgataccgactggttcgagcatctgccgccggaaatcgacagccaactggtacataaactctattacggccactttatgtgccacgtttttcatcaggactatatcgtgaagaaaggcgtcgacgtccacgcgctgaaagcgcaaatgctggagctgttgcaggcgcggggggcacaatacccggcggagcacaacgttggacatctgtataaagcgccggaaacgctgacgcgtttttatcggcaaaatgacccaaccaacagtatgaaccccggtatcggcaaaacgagtaagcggaaattctggcaggaaaatacgcccgacgaaacgcattaa

SEQ ID NO: 369809 - DNA, 2298 bp, Salmonella enterica
atgaaatggttatgttcagtaggtgttgctgtgagtctggcgatgcagccagcattggcggaaaacctgtttggcaatcacccgctgacgcccgaagcgcgcgacgcgttcgtcacggatttactcaagaaaatgactgtcgatgaaaaaattggtcagttacgtctgattagcgtcggccctgataacccgaaagaagcgattcgcgagatgatcaaagacgggcaggtaggggcgattttcaataccgtcacccgccaggatatccgtcaaatgcaggatcaggtgatggcattgagccgcctgaaaattcctctcttttttgcctatgacgtggtacacggccagcgaaccgtcttcccgataagcctcggtctggcttcttcttttaatctggatgcggtaagaaccgtaggacgcgtatcggcgtatgaagcggcggacgacggtctgaatatgacctgggcgccgatggtggatgtctcccgcgatccgcgttggggacgcgcctccgaaggctttggcgaagatacatatttaacctctatcatgggcgaaaccatggtgaaagcgatgcagggcaaaagcccggcggaccgctattcggtgatgaccagcgtgaaacattttgccgcctatggcgccgttgaaggcggtaaagaatacaacaccgtggatatgagttcccagcgtctgtttaatgactacatgccgccgtacaaagcggggctggatgcggggagcggcgcggtgatggtggcgctgaactcgctgaacggcacgccagcgacgtcagattcctggctattgaaagatgtcctgcgcgatgagtggggctttaagggaattaccgtttccgaccacggcgctattaaagaactgattaaacacggtaccgcggccgacccggaagatgcggtgcgcgtggcgctaaaggcaggggtggatatgagcatggcggatgagtattacagcaaatatctgccgggtctgattaagtcgggcaaagtgacgatggcggaactggacgacgcgacgcgccatgtgctcaacgtaaaatatgacatgggattgtttaacgacccctatagccatctgggaccgaaagagagcgacccggtggacaccaatgccgaaagccgcctgcatcgtaaagaggcacgggaagtggcgcgggaaagtgtggtactgctgaaaaaccggctggaaacgctgccgctgaaaaaatcgggcaccattgccgttgttgggccgctggccgacagtcaacgtgatgtaatgggaagctggtctgctgctggggtcgcgaatcagtcagtgacggtgctggcgggtattcaaaatgccgtcgacgacggggcgaagatcctctatgccaaaggggcgaatatcactaacgataaagatatcgtcgatttcttaaacctgtatgaagaggcggtgaaaatcgatccgcgctcaccgcaggcgatgattgatgaggcggtgcaggcggcgaaacaggccgatgtagtggtcgcagtggtaggcgagtcgcaggggatggcgcatgaagcctccagtcgtaccaatatcaccattccgcagagtcagcgcgacttaatcaccgctctgaaagccaccggtaagccgctggtactggtattaatgaacggcagaccgctggcgctggtaaaagaagatcaacaggccgatgcgattctggagacctggtttgccgggacggaaggcggcaacgccattgccgatgtgctgtttggcgattacaacccgtcaggcaaactgccgatctccttcccgcgttcggtgggacaaattccggtctattacagccatctcaatacgggacgcccgtataatcctgaaaagccaaacaaatacacctcacgctattttgacgaagcgaatggcccgctctatccgtttggttacggtctgagctacaccacatttacggtgtctgacgtcacgctctcctcaccgacaatgcaacgcgacggcaaagtcacggccagcgtagaggtcacgaacaccggtaaacgcgaaggggccacggtcatccagatgtacttacaggatgtcacggcgtcgatgagccgcccggtgaagcaattaaaaggctttgaaaaaatcaccctcaagcccggcgaacgtaaaaccgtgagtttcccgattgatatcgaggcgttgaagttctggaatcagcagatgaaatatgacgcggaacccggcaagttcaacgtctttatcggcgtggattccgctcgcgttaaacaaggatcgttcgagctactgtaa

SEQ ID NO: 369810 - DNA, 918 bp, Salmonella enterica
atgacgatctcaaagctatgggtaagttcgctggcgttgctggcgacggtgagtttacctctacaggcggcatcgcccgtgacggtcgggtcaaagattgataccgaaggcgcactgctcggcaacatgattttgcaggtactggaaagccacggcgttaaaacggtcaataaaattcagctcgggacgacgccagtcgttcgtggcgcgattaccgccggagagctggatatctatccggaatacaccggtaacggggcgttcttttttaaagatgaaaacgatccggcatggaaaaatgcaaagcaaggctttgagaaagtcaaaaaactggatgcggagcagaataagctggtctggttgacgcctgcgccggcaaataacacctggaccatcgcggtacgccaggacatcgcggaaaaaaataaactctcctcgcttgccgatctcagccgttatctgaaagagggcggcacttttaaactggcggcgtctgcggaatttatcgaacgggcggatgcgctgccggcatttgaaaaagcctatgattttaccttgaatcagaaccagctcttgtcgctggcgggcggcgatacggcggtcacgatcaaagccgccgcgcaacaaacatccggcgttaacgccgcgatggcgtatggcaccgacggccctgtcgccgcgctgggtctgcaaaccctgagcgacccgaaaggcgtccagcctatctatgcgcccgcgccggtagtgcgtgaatcggtgttacaggcctatccgcagatagccgactggctgcagcccgttttcgccagccttgatgagaaaacgctgcaacagttgaacgccagaatcgccgtagaagggctggatgcgaaaaaagtcgccgcagattacctccgacaaaaagggtgggtgaagtaa

SEQ ID NO: 369811 - DNA, 1170 bp, Salmonella enterica
gtgagtgatgctgccaaaaaaatcacggttaatcgtgtgctgttgctgttggttgttctgaccctgcttgctgtcgcgctgcctttcattaattacgccccgaatcgtctggtgagcggcgaggggcgccagttatgggagatctggccggcgaccatctggatgctgactggcgcgggatgcgcgctgtttacgttgtgctttgtacccggtaaacgcggtagcgtactgacgctgatgatggcgcagacgctttttattgtcatgctgtggggagtcggcagggtggcgacccaattggcgcaggagggcagcccgctggcgcgtaccagtctgggaagtggattgtggctgggcctcggtctgatgctgctggcctgtagcgatgcgatccgccgtattaccactgggccgctgtggcgctggttgctgcacgcgcaaattgtcattgtcccgctggtgctgctgttttcaggcacgttcgacaacctctcgcttctgaaagagtataccaaccgccaggatgttttcgatgccgcgctggtgcaacatttgatgttactggcgggcacggtgctgccggcgttggcgatcggactaccgttgggcgtctggtgttatttttccgcctcacgccaggggccggtgtttaccgtgctgaatgtgatccagactatcccttccgtcgcgctgtttggcctgctgattgcgccgttggccgggctggtgaaacagtttccgtggcttgccgaattcggcgtcgcgggaaccggcatgacgcctgcactgatagcgctggtgctctatgcgttattgccgctggtgcgcggcgtggtcgccgggctcaatcaggtgccgcgcgatgtgctggagagcgcaagagcaatgggaatgagtagcggccagcgcttcaggcatgtgcaactgccgctggcgctgccggtctttttacgtagcctgcgggtagtaatggttcagacagtgggaatggccgtcgtcgccgcgctgattggcgcgggaggtttcggcgcgctggtgtttcaggggctattgagcagcgccattgatttagtcctgttgggcgtcattccggtgattgcgctggcggtagtgatcgacgcgctgtttgatttatggatcgcgtttttgaagggagcaaccgatgattga

SEQ ID NO: 369812 - DNA, 948 bp, Salmonella enterica
atgattgaatttaaccatgtcagtaaaaccttcggcgatcaacaggctgttagcgacctcaatttgcactttagcgaaggcagcttttcggtgttaattggcacctccggttcgggaaaatcgaccactctgaagatgattaaccggctggtagagcatgatagcggaacgatccgttttgccggggaagagatccgcagcctgccggtgcttgaactgcgccgtcgcatgggctatgccattcagtctatcggtctttttccccactggacggtggcgcaaaatatcgccaccgtaccgcaactacaaaagtggtcgcgtgcgcggattaacgatcgtattgatgaactgatggcattattgggtctggaaagcgcgctgcgcgatcgttatccgcatcagctttccggcgggcaacagcagcgggtcggcgttgcgcgggcgctggctgccgatccgcaggtattgctgatggacgagcctttcggcgcgcttgatccggtaacgcgcggcgcattgcagcaggagatgacccgcattcatcagctactggggcgcaccatcgtactggtgacgcacgacatcgacgaggcgctacgcctcgccgaccatctggtgctgatggacgggggcaatgttatccaacagggatcgccactttctatgctgacctcgccggaaaatgatttcgtgcaggcgttttttggccgcagcgagctgggcgtaaggctgctttcgttacgtagcgtaggcgattatgtacgtcggcatgaacagctcagcggcgacgcgctggtggaagagatgacgctacgcgatgcgctatcgatgtttgtcgcccgtcggtgcgacgtcctgccggtggcgaatcagcagggcgagccctgcggtacgctccatttccgcgatctactttcggagacgtccccccgtgaaacgactgtgtga

SEQ ID NO: 369813 - DNA, 732 bp, Salmonella enterica
gtgaaacgactgtgtgatccgcttctctggcttattgttctgttcttgcttctgctgtttggattgccttatagccagccgttcttcgccgcgctgtttcccgatttaccgcgcccggtctaccaacaggagagttttgccgccctcgcgctcgcccatttctggttggtgggcatctcaagtctgtttgccgtcgtggtgggcgtcggcgcagggattgcggtcacgcgagaaagtgggaaggagtttcgtcccctggtggagactatcgccgccgtcgggcagacctttcccccggtcgcggtactggcgatcgcggtacccgtcatgggttttggtcagcaaccagccattatcgccttgatcctgtatggagtgttgcccatcctgcaggcgaccctggccgggctgggcgcggtgcctgccagcgtgatgagcgttgccagcggtatgggaatgagccgtcgccaacagttgtatcaggttgaactgccgctggccgcgccggtgattctggcgggcatccgaacctcggtgattatcaatattggtacggcgaccatcgcttcaacagtgggggccagtacgttaggcacgccgatcattatcgggcttagcggctttaatacggcctatgttatccagggggcgctgctggtggcgctggcggcgatcattatcgatcgcctgtttgaaaggctgacgcgcgcgcttacccggcacgcaaaataa

SEQ ID NO: 369814 - DNA, 732 bp, Salmonella enterica
atggcgctttacacaattggtgaagtggctttgctttgtgatatcaatcctgtcacgttgcgcgcgtggcagagacgttatggacttttaaaaccacagcgaacggatggcggtcatcgtctgtttaacgatgccgatatcgacagaatccgcgaaatcaagcgctggataaataacggcgtccaggtcagcaaagtcaaagtgctgctcagtagcgacagtagcgaacaacctaacggctggcgcgaacagcaggagatcctgctgcactacctgcaaagcagtaatctgcacagtttacggttatgggtcaaagaacgctgtcaggattatccagcccaaacattgaccactaacctgttcgtcccgctgcggcgacgattacagtgccaacaacctgcccttcaggcgctgctcggcattcttgacggtatcctgatcaactatattgcgctctgcctggcgtctgcgcgtaagaaacagggaaaagatgcgttggtgatcggctggaatatccatgataccacccgcctgtggctggaaggttgggtcgccagccaacagggatggcgaatcgacgtgctggcgcattcgcttagccagttccgcccggaactgtttgacggcaagacgttactggtatggtgcggagaaaaccagacgctggcgcagcagcagcaactcctggcatggcgcgcccagggacgcgacattcatccccttggcgtttaa

SEQ ID NO: 369815 - DNA, 1686 bp, Salmonella enterica
atgtacgagtttaatctggtgttgctgctgcttcagcagatgtgcgtgtttctggtcattgcgtggctaatgagtaaaacgcgtctgttcatcccgcttatgcaggtcacggttcgtctgccgcacaagcttctgtgttacgtcacgttttctatcttctgcatcatgggcacttattttgggctgcatatcgaagattcgattgccaatacccgcgcaattggcgcggtgatgggcggcctactcggcgggccggtcgtcggcgggctggtcggtctgaccggtgggttacatcggtattctatgggcggcatgacggcgctgagctgtatgatttccaccatcgtcgaagggctgctgggcgggttggtacacagcgttctcatacgtcgcggacgcccggacaaagtgtttagcccgctgacggcgggagcaattacgtgtattgccgaactggtgcagatgctgatcattttactgatagccaggccgtttgacgatgccttgcatctggtcagtaatattgccgcgccgatgatggtgacgaataccgttggcgccgcgctgttcatgcgtattttgctcgataagcgcgccatgttcgaaaaatatacttcggcattttctgctaccgcgctgaaggtcgccgcgtcaacggaggggattctgcgtcagggatttaacgaagtgaacagtatgaaggtggcgcaggtgttatatcaggagctggatattggcgccgtcgccatcaccgatcgcgaaaaactgctggcttttactggtattggcgacgatcaccatctaccgggcaaacccatttcatcaggttatacgctgaaagcaattgaaaccggagaggtggtttatgccgatggcaacgaagtgccgtatcgctgttcgctacacccgcagtgtaaactcggctcgacgctggtgatcccgctgcgtggcgaaaatcagcgagtcatgggcaccattaaattgtacgaagcgaaaaaccggctgtttagctcaattaaccgcaccctgggagagggtattgcgcagcttttatccgcgcagatcctggccgggcagtatgaacggcagaaggcgttgctgacgcagtcagagatcaagctgttgcacgcgcaggtgaacccgcattttctgtttaacgcgctcaataccattaaagcggtgattcgccgcgacagcgaacaggccagccaactggtgcagtacttgtcgaccttttttcgcaaaaatttaaaacgcccgtcggaaatcgtcacgctggcggatgaaattgaacacgtaaacgcttatctgcaaattgaaaaagcgcgttttcagtcgcgtctgcaggtacagcttgatgttccatcgacgctttcacgtcagaaattgcctgcgtttacattacagccgattgttgagaacgccattaaacatggcacgtcgcaactgcttgataccggcaacgtcgctattcgcgcccggcgcgaagggcagcatttgatgttagatattgaggataatgcgggactgtatcagccttccgccggcagtagcgggctggggatgagtctggttgataaacgtctgcgcgaacactttggcgatgattatggtattagcgtggcctgcgagccggactgttttacccgaattacattacgacttccactggaggaggacgcatga

SEQ ID NO: 369816 - DNA, 720 bp, Salmonella enterica
atgattaaagtgctgattgtggatgatgagccgttagcgcgggaaaatctgcggattttgctccaggggcaggatgacattgagattgtgggagagtgcgcgaacgcggtagaagcgattggcgcggtacataagttgcgacctgatgtgctgtttctggatattcagatgccgcgtatcagtggactggagatggtaggaatgcttgatccggaacaccgcccgtatatcgtttttttaaccgcgtttgacgaatacgccatcaaagcctttgaagaacacgcttttgattatctgctcaagccgatagaggagaaacggctggaaaaaacgttacatcgtctgcgtcaggagcgcagtaaacaggatgtttcgttgttgccggaaaaccagcaggcgcttaaattcattccctgtaccggacacagccggatctatttgttgcaaatggatgatgtcgcctttgtcagtagccgtatgagcggcgtttatgtgaccagcagtgaagggaaagaggggtttaccgagctgacgctgcgcacgctggaaagccggacgccgctactgcgttgtcatcgtcagtttctggtgaatatggcccatttgcaggaaattcggctggaggataatgggcaggcagagctgattttacgcaacggcctgacggtgccggtaagccgtcgctatctgaaaagtttaaaagaggcgattggcctgtaa

SEQ ID NO: 369817 - DNA, 468 bp, Salmonella enterica
atgctgagtaacgatattctgcgtagcgtgcgctacattttaaaagctaataataccgatctggcgcgtatcctggcgctgggtaacgttgatgctacgccggagcagatagcaatctggttgcgcaaagaagaggaagaggggtttcagcgttgcccggatatcgtgttgtcctcatttctcaatggcctcatttatgaaaaacgcggcaaagatgaggcggcgcctgcattgacggcggaacgtcgtatcaacaacaatattgtgctgaaaaagctgcgtattgccttttcgctaaaaacagatgatatcctggcgatacttaccggtcagttgtttcgtgtctcaatgtcagagatcaccgcgatgatgcgcgcgccggaccataagaacttccgcgaatgcggcgatcagtttatgcgttattttctgcgcggtctggcggcccgtgaacacgcggcgaagtaa

SEQ ID NO: 369818 - DNA, 531 bp, Salmonella enterica
atgcaggttctacgtcttatggcactgccactattcgcgctctctctatcggttagcataactggctgcgatcagaaaaacgatactctccagggaaagcaaaataacatgacagcgtttatcaagaagatagccgctagcaaagagtcagaggaaacacaacgctatgtaggtaatctcaacggtattgaaatcaagttaacctattactacaaaggggatatcgttttacgtcaaatatctgaacataaactactttataagaccctgaaagccaataataaagaagaagcacaaaaaatgctgagtcaagtcggcgaagcttatcagggtatgccgggtttgactgaacgaatcgactattatgatagctatgctacggaatatgtggatattgattttacccaggcaaaaataagcgacctctgtaaattgccaggatcatcaattgacaactgttccgcgtactatctgtcaatgattcgctcgcagaaactgttggaagagagcgggtatcatagaatcaattag

SEQ ID NO: 369819 - DNA, 459 bp, Salmonella enterica
atgaaaatttctggcaagttattgtccacggctttggcttccgtactggtgttctctcttgctggctgtggcgataaagaagaatcaaagacctttaacgcaaacctggcggggacagaaatttcaattacttacacctataaaggtgacaaaatcattaagcagacgtctgaaagtaaaatcagctatgccactgtaggcgctaaaacgaaagaagatgccgccaaaattctcgatccgctgagcgcgaaatataaaaatatcgccggagtggaagaaaaattaacctatgaagatacctatgcccaggaaaacgtctctgtggatatggaaaaagtggactttaaagcgttacagcaaatctcagggacgatggtgtccggcgataccagcaaaggtatcagcatgaaacaaacccagacgctgctggaagctgctggttttaaagaagcgaaataa

SEQ ID NO: 369820 - DNA, 2034 bp, Salmonella enterica
atgactcaagtcgcgaagaaaattctggtaacgtgcgcgctgccgtacgccaacggctctatccacctcggccatatgctggagcacatccaggctgatgtctgggtccgttaccagcgaatgcgcggccatgaggttaacttcatctgtgccgatgacgctcatggcacgccgatcatgctgaaagcgcagcagcttggtattacgccggagcaaatgatcggtgaaatgagccaggagcaccagaccgatttcgccggttttaatattagctacgacaactaccactcaacgcacagcgacgagaatcgcgagctgtccgagctgatttatacgcgcctgaaagagaacggttttattaagaaccgcactatctctcaactctacgatccggaaaaaggcatgttcctgccggaccgatttgtgaaaggcacctgcccgaaatgtaaatccgcggaccagtacggcgataactgtgaagtctgcggcgcaacttacagcccgaccgaacttatcgagccgaaatccgtggtgtccggcgcgacgccggtaatgcgtgactccgagcactttttctttgatctgccgtcattcagcgaaatgctgcaggcgtggacccgcagcggcgcgctgcaggagcaggtggcgaacaaaatgcaggagtggtttgaatccggcctgcaacagtgggacatttcccgcgacgcgccgtattttggtttcgaaatcccgaacgcgccgggcaaatatttctacgtctggctggacgcgccgattggctatatgggctccttcaaaaatctgtgcgataagcgcggtgacacgaccagttttgatgagtactggaaaaaagactccgacgccgagctgtatcactttatcggcaaagacatcgtctatttccacagcctgttctggcctgccatgctggaaggcagccacttccgtaagccgaccaacctgttcgttcacggttacgtgacggtgaacggcgcgaagatgtctaagtctcgcggcacctttattaaggccagcacctggctgaaacactttgacgccgacagcctgcgctactactacaccgcgaagctttcttcacgcattgatgacatcgacctgaacctggaagactttgtccagcgcgtcaatgccgatatcgtcaataaagtagtcaacctggcatcccgtaacgccggttttatcaataagcgtttcgacggcgtgctggcggctgaactggccgatccgcaattgtacaaaacctttactgacgccgctgcggtgattggcgaagcatgggaaagccgtgaattcggcaaagctatccgtgagattatggcgctggccgacgtcgctaaccgttatgttgacgagcaagcgccgtgggtggtggctaaacaggaaggccgcgacgctgacctgcaggccatttgctcgatgggcatcaacctgttccgcgtgctgatgacgtatctgaaaccggtactgccgacgctttctgaacgcgttgaagccttcctgaacagcgaactgaactgggatgccatcgaacagccgctgctcagtcacaaggtcaacacctttaaggcgctctacaatcgcatcgacatgaagcaagttgaagcgctggttgaagcgtctaaagaagaggtgaaagccgcagccgcaccggttaccggcccgttagccgacttcccgattcaggaaaccatcacctttgacgatttcgccaaaattgacctgcgcgtagcattgattgaaaacgctgagttcgtggaaggctccgacaaattgctgcgtctgacgctggatctgggcggcgagaagcgtaacgtcttctccggcattcgttccgcctacccggacccgcaggcgctgatcggccgccagacggtaatggtcgccaacctcgcgccgcgcaaaatgcgctttggcgtctccgagggaatggtgatggccgcaggccctggcgggaaagatatcttcctgttaagccctgatgacggcgcgaagcctggccaacaggtgaaataa

SEQ ID NO: 369821 - DNA, 1110 bp, Salmonella enterica
atgaacgaacaatcccaggccaaatcaccagataccctgcgagcgatggtcgccgggacgctggcgaattttcagcacccaaccctgaagcataacctcaccacgcttaaggcgttgcaccacgtcgcctggatggatgatacgctgcacgttgagctggtcatgccgttcgtctggaacagcgcgtttgaggtattaaaagagcaatgcagcgccgatctgttacgtattacgggcgcaaaagcgatcgactggaaactgtcgtacaacattgcgacgctgaaacgcgtcaaaaatcagcctggcattaatggcgtgaaaaacatcattgccgtgagctccggtaaaggcggggtggggaaatcgtccacggcggtaaacctggcgctggcgttagcggctgaaggcgcaaaggtcggggttctcgatgccgatatttacggtccgtcgatcccaaccatgcttggcgcagaagatcagcgcccgacatcgccagacggtacgcatatggcgccgattatgtctcacggcctggcgaccaactcgatcggctatctggtgactgacgataacgcgatggtatggcgcggcccaatggccagtaaggcgctgatgcagatgttgcaggagacgctgtggccggatctggattatctggtactggatatgccgccgggaaccggggatattcagctaacgctggcgcagaacattcctgttaccggcgcggtggtggtgactacgccgcaggatatcgcgctgatcgacgccaaaaaaggtatcgtgatgttcgagaaggtggaagtgccggtgctcggcattgtggaaaatatgagtatgcatatttgtagcaactgcggccatcacgaaccgatcttcggcacgggcggcgcgcagaagctggcggaaaaataccatactcagcttctgggtcagatgccgctgcatattagtctgcgcgaagatctcgatcgtggtacgccgacggtggttagccgtccggagagcgaatttaccgcgatctatcgcgaactggccgatcgcgttgcggcacagctttactggcagggtgaagtgattccgggtgaaatcgccttccgcgcggtgtaa

SEQ ID NO: 369822 - DNA, 282 bp, Salmonella enterica
atgaaaaaatatttgctgatgggaattatagtttcggcttatgggataagcgtacccgtttttgcctccgacaccgcaacattaaccatcagtggaaaagtgaccgcgccaacgtgcagtacagaagtggtaaacgcacagttgcagcagcgttgcggcaacactatccacgtttcaactctgcaaacacccgccgctacgccgatgagaggtgtgacaacgcagctatacacggtgcctggtgatagcacccgacagattgttgttaatcattacgactaa

SEQ ID NO: 369823 - DNA, 534 bp, Salmonella enterica
atgaaacgttcacttattgctgcttctgtattgtctgctgtatttatgagcgctggggtttttgctgctgatgaagatatgggggaattaaaaataaacggagaagtggtgggaacatcctgtactttcgaaggtgcaaatagcgcgactattgaattatcccaggtaggtgttgatagattgactgacttaaaccctggcgatatatatacaggatacactagcccagaagcgattttaaaagtaagatgtacgaatacagctaatccacgaattagttttaaccgttctcaatttgtggataacatgcaaatcaccaaaaataatgctactaataatggtgcgggcttcgctgtttatcttgatggtattcaggtgaaaccggatgaggcggggaattacactctgaattcaagtaagtttgaaaatggtgtatataccctgaacttttctgcccgctatgccgccgttgaaaatactgtaacaccaggttctgttgaatctgtactgacgatgacggtattaactgattaa

SEQ ID NO: 369824 - DNA, 681 bp, Salmonella enterica
atgaaatggatgattgcattatgcctggcttgtgccgctatgcctgcgtggagcggcatttatatatatggtacacgtattatttatccggcgcagaaaaaagatattaccgtacaattaatgaatgacggtaaacgaagttcactcatccaggcgtggattgataacggtgataccagcctgccgccagaaaaattacaggttccatttattatgaccccccctgtaattagagttgcggcaaattcaggtcagcaattaaaaataaagaagctcgctaataatttgcctggcgatcgtgaaagtcttttctacctcaatgtattggatattccaccaaattcagacgagaacaaagataaaaatatcattaaatttgcgctacaaaaccggataaagttgatctatcgcccaccgggggtacagaaagtcgataaagcaacattttcccgcttgcagttgcttcgtgcgccagggagtattagcgtgaaaaataattccgcaaactggatcactattccagaaattaaagcaaaaagtaaagtaaataaagaaaccttattactggctccatggtcatcgcagagtatcaccacaacggtagtcgtaaatagctataccgtgacgctaattgatgattctggtaattatttaaacgagactgtcaaaatagaaaattaa

SEQ ID NO: 369825 - DNA, 2487 bp, Salmonella enterica
atggaaaagttaaacgccatcacgctgtcactttttgcagcattacttatttcacccgcctgggctgaagaagaaacattcgatactaactttatgttcggtgggttgaaaggtgaaaaggtgtctcgttatcagattgatagcaccaaacccatggctggcgtttatgaaatggacgtttatgtcaataaagaatggcgtggaacttatgaggttaatattcaggatgaccccgatagcacctgtatttctccggacctgatcgccagcctgggaattaaatttaccccgcagagtacaacagtagaaaatgaatgtattgcgctgaaaacggtggttcatggaggtagtgtttcttatgacactgccgcttttaacctttatctgagcgtccctcaggcttatgtgctggaatatgaagcgggctatgcgtctccagagacatgggaccgtggaattaacgctttttatacatcgtattatgccagcgaatattacagccattataaaagcggcggtagtgagaaaaatacttacgcaaattttgtcagcggattgaatctgcttggatggcaattacattctaacgctaatttttccaaaagtgaaaattcagctggcaaatggcagagcaatactctgtatctggaacgtgatttcccggcggtactggggacaatgcgtctgggggaacagtacaccagcggggatatgtttgatacggtgcgctttcgcggggtgcgcttctggcgtgatatgcaaatgctgccgcactctaagcaaaatttcgctccggttgtgcgtggcgtggcgcaaagtaacgccctggtgacggttgaacagaatggcttcattgtttatcaaaaagaagttccgcctggcccctttgtatttgaagatcttcagctggcaggggggggagccgatctggacgtgagcgttaaagaggctgacggtactgtttcacggtttattgttccgtattcttccgttcccaatatggtgcagcccggcgtagcaaaatatgatttcgccgccggacgaagcagaattgaaggagcctctcagcaaactgattttctccagggaacctatcagtacggggtcaataacctgctaacgttgtatggcggaacgatgttagccagcgattatcgctcatttacccttggcaccggatggaacacgctgattggcgcggtatctgtcgacggtacgttgtctcatagcaagcaggataatggcgatgtttttgatggggaaagctaccaggttgcctggaataaatatctcccgcaatcggccacccatttttctctggcagcgtatcgctactcatcacgtgattatcgcacttttaacgatcatgtctgggctaataaccgggataactatcgtcgcgatgatgacgatatttatgatattgctgattattatgagaatgactttgggcgtaaaaatactttcactctcaatattaatcagacgttacccgatgggtggggatattttactgccagcgctctgtggcgcgactattgggggcgtagcggcacgggaaaggattatcagttaagctacagtaatacctggcagcggctcagttttacgctatcggcaactcagacgtatgacagcaataaccgtgaagataagcgctttaatatctatttatcgattcccttaacatggggattaaaggagaatgggggaaatcgtgatatccatttatcgaattccaccacctttgacgatcaaggttatgaggcgaataacaccagccttagcggcacgttcggtaatcgcgatcagtttaattatacgactaacctcagccagcagcgacaggaacaccaaacgacattcgggggatcggtaacctggaacgccccgctggcgacagtcggcggcagttacagccagtccaataaataccatcaggtgggcggaaatattcagggagggctggttgcatgggccgatggcgtgcatttagcctctcgccttaatgatactatcgcgattattaacgcgccgtacctggaaggcgcggcggtgcaggggcgtccctatttacgtaccaatgcaaaaggttatgccgtatttgaagcattgacgccataccggcaaaattttatctctcttgatgtctctgagagtgaaagcgatgtcgccctgttgggaaatcgaaaagttacagtgccttatcgcggagccgtagtattggttcattttgaaacagagaccagtaaacctttttatttcctggcgcggcgcgcagatggcgagcctttaacatttggttatgaagtggaagatgacgagggaaataatgtaggactggtaggtcaggggagccgggtatttattcgtactgaaaaggttcccatttcggtaaaaatcgcaacagataaacaacagggtcttttctgtaagatcacttttgataaacagattgatgaaaataacgtttatatttgtcggtaa

SEQ ID NO: 369826 - DNA, 1023 bp, Salmonella enterica
atgaaaagactactatttttattaatgatgatgcagtttacgcagttgggttacgcggcgtgtaatgcgaccttaaccaacacgaaggattatacgattcaatccgacagcttaatgctggggggggaggagtcagccattattacaaatggtttcacagatgccaattgttctaatagtgatgttgtgactaaattagagacatccgatcatattatcggtatgggaccgaatgacagtgttaagttaaagttaaaagttgaatggcagagcagtagtgcgataaatatgcgcaatcaaaacggtgtaattgaagccccctataagataacgatttcagaaataaactcactggaggcggtgactgtgtctgccaggggggggtactcggttacgatagataatataacggtgatgtcgggtgcaaagaatcaatggagcagtagcgattgggtggtatttattttaagatatattggctgttgggggaatagagagtgtgttgcaaacgttatcactgatctgaatgggaaaggcgtttataaagccagtttaacgataaattacaaccgtaaagaaactacctgcgccccccagaatctcaccatcacactggacccggtgcctatgactaaactccgtgctaaaggagaggttagtgagttttctaagcagggtgatattattctggattgcaaaaatcaggtgcggaatgcgatgctgacatcacggcaaatagcggtaaatctacgtagtgatttagtctgggatgagaatgaagcagtcctgaaaccggataacgataatggcgttgggtttatcttaagagattcaaatcggagcctgcttaaaataaacaaaggagtagcgataaatagtattttcaaaacctatgccaaaggcagcgcagtgaattcggtggaagctattcctgtctttgccacatattatgttctcgatcctgcaaaagttaaagcggggccattacaatcgaaagcattaatcgtggtatcttataattaa

SEQ ID NO: 369827 - DNA, 315 bp, Salmonella enterica
atgaaaagtaagttgctgccttgcgcgctgttgcttgcaaccagttttgcatgggccgcccccgcgacaacgggcattgatcaatatgagttaaaaagctttatcgccgacttcacccacttcaagcccggcgataccgttccgcaaatgtaccgcaccgatgagtataatattaaacagtggaaattacgtaatctgcccgcgccagatgccggtactcactggacctatatgggcggcgcgtatgtactgattaacgataccgatggaaaaattatcaaagcctatgatggcgagattttttatcatcgataa

SEQ ID NO: 369828 - DNA, 798 bp, Salmonella enterica
atgcagcctgacctgcactgccgcacgcttgcggcgcatacgttaaaacactttcgcgcgctctccccgcttacgcactgtatgacgaatgacgtcgtacaaacgtttaccgccaatacgttgctggcgctgggcgcttcacccgccatggtgattgatcctgtcgaggccagaccgtttgccgccatcgccaacgccttgctgattaatgtcggaacattaactgcctcacgcgctgacgcgatgcgtgcggcggtagaaagcgcttatgatgccaaaacgccgtggacgcttgatcctgtcgcggtgggcgcgctggaatttcgtcggcgattttgcctggatctcttgtccctgcgcccggcggcaatacgcggcaacgcctcggaaatcctggcgttatccggcatggcgctgggcggacgtggcgtagataccaccgaggcggcgttggccgcactgcctgcggcgcaggcgctggcgcgtcagatagactgcatcgttgtggttaccggagagatagattacgtcactaatggtcagcgcacgctgagcattcccggcggcgatccgttaatgactcgcattgtaggcaccggctgcgcgttgtcggcggtcgtcgccgccagttgcgcgttaccgggcgccgcgctggacaatgtcgcgtcggcctgctgctggatgaaactggctggacaggccgcggcagagcgtagcgaaggacctggtagcttcatcccggcttttcttgatgcgctctatcatctggatgtggaggcggccaatgcaacgaattaa

SEQ ID NO: 369829 - DNA, 801 bp, Salmonella enterica
atgcaacgaattaacgcgctgacgattgccggcaccgatcccagcggcggggccggtatccaggcggatctcaagaccttttccgcgctgggcgcatatggctgttcggtcatcaccgcgctggtggcgcaaaatacctgtggcgtacagtcggtgtaccggatagagccggactttgtcgccgctcaacttgattccgtgttcagcgatgtgcgcattgataccacaaaaatcggcatgctggcggaaaccgatattgtcgaggccgtggcggagcgactacagcgtcatcatgtacgtaatgtggtgctggatacggtgatgctggcgaaaagcggcgatccgctgctctcgccctctgcgatagaaacattacgcgtccggctgttgccacaggtatcgctgattacgcctaatttgccggaagccgcagcgttgctggatgcgccccatgcacgtacggaacaggagatgctggcgcaggggcgggcgttactggcgatggggtgtgaagcggtattgatgaaaggcgggcatttagaggatgcgcaaagcccggactggctctttacccgtgagggcgagcaacgttttagcgcgccgcgtgtgaacaccaaaaatacgcatgggacgggctgtacgctgtcggcggcgctggcggcgttacggccccggcatcgctgttggggagagacggtaaacgaggcgaaggcatggctttcggcggcgctggcgcaggcggacacgctggaagtggggaagggcattggtccggtacatcatttccacgcgtggtggtag

SEQ ID NO: 369830 - DNA, 747 bp, Salmonella enterica
atggaacaagcgcatacccggctcatcgcgcaactgaatgaacgaatttcagcggcggataatacgccgctatacatgaaattcgcccagacggtaaaggatgccgtgcgcagcggtattcttgagcacggtaatattttgcctggcgaacgcgatctcagccagcttaccggcgtctcgcgcatcacggtacgaaaagcgatgcaggcgctggaagaagagggggtcgtcacgcgcgcccgcggctacggtacgcaaatcaataatatctttgaatattccctgaaagaggcgcggggattttctcagcaggttgtcttgcgcggcaaaaaaccggatacgctatgggttaacaaacgcgtggtaagttgtccggatgaggtcgcgcagcatctggcgatccccgcaggcagcgacgtctttttactcaaacgcattcgttatgttgatgaggacgcggtatcgattgaagagtcctgggtgcccgcgcatctgattcatgatgtcgacgcgattggcatttcgctgtatgactattttcgtcgccagcacatttaccctcagcgtacccgatcccgcgtcagcgcccggatgccggatgatgagtttcagtcgcatattcaaatggatggtaaagtgccggtgctggtgattaagcaggtggcgctcgatcagcagcagcggcctattgaatacagcatcagttattgtcgtagcgacctatacgtttttgtgtgcgaggagtag

SEQ ID NO: 369831 - DNA, 966 bp, Salmonella enterica
atgaacggcgcacggttgctgacattattaccgaccctgcatacccggcgtccgctcaccgttatcggcgcggcagtgatcgatatcattgccgacgcctggacgttgccgcgtcgcggaggcgatattgaactgcaacaacagagcgtcaatgtcggcggctgtgcgctgaatattgccgtggcgttgaaacgactggggattgacgccagcaatgcgctgccgctgggccagggcgtgtgggcggagaggattcgccgccgtctggcaaaagagggattatccagcgtgattgacgcggttgaaggagataacggctggtgtctggcgttagtcgaaccggatggcgaacgcacgtttatgtcttttagcggcgtggaaaaccagtggaatgcggactggctgtcgcagctcaggacaccgcggggcagtcttgtctacctgtccggctatcaactggcctcgtcctgtggcgagccactgatccagtggctggaaaccgtcgacgatgtaacgccttttatcgattttggcccgcgaatcggtgatattacagacgatgcaatggcgcgcattatggcctgccggcccatcgtatccctcaatcgccaggaagccatcatcgccgcggaacgcgccgggcttgcgaccgatacccgcactttcggcgaagcatgggtaaaacgcttttccgcgccgctggtggtgcgccacgataaagacggagcgtggtattttagcgcgcaatcttccggcgttgtgccagcgtttccggcaaccgtggtggataccatcggcgcaggcgacagccatgctggcggcgtgctggcaggactggcgtcaggctggtcgctcgcggatgccgtactgctgggaaatgcggtggcgagctgggtggtcgggcatcgcggcggcgactgcgcgcccacgcgcgaggcgctactcctcgcacacaaaaacgtatag

SEQ ID NO: 369832 - DNA, 1005 bp, Salmonella enterica
atgaaagcagaacgtattctcggtgctctttacgggcaagcgttaggggatgcgatgggaatgccctctgagctgtggccgagaacgcgcgtcaaagcgcatttcggctggattgaccgctttctgcccgggccaaaagagaataatgccgcctgctattttaaccgcgcggagtttacggatgataccgcaatggcgctctgcctggccgacgcgctactcgaatgcgaaggcaacattgatcccgagattattgggcgtaacatcctcgcctgggcggaacgctttgatgcgttcaataaaaatgtactcggcccgacgtcaaaaattgcgctgaatgcgattcgcgacggcaaacccatcgcggcgctggaaaataacggcgtgactaacggcgcggccatgcgcgtttcgccgttgggctgcctgttgccgccaactaacctgacagcctttatagcagaagtagcgttagcctccagcccgacgcataaatccgatctggcggtggctggcgccgtggttgtcgcctgggccgtctcgcgagcggttaacggcgacacgtggcaaagtattgccgactcgctccccgccatcgcccatcaggcgcagacagcgcgtattaccacgtttagcgcctcgctatcggcacgtctggaactggcgctaaacattgtccgccacgccgacggcgtcgaatctgccagcgaacagctctatcagatcatcggcgcgggaaccagcaccattgaatcggttccctgcgctatcgccatggtggagctggcgaataccgatcctaaccgctgtgccgtgctgtgcgctaacctcggcggcgataccgacactatcggcgcgatggctaccgccatttgcggcgcgttgcacggggtaagcgccattaacccccagttaaagcaaacgctggacaaggttaatcagctggattttgcgcgctatgccgttgcgctggcgagctatcgtcaacggcgggaggcactatga

SEQ ID NO: 369833 - DNA, 1272 bp, Salmonella enterica
atgaaaacgacctttaaactgtcgttcatgatgttcgtggagtggtttatctggggcgcctggttcgtccccctgtggctatggctaaataaaagcgggttttccgccggtgaaataggctggtcttatgcctgtaccgccattgcggcgatcctgtcgccgattctggtcggctccgttaccgaccgttttttctcagcgcaaaaagtcctggcggtactgatgtttgcgggtgccgtactgatgtatttcgcggcacagcaaaccacctttgccggattctttccgctgctcctggcctattcattgacctatatgccgaccatcgcgctgacaaacagcattgccttcgctaacgtaccggacgttgaacgcgattttccacgcattcgcgttatgggaaccattgggtggattgcctccggcctcgcctgtggattcttgccgcaaatgttaggctataacgatatttcccccaccaacattccactgctcataaccgccgcaagttcagcgttgctgggcgtatttgcgttctgtctgccagacacgccgccaaaaagcaccggcaagatggatattaaagtgatgctggggctggatgcgctggttctgctgcgcgataaaaactttctcgttttcttcttctgttccttcctgtttgcgatgccgctggccttctactacatcttcgctaacggctatctgacagaagtgggaatgaaaaacgccaccggctggatgacgctcggccagttctctgaaatcttctttatgctggcgctaccctttttcactaagcgctttggtattaaaaaggtattattacttggtcttattaccgccgcgatccgctacggcttttttgtctatggcggcgcggagacgtacttcacttacgccctgctgttcctcggtattttgctgcacggcgtaagttacgatttctactacgtcaccgcctacatttatgtcgataaaaaagcgccggttcatatgcgtaccgctgcgcaagggcttatcaccctctgctgtcagggattcggcagcctgctggggtatcgcctcggcggcgtgatgatggaaaaaatgtttgcttatccgcaaccggttaacggtctgacattcaactgggcgggcatgtggacgtttggcgcagtgatgattgccgtcatcgcgctactgtttatgattttctttcgcgaatcggacaaagagatcactgctattgacgatcgcgatattgcgttgacacaaggggaagtaaaatga

SEQ ID NO: 369834 - DNA, 1053 bp, Salmonella enterica
atgactgatattgcgcagttgcttggcaaagacgccgacagccttttacagcatcgttgtatgaccattccttccgatcagctttatctacccggcaaggattacgttgaccgggtgatgattgacaataatcgtccaccagccgttctgcgtaatatgcagacgctctataatactggacgcctggcgggaacaggatacctttcgatactgcccgtcgatcagggagtggagcactccgccggcgcttcttttgcggccaacccgcgctactttgacccaaaaaatattgttgaattggcgattgaggccggctgtaactgcgtggcctctacctacggcgtactggcctcggtttcacggcgctatgcgcaccgtattccgtttttggtcaaactgaatcacaacgaaacattgagctatccgacagagtacgatcagaccctgtacgccagcgttgagcaggcgttcaatatgggcgccgtggcggtaggcgcgacgatctatttcggttcggaacagtcccgtcgccagattgaagagatctccgccgcttttgagcgtgcgcatgagctgggtatggtgaccgtattgtgggcttacctgcgtaattcttcctttaaaaaagacggcgtcgattaccatgtatccgctgacctgacggggcaagccaaccatctggccgctacgattggtgcggatattgtgaaacagaaaatggccgagaataatggcggttataaagcggtcaacttcggctataccgacgatcgcgtgtacagcaaactgaccagcgataacccgattgatttggttcgttaccagttggcgaactgctatatgggacgcgccgggcttatcaactccggcggcgcggacggcggtgacactgatctcggcgacgcggttcgtaccgcggtgatcaacaaacgagccggtggaatgggactaattctgggacgtaaagcctttaagaaatcgatggctgatggcgtgaagttgattaatgccgtacaggatgtctatctggatagcaaagtcaccatcgcctga

SEQ ID NO: 369835 - DNA, 651 bp, Salmonella enterica
atggctaactttcccgccagcttactgatcctcaatggcaaaagcgctgataaccagccgctacgtgaggccattactctacttcgcgacgaaggtatacagattcacgttcgggtaacctgggaaaaaggcgacgcgcagcgttacgttgatgaagcccgtagactgggcgttgaaacggtgattgccggcggcggagacggtaccattaatgaagtgtcgaccgcgctcatccagatccgcgacggcgtagcccctgcactgggccttttgccgctcggcactgccaacgattttgccaccagcgccggtattcctgaagcgctggacaaagcgctgaaactggcgattgccggaaacgcgatggaaattgatatggccagggtcaatgataaaacctgttttatcaatatggcgacgggcggttttggcacccgcattaccaccgaaacgccggaaaaacttaaagccgcgttgggcggcgtctcctatcttattcacggtctgatgagaatggatacgctgacccctgaccgctgcgaaatacgtggcgaaaactttcactggcagggagatgcgctggtgatcggcatcggcaacggtcgtcagggccggcggcgggcagcaattatgtcctaccgcgctggttaa

SEQ ID NO: 369836 - DNA, 336 bp, Salmonella enterica
atgaatgtcacttcaggcgtgaatgcgcaaacgccattgctccctccttctgaacggggtaatgacgaaaaaccggtagctgaaatcgttgattttaacgcttatggcaataaacccagatgtttaatgtgcctgggaaccacggcattgtttgcaggtgttttcagtggggtatgctcaggggctgtcgccagtgtcagtagtggtactgcatatactaccgccctgacggttttaggcgcatcgtttggcatggggggaattggtatgatgggaatatgcgccggactataccttagcgcaaatggcatcagaacccggccagcctggccataa

SEQ ID NO: 369837 - DNA, 417 bp, Salmonella enterica
atgtattcaagagccgatcgcttattaagacagttttcactaaaattaaatgccgattcaattgtctttgacgaaaacagattatgctcatttattatagataaccgttaccgtatcttactaacaagcactaacagtgagtatataatgatatacggtttttgcggaagacctccggataataataatcttgcttttgaatttctcaatgctaatttatggtttgcagagaataatggaccacatttgtgttatgataataactcacaatcattattattggctctcaacttctcactaaatgaaagttctgtagagaaactggaatgtgaaattgaggtagttattagatcaatggagaaactgtatcacattttacaggataaaggaataactctggataccgattatacgtga

SEQ ID NO: 369838 - DNA, 1362 bp, Salmonella enterica
atgtttaaaccagaacttctttcgccggcgggaacgctgaaaaatatgcgttacgctttcgcttacggtgccgatgccgtctatgcgggccaaccacgctactctttacgcgtgcgtaataacgaattcaatcacgaaaatttgcagcttggcatcaacgaagcccacgcgctcggaaaaaaattctacgtggtggtgaacatcgccccgcataacgccaagctcaaaacctttatccgtgacctgaaacccgtcgtcgagatgggcccggatgcgctgatcatgtccgatccagggttgattatgctggtacgcgagcacttcccggcaatgccgattcacctgtcggtacaggctaacgccgtaaactgggcgacggtaaaattctggcagcagatggggctgacccgtgtgattctctcccgcgaactgtcgctggaagagattgaggaaattcgccagcaggtgccggatatggaaatagaaattttcgtccacggcgcgctatgcatggcctattccggccgctgcctgctttccggctacatcaataaacgcgatccgaatcagggcacctgcaccaatgcctgccgttgggaatataacgtgcaggaaggaaaagaagacgttgtcggcaacatcgtgcataagcacgaaccgattccggtacagaacgttgagccgacgctcggtatcggcgcgccgacggataaagtgtttatgatagaagaggcccaaagaccgggcgaatacatgaccgcgttcgaagacgagcatggcacctatatcatgaactcaaaagatttgcgcgctatcgcccacgtggagcgcctgacgaaaatgggcgtccactcgctgaaaatcgaaggccgcaccaaatccttttattactgcgcccgtaccgcacaggtctaccgtaaggccatcgacgacgccgccgcgggtaaacccttcgaccctacgctgctggaaacgctggaaggtctggctcatcgcggctataccgaaggtttcctgcgtcgccatacgcacgacgattaccagaattacgagtacgggtactccgtttccgaacgccagcaatttgtcggcgagttcaccggcgagcgtaaaggccaactggcggccgtggcggtgaagaataaattctccgttggcgatagtctggagctgatgactccgcagggaaatatcaatttcaccctggaacagatggagaacgccaaaggcgacgctatgccggtggcacctggcgatggctataccgtctggatgcccgtcccgcaggacgttacgctggattacgcactattgatgcgtaatttctcaggcgaatcaacgcgtaacccccatgctaagtag

SEQ ID NO: 369839 - DNA, 2112 bp, Salmonella enterica
atggaacaggatgatcgtctgctcaacgctatgtttgagatgtgcaaccacaaaaatcccctcaatgacgggcaacgagagtggcatatcgccgatatttccggcctgctgcgcgaagaacgctatgacgaactggacgaacgctacaaccagacgctgacggagagctttaccagccgcgaagcggaaaagcgctatttcttcgcctggaatcaaatggacaaccctttttacgatatggacacgctggttgaggctgggccgcaaggattagcgctgatcaaaaactggcagcgcgcccgcccccgctccactcacgcctggcttgccgaggcgcaatactggaatcaccgtgcgtggctgtatcgcagctatggctgggcgagagaaaccacccgagcgatgtggatctgcgccgccgcctgcaacgaacggatggtcatcgccgtgctcaatgctatcgactgtgaaccgcgccagtggatggcggcggccctgaccagcaccaactcaaaagtcttcggccagcccgactggctggttgagttcctcgagggcgcggatgttgccgggcagccattaatggaggatctggctgaatatcatcgccattcaccgcaggaggtggacgcgctgatggcccattccgggctgtcgtttgccgacgcggtttgcccaaatttgccgcgcccgtccgtgctgccggagtgcaatgacgatgccgggcaaaaatactggctcaccgtctgcctggctattttcccgacggcattttacgtgctggatgaatatatcccgtttcgtatgccgcgctggggagggtctcacgaggaaatccgcgaatttctggaatcaagcgtatgcgatcacctttctgccgcagaacgtgaacatctggagctattgatctggtgggacgatcaccgcgatctgcgcatcaaagaggttgactccccggcagaacaggaacgcattatcgccaaagccgaagagattagcctgcgagcgcatatccaggaatctcgccataacacgctgaagtggctgcgggtctgctatagcgatctggacgataatgacgcgctctggcgaacccttcagcgttcgatcgtggaaaaagttaagttcaacaattacttctttgatgacacgataaagttcgccctgcgcgattttcctgacacctggtggatgtataattttctctgtcagaatgcgcagcaaacggaattcgcagtgccgaaaatccgtcgtggctactttcagtacgccgggttattgggtttcgaaaaggatgaggcgcaaggcctcgcctggctcgatagcgtcgccgacattcaatataaccataactggcgggcggcgattaaaaatttcgactggttcgggctcccggaacatttcgtgccgctggcagagctgggcgcacaaagaaatatacccgccgcgctaaacctgctgggccttgaacacaataataaagagaacaacggcctactaccttacgatcctgccatcgcgttagggtattttcagcgcgcggcggagattttgcaccggcagttagcgctgcgcgagagccccccgtacaaattaatagataacggaggctataccgactatgaaaatgacctgcaaaatattcatttcagcattggcatctgcaaccagcgtctgagtaaacaagaacctgataccgaaaaacgttccgcttatgaaaaagaactgctcgataatctctggctggcgcatcagtacgggcataaagaggcctggggcttgttcctgctgaatatttttgaagtgaaggatattacgctggcgcataagcatctggaactggtgcaacaagaagccaacaaaggcacgctacacgctatggtgaccctatcgcgcctgcatggtaataaacacgatcgaacgctgtttaatatgaagctaagcgcacgctgggcgcattttgccttcacgctttacccggataatgaaatcgttatggactgcctggaccacctgcatttcgattctttctggaaacgcttccgtttcgcgtggtataccgtccgcatcccgaattcagagctgccgggacaggtcaactcaatggtgtaa

SEQ ID NO: 369840 - DNA, 717 bp, Salmonella enterica
atgttctggattgttcttattattgccgccctattttttagctggcgcaactacaaaaaaaacaaaccgctgattgcggcccgtatcgccgaggagaaagaaaaagatcgcctgaaagacctgcgtcgcgatacccgacggcggcaatgggcgctggcgctagctgatatcctcgcccggcgcaacgggctaccgatcaaaggcgttgagctggtatttaaacttgacgatgacaaacgccgctatctggcgcagcaggtaaaaaaagagctgggcttgagcgaaaacctcgacggcgcggcgttacgccacaaggttgaggatatcttacgccgctggcctgcgggcatcggcagctcgccgcgcacgttttatcatcatctggcggcccagggccaggtccgcgacgcgctggccttcgactgtatgcgcaccgcctttctgacccgctgtatcgccgggctcggctggtgtaacgaaaacgaggcctggctggtgctattgctcaacgcccagcgcgctcaggactgttttgattcctgggaggattacgccaccgcctacgttcgcgctcgccgggtatggctcacgctacgtgacacgccaacagcgcttgccggacgggatttacaggaagccacccattatctgcaagaccctgtcagccgctggcgacaactgccgtggaatgaattcaaaattttcgagccgatttaa

SEQ ID NO: 369841 - DNA, 1203 bp, Salmonella enterica
atgacagaaacgtcatctcaccgctataaaccacgcaatataataaatgcgccaaatgtaaaatcgtctattttttcccggagccaacaacgcggcgacagcgaaaatatccagcgctggttaagcaaccatttttatcgttggatcatcggtgactttcctcatgtttatcctgtgcgttccgtcgccgattatgccgtttattttagcgctgatgcagaaatccccgcctggctggcgccaaagctgggtggcgatgagcgcttttactaccttaacgttcagcacccgcaacttgtggcaatggaaagagatttagtggaatttctttcgcgtcaggaaggaacgcggctggaaactaaactgcagcgcatcaactgctttaccgtgctggcaatgcgcgaagcggagcatcaaaaaatgcagcgcctgcgtgaacaaggttggtatccctccaacagcgaggcgctaaaaccggtgatgacggtgaataacggtgtgctggttgaacttgatgcaacaaatcccggcctgcgcagtgagatggcgtatgaatcctggcatatgcaacactgcgacggagattttgataataaaggcgcgctttccggcggctacggcgattactacgcccggcaaatggaacaacaaaaacttcgcctgttcagcctgcgcgacggcaataatattccccacgtcacaataagcctggtggttggtaataacggcctgagcattgatcagattaaaggtaagcaaaatcgccatcctattaagaaatatgctaacgatgttttatctctgttacgccatctgcaaccacttcctgagcgccacgctgattgcgaagggatgggaatagtttatgaatcgacgccggaatattcaggttggaaatttattactcatattcatgacctcaattttctgctcaatgtgctgcatgacaattttcatttaatggagcacttccctacgcctccggtggctttacagtggctgctgctgcacagcgccccggaggcactgcgctaccttcaggttgttgatcctaacgtggcgacggctgcggaaatgctgtttccgcagcatgaatggcatcctacgcttgccgggaaaaacaccagtagcgaacctttcgaaattgaaagcctgacgctacaaaccacgcgttacctccctgtcatcaaggaggtgcaataa

SEQ ID NO: 369842 - DNA, 723 bp, Salmonella enterica
atgactgaattacccattgatgaaaacacgccgcgcattttgattgttgaagatgaacccaagctgggtcagctgcttattgactacttacgcgcggcgagttacgcccccacgctcatcaatcacggcgacaaggtactgccgtatgtgcgtcaaacgccgccggatctgattctgctggatctgatgctgccgggtaccgatggtctgacgctatgccgggagattcgccgtttttccgacatccccattgtgatggtcacagccaaaattgaagagatcgaccggctgctggggctggaaatcggcgccgatgattatatctgtaagccttacagcccgcgcgaagtcgtggcccgcgtgaaaaccattttgcgccgctgtaaaccgcagcgcgaactccagcagcaggatgccgaaagcccgttaatgattgatgaaagccgctttcaggcctcctggtgtggtaaagcgctggatttaacccccgctgaattccgcctgctaaaaaccttatcgcttgaaccgggtaaagttttttcccgcgagcagttgttaaaccacctctacgacgactaccgtgtggtgaccgatcgtactatcgacagccacattaaaaacttgcgccgtaaactggaatcgctggatgccgaacagtcatttatacgcgcggtctacggggtgggatatcgctgggaagcggatgcgtgtcgcctggtataa

SEQ ID NO: 369843 - DNA, 1404 bp, Salmonella enterica
atgaaagtctggcggcccggaatcaccggcaagctgtttctggcgattttcgccacctgcatcgtgctgctgatcagtatgcattgggccgtgcgcgtcagttttgaacgcggatttattgactatatcaaacacggcaacgagcagcggctacaaatgctgggcgatgcgctgggcgaccagtaccagcaacacggcaactggcgttttttacgcaacaacgatcgcttcgttttccagattttgcgttcatttgagcatgacaacgaccgggataaacccggccccggtatgccgccgcacggttggcgcacccaattctgggtcgtcgatcaaaatggccgggtgctggtcggcccacgcggtccggtgccgcatgacggtactcgccgccccattctggtcaatggcgccgaagtcggcgcgattatcgcctctcctgtcgagcggctgacgcgcaatacggatattaattttgatatgcagcagcggcgcgccagttggatgatcgtggcgttatcaacgttgctggccgcgctggcgacgtttttgctggcgcgtggcctgctcgccccggtcaaacggttggtcgagggtacgcacagactggcggcgggggattttaccacgcgcgtgaccccaaccagcgccgatgagctgggaaaactggcgcaggactttaaccagcttgccagtacgctggaaaaaaaccagcagatgcgccgcgactttatggcggatatttcccacgaactgcgcacgccgctggcggtattgcgcggcgaactggaagccattcaggatggcgttcgccagttcacgccagaatcggttacctcgctacaggcggaagtcggtacgcttaccaaactggttgacgacctgcatcagctgtcgttgtctgacgagggcgcgctggcttaccaaaaaacgaccgtcgatcttgttcccctgttggaagtcgctggcggcgcgttcagagagcgctttaccagccgggggctaacgctacattacgcgttgccggatagtatgaccgtcttcggcgacccggatcgcctgatgcaactgtttaataatctactggaaaacagtctgcgctacaccgacagcggcggcggcctgcatatttccgccgaacaacgcgacaaatcattattcctgacctttgccgattctgcaccgggcgtcagcgatgaacagttacaaaagctttttgaccgtttttaccgcacggaagtgtcccgtaaccgcgccagcggcggttctggactggggctggcaatatgcgtcaatattgtacacgcgcataacggtcatcttcacgccgctcattcgccttttggcggggttagcattacagtagagttaccgctggatcgcgatttacagagagaagtatga

SEQ ID NO: 369844 - DNA, 1413 bp, Salmonella enterica
atgacagaacttcctgacaatacccgctggcaactctggattgtggcattcggcttttttatgcagtcgctggataccaccatcgtcaacactgcgctgccctccatggcgaaaagcctgggggaaagcccgctgcatatgcacatggtagtggtgtcatatgttcttaccgtcgccgtaatgctccccgccagcggctggctggcagataaaatcggcgtgcgtaatatcttctttgccgccattgtgctgttcacgctgggttcgctgttttgcgccctttccggcacgcttaatcaactggtattagcgcgggttttacaaggcgtaggcggcgcgatgatggtgccggtcggacgcctgacggtcatgaaaatcgtgccgcgcgcgcaatatatggcggcgatgaccttcgtcaccctaccgggacagatcgggccgttactcggccccgcgctgggcggggtgctggtggaatatgcttcatggcactggatctttctgatcaatatcccggtgggaatcgtcggcgctatggcaacctttatgctgatgccaaactacaccatagagacccggcgctttgatctgccggggttcctgctgttagctatcggcatggcggtactcacgctggcgctggatggtagtaaaagcatggggatttcgccctggacattagccggacttgctgcgggcggcgcggcagccattctgctctatctcttccatgccaaaaaaaactcaggcgcgttattcagcctgcgattgttccgcacgcccacgttttcactggggttgctgggcagttttgccgggcgtatcggcagcggtatgctgccgtttatgacgccggtctttttacaaattggtcttggtttttcaccgtttcatgccggtttgatgatgatccccatggtgctaggcagcatgggaatgaagcggattgtggtgcagatagttaaccgttttggctatcgtcgggttctggtggcgactacgctcggactggcattggttagcctgttgtttatgtcggtcgcgctgctcggctggtattatctcctgccgctggtactgcttttgcagggaatggtgaactcggcgcgcttttcttccatgaataccttaacgctaaaagaccttcccgatacgctggccagcagcggcaatagcttattatcgatgattatgcagctctcgatgagtatcggcgtcactattgccggaatgctgctgggtatgtttggccaacagcatatcgggatagacagtagcgccacacatcacgtctttatgtacacctggttatgtatggcggttattatcgcgctaccggcgataatttttgcccgcgtgccgaacgatacacagcaaaacatggtcatttcacggcgtaaaaggagcctgtaa

SEQ ID NO: 369845 - DNA, 3081 bp, Salmonella enterica
atgcgctttttcgcccttttcatctaccgcccggtcgccaccattttgattgccgccgccattacgctgtgcggcattctgggctttcgtctgctgccggtcgccccgctgccgcaggtcgatttcccggtgattatggttagcgcctcgctgccgggcgcctcgccggaaaccatggcttcgtcggtggcgacgccgttggaacgttctttgggacgcattgcaggcgtcaatgaaatgacctccagcagctcgctcggcagtacacgcattattctcgaatttaatttcgatcgtgatattaacggcgcggcgcgcgacgtgcaggccgccattaacgccgcgcaaagcttgttgccaggcggaatgcccagccgcccgacttatcgcaaggccaacccgtccgacgcgccgattatgattttaacgcttacctcggagagctggtcacagggcaaactgtatgatttcgcctctacccaactggcgcaaaccatcgcgcaaattgacggcgtcggcgatgttgacgtcggcggcagctccctgcccgcagtacgtgtaggcttaaacccgcaggcgctctttaaccagggcgtctcgctggatgaggtccgcgaagcgatcgacagcgccaacgtacgccgaccacaaggcgcaattgaagatagcgtccaccgctggcaaatccagaccaacgacgaactgaaaaccgccgccgaatatcagccgctgattattcactataacaacggcgcggcggtacgcctgggcgacgtcgccagcgtcactgactcggtgcaggatgtccgtaacgccgggatgacgaacgctaaacccgctattttgttgatgatccgcaagctgccggaggccaacattattcagacggtcgacggcatccgggcaaaactgccggaactgcgggcaatgatccccgccgctatcgatttacaaatcgcccaggatcgttcgccgacgattcgcgcatcgctgcaagaggtagaagagacactggctatctctgttgcgctggtgatcctggtggtgtttttattcctgcgttccgggcgcgccacgctaatccccgccgtcgccgttcccgtttcgctcatcggcaccttcgccgccatgtatctgtgcggcttcagcctcaacaatctgtcgctgatggcgctgactatcgcgaccggatttgtcgttgatgatgccattgtggtgctggaaaatatcgcccgccatctggaggcgggaatgaaacctttgcaggcggcattacagggtacgcgggaagtcgggtttacggtcatctccatgagtctgtcgctggtggcggtatttctgccgctgctgttaatgggcggcctgccaggacgattattacgggaattcgccgttaccctctcggtggcgattggcatttcgctggtggtctcgctcacactgacgccgatgatgtgcggctggatgcttaaatcaagcaaaccgcgcacccaaccgcgtaaacggggcgttggccgtttgctggtcgccttgcaacagggttacggcacgtcgttaaaatgggtgcttaaccatacgcgtcttgtcggggtggtttttcttggcaccgttgcgctgaacatctggctttatatcgccatccctaaaacattctttccggagcaggacaccggcgtgttgatgggcggtattcaggctgaccaaagcatctctttccaggccatgcgcggcaagctgcaggattttatgaaaattattcgcgacgatccggcggtgaataatgtcactggttttaccggcggatcgagggtgaatagcggcatgatgtttattacgctgaagccgcgtggcgaacgcaaagagacggcgcagcaaatcattgatcgactgcgggtcaaactggcaaaagaacctggcgccaggctgtttctgatggcggtacaggatattcgcgtcggcgggcggcaggctaacgccagttaccaatatacgttgctgtctgactctctggcggcgctgcgcgaatgggagccgaaaatacgcaaagcgctctcggccctgccgcaactggcggacgtaaactccgaccagcaggataacggcgcggagatgaaccttatctacgaccgcgacaccatgtcacggctgggtattgatgttcaggccgcaaacagtctgttaaataatgctttcggccagcggcaaatttccaccatttatcagccgatgaaccagtataaagtggtgatggaagtcgatccgcgctatagccaggatatcagcgcgctggagaaaatgttcgttatcaaccgtgacggaaaagcgattcccctctcttatttcgcccaatggcggcccgccaatgcgccgctgtcggtgaaccatcagggactttccgcggcgtccacgattgcctttaacctgccgaccggcacatcgttatcgcaggcgacagaggccattaatcgcaccatgacgcagcttggcgtcccctcgacggtacgcggcagtttttccggaacggcgcaagtcttccagcagaccatgaattcacagcttattttgatagtggcggcgatcgctaccgtctacattgtgctggggatactgtacgaaagctacgtccatccgctgaccattctctctactctaccatcggcgggcgttggggcgcttctggcgctggaactcttcaatgcccctttcagcctaatcgccctgatagggatcatgctattaattggcattgtgaagaaaaacgccattatgatggtcgattttgcgcttgaagcgcaacgaagcggcggcctgacgccggcacaagccattttccaggcctgcttgttacgcttccgtccaataatgatgaccacgctggcggcgctgttcggcgcactgccattggtgttatctggcggagacggttcggaattacggcagccgttggggataaccattgtcggcggtttggtcatgagccagctcctgacgctctataccacgccggtggtgtacctctttttcgatcgtctgcggctgcgtttttcgcgtaaaaatagcaaaccggtagtagaaatatga

SEQ ID NO: 369846 - DNA, 3123 bp, Salmonella enterica
atgcaggtattacctccgggcagcacgggcggcccctcgcgtctgtttattctgcgccccgtggccaccactctgctgatggcggcgattttactcgccgggattatcggctatcgcttcctgcccgtcgccgctttgccggaggtcgactaccccactattcaggttgttacgctctaccctggcgccagcccggatgtcatgacctccgccgtcaccgcgccgcttgagcgccagttcggccagatgtcaggactgaagcagatgtcgtcgcaaagctccggcggcgcgtcggtggtaacgctacagtttcagttgacgctgccgctggacgttgccgagcaggaagtacaggcggcgattaacgcagccaccaatttattgccttccgacctgccgaatccgccgatttatagcaaagtcaatccggcggacccgccgattatgacgcttgccgtcacctcaaacgcgatgccaatgactcaggtagaggacatggtagaaacccgcgtggcgcagaagatctcgcaggtctccggcgtcggactggtgacgcttgccggcgggcagcgccctgcagtacgcgtaaaactgaatgctcaggctatcgccgcgctcggtctgaccagcgaaacggtccgtaccgcaattaccggcgccaacgtcaactcggcgaaaggcagtctggatggccccgagcgggcggtgacgctttctgctaacgatcagatgcagtctgccgacgaataccgcaagcttatcatcgcgtatcaaaacggcgcgccggtacggttgggcgatgtcgccaccgtcgaacagggggcggaaaatagctggctcggcgcatgggcgaatcaagcgccggctatcgtgatgaacgttcaacgccagcccggcgccaatatcattgcgacagcggacagcattcgccagatgctgccccagcttaccgaaagcctgccgaaatcggtgaaggtcacggtcctgtccgatcgcaccaccaatattcgcgcttccgtgcgcgatacccagtttgaactgatgctggcgatcgcgctggtcgtcatgattatctatctgtttttacgtaatattcccgccacaattattcccggcgtcgccgtaccgctgtcgcttatcggcacctttgcggtgatggtgtttttggatttttccattaataacctgacgctgatggcgctcactatcgccacgggtttcgtggtggacgatgcgattgtggtgatcgagaacatctcgcgctacatcgaaaaaggagaaaaaccgctggcggcggcgctcaaaggcgcgggcgaaatcggctttaccattatttccctcaccttttcactgattgcggtgctgatcccgttgctctttatgggcgatattgttggtcgactgttccgcgaatttgcggtgacgttggcggtagcgattttaatctccgccgtcgtctctttgacgctcacgcccatgatgtgcgcgcgtatgctcagccagcagtctctgcgtaaacaaaaccgcttttcccgcgcctgcgagcggatgtttgaccgcgtgatcgccagctacggacgcggattagcgaaagtgctcaaccatccgtggcttacattgagcgtggcattcgccacgctcctgctcagcgttatgctgtggatagtcattccgaaagggttctttccggtacaggataacggcattatccaggggacgctgcaggcgccgcaatcgtcatcgtatgccagtatggcgcaacgtcaacgccaggtggcggagcggatattacaggacccggcggtgcaaagcctgacgacttttgttggcgtagacggcgctaaccccacgctcaatagcgcgcgcctgcaaattaacctcaagccgctggatgcgcgtgatgaccgcgtgcagcaggtgatctcccggctgcaaaccgccgtggcgacgattcccggcgtggcgctgtatctccagccgacgcaggatttaaccatcgacacgcaggtcagccgcacgcagtatcagtttaccctgcaggccacgacgctcgatgcgctcagccactgggtgccaaaactgcagaacgcgctacagtcgttaccacagctctctgaggtaagcagtgactggcaagatcgaggattagcggcctgggtgaatgtcgaccgcgacagcgccagccgtctgggtatcagcatggcggatgtggataacgcgctctacaacgcgttcggacaacgcctgatttcaacgatttatacccaggcgaaccagtaccgcgtcgtgctggaacataataccgccagcacgccgggcctggcggcgctggagacgattcgcctgacgagccgcgacggcggcaccgtaccgctcagcgcgattgcccgcattgagcagcgcttcgctccgctctccatcaatcatttagatcagttcccggttacgacattttcgtttaacgtgccggagggctattcgctcggcgatgcggtgcaggcgattctcgatacggaaaaaacgctcgccctgccagcagatattacaacgcagtttcagggtagtacgctcgccttccaggcggcgctaggcagcaccgtctggcttattgtcgccgccgtggtggcgatgtatatcgtgctcggcgtgctgtatgagagttttatccatccgatcacgattctctcaacgctgccgacggcgggcgtcggcgcgctgctggcgctgatcatcgctggtagcgagctcgatattatcgccattatcggcattattttgctgatcggtatcgtgaagaaaaacgccatcatgatgattgacttcgccctcgccgctgaacgcgaacaggggatgagtccgcgcgacgctatcttccaggcctgtctgctgcgttttcgaccgattctgatgaccacgctggcggcgttgctcggggcattgccattaatgttgagtaccggcgttggcgcggaattacgtcgcccgttggggatcgcgatggtgggcggcctactggtcagccaggtattaactctgtttaccacaccggtgatttatctcctgtttgaccgcctgtcgctgtacgtgaaaagtcgctttccgcgccataaagaggaggcgtag

SEQ ID NO: 369847 - DNA, 1242 bp, Salmonella enterica
atgaaaggcagtaatactttccgctgggcaatagcgattggggttgtagtggccgccgccgcattctggttctggcatagccgtagcgaaagcccgaccgccgcgccgggcgtcgccgcgcaagcgccgcataccgccgccgcaggtcgccgcggtatgcgcgacggccctctggcgccggtacaggccgcgaccgcgaccacgcaggccgtaccgcgctatctgagcgggctgggtaccgtgaccgccgcgaataccgttacggtgcgtagccgcgtggatggtcaactcatctccctgcactttcaggaaggtcagcaggtcaacgcaggcgatctgctggcgcaaatcgatcccagccagtttaaggtcgccctggcgcaggctcagggacagttggcgaaagataacgctacgctggcgaatgcgcgtcgtgatctggcgcgctatcagcaactggcaaaaaccaatctggtttcccgtcaggaactggatgcgcaacaggcgctggtcaacgaaacccagggaaccattaaagcggatgaagccaatgtcgccagcgcgcagttacagctcgactggagtcgtatcacggccccggtctcgggacgcgtgggtctgaaacaggtggatgtcggcaaccagatttccagcagcgataccgcaggtattgtcgtcattacgcaaacgcacccgattgatctcatttttactctgccggaaagcgatatcgcgaccgtggttcaggcgcagaaagcggggaaaacgctggtcgtagaagcctgggatcggactaactcgcacaaattgagcgaaggtgtgttgctcagtctggacaaccagattgatcccacaacgggaacgatcaaaattaaagcgcgctttaccaatcaggacgatacgctgttccccaatcaatttgtgaacgcccggatgctggtcgataccgaacaaaatgccgttgtggtgcctgccgcggcggtgcaaatgggcaatgagggccactttgtgtgggtgctgaacgacgaaaataacgtcagcaagaagcgggtaaaaatcggtattcaggataaccgaaacgtggtgatcagcgctggcttgtcggcaggcgatcgcgtcgttaccgatggtattgatcggctgacggaaggcgcaaaagtcgaggtcgttgagccgcaaaccaccgtggcggatgaaaaatccccttcccgccatgaaggtcaaaaaggagcgcgcgcctga

SEQ ID NO: 369848 - DNA, 198 bp, Salmonella enterica
atgatgactaccttcatcataaccctttccttattttggccccttcctcgggaggggctttcccgtttcagcgtcctgctgaaatcggtggcttaccttcattgccgtgccgccactttaccgcactccggcgcgttaacgattttcaccgatgagagttgcgtagcgcctcgcaaagcgagtcgccattcagaataa

SEQ ID NO: 369849 - DNA, 1353 bp, Salmonella enterica
gtgtttatcggatttgattacggtacggcaaactgctcggtcgccattatgcgcgacgggcatccacagttgctgacaatggagaataacagcgcattactgccgtctatgctgtgcgcgccgacgcgcgaagcggtgagcgagtggctgtatcgccatcatgatgtgccggcaacggacgaagaaacccaggcgctgctacgccgcgcgatacgctacaaccgcgaggaagatattgaggttggcgcgcaaagcgtacagtttggtctggcgtcgctggcgcactatattgacgatccccaggaggtctggtttgtcaaatcgccgaaatcctttttaggcgccagcggcctgaaaccgcagcaggtcgcgctgtttgaagatttagtctgcgccatgatggtacatattcgtcatacggcgcacagccaattgccggaggccattacccaggcggtgatcggtcgcccgatcaactttcagggactcggcggcgatgacgcgaaccgacaggcgcagggtattctggagcgggcggcaaaacgcgccggttttcaggaggtggtattccagtatgaaccggttgcggcgggcctggactacgaagctacgctgcgggaagagaagcgtgtgctggtcgtggatattggcggcggtaccaccgactgttccatgctgctgatggggccgcagtggcgtcagcgcgccgatcgtgaaaacagcctgttggggcacagcggttgccgcgtgggcggaaacgatctggatatcgcgctggcctttaaaaatctgatgcctttgctgggcatgggcggcgaaaccgaaaaaggcatcgccctaccggtgctgccgtggtggaacgccgtggcgattaacgacgtcccggcgcaaagcgatttttacagtagcgcgaatggtcgtctgttgaacgatttggttcgcaacgcgcgtgaagcagacaaggtcgcgttgctgctcaaggtctggcgtcagcggcttagttaccgcctggtacgctgcgcggaagagagcaaaatcgccctttccggccaggcggatgttacggcgaggctgccatttatcagcgacgaccttgcggtcgctatcagccagcaaggactggaagcggcgctggatcaaccgctggcgcgtattctggaacaggtgcaactggcgctggacagcgcgcaggaaaaaccggatgtcatctatctgaccggcggcagcgcccgttcgccattgattaaaaaagcgctttccgaacagttaccgggcatacccgtcgctggcggcgatgatttcggctccgtcaccgcaggactggctcgctgggcagaggtcgttttccgctaa

SEQ ID NO: 369850 - DNA, 870 bp, Salmonella enterica
atgtttaccctgagctggcagccgccttacgactggtcgtggatgttgggctttcttgccgcgcgtgcggtggacggcgtggaaacggtaggcgagggcttttatgcgcgcagcctggtggtgggcgagcatcgcggactgatcagcgtgagcccccatctgcccacccacactgtgcaggtcagcgtgagcgccggattacttcccgtcgcgccggcgtgtctggcgaaggtttcgcgtctgtttgatcttgactgccagcccgcgcaggttgccgccgtgctggggccactgggcgaggacagaccggggctgcgtttaccgggatcggttgatacgtttgaacaaggcgtgcgggcgatactggggcaactggtgagtgtcgcgatggcggcaaggttgacggcgaaagtggcgcgccgctatggcgaggcgttgccggatgcgcccgattatgtctgttttcccggtccggaaacgctggcgttggccgatccgctggcgctgaaagctctggggatgccgctgcggcgcgccgaagcgctgattcatctggcgcaggcgacgctggcgggaaaactggcgctcgccgcgccgccggatattgagcagagcgttaaaaatttacaaacgtttccgggaattggccgctggacggcgaactatttcgccctgcgcggttggcaggcaaaagatatctttttacccgatgattacttaattaagcagcgcttcgccgggatgacgcccgcgcagatccgtcgctacgcggagcgctggaaaccgtggcgttcctacgcgctactgcatatctggtatacccacggctggcaaccgtcaatggatagcgaaatagctggtattcagtaa

SEQ ID NO: 369851 - DNA, 2991 bp, Salmonella enterica
atgagtaaaccatcccaacatgttttcgttaccgtcccccacccgctattgcgtctggtcagtttaggcctggtcgcgtttgtctttacgctcttttcgctcgtattatcgcgtgtcggcacccaactcgcgccgctgtggttccccacctccattatgatggtcgcgttttaccgccatgcgggccgtctgtggccagggatcgcggtcgcctgctcgctcggcagcatcggagcctcactgactttatttcctgccgcctcgcttaactttagctggacggcaataaatattatcgaggcggccactggcgcgatactgctgcgaaaactgctccccagctacaatcccttacaaaatttgaatgactggtttcgtctggctatcggcagcgccgtgattccgccgctactcggcggcctgttattttggctgatagcgccggaagcggtcgcctcgaaagcgtttctgatttgggtattatcggaagccatcggcgcgctgacgctggtgccgttaggtttactgtttaaaccacactatctattgcgtcatcgcgacccgcatctgttgctggaaacgctgttgacgctggtcattacgctggcgctaagctggctcgctatgcgctatattccgtggccgtttacgtgcgttatcgtcctgttgatgtggagtgcggtgcgcctgccgcgaatggaggcgtttttaatttttttagctaccgttatcgtggtctcgctcatgctggccaatgaccccacgctgctcgccacgccgaaaaccgacgtgatggtcaatatgccgtggctgccttttttaatgatcctgctgcctgccaatatgatgacgatggtgatgtacgcgtttcgcacggagcgcaaacatatcaccgagagcgaatcccgctttcgcaacgcgatggagtattccgccattggtatggcgctggtcggtacggagggtcagtggctacaggtcaataaatctctgagccattttcttggctatagccaggatgaattacgcacgatgacatttcagcaattgacctggccggaagacctgaataatgaccttgaacagctaaacatgctggtgcgcggcgacatcaatagctattccatggaaaaacgctactacacccgcaacggcgatgtcgtctgggcgctactggccgtctcgctggttcgtcataaagacaataaacctctctattttattgctcagattgaagatattaacgatctcaagcaaagcgagcaggaaaaccagcggttgatggaacgtattacacaagcgaacgacgcgctgtttcaggaaaaagaacggttgcacatcacgcttgactctatcggagaagcggtggtgtgtattgatgtcgcgatgaatatcacctttatgaacccgatcgccgagaagatgagcggctggcggcaagaggatgctttaggcgcgccattattaacggttctgcgcattacgtcaggtgataaggggccgctgctggaggatatttatcgcgccgacaggtcgcgatcggacatggaacaggagatagtgctccattgtcataacggcggcagctacgatattcattacagtatcacgccgctcagtacgcttgacggcgataagattggttcggttctggttatccaggacgttaccgaatcacgaaaaatgttacgccagctcagctacagcgcaacgcatgacgccctcacccatcttgccaaccgcgctagttttgaaaaacagcttcaacagcgcctgcaaacaatacaggaatcgcctcaacatcatgcgctggtgtttatcgatctggaccgttttaaagcggttaacgacagcgcgggacatgccgccggcgatgccttattgcgcgaactcgcgtcactgatgctcagtatgcttcgatccggcgatcttctggcccgtctgggtggcgatgagtttggcctgttgctgccggattgtaatagtgacagcgcacgctttatcgtgacgcggcttatcaacgccgttaatgagtatcactttatgtgggaaggacgcctgcatcggatcggcgccagcgccgggatcacaatgataaatgaacataactgccagctcacagaggtcgtgtctcaggccgatatagcctgctacgccgcgaaaaatagcggtcgcggccgtctgaccgtgtacgaaccgcagcacgcattaacctcctcaaagggaatgatgccgctggaagaacagtggcatatgattaaaaataaccacctgctgatgcttgccagaaacgtcgcgccgccgcgtacgccggaggccaccagcttttggctggtctcactcaggctgtggaccagcgaaggggaagtgttggaagagcgcgcgttccgggcagggttagccgactccgcgctgcatcacgcgcttgaccgacgggtattccatgagtttttccaccatgcggcgaccgccgtcgccagcaagggattaagcgttgcgctgccgctgtccgccgcgggattatacagcgcgacccttattgatgagctgctggaacaactggagcatagcccactgccgccacggttattacatctgattatcccggctgacgttatcgttaagcaggcgcagaccgccgctgcgactctgcgaaaactgcggcaacgcggctgccaggtgattctcagccatgtcgggcgcgatttacagctgtttaatttactgcccccgcatatcgtcgattatttactgctggatagcgaccttatcgccaacgttcatgaaagtttaatggatgaaatgctgacctcgatcatccagggacacgcccagcatctggacatcaaaacgctcgccgggccggtacaaaacccacaggtgctggatacgctctcctgtattggcgtggatctgatttatggcgacactatcgccgaagcgcaaccgctggatttattactgaataccagctatttcgctatccattga

SEQ ID NO: 369852 - DNA, 642 bp, Salmonella enterica
atgactgatcagtctcatcagtgcgtcattatcggtatcgctggcgcatcggcttccggcaagagtcttattgccagtaccctttaccgcgaattgcgtgaacaagtgggtgacgaacatattggcgttattcccgaagacagttattacaaagatcaaagccatctgtcgatggaagaacgcgtaaaaactaactatgaccatccgaatgcgatggatcacagcctgctatttcagcatcttcaggcgctcaagcgcggttcggcgattgaattaccggtatacagttatgttgagcatacccgtatgcaggaaacggttcgcgtagaaccgaagaaagtgattattcttgaaggtattctgttactgaccgacgcgcgtttgcgtgaagagatgaacttctctatttttgtcgatacgccgctggatatctgtttgatgcgccgtatcaaacgcgatgtgaacgagcgtggtcgctcaatggattcggtgatggcgcaatatcagaaaacggtgcgtccgatgttcctgcaatttattgagccttccaaacaatatgcggatattatcgtgccgcgcggcggtaaaaaccgcatcgctattgatattctgaaagcgaaaatcagccagttctttgaataa

SEQ ID NO: 369853 - DNA, 582 bp, Salmonella enterica
atgcgtttatgcgaccgagatattgaagcctggctggatgaaggccgtttgtctatcaccccgcgacctcccgtagagcgcattaacggcgcgacggtcgatgtacgtcttggcaataaatttcgaaccttccgtggccatacggcggcgtttatcgatctgagcgggccgaaagacgaggtcagcgcggcgctggatcgcgtgatgagcgatgaaatcgttttgccggacggcgaggcattttatctgcatccgggcgagttggcgctggctgtcacctttgaatccgttaccctgccgccggatttagtgggctggctggatggtcgctcctcgctggcgcgtctgggattgatggtgcatgtgacggcgcaccgtatcgatcccggctggtcgggctgcattgtgcttgagttttacaactccgggaagctgccgctggcgttgcgtccgggtatgctcatcggcgcgctgagctttgagccgctgtccggcccggcggcgcggccttataaccgccgtcaggatgccaaatatcgcgatcagcagggcgctgtcgccagccggattgataaagactga

SEQ ID NO: 369854 - DNA, 1857 bp, Salmonella enterica
atgagacgatttctgacgacgctgatgattctcctggtcgtgctggtggccggattctctgcgttggtattgttggtcaatccgaatgatttccgcgcctatatggtgcagcaggttgccgcgcgtagtgaataccagttgcaactggacgggccgctgcgctggcacgtatggccgcaactcagcatcctttccgggcgaatgacgctaacggcgcgaggcgccagcgaaccgctggtgcgggctgacaatatgcgcctggatgtcgctttatggccgctgttgagtcatcagcttcatgttaagcaggtgatgctgaaaggcggggtgattcaactgacgccgcaaacggaagcggtacgcagtgatgatgcgccggtcgcgccgaaagataataccttgccggacgtagcggaagatcgcggctggtcgtttgatattcgtagcctgcgcgttgccgacagcgtgctggttttccagcatgaaaatgatgatcaggtcacggtgcgcgatattcgtctgaatatggaacaagatgccgagcatcgcggcacgtttgatttttcgggacgcgtgaaccgcgatcagcgggatcttgctttatcgttcagcggaacggtggatgcttccgattatccgcataacttaaccgcgggtattgagcaactgcgctggcaattgcagggcgcggatttaccggcgcaggggattgaggggcagggacagctgcaggcgcagtggcaggaggcgcaaaaacgtctttcatttaaccacttaaatttaacggcgaatgacagttctctgaccggacacgttcaggtaacgctggcggagcagccggaatggcaaattgacctccagtccagcaagcttaatctggacaacctgttgccgcatcatagcgccgtggctcagacgggcggcgcggtgtcgcaggggcaaaatacgctccccctgaccaggccagttatcgcgtcgcgtgttggtgcgccgccttatcaggggctgcaaagctttacggcggagattgctttacaggcggattcagttcgctggcggggaatggactttacccaggtttcgacgaagatgtctaatcaggccggattgctggatattaccgagttgcaggggaaactggccgacggagagatgtcgctgcccggcacgcttgacgcccgcaccgccagtccacgcatcgagttccaccctcgcctcaaccatgttgagattgggactatcctgaaagccttcaattatccgattagcctgaccggtaagatgtcgctggttggcgatttctccggggcggatattgacgcggaggcatttcgccacagctggaaaggaaaagcgcatgttgacatgagcaatacgcgcctcgaaggaatgaatttccagcaactggtgcagcaggccgtagagcgaagcggcggcgacgcgcagcagtcgcaggaaaatatggacaacgcgacccgactggatcgcttcacgaccgatctgacgctaaataagggcacgctgacgctcgacgacatggtcgggcaatcttctatgctggcgttaaccggcagcggaacgctggacctggttaagcagagctgtgatacgcaatttaatctgcgtgtgctgggcggctggaacggcgatagcaacctgatcaccttcctgaaagagacgccggtgccgctgcgcgtctatggcaagtggcaggagctgaactataccctgcaagtggatcagttattgcgtaagcatttacaggatgaggcgaagcgtcggctcaacgactgggcggagcgcaataaagatacccgcaatggtaaagatgtgaagaaactgctggataagctgtag

SEQ ID NO: 369855 - DNA, 1581 bp, Salmonella enterica
atggaatggattgccgatccgtcaatctgggccggactggtaacgttaatcgttatcgaacttgttctcggcattgataacctggtctttattgccatcctcgctgaaaaactaccgccggggcagcgcgaccgcgcgcgcattaccggcctgatactggcgatgatcatgcgcctgctgctgctggcgtcaatctcgtggctggtcaccttgactaagccgctttttagcgtacaggcgttaagctttagcgcccgcgatctgattatgctgttcggcggcttcttcctgctctttaaagccaccatggagctcaacgaacggctggaagggaaagatagcgccaaccctacccagcgtaagggggcgaaattctgggcggtggtcgcgcaaatcgtggtgctggacgctatcttttctctcgactccgtgattaccgccgtggggatggtcgatcacctggcggtcatgatggcggccgtgataatcgccattagcctgatgctgctcgccagcaagtcactgacccgatttgtgaacaaccatcccaccattgtcattttgtgtcttagcttcctgctaatgatcggctttagcctggtggcggaagggtttggtttccacattccgaaagggtatctgtacgcggctatcggcttctcggtgatgatcgaggcgctcaaccaactggctatttttaaccgccgccgttttctttccgctaaccatacgctgcgccagcgcacaacggaggccgtgatgcggctgattagcggtaaaaaagaggatgccgaactggatgcggaaaccgccgcgatgctggcagaccatgacgacagccagatttttaatccgcaggagcgcaggatgattaagcgggtgctgaatctcaaccagcgcaccgtaagtagcatcatgacgtcgcgtcacgatatcgagcatatcgatctcaacgcgccggaagcggaaatccgcgctctgctggaaaagaaccagcatacgcgtctggtcgtgacgggtgagaatgaacaggaagatttactcggcgtcgtccacgtcatcgatctgttgcaacaatcgctgcgcggcgaaccgctcaacctgcgggcgctgattcgccaaccgctggttttcccggaaacattgccgctgctgcctgcgctggagcagttccgtaacgccagaacccattttgcctttgtcgtagatgagtttggctcggttgaaggcattgtgacattaagcgatgtcatggagactatcgccggtaatttgccgaatgaagtcgaggaaattgacgcccgccacgatattcagaagaacccggacggttcctggacagcaaacggccatatgccgctggaggatttggtgcagtacgtgccgctaccgctggatgaaaaacgggaataccatacgattgccggattattgatggaatatttgcagcgcataccgcaaaccggtgaagaggttcaggtgggtgattatttgctgaaaacattgcaggtagaaagccatcgagtgcagaaagtgcagttaattccgctgcataacggcgagccagaccaggagatgtaa

SEQ ID NO: 369856 - DNA, 1140 bp, Salmonella enterica
atgatgaaatccaaaatgaaattgatgccattattggcgtcgctcagcttgataagtggttgcacagtacttccgggcagcaatatgtctacgatggggaaagatgtgatcaaacagcaagacgctgactttgatctcgaccggatggtcaatgtgtatccgctgacgccacggctggttgagcaattacgcccgcggcccaatgtcgcgcaaccgaatatgtcgctggaccaggagatcgccagctatcagtatcgcgtcgggcctggcgatgtgctgaatgtcaccgtctgggatcacccggaattgaccacgccagcgggccagtaccgtagctcaagcgataccggcaactgggtacagccggacggcaccatgttttatccctacattggcaaggttagcgtcgtcggtaaaactttgtcagagattcgcagcgatattaccgggcgtttagcgaagtacatcgcggacccgcaggtggatgtcaatatcgccgctttccgctcgcaaaaagcgtatatctccggccaggtgaataaatccggtcagcaggccattactaacgtaccgctaaccgtcctggatgcgattaacgccgcgggcggcctgaccgatatggcggactggcgcaacgtcgtgttgacgcacaacggcaaagaacagcgcatttcgctacaggcgctgatgcaaaatggcgatcttagtcagaaccgcttgctctaccctggcgacattctgtatgtgccgcgcaatgacgatctgaaagtctttgtcatgggcgaagtgaaaaaacagagcaccctcaaaatggatttcagcggcatgacgctcaccgaagcattgggcaatgcggaaggcatcgatctgaccacctccaacgccagcggcatttttgtgattcgtccgttgaaaggcgagggggaacgcggcggcaagatcgccaatatctaccagcttgatatgtctgacgccacgtcattggtgatggcgacggaattccgacttcagccttacgatgtggtgtacgtcacgaccgcgccggttgctcgctggaaccgtctgatcaatcagttgctgccaaccattagcggtgtccgttatatgacggatacggccagcgacattcattcctggtaa

SEQ ID NO: 369857 - DNA, 450 bp, Salmonella enterica
atgtttaacaaaatcttagtggtctgtgtggggaatgtttgccgttccccgacggcggaacgtttgctaaaacgctttcatccctcgctgacggttgcgtccgcaggattaggcgcgctggtcggcaaaggcgccgatcctgcggcggcgagcgtggcgagcgcccacaatctgtctttggaaaatcactgcgcaaggcaaatttccgcgcgtctgtgccgggaatatgacctgattctgacgatggagaaacgtcacatcgccgccctgtgcgacattgcgccggaaatgcgcggcaaggtaatgctgtttggtcactgggacagcgagcgtgaaataccggacccgtatcgcaaaagccgcgatgcgtttgaggcggtgtacacattactggaaaggtctgcccgccagtgggcgcaggcactgaatgcagagcagggaaaaccatga

SEQ ID NO: 369858 - DNA, 2160 bp, Salmonella enterica
atgacagaaaaagtaaaacaatctgcggcggttacgggtagcgatgaaatcgatatcgggcgcctggtcggaacggtgattgaagcgcgttggtgggtgttggggacgacggccatatttgcgctgtgcgcggtaatttatacgttcttcgccacgcccatctatagcgccgatgcgctggtgcagattgaacaaaacgccggtaattcgctggtacaggatatcaacagtgcattagcgaataagccgccggcttccgatgcggaaattcagctcattcgatcgcgcctggtgcttgggaagaccgttgacgatctggatctggatattgccgtcaccaaaaacacctttccgctgttcggcgccgggtgggaacggctgatggggcgtcacaatgaaatggtgaaagtcacgacattcacccgaccagagacgatgagcggacagatcttcaccctcaaagtgctgggcgacaaacgttatcagttggttagcgacggcggatttagcgcgcagggcgttgtgggccagccactcaataaagacggcgtgacgatgcaggtagaggcgattgacgcccgtcctgatacagaatttacggtgagtaaattctcaacgcttggcatgattaataacctgcaaaataacctcaccgtaacggaaaccggcaaagataccggcgttctgagcctgacgttcacgggagaggatcgcgaccagatccgcgaaattctcaacagtattacccgtaactatctgcaacaggatattgcgcggaaatctgaagaggcggggaagagcctggcgtttctggcaaaacaactgccggaagtccgcagccgtctggatgtggcggaaaacaagctaaacgctttccgccaggataaagactcggtggatttaccgctggaggcgaaggcggtgctcgattcgatggttaatatcgacgcccagttgaatgagttgacgtttaaagaggcggaaatttccaagctctttaccaaagcgcatccggcctaccgcaccctgctggaaaaacgtaaagcgctggaagatgaaaaagccaaactgaacgggcgggtgacggcaatgccgaaaacccagcaggagattgtgcgtttgacccgcgatgtggagtccggccagcaggtttatatgcaactgcttaataaacagcaggagctgaaaatcaccgaagccagcaccgttggcgatgtgcgcatcgttgacccggcgattacccagccgggcgtgctgaagccgaaaaaggcgttgattattctcggcagcattattctgggattaatgttatcgattgtcggcgtgctgctgcgctcgctgtttaatcgcggtatcgaaagcccgcaggcgctggaggagcacgggatcagcgtctatgccagtattccgctgtcggaatggcaaaaagcgcgcgatagcgtcaaaaccattaaagggattaagcgttacaagcagagccaactgctggcggtgggcaatccgaccgatctggcgattgaggcgattcgcagcctgcgcaccagcctccatttcgccatgatgcaggcgcaaaataatgtactcatgctcacaggcgtcagcccctctatcggtaaaacctttgtttgcgccaacctggcggccgtcatcagccagacgcataaacgggtattactgatcgactgcgatatgcgcaagggctacacccatgaactgctcggcaccaataacgtggacggcttatctgacattctggcgggcaaaggcgagatagcctcctgcgcgaaacctacggcgatcgctaattttgatcttattccgcgcggtcaggtgccgcctaatccatcggaactgctgatgagcgagcgcttcggcgagctgatcgcctgggcaagcagccgctacgacctggtattaatcgacacgccgccgattctggccgtgacggacgccgcgattgtgggtcgccacgtcgggacgacgctgatggtggcgcgttatgccgtcaacaccttaaaagaggtggaaaccagtctgagccgttttgaccagaatggcattcaggtcaaaggcgtcattctcaactccatttttcgccgggcgacgggctaccaggattatggttattacgagtatgaataccagtcagattccaaataa

SEQ ID NO: 369859 - DNA, 912 bp, Salmonella enterica
atggcgcggcctgtgactgtaggccggacaagcgtagcgccatgcggcaaaactatctggggaataagcatgacaacagacaatccgctgatctcaatttatatgccaacctggaacaggcagcagttggctatccgggcgattaaatcagtactacgtcaggactaccgccactgggagatgatcatcgtggatgattgctcctcgtcttatcagcagctacaacaatttgttgaggagctgaacgacccgcgcgtccgttatacccataacgccaggaataccggcgcctgcgcggttcgcaaccaggccattatgcaggcgcaaggacactacattaccggtattgatgatgacgatgaatggacgccaaaccgtctgagcgtgtttctggcccataaacaccagttgactacgcacgcctttttgtatgccaacgactatgtgtgcgagggcgaggtctactctcagcctgccagcctgccgctgtatccgaaatccccttattcgcgccgcttgttctacaagcgcaatattattggcaatcaggtttttacctgggcctggcgttttaaagcgtgtttgttcgataccgaactcaaggcggcgcaggattacgacatttttctgcgcatggtggtggagtatggcgaaccgtggaaagttgaagaggcgacgcaaattttacatatcaaccacggcgagatgcagattacctcttcgccgaaaaagttctccggctatttccatttttatcgtaagcacaaagataaattcgatcgcgccagcaaaaaataccagctttttacgctgtaccaaattcgcaataagcgaatgacctggcgcacgttgctgacgttgctctccgtgcgtaacagcaaacgcctggcggccgggctgcgggggcgataa

SEQ ID NO: 369860 - DNA, 489 bp, Salmonella enterica
atgttggaagacttacgcgcgaatagctggagcttacgcccctgttgcatggtgctggcctaccgtatcgctcatttttgttccgtctggcgcaaaaagaatgtgctgaataatctgtgggccgcgccggtgctggtgctgtatcgcgtgatcacggaatgcctgttcgggtatgaaatccaggccgccgcgaccattggtcggcggttcactatccatcatggttacgcggtagtgattaacaaacatgtcgtcgccggcgacgattttaccattcgccacggcgtcaccattggcaatcgcggcgcggacagcctggcttgtccggtgattggtcacggcgttgagctgggggcgaatgtcatcctgcttggcgatattactatcggtaatcacgtcacgattggcgcgggtagcgtggtacttgacagtattccggaccatgcgctggtggtgggagaaaaagcacgggtgaaggtcagcacatga

SEQ ID NO: 369861 - DNA, 1218 bp, Salmonella enterica
atgaatattctgcaatttaatgtacggctggcggaaggcggcgcggcgggagtggcgttggatctccatctgcgggcgctgcaaaaagggctgacgtcacgttttgtctatggttatggcaaaggcggaaaaaaaagcgtcagccaccaccgttatccgcaggtgataaaacagacgccgcgcggcacggcaatcgctaatatcgcgctgtttcgtttcctgaatcgcgatctgtttggcaatctcgacaatctttaccgcacggttatccagacatccggcccgctggtgctgcattttcatgttctccacagttactggctaaacctggcggatatcgtgacgttttgcgaaaaagtcaaagcgcaaaaaccggacgtcacgctggtctggacgctgcacgatcactggagcgtcaccgggcgttgcgccttcaccgacggttgcgagggctggaaaagcggctgccaaaaatgtccgaccctaagcaattatccgccggtcagggtggatcgggcgcaccagcttattggcggcaaacgtcagcgctttcgggacatgctgcggctgggctgccagtttatttcgccgagccagcatgtggccgaggcctttaacagcgtttatggcgcgggactctgccgggtgattaacaacggtatcgatctggcgaccgaggcgattctcgcgcaactatcacctgtgccgctgaatccgggcaaaccgcggatcgccattgtggcgcatgacttgcgttacgacggcaaaactgaccagcgtctggtacacgacatgatggcgctgggcgaaaaaattgaactgcataccttcggtaaattttcgccttttaccggccaaaacgttgttaatcacggttttgaaaccgataagcgcaaattaatgagcgcgctcaatgagatggatgcgctggtctttagctcgcgggtcgataactatccgctgatcttgtgtgaagcgctctcgatcggcgtaccggtgctcgctacccacagcgaggcggcgcaggaggtgctggcgaaatccggcggccagacctttgccgctacagatgtactgcgcctggcgcagcggcgtaagccagagattgctcaggcggtatttggcgccacgctggacgcctttcgtatgcgtagccgcgtcgcgtacagcggtcaacagatgctggaggagtatgtctcgttctatcagaatctgtag

SEQ ID NO: 369862 - DNA, 1215 bp, Salmonella enterica
atgtctcgttctatcagaatctgtagctatctgctgctgccgctgatctacctactggtcaatgtcaagattgcccaactgggggaaagctttcccattaccatcgtcacttttttaccgctgttgctgctgttatttgtggaacgcattagcgtaaaaaaattgatgatcgccttaggcatcggcgcggggcttacggcatttaacttcctgttcggccagtcgctgaatgccggtaaatatgtcacatccacgatgctgtttgtctatattgtggtcattatcgggatggtctggagtatccgattcaaaaccatttccgcgcataaccaccgaaagattttgcgttttttttatctggtggtgggtatagtggtcgcgctcgccgcggttgagatggcgcaaattatccttaccggcggcagcagtattatggaaggaatttcgaaatatctcatttacagtaatagctacgtactgaacttcataaaatttggcggtaagcgtaccactgcgctttattttgaaccggcatttttcgctttggcactaatctcaatttggctgagcatcaaacagtttggtatcaaaacaccgaaaagcgatgctatgattctggcagggataatattatcaggatcattttcaggggtaatgacctttatcctgttttaccttctggagtgggcgttccaatatttgaataaggatgcgataaagaaaaaacttccactggcgctggtctcattaaccctgtttttggttggggtaattattgcatttccttatatcgcgacacgacttggcgatttagggacggaaggctcatcttcttattatcgtattgtgggccccttagtcatggtcggatattccttgacccatattgatggtgtagtcagatttggctcactttatgaatatgtcgcatcattcggaatctttaacggtgcggatgtcgggaaaaccatagacaatggattgtatctgctgattatttatttttcctggttcgcagtgctaatgacgctgtggtatatggggaaagttttaaaaatggcgctaaatgcgtttggcgataatcgcaattttcgggtacagctctatctttttacgccggtgtcactgttttttaccggttcaatatttagcccggaatatgcttttttaatcgtctgtccgttcattttgcgcaaggcgttaaaaatttcataa

SEQ ID NO: 369863 - DNA, 747 bp, Salmonella enterica
atgtttttaagcgtcgttaccgtcgcctttcgcaattacgaaggggtggtaaaaacctggcgctcgctgcgcaatctggcgcgcgatccgggtctgtcatttgaatggatcgtagtggatggcggttcggaggacggcacgcgcgaatttctgcaaaaacgtcacggtgagtttaacctgcgttttatcagtgaaaaggatcgcggtatttatgatgccatgaacaaaggcattgcgctggcgcaggggcgttataccctgtttcttaattccggtgatgcgttccatgatgatgccgcgctgtttgtccgccaactggcgcggcaaaagggcgaggcgatgtatattggcgacgcgctgctggatttcggcggcgggcataaaatacgccggaaggctaaacccgggtattatatctaccatagtttgccagccagccatcaggcgatatttttcccgacggcagcgttaaaaaagtatccttatgatctgcaatatcatgtttcttcagattatgcgctggcggcccgtctttataaagcaggctatccttttcggcgaattaacggactggtatctgaattttcgatgggcggcgtgtcaacctcgaataatctggaattatgtcaggatgcaaaaaatgtacagcgaaaaatattacgtgtgccaggattttgggcgcaattatcctatttattacgtctgaaaacgacgggtaaaacaaaagcgcggtataacaaagtctaa

SEQ ID NO: 369864 - DNA, 555 bp, Salmonella enterica
atgcaggatcttagcggctttacggtgccgaaggggttccgcggcgctaatgtgctaaaagtacaattatggtgggcggtacaggcgacattattcgccgggtcgccgcaaatattgtatcgctggcgagcctttttgctgcgtctgtttggcgccaaaattggaaagaatgtggttattcgaccgtcagtaaaaattacctatccgtggaaattaaccgtcggcgattatgcctgggtaggcgacgacgctgtgttatatacgttgggtgaaattaatattggcgcacatgcggtcatttcacaaaaagggtatttgtgcaccggtagccatgattataccagcgcccatttcgatattaacgccgcgccgattgttattggcgaaaaatgttggctggcgaccgatgtttttgtcgcgcccggcgtgacgataggtcatggcaccgtcgtcggcgcgcgcagcagcgtatttaaatcattaccggcaaatgcgatttgtcggggcaatcccgcagtggtaacgcgccagcgcgttcagaaagttactccctaa

SEQ ID NO: 369865 - DNA, 1122 bp, Salmonella enterica
atgtcaaaagtcgctctcattactggcgtaaccggacaggatgggtcttacctggcagaatttctgctggaaaaagggtatgaggtgcatggtatcaagcgccgcgcgtcatcgtttaataccgagcgcgtggaccatatttatcaggacccgcacagctgcaacccgaaatttcatctgcattatggcgacctgaccgacgcctccaacctgacccgcattttacaggaagtgcagccggatgaggtctacaacctgggcgcgatgagccatgtggcggtgtcgtttgagtcgccggaatataccgccgatgtggatgcgatgggcacgctgcgcctgctggaggcgatccgcttcctcggtcttgaaaagaaaacgcggttctaccaggcctccacctctgaactgtacgggctggtgcaggagatcccgcagaaagagaccacgccgttctacccgcgttccccctatgcggtggcgaaactgtacgcctactggatcaccgttaactaccgtgaatcctacggtatttacgcctgtaacggcattctgtttaaccacgagtccccgcgtcgcggcgaaaccttcgtcacccgtaagatcacccgcgccatcgccaatatcgcccagggactggagtcctgcctgtatctcggcaacatggactcgctgcgcgactggggtcatgcgaaagattacgtgcggatgcagtggatgatgttacagcaggagcagccggaagatttcgtgattgccaccggcgtgcagtattccgtgcgccagtttgtggagctggcggcggcgcaactggggataaaactgcgctttgaaggcgaaggcattaatgagaaagggattgtggtatccgttaccggacacgatgcgccgggcgtgaaaccgggcgatgtgattgtggccgttgatccgcgttatttccgtccggcggaagtggaaaccctgctgggcgacccgtccaaagcgcatgagaaactgggctggaaaccggaaatcaccctgtcggagatggtctccgagatggtggcgaacgatctggaggccgcgaaaaaacactcactgctgaaatctcacggttacgaggtggccatcgcgctggagtcctga

SEQ ID NO: 369866 - DNA, 966 bp, Salmonella enterica
atgaataagcaacgaatttttgtggcgggccatcgcgggatggtgggctccgccattgtacggcagcttgcgccgcgcggcgacgtggaactggtgctgcgcacccgcgatgagctggatctgctcgacgggcgcgcggtacaggcgttctttgccggggcgggtatcgaccaggtttatctggcggcggcgaaagtgggcggcattgtcgccaacaacacatatccggcggattttatctatgaaaacatgatgatagagagcaacattattcacgccgcgcacctgcacaacgtgaacaaactgctgtttctcggttcgtcctgtatctatccgaaactggcaaggcagccgatggcggaaagcgagctgctgcaggggacgctggagccgaccaacgagccgtatgccatcgccaagatcgccgggattaaattgtgcgagtcctacaaccggcagtacggtcgcgactaccgttcggtgatgccaaccaacctgtacggcccgcatgacaatttccatccggacaattcacatgtgatcccggcgctgctgcgccgctttcatgaggccgcgcagagccacgcgccggaggtggtggtgtggggcagcggcacgccgatgcgcgaatttctgcacgttgacgatatggcggcggccagcattcacgtgatggagctggcgcgcgaagtgtggcaggagaacaccgctccgatgctgtcgcacattaacgtcggcactggcgtggactgcaccatccgcgagctggcgcagactatcgcaaaggtggtgggttaccagggccgggtggtgttcgacgccacgaagccggacggcacgccgcgtaaattgctcgacgtcacgcgcctgcatcagcttggctggtatcacgaaatttcactggaggcagggcttgccggtacttaccagtggttccttgagaatcagcaccggttccgggggtga

SEQ ID NO: 369867 - DNA, 474 bp, Salmonella enterica
atgtttttacgtcaggaagatttcgccgccgtggtgcggaccacgcccctcatctccctcgatttcatcgtggaaaacggccagggggaaattttactgggccagcgtctcaaccgtccggcgcagggctactggtttgtgccgggggggcgggtgtgcaaagacgaaacgctggaggccgcctttgcacgcctgacgcaggcggaactgggcgtgcgtctgccgctggcggcagggacgttttatggcgtctggcagcacttctatgacgacaacttttccggtgaggatttttcaactcactacatcgtgctcggctttcgtctgcgcgtgacggagagcgatttacgcctgcctgatgcccagcatggcagttaccgctggctgacgccggaacagcttctggcaagcgacaatgttcatgagaacagtcgggcctacttccttcctgacgcgccggcggtgggcctatga

SEQ ID NO: 369868 - DNA, 1224 bp, Salmonella enterica
atgaagatcctggtctatggcattaactattcgccggaactgaccggtatcggcaaatataccggcgaaatggtggcgtggatggcgcaggaaggccatgaggtgcgggtcattactgcgccgccgtactacccgcagtggaaggtcggtgagcgctattccgcctggcgctatcgccgggaagagggcgaggctaccgtctggcgctgcccgctgtatgtgccgaaacagccctccaccttaaaacgactgcttcatctggggagctttgcattgagcagttttttcccactgatggcgcagcgtcgctggaagccggatcggattatcggcgttgtaccgacgctcttttgtacgccgggaatgcgcctgctggcgacactctccggcgcgcgtaccgttctgcatattcaggattacgaagtggatgccatgctcggcttaggaatggcgggaaaaggcaagcgcggcagcgtagcgcggttagcgacggcctttgaacgcagcgcgctgcgtaacgttgataatgtttcgaccatctctcgctccatgatgaataaagcgcgggaaaagggcgtcgcggcggaaaaaatcctcttttttccgaactggtcggaagtggcgcgctttcaggacgttaatgacgctgacgtgacggctttgcgtcagcagcttggcttgccagagggcaaaaaaattgtgctttattccggcaatatcggcgaaaagcaagggctggaaaaggtgattgacgccgcggaacgattacgcgatcgaccgttgatttttgcgattgtcggccaggggggcggcaaggcgcggctggagaacatggcccgcgaacgcggcctggcaaatattaaattcctcccgctgcagccttacgacgccttacccgcgctgctgaaaatgggcgactgccatctggtggtgcaaaagcgcggcgcggcggatgcggtactgccctccaagctgactaacattctggcggtcggcggtaatgcggtgattaccgctgagccgcacaccgaattaggacaactttgcgcgcgctatccgggcatcgccgtttgcgtggaaccggagtcgaccgacgcgctggtcaacgggattagccaggcgctcgccatgccgaaaaacaacacgacggcacgtgaatacgccgaacgcactctcaataaagagaacgtgctacgccaatttattgcagatattcggggatga

SEQ ID NO: 369869 - DNA, 1437 bp, Salmonella enterica
atgcgtcagacaaaactttacccggttgtgatggccggtggctccggtagccgattgtggccgctttctcgcgtgctttatccaaaacagtttctgtgcctgaaaggcgatctcaccatgctgcaaaccaccatttgccgtctgaacggcgtggagtgcgaaagcccggtggtgatctgtaacgaacagcaccgttttatcgttgccgaacagctccgccagctcaataagctgacggagaacattattcttgagcccgccgggcgcaataccgcgccggcgattgcgctggcggcgctggcggcgacgcgccagcatacggactgcgatccgctgatgctggtactggcggcggatcatgcaatcgccaatgaagaggccttccgcgacgcggtgcgcggcgccatgccctatgccgacgcgggcaaactggtgaccttcggtatcgtgccggatctgccggaaaccggctatggctatatccggcgcggtgatgtcgtgccgggcgcgacggatgcggtggcttttgaggtggcgcagttcgttgagaagccggggctggaaaccgctcaggcctacgtcgccagcggcgattactactggaacagcggcatgtttctgttccgcgccggacgctatctggaagagctgaaaaagttccgccccgatattctggccgcctgtgaacaggcgatgcgcggcgtcgatccggatcttgacttcattcgtgtggatgaagaggccttcctcgcctgtccggaagagtccattgactacgcggtgatggagcgaacggtggacgcggtggtgatgccgatggacgcgggctggagcgatgtcggctcgtggtcctcgctgtgggaaatcagcgcccacaccccggagggaaacgtccaccacggcgacgtcatcagccataaaacggaaaacagctacgtttacgccgaatccggcctggtgaccaccgtcggcgtgaaggatctggtggtggtgcagaccaaagacgccgtgctgattgccgatcgccacgcggtgcaggacgtgaaaaaggtggtggagaagatcaaggccgacggacgccatgagcaccacatgcaccgtgaggtttaccgtccgtggggcaaatacgactccatcgacgcgggcgagcgctatcaggtgaagcgtattaccgtcaagccgggggagggactgtcggtgcagatgcaccatcaccgcgccgagcactgggtggtggtggcggggaccgccagagtcaccatcaacggcgaggttaagctgctcggtgaaaacgagtccatctatattccgctgggggcgactcactgcctggaaaatccgggaaaaataccgctcgatttaattgaagtgcgttccggctcgtatctcgaagaggacgacgtggtgcggttcgaggaccgttacgggcgggtctga

SEQ ID NO: 369870 - DNA, 1371 bp, Salmonella enterica
atgacaaaattaacctgtttcaaggcctacgacattcgcggcaggctgggcgaagagctcaatgaagatatcgcgtggcggattggccgcgcctacggcgaatatttaaaaccgaaaaccatcgtgctgggcggcgacgtgcgtctgaccagcgaggcgctgaagctggcgctggcgaaagggttacaggacgcgggcgttgacgtgctggatatcggtatgtccggcaccgaagagatttacttcgccaccttccaccttggcgtggacggcggtattgaggtgaccgccagccataacccgatggactacaacggtatgaagctggtacgcgagggcgcccgcccgataagcggcgacaccggtctgcgcgacgttcagcgtctggtggaagcgggcgacttcccgccggtgaacgaggccgcgcgcggcagctacagacaaatcagcctgcgcgacgcctacatcggccacctgctcggctatatcagtgttaacaatctcaccccgctgaagctggtgtttaacgccggcaacggcgcggcggggccggtcattgacgccatcgaagcgcgcctgaaggcgctgggcgcgccggtggagttcatcaaaatccacaacaccccggacggcaccttcccgaacggcattcccaacccgttgctgccggagtgtcgcgacgacacccgcaaggccgttattgaacacggggcggacatgggcatcgcctttgacggcgacttcgaccgctgcttcctgttcgatgagaaagggcagtttatcgaggggtactacatcgtcgggctgctggcggaagcgtttctggaaaaacacccgggggcgaagattatccacgacccgcgcctgacctggaacacggaggcagtggtgacggcggcgggcgggacgccggtgatgtcaaaaaccgggcacgcctttatcaaggagcggatgcgtacggaggatgccatttatggcggggaaatgagcgcgcatcactattttcgtgattttgcctactgcgacagcgggatgatcccgtggctgctggtggcggagctggtgtgcctgaagagacagtcgctgggtgagctggttcgcgaccggatggcggcgttcccggcgagcggggaaatcaacagcagactggcggagccggcggcggccattgcgcgggtggaagcgcactttgcggaagaggcgcaggcggtggatcgcacggacggtctcagcatgtcgttcgccgactggcgtttcaacctgcgctcgtcgaacaccgaaccggtggtgcgcctgaatgtggaatcacgcggcgatattccgctgatggaagcgcgaacacgcactctgctggcgctgctgaatcagtaa

SEQ ID NO: 369871 - DNA, 1395 bp, Salmonella enterica
atgacaaatctaaaaaagcgcgaacgagccaaaaccaatgcatcgttaatctctatggtgcaacgcttttcagatatcaccatcatgtttggcgggctgtggttcatctgtgaagtcagtggactgccattcctgtacatgcacctgttggtggcgctgattacgctggttgtttttcaaatgctgggcgggatgaccgatttttatcgctcctggcgcggcgtcaaaatgtcgacagagttaacgctgttactgcaaaactggacgctgagcctgatcttcagcgccggtctggtggcgtttaatgatgactttgacaaccgcctcgccacctggctggcttggtatgcgctgtccagcctgggcttagtgttatgccgttcatttattcgtttcggcgcgggctggctacgcaatcgtggttataacactcgccgggtcgccgtcgccggagatttgcctgcgggtcaggcgttgctggatagcttccgtaatgagccgtggctgggttttgaggtggtgggcgtctatcacgatcctaaaccgggcggcgtctctgctgactgggccgggaacttcgagcagttaattgacgatgcgaaagcctcgcgaattcacaatgtttatatcgccatgtcgatgagcgacggcgccatggtgaaaaaactggtgcgcgagctggccgacaccacctgctcggtgatccttattcccgatgtgttcacctttaatattctccactcgcgcgtggaggagatgagcggcgttccggtcgttccgctgtatgacacgccgctatcagggattaaccgtctgcttaaacgggcagaagatatcgtgctggcgtcgctgattctgctgctcatctcaccggtactgtgctgcattgcgctggcggtcaaattgagctcgcccgggccggtgattttccgtcagacgcgctacgggatggacggcaagccgatcaaggtctggaagttccgctcaatgaaggtgatggagaacgataaggtcgttacccaggcgacgcaaaacgatccgcgcgtcacccgggtaggtaactttttgcgtcgtacctcgctggatgaattgccgcagtttatcaacgtattaactggcgggatgtccatcgtcggtcctcgcccgcacgcggtggcgcataacgaacagtatcgtcagttgattgaaggttacatgctacgccacaagatgaagccgggcatcaccggctgggcgcaaattaatggctggcgcggtgagaccgatacgctggagaaaatggaaaaacgcgtggaattcgacctggaatacatccgcgaatggagtatttggttcgatatcaaaatcgtttttctgacgatttttaaagggtttgttaataaagcggcgtattaa

SEQ ID NO: 369872 - DNA, 1479 bp, Salmonella enterica
atgagtttacgacaaaaaacgatcagcggcgctaaatggtcggctatcgccacgatagtgattatcggtctggggttaattcagatgacggtgctggcgcggatcatcgacaaccaccagtttggcctgttgaccgtctcgctggtgattatcgcgctggccgacacgatctcggactttggcatcgcgaactcgattatccagcgtaaaacgattgggcatctggagctgaccacgctctactggctaaacgttgggcttgggattgtggtatttgcggtggtcttttggctgagcgatgcgattgcccatgttttgcataacccggatctcgcgccgttaatcaaaacgttgtcgctggcgttcatcgtgatccctcacgggcagcagttccgcgctctgatgcaaaaagagctggagttcaataagatcggcatgatcgaaacgacctccgtgctggcggggttcacctttacggtgattagcgcccattactggccgctggcgttaaccgcgattctcggctatctggtgaacagtgcggtgcgaacgctgctgtttggttactttggccgcaagatttaccgtccggggctgcatttttcgctggcatcggtgtccacgaacctgcgttttggcgcgtggctgacggcggacagtatcgtcaattacatcaacacgaatttatcgacgctggtactggcgagaattctcggcgcaagcgtcgccgggggatataacctcgcgtacaacgtggcggttgtgccgccggcgaagcttaaccccatcattactcgcgtgctatttccggcattcgccaaaatccaggacgataccgagaagctgcgcgtcaacttctataagttgctttccgtggtgggaattatcaattttcccgcgctgttgggcctgatggtagtggcgaacaattttgtgccgttagtgtttggcgagaagtggaacagtattatcccgatcctgcaattgctgtgcgtggtggggctgttgcgctcggtcggcaacccgattggttcgctgctgatggcgaaagcgcgcgtggatatcagctttaagttcaacgtctttaaaacgtttctgtttatcccggcaattctcattggcggccatctggcgggggcgattggcgtgacgctggggttcctggtggtgcaaatcatcaacaccattctgagctatttcgtgatgattaagccggtactcggctccagctatcgtcagtatattctcagcctgtggctaccgttttatctctcattgccaacatttattaccagctacggcgcaggaaagctggccgacggctatttaccgttgtcaggggtattcgcactacaggttatggtcggtattttgagttttattttgatgattattttttcacgcaatgcgctggtgatggaaattaaaaatcagcttgttggcagtgcaaaaatgaaaaagttattacgtgtcggatga

SEQ ID NO: 369873 - DNA, 1281 bp, Salmonella enterica
atgaaattattaattttaggcaaccacacatgcggcaaccgtggtgatagcgccattatgcgcggtttgcttgatgccatccgtcaacaggcgccggaggcggagatggatgtgatgagccgtttcccggtgagttccgcctggttgcaggggcgcccgattattgccgacccgctgtatcagttaagccagaaacagcaggcggcggcagggcttaacggtcgggtgaaaaaagtattacgccgtcgttttcagcataaaattttattgtctaaagtcgcccaggaaggatcgctgcgtaattttgctatcgcgccggaatttgccgaattcgcgcaatttattgcgcagtatgacgccgtcattcaggtgggcggttcaaactatgtcgacttatacggtttgactcactttgaatatccgctgtgcgcgtttatggcgaacaaaccaatttatatggtgggacatagcgtcggccctttccagaatcctgactttaaccagctcgccaattatgtttttggccgcaccagtgcgctgatcctgcgtgaaaccgtcagccgcgatatgatgaccgccgcgcagatcgatacccggaaagtggagcagggggtggataccgcctggttagtcgaacgccgtcacgacgagtttgttgccagttatgctgtgcagcactggctggacgtcaccgcgcgccgcaaaaccgtcgcgattacgttgcgcgatctggagccgtttgataaacgcctgggcaccactcagcaggcctatgagcaggcatttgcccaggtcgtgaatcgcctgattgcggacggttatcaggtactggcgctgtcaacctgcaccagtatcgatcgctataaccgcgatgaccggatggttgcgttacggatggcgaagtatgtaaacgactcagagaatttccatatcgcgatggacgaactcaatgacgtggaaatcggaaagatcctcgcctcctgcgtactgaccatcgggacgcgcctgcattccgccattatctccatgaattttggcacacccgccatcgccattaattatgaacataaatccgccgggattatgcagcagctaggcctggcggaattggccatcgatatccgtcacttgctgaacggttcattacaaagcgtggtggccgatacgctcaatcaattgcctgcgctaaaggcaaaagtggctaacgccgtcaccgaggagcgggcgaaagggttcacgatgatcaaatctgttctcgacagaattcgggaggcgcaatga

SEQ ID NO: 369874 - DNA, 1221 bp, Salmonella enterica
atgaaagtcagcttttttctgctgaaatttccactctcatcggaaacctttgtgctgaatcagattactgcgtttattgatatgggccatgaggtggagattgtcgcgttacaaaaaggcgatacccaacatactcacgccgcctgggagaagtatggcctggcggcgaaaacccgctggttacaggatgagccccagggacggctggcgaaactgcgctaccgggcatgtaaaacgctgccggggctgcatcgggcggcgacctggaaagcgctcaattttacccgctatggcgatgaatcacgcaatttgatcctttccgcgatttgcgcgcaggtgagccagccttttggggcggatgtgttcatcgcacactttggtccggcgggcgtgacggcggccaaactacgcgaactgggcgtgcttcgcggcaaaatcgcgactattttccacgggattgatatttccagccgcgaagtgctcagtcattacacgccggagtatcagcagttgtttcgtcgtggcgatctgatgctgcccatcagcgaactgtgggccggtcgcctgaaaagtatgggctgtccgccggaaaagattgccgtttcgcgcatgggcgtcgacatgacgcgttttacctatcgtccggtgaaagcgccagggatgccgctggagatgatttccgtcgcgcgcctgactgagaaaaaaggcctgcatgtggcgattgaagcctgtcggcaactgaaagcgcagggcgtggcgtttcgctaccgcattctgggcattggcccgtgggaacgtcggctgcgcacgctcatcgagcagtatcagctagaggatgtcattgagatgccggggtttaaaccgagccatgaagtgaaggcgatgctggatgacgccgatgtttttttgctgccgtcgattaccggtacggatggcgatatggaaggtattccggtagcgctgatggaggcgatggcggtagggattcccgtggtatctaccgtgcatagcggtattccggaactggtggaggccggcaaatccggctggctggtgccggaaaacgatgcgcaggcgctggcggcccgactcgctgagttcagccggattgaccacgacacgctggagtcggtgatcacgcgcgcccgtgaaaaagtggcgcaagattttaatcagcaggcgattaatcgccagctagccagcctgctacaaacgatataa

SEQ ID NO: 369875 - DNA, 1404 bp, Salmonella enterica
atgcccgtgaataagttctcccgacgtaccctcctgacggcaggttccgcgcttgctgttcttccttttctgcgcgccttgccggtacaggcgcgtgaacctcgcgagaccgtcgatattaaggattatccggcggatgacggtatcgcctcgttcaaacaggccttcgccgacggacagaccgtggtcttaccgccaggatgggtgtgtgaaaatatcaatgcggcgataacgattccggcgggaaaaacgctgcgggtacagggcgcggtgcgtgggaatggccggggacggtttattttgcaggacgggtgtcaggtggtgggggagcagggcggcagtctgcacaatgtgacgctggatgttcgcgggtcggactgtgtgattaaaggcgtgacgatgagcggctttggccccgtcgcgcaaattttcatcggcggtaaggaaccgcaggtgatgcgtaatctcattatcgatgacatcaccgttacccacgccaactacgccattctccgccagggatttcataaccaaatggacggcgcgcggattacgcatagccgctttagcgatttgcagggggacgccattgagtggaatgtcgcgattcacgaccgcgacatcctgatttccgatcatgtcatcgaacgcattgattgtaccaatggcaaaatcaactgggggatcggcatcgggctggcgggtagcacctatgacaacagttatcctgaagatcaggcagtaaaaaactttgtggtggccaatattaccggatctgattgccgacagctggtgcacgtagaaaatggcaaacatttcgtcattcgcaatgtcaaagccaaaaacatcacgcccgatttcagtaaaaatgcgggtattgataacgcaacgatcgccatttatggctgtgataatttcgtcattgataatattgatatgacgaatagtgctgggatgctcatcggctatggcgtcgttaaaggaaaatacctgtcaattccgcaaaactttaaattaaacgctattcggttggataatcgccaggttgcttataaattacgcggcattcaaatttcctccggcaacatcccctcttttgtcgccatcaccaatgtacggatgacgcgtgctacgctggaactgcataatcaaccgcagcacctctttctgcgtaatatcaacgtgatgcaaacttcagcgattggcccggcgttaaaaatgcatttcgatttgcgtaaagatgtccgtggtcaatttatggcccgccaggacacgctgctttccctcgctaatgttcatgccatcaatgaaaacgggcagagttccgtggatatcgacaggattaatcaccaaaccgtgaatgtcgaagcagtgaatttttcgctgccgaagcggggagggtaa

SEQ ID NO: 369876 - DNA, 894 bp, Salmonella enterica
atgatgaatttgaaagcagttataccggtagcgggtttgggtatgcatatgttgcctgccaccaaggcaatcccaaaagagatgctaccgatcgtcgacaagccaatgattcagtacattgtcgatgagattgtggctgcagggatcaaagaaatcgtactggtgactcacgcgtctaaaaacgccgttgagaaccacttcgacacctcttatgaacttgaatcacttcttgagcagcgcgttaagcgccagcttttggcggaagtgcaatctatctgcccaccgggcgtgacgattatgaacgttcgccaggcgcagccgttagggctggggcactctattctgtgcgcgcgtccggtcgtgggcgataaccctttcattgtggtactcccggatattattatcgatgatgctaccgccgatccgctgcgctataaccttgcggcgatggtggcgcgtttcaatgaaacgggtcgcagccaggtgctggcgaagcgcatgaaaggtgatttatcggagtattccgttatccagacgaaagaacctctggataatgaaggcaaagtcagccggattgtggagtttatcgaaaaaccggatcagccgcagacgctggattccgatttgatggcggtaggccgttatgtgctttcagccgacatctgggcggaactggaaagaaccgaaccgggcgcctggggccgtatccagctcaccgatgccattgcagaactggcgaaaaaacagtcggttgacgcgatgctaatgacgggtgacagctatgactgcggtaaaaaaatgggctacatgcaggcatttgtgaagtacgggctgcgcaacctgaaagaaggagcgaagttccgtaagagcatagagcagcttttgcatgaataa

SEQ ID NO: 369877 - DNA, 1086 bp, Salmonella enterica
gtgaagatacttattactggcggggcaggttttattggatcagctgttgtccgccatattattaagaatacacaggacactgtagttaatattgataaattaacctacgccggtaatcttgaatccctttctgatatttctgagagtaatcgctacaattttgaacacgcggatatttgtgattccgctgaaataacgcgtatttttgagcagtaccagccggacgcggtgatgcatttggctgcggaaagtcatgtggaccgttcgattaccgggccagcagcatttattgaaaccaatatcgtcggcacctatgtacttcttgaagttgcgcgtaaatactggtctgcgcttggcgaagataaaaaaaataattttcgttttcatcatatttccactgatgaagtttacggcgatttaccgcatcctgatgaagttgaaaacagcgttacgctgccgttatttactgaaacgacggcatatgcgccaagtagcccctattctgcgtcaaaagcatccagcgatcatttagtccgtgcctggcggcgtacctatggtctaccaacgatcgttaccaattgttctaataactatggcccttatcacttccctgaaaaactgattccgttggtcattttgaacgcactggaaggaaagcctttgccaatttatggcaaaggggatcagattcgcgattggctatatgtagaagatcatgctcgcgcgcttcatatggtagtgactgaaggcaaggcgggggagacttataacattggtggccacaatgagaagaaaaatctcgatgtggtatttaccatctgtgatctgctggacgagattgtacccaaagcgacttcttatcgtgaacaaatcacttatgtcgcggatcgtccgggccatgatcgtcgttatgccattgatgcaggtaaaattagccgcgaattaggctggaaaccgctggagacctttgaaagcggtattcgtaaaacagtggaatggtaccttgcaaatactcaatgggtaaacaatgttaaaagtggggcgtatcagagttggatagaacagaactatgaaggacgccagtaa

SEQ ID NO: 369878 - DNA, 900 bp, Salmonella enterica
atgaatatcttactttttggtaagacagggcaagtaggctgggagttgcaacgttctctggcaccagtagggaatctgattgccctggatgtccattcaaaagagttttgcggtgattttagtaatccgaaaggcgttgccgaaaccgttcgtaagcttcgtcccgatgtgattgttaacgcagcagcacatactgcagtagataaagcagagtctgaaccagaactggcgcagttacttaacgccaccagtgtggaagccatcgctaaagcagccaacgaaactggcgcatgggtagtgcattattcaaccgattatgtatttcctggtaccggcgatatcccatggcaggaaacggacgctacgtcgccgctgaatgtctatggcaagaccaaactggcgggagaaaaggccctgcaggataactgccctaagcatcttatcttccgcaccagttgggtttatgcaggtaagggcaataatttcgcaaagacaatgcttcgtctggcgaaagagcgtcagacactttcagtcatcaacgatcagtacggtgcgccaaccggtgcagaattactggctgactgcacggctcatgcgatccgtgtggcgttaaagaaaccagaagtcgcaggtctttaccatctggttgccgggggaaccacaacctggcatgactacgcggccttagtctttgacgaggcgcgcaaagcagggataacgcttgcgctgactgagcttaatgctgtgccgaccagcgcctacccgacgccggcgagcagaccaggcaattcgcgtctcaatactgaaaagtttcagcgtaattttgaccttattctgccgcaatgggaattaggagttaagcgcatgctgactgaaatgtttacgacgacaaccatctga

SEQ ID NO: 369879 - DNA, 879 bp, Salmonella enterica
atgaaaacgcgtaagggcattattttagcggggggctccggcacccgtctttatccggtgaccatggcggtaagtaagcaattgctaccaatttatgataaaccgatgatttactatcccctttccacgcttatgctggcaggcattcgggatatcctgatcatcagtacgccacaggacacgccgcgttttcaacaactgctgggagacggcagccagtgggggctgaatcttcaatataaagtacagccaagcccggatggcttagcacaggcgtttattattggtgaagagttcattggtaatgatgattgtgcattagtactgggtgacaatatcttctatggtcatgatttaccaaagttaatggaagctgccgttaataaagaaagtggtgctaccgtctttgcttatcatgtaaacgatccggagcgctacggtgtggttgagtttgaccaaagtggcacagccgttagtctggaggaaaaaccgttacaaccgaagagtaattacgcggtaacggggctgtatttttatgataatagcgtggtggagatggcgaaaaatcttaagccttccgctcgcggtgagttagaaatcacggatattaaccgtatctatatggatcagggaagattgtctgtcgccatgatggggcgcggttatgcctggctggatacagggacgcatcagagtttgatagaggccagtaattttattgcaaccatcgaagaacgccaggggctaaaagtgtcctgcccggaagagatcgcatttcgtaaaaattttataaatgcacaacaggttatagaactggccgggccattatcaaaaaatgattatggcaaatatttgctgaagatggtgaaaggtttataa

SEQ ID NO: 369880 - DNA, 549 bp, Salmonella enterica
atgattgtgattaaaacagcaataccagatgtcttgatcttagagcctaaagtttttggcgatgagaggggattcttttttgaaagttataaccagcagacctttgaagagttgattggacgtaaagttacatttgttcaagataatcattcaaaatccaaaaagaacgtactcagagggctacattttcagagaggagaaaatgcacaggggaagttagttcgttgtgctgtcggtgaggtttttgatgttgcggtcgatatccgaaaagaatcgcctacttttggtcaatgggttggcgtaaatctatctgctgagaataagcgacagctttggattccagaaggttttgctcatggttttgttactcttagtgagtatgcagagtttctgtacaaagcaactaattattactcaccttcatcggaaggtagcattttatggaatgatgagacaataggtattgaatggcctttttctcagctgcctgagctttcagcaaaagatgctgcagcacctttactgcatcaagccttgttaacagagtaa

SEQ ID NO: 369881 - DNA, 975 bp, Salmonella enterica
gtgtctcatattattaagatttttccatcaaatattgaattttccggtagagaggatgaatcaatcctcgatgctgcgctatcggctggcatccatcttgaacatagctgcaaagcgggtgattgtggtatctgtgagtccgatttgttggcgggagaagttgttgactccaaaggtaatatttttggacagggtgataaaatactaacctgctgctgtaaacctaaaaccgcccttgagctaaatgcgcatttttttcctgaactagctggacagacaaaaaaaattgtcccatgcaaggtaaatagtgctgtactggtttcaggcgatgttatgactttgaagttacgcacaccaccaacagcaaaaattggcttccttccagggcagtatatcaatttacattataaaggtgtaactcgcagttattctatcgctaatagtgatgagtcgaatggtattgagttgcatgtaaggaatgttcccaatggtcagatgagctctctcatttttggggagttacaagaaaatactcttatgcgcattgaaggaccttgcggaacattttttattcgtgaaagtgacagacctataatcttccttgcaggcggtactggattcgctccagttaaatcaatggttgagcatctcattcagggaaaatgtcgtcgtgagatctacatctactggggaatgcaagatagtaaagatttttactctgcattaccgcagcagtggagtgaacagcacgacaacgttcattatatccctgttgtttctggtgatgacgccgaatgggggggaagaaagggatttgtccatcatgctgtgatggatgattttgattctctagagttcttcgatatatatgcatgtggttcacctgtgatgatcgatgccagtaaaaaggactttatgatgaaaaatctctctgtagaacatttctattctgatgcatttaccgcatctaaataa

SEQ ID NO: 369882 - DNA, 774 bp, Salmonella enterica
atgaaagcggtcatcctggctggtggacttggtaccagactaagtgaagaaacaattgtaaaaccaaaaccgatggtagaaattggtggcaagcctattctttggcacattatgaaaatgtattctgtgcatggtatcaaggattttattatctgctgtggttataaaggatatgtgattaaagaatattttgcgaactacttccttcacatgtcagatgtaacattccatatggctgaaaatcgtatggaagttcaccataaacgtgttgaaccatggaatgtcacattggttgatacgggtgattcttcaatgactggtggtcgtctgaaacgtgttgctgaatacgtaaaagatgacgaggctttcctgtttacttatggtgatggcgttgccgaccttgatatcaaagcgactatcgatttccataaggctcacggtaagaaagcgactttaacagctacttttccaccaggacgttttggcgcattagatatccaagctggtcaggtccggtcattccaggaaaaaccgaaaggcgatggggcaatgatcaatggtggtttctttgtgttgaatccatcggttatcgatctcatcgataacgatgcaacaacctgggaacaagagccattaatgacattggcacaacagggggagttaatggcttttgaacacccaggtttctggcagccgatggataccctacgtgataaagtttaccttgaagggctgtgggaaaaaggtaaagctccgtggaaaacctgggagtaa

SEQ ID NO: 369883 - DNA, 1080 bp, Salmonella enterica
atgattgataaaaatttttggcaaggtaaacgtgtattcgttaccggccatactggctttaaaggaagctggctttcgctatggctgactgaaatgggtgcaattgtaaaaggctatgcacttgatgcgccaactgttccaagtttatttgagatagtgcgtcttagtgatcttatggaatctcatattggcgacattcgtgattttgaaaagctgcgcaattctattgcagaatttaagccagaaattgttttccatatggcagcccagcctttagtgcgcctatcttatgaacagccaatcgaaacatactcaacaaatgttatgggtactgtccatttgcttgaagcagttaagcaagtaggtaacataaaggcagtcgtaaatatcaccagtgataagtgctacgacaatcgtgagtgggtgtggggctatcgtgagaacgaacccatgggagggtacgatccatactctaatagtaaaggttgtgcagaattagtcgcgtctgcattccggaactcattcttcaatcctgcaaattatgagcaacatggcgttggtttggcgtctgtgagggctggtaatgtcataggcggaggcgattgggctaaagaccgtttaattcccgatattctgcgctcatttgaaaataaccagcaggttattattcgaaacccatattctatccgtccctggcagcatgtactggagcctctttctggttacattgtggtggcgcaacgcttatatacagaaggtgctaagttttctgaaggatggaatttcggcccgcgtgatgaagatgcgaagacggtcgaatttattgttgacaagatggtcacgctttggggtgatgatgcaagctggttactggatggtgagaatcatcctcatgaggcacattacctgaaactggattgctctaaagcaaatatgcaattaggatggcatccgcgttggggattgactgaaacacttggtcgcatcgtaaaatggcataaagcatggattcgcggcgaagatatgttgatttgttcaaagcgtgaaatcagcgactatatgtctgcaactactcgttaa

SEQ ID NO: 369884 - DNA, 1314 bp, Salmonella enterica
atgacagcaaataacctgcgtgagcaaatctctcagcttgtcgctcagtatgcgaatgaggcattgagcccgaaaccttttgttgcaggtacaagcgttgtgcctccttccgggaaggttattggtgccaaagagttacaattgatggttgaggcgtctcttgatggatggctaactactggtcgtttcaatgatgcctttgagaaaaaacttggggaatttattggggttcctcatgttttaacgactacatctggctcttcggcaaacttgctggcactgactgcgctgacttccccaaaattaggcgagcgtgctctcaaacctggtgatgaggttattactgtcgctgctggcttcccgactacagttaacccggcgatccagaatggtttaataccggtattcgtggatgttgatatcccgacatataatatcgatgcctctctcattgaagctgcagttactgagaaatcaaaagcgataatgatcgctcatacactcggtaatgcatttaacctgagtgaagttcgtcggattgccgataaatataacttatggttgattgaagactgctgtgatgcccttgggacgacttatgaaggccagatggtaggtacctttggtgacatcggaaccgttagtttttatccggctcaccatatcacaatgggtgaaggcggtgctgtattcaccaagtcaggtgaactgaagaaaattattgagtcgttccgtgactggggccgggattgttattgtgcgccaggatgcgataacacctgcggtaaacgttttggtcagcaattgggatcacttcctcaaggctatgatcacaaatatacttattcccacctcggatataatctcaaaatcacggacatgcaggcagcatgtggtctggctcagttggagcgcgtagaagagtttgtagagcagcgtaaagctaacttttcctatctgaaacagggcttgcaatcttgcactgaattcctcgaattaccagaagcaacagagaaatcagacccatcctggtttggcttccctatcaccctgaaagaaactagcggtgttaaccgtgtcgaactggtgaaattccttgatgaagcaaaaatcggtacacgtttactgtttgctggaaatctgattcgccaaccgtattttgctaatgtgaaatatcgtgtagtgggtgagttgacaaataccgaccgtataatgaatcaaacgttctggattggtatttatcctggcttgactacagagcatttagattatgtagttagcaaatttgaagagttttttggtttaaatttctaa

SEQ ID NO: 369885 - DNA, 831 bp, Salmonella enterica
atgggagcgtttgggttccttggatcacgacttacatcctacttcgaaagtcgacatactgtgattggcttagcaaggaagaggaacaatgaagctaccataaataatattatttacacgacagaaaataattggatcgaaaaaatagtagaatttgaaccgaatattattattaacactattgcttgctatggaagacataacgaacctgcaacagctttaatagaaagcaatattcttatgcctatcagagtattagaatctatctcatcacttgatgcagtattcataaattgtggaacatcactgccaccaaatacgagtttatatgcatatactaaacaaaaagcaaatgaactcgccgccgccattatagataaagtttgtggtaaatatatagagttaaaattggagcatttctatggagcttttgatggagacgataagtttaccagtatggttattagacgttgtttaagtaaccagccagtaaagttaacatctggtttgcaacagagagatttcttgtatataaaagatctactaacagcgttcgattgtattataaataatgttaataatttccccaaatttcatagtattgaagttggtagtggaaaggctatatcaattcgtgaatatgtagagactgttaaaaatatcacaaaaagcaattctataattgaatttggtgtggtcaaagaaagagccaatgaattgatgtatagttgtgctgatatagcagaacttgaaaaaataggatggaaaagagagttctctcttgttgatgcattaatcctggcgttaaatcctttaatttggtggacgtaa

SEQ ID NO: 369886 - DNA, 1962 bp, Salmonella enterica
atgaatcgttttattatggccaatagccagcagtgtctgggctgccatgcctgcgaggtcgcctgcgtaatggctcacaatgatgagcgacatgtcctgacgccacagcgctatcagccccgaattactgtcatcaaacatcagcgccagcgcagcgcggttacatgtcaccattgcgaagatgcgccctgcgcccgtagctgtccgaacggcgcaatcgcgcatattaacgacagcgtgcaggtcaatgcgcagaagtgtatcggctgtaaatcctgcgtcgtcgcctgcccattcggcaccatgcagatggtattgacgcccgtcgcgccaaaccagttcaaagccagcgcgcataaatgcgatctgtgtcagggacgtgaacagggtccggcctgtgtggaaaattgcccggcggatgcgctgcaactggtcaccgaagactcgttgacccgtctggctaaaacgcgacggctgcgtaccgcccggcaggagattcgcccctggcataccgtggatacacaacacagtgggacagcaagcagcaaagtcgagcgtatgcaggcgacgccgccgcgcggcgaaccggataaactggcgattgaagcgcgtaaaaccacctttgaggaaatttatctgccgtttcgcgccgcgcaggcggagcgtgaagcggcccgctgcctcacatgcggggaacacagtatctgcgaatggacctgtccgctgcataaccatattccccagtggatcgaactggtgaaagccggcgatattgatgcggcggtagagctttcccaccagaccaactgtctgccggaaattaccgggcgcgtctgtccgcaggaccggctatgcgaaggcgcgtgtacactccgcgatgagtatggcgcggttaccatcggcaacattgagcgctatatctccgatcgcgctctgagcaaaggctggcgtcccgacctgtcggacgtacagaagagcgataagcgcgtggcgattatcggcgcggggccggcaggtcttgcctgcgctgacgtgctggcgcgccatggcgtaagcgccaccgtctacgatcgccatccggaaatcggcggtttactcacctttggtattccggctttcaaactggataaatctctgctggcgcgccgtcgggaaatcttcagcgcgatggggattcgtttcgagcttaactgcgaagtagggaaagatatttctctggagacgctgctggagagttatgacgccgtctttgttggggttggaacctatcgttccatgaaggctgatttaccgaatgaagatgcgccgggggtatatgatgcgttgccattcctcatcgccaataccaaacaggtgatggggcttccggcgttgcctgacgagccgtttattgatactgcgggccttaacgtggttgtgctgggcggcggtgacaccgcaatggactgcgtacgtacggcgctgcgtcatggcgctgctaacgtcacctgcgcttatcgccgcgatgaggccaatatgccggggtcgaaaaaagaggtgaaaaacgcgcgggaagagggcgcgaactttgaatttaacgttcagccggttgagttggtgctggatacgcacgggcgcgccagcggtattcgctttttgcgtacgcggcttggcgaaccggatggtcaggggcgacgccgcccggtacctgtaccggacagcgagttcgtgatgccggcggatgcggtcattatggcgtttggttttcatccgcatggtatgtcgtggctcgaatcgcatggcgtgaaggtggataactggggacgtattgccgccagcgtcgagagcgagtttcgttaccagacgtccaacccgaaaattttcgccggcggcgatgcggtgcgcggcgccgatctggtggtgacggcgatggcagaaggccgacatgctgcgcaggggatactcgactggttagctaaataa

SEQ ID NO: 369887 - DNA, 1701 bp, Salmonella enterica
gtgacggttaaacgcccggtctcagccagtctggctaaggcttttttctatattgtgctgttgtctattctgtccaccggcagcgcattactgacgctgaccagcagtttacgggatgccgaagcgatcaatatcgccggttcgctacgaatgcagagctatcggctgggttacgatctgcaaagccgtagcccgcagattaatgcgcatcgtcaacttttccagcacgcgctcaactcgccggtactgcaaaatctcaacgcctggtatgtgccgcaggcggtgaaaactcgctacgcgcgcctgcacgccaactggctggagatgaatagccgcctacaggacggcgacattgcctggtatcagaccaatatcaacaattacgtcgatcaaattgatctcttcgttctggcattacagcattacgccgagcgtaaagtcatgctggtcgtcgccatatcgctggcgggcggtatcggcatatttacgctggtcttttttaccctacgacgtattcgccagcaggtcgttcgcccgctgaatcaactggtcaccgccagtcagcgaattgaacatggtcagttcgccccgctgccgctggataccagcttacccaatgagctgggattgttggcgaaaacgtttagtcagatgtcgagcgagctgcataaactttatcgttcgctggaagcctcggtggaagaaaaaacgcacgatctgcacgaagcgcaccgccgcctggaggtgttataccagtgctcccaggcgctgaataccagccaaatcgacgtccactgttttcgccatattttgcaaattgtccgtgaacatgacgccgcctggtatctggagttaaccgtgggcgataactggcggattagcgaaggcatgcaaagccccgacctgccgatgcaaatgctgccagtgacgatgcaggacacggtctatggcgaactccactggcaaagccccaacgttaatgcctctacgccgctgctgaacagcgtctccacgatgctggggcgtggtttgtactttaatcaggcgcaaaaacacttccagcaacttttgttaatggaagagcgcgcgacgattgcccgtgagctacacgattcgctggcgcaggtactttcttatttacgtattcagttaacgcttttgaagcgcgctattcctgaggataacgccggcgcgcaaagcatcatggcggatttttccagagcgctgaacgacgcctaccgtcagcttcgcgagctactcaccacgttccgtctgacgttacagcaggccgatttaccctccgcattgcatgagatgctggaagatttacagagtcagactccggccaaactcacgttggattgccgtttacccacgctggcgctggatgcgcaaatgcaggtgcatttattgcaaattgtgcgtgaagcggtcctgaacgccattaaacacgccaacgcgagcgaaatcgccgtgagctgcgtcaccgcgcctgacggcgatcataccgtttatattcgcgataatggcattggtatcggcgaaccgcatgagcctgccggacactatggtctgaatataatgcgtgagcgcgcggagcgccttggcggcacgctgaatttttcgcaaccctccggcggcggcacactggtcagtatcagttttcgctcctccaacaaggaagagagtcagttaacgtaa

SEQ ID NO: 369888 - DNA, 3114 bp, Salmonella enterica
atggcgaatttttttatcgatcgccccatttttgcctgggtgctggctatcctgttgtgtctgacaggggcgttagccattttttctttacctgttgaacaatatcccgatctggcaccgcccaacgtacgtattaccgcgaattatccgggagcgtcggcgcaaacgctggaaaataccgtaacccaggttattgagcagaatatgacgggcctcgataatctgatgtacatgtcatcacaaagtagcggcaccggacaggcgaccatcaccctgagctttattgcgggaaccgatcctgatgaggcggttcagcaggtgcaaaaccagttacagtccgcgatgcgtaaactgccgcaggcggtacaggatcaaggcgtcacggtacgcaaaacgggcgataccaatattttgaccatcgctttcgtctctaccgacggttctatggacaagcaggatatcgccgactacgtcgccagtaatattcaggacccgctcagccgcgtcaacggcgtcggcgatattgacgcttatggttcacagtactctatgcgtatctggctcgatccggccaaattgaatagttttcagatgaccacgaaagacgtgaccgatgcgattgagtcgcagaatgcgcaaatcgccgtcgggcagcttggcggtacgccttcggtcgacaagcaggcgctgaacgccaccattaatgcgcagtcactgctgcaaacgccgcaacaatttcgcgatatcaccctgcgcgttaatcaggacggttccgaggtcaaactgggcgatgtcgccaccgtggagctgggggcggaaaagtatgactacctcagccgttttaacggcaatccggcttccggtcttggcgttaagctggcttccggcgcgaacgaaatggcgaccgcgaagctggtgctggatcgcctcaacgagctggcgcagtacttccctcacggcctggaatacaagatcgcgtatgaaaccacctcctttgtcaaagcctcgattatcgatgtggtcaaaacgttgctggaggctatcgcgctggttttcctggtgatgtacctgttcctgcaaaactttcgcgccacgctgattccgacgatcgccgtgccggtagtattaatgggcaccttctccgtgctttacgcgttcggctacagtattaacacattaaccatgttcgcgatggtgctggcaatcgggctcctggtcgacgatgccatcgtggtggtggaaaacgtcgaacgtatcatgagcgaagaagggctcacgccgcgtgaagcgacgcgcaaatccatgggacaaatccagggggcgctggtcggtatcgcgatggtgctgtctgcggtattcgtgccgatggcgttctttggcggtaccaccggggcaatttatcgtcagttttctattaccattgtctcggcaatggtgctgtcggtgctggtcgccatgatcctgacaccggcgctgtgcgcaacgttattaaaaccgctgcacaaaggcgagcagcacgggcaacgcggatttttcggctggtttaaccgtaccttcaatcgtaatgccgaacgttatgagaaaggcgtagcgaaaattttgcatcgcagcctgcgctggattctgatttatgttctgttgcttggcggaatggtgttcctgtttttgcgcctccccacctcctttctgccgcaagaagatcggggcatgttcactacgtctatccagctaccgagcggctctacgcaacagcagaccctgaaagttgttgaaaaggttgaaaactattacttcacccatgagaaaaacaacattatgtcggtcttctcgacggtcggttccggccctggcgggaacgggcaaaacgtcgcgcgcatgtttgttcgcttgaaagactgggacgcgcgcgatcccaccaccggctcctcgttcgccattattgagcgggcgacaaaagcatttaaccagattaaagaagctcgcgtcttcgccagcagcccgccggcaattagcggtctgggcagctccgccggttttgatatggaattacaggatcacgccggagcaggccatgacgcgctgatggccgcacgagatcaactcattgagctggccgggaaaaacagttccttgacccgcgtgcgccacaacggcctggacgacagcccgcaactgcaaattgatattgaccaacgaaaagcgcaggcgctgggcgtatcgattgacgatatcaacgacaccctgcaaacagcctggggatcgagctacgtcaacgactttatggaccggggccgcgtgaagaaggtctatgttcaggccgcagcgaaatatcgtatgttgccggatgatattaatctttggtatgtccgtaacaaagatggcggcatggtccccttctccgccttcgccacctcgcgctgggaaaccggctcgccgcgtctggaacgctataacggctattcggcggtagaaattgtcggagaggccgcgccgggagtcagtaccgggactgcgatggatgtcatggagtcgttggtgcatcagctaccgggcggttttggcctggaatggacagccatgtcttaccaggaacggctctccggcgcgcaggcgcccgcgctgtacgctatttcgctattagtcgtcttcctgtgtctggcggcattgtatgaaagctggtcggtgcccttctcggtgatgctggttgtgccgctcggcgtcattggcgcgctactcgctacctggatgcgcgggctggaaaacgatgtttacttccaggtggggctgttgaccgttatcggcctctcggcgaaaaacgcgattctgattgtggaattcgccaacgaaatgaatcagaagggacacgcgctgttagacgccacgctgtacgccagccgccagcgcctgcgaccgatactgatgacttcgctggcgtttatctttggcgtattgccgatggccaccagcaccggggcaggctcgggtagccaacatgctgtcggaaccggcgtgatggggggaatgatctcagcaaccattctggctatcttctttgtacccctgtttttcgtgctgatacgccgccgcttcccgctgaagccgcgcccggaataa

SEQ ID NO: 369889 - DNA, 357 bp, Salmonella enterica
atgattaccctctatggcattaagaattgcgacacgatcaaaaaagcgcgccgttggctggaggagcatggcattgattatcgttttcacgattaccgtgtggatggcatagacctccctcttcttaatacctttattgccgaactcggctggcagccgttactgaatacgcgcggcacaacatggcgcaaactggatgaaggcgaccgcagcgggattaccgatgccgactccgccgctgctctcatggttgaacagccggcaatcatcaaacgcccattgctctgcgcgcccgggaagcctatgctgcttggtttcagtgaatcccgttatcagcagttttttgatgaggtgtag

SEQ ID NO: 369890 - DNA, 1128 bp, Salmonella enterica
atgtcgtgcccggttattgagctgacacagcaacttattcgtcgcccctccctgagtccggatgacgcaggctgtcaggcattaatgattgaacgcctgcgtaaaatcggttttaccattgagcatatggattttggcgacacgcaaaatttttgggcatggcgtgggcgtggcgaaacgctggcgttcgccgggcatactgacgtcgtaccggctggcgatgtcgatcgctggatcaatccgccgtttgaacctacgattcgcgacggaatgttgttcggtcgcggcgcggcggatatgaaaggttcactggcggccatggtggtggctgctgaacgttttgttgcgcagcatcctcatcaccggggccgcctcgcatttttgattacctctgatgaagaagccagcgcaaaaaatggcaccgtaaaggtggttgaagcgctgatggcccgtaacgagcggctggattactgtctggtcggcgaaccttccagtactgaaattgtgggcgatgtcgtcaaaaacgggcgtcgcggttctctcacctgtaacctcactatccatggcgttcaggggcacgttgcctatccgcatctggcggataaccctgttcatcgcgccgcgccttttcttaatgaactggtcgctatcgagtgggatcggggcaatgactttttcccggccaccagcatgcaggtagctaatatccaggcaggcaccggcagcaataatgtcattcccggtgaactgttcgtgcagtttaacttccgtttcagcacggaactgaccgatgagatgatcaaagagcgggtacatgcgctgcttgagaagcatcagctacgctataccgtagactggtggctttccggccagccgttcctgaccgcacgcggcaagctggtggacgcggtggtaaacgccattgagcactataatgaaattaaaccgcaattactgacgacgggcggtacgtccgacggacgttttatcgcccgtatgggagcgcaggtggtagaactggggccggtgaacgccaccattcataaaattaatgaatgtgtgaatgccgccgatctccagctactggcccgtatgtatcaacgcattatggaacagctcgtcgcctga

SEQ ID NO: 369891 - DNA, 201 bp, Salmonella enterica
atggactggctggcaaaatattggtggattctggtattggtgtttctggtaggcgtactgctgaatgtgatcaaagatctcaaacgcatcgaccataagaaattccttgccaataaacctgagctgcccccgcatcgcgattttaacgataagtgggacgatgaagaagactggccgaagaaagatcagccgaaaaagtaa

SEQ ID NO: 369892 - DNA, 2019 bp, Salmonella enterica
atgtctgatatcgatgcgctacaggcgttaacgtcgcaaatgacacaggaaggcattcgccgtttactggtcatcagcggcgatgcggcgtggtgccgggagcgggccgaggcgatacgcgctgcattgcccggtgactggctgtgggtcgcgcctgacgcgcccgcccagccgtgctgtacgccacaggcgttacaaacgctgctgggccgtgaattccgtcatgcgatatttgatgcctggcagggctttgacgccgcagcgtttgccgccctgagcgggaccttgcaggccggaagctggctgcttctgctgatgccgccgtacgagacgtgggaaagccggcctgataccgattcactgcgctggagcgactgcgcgcagcctatccccacaccgcagtttgcacagcatcttaaacggactctctcccgcgatccgcaaacgctgctttggcgacagcaccagccgttttgctggccatcttatcctttccgtggacgctggcgacccgccaccggcgagccgcagccggagcaggcggctatcttatcgcgtttacgtgaaatgccgcccggcgtggcgacggtgattgccccccgtgggcgcggcaaatcggcgctggccgggcaattcatctcccggatggcgggcacggctatcgtgaccgcaccggcgaaaacggcaacggatatcctggcagcgtttgccggtgagcggttctgctttatggcgccggatgcgttgctggcgagcggggcaagagccgactggctggtagttgacgaggcggcggcaatccccgcgccgctgctgctgcaactggtttcgcgctttccccgcatactactcaccaccaccgttcagggctacgaaggcaccggacgcggttttttacttaagttttgcgcccgttttccgcagcttcaccgcttcacgcttcgtcagcctgtccgctgggcgccagaatgcccgctggaaaatatcgtcagcgaggcgctgatattcgacgatgaagcgtttgcgcaggcgccacatggcgcgatagcaatctcggcgttttaccaacaggcctgggtgaatacgcccgcgttgccgagggctgtgtatcagttactgtcgggggcgcactatcgtacttcgccgctggatctgcgccgaatgatggatgcgccaggacagcatttcttgcaggctacggcgaataaccgtgtggcgggcgccctctggctggtcgaagagggcgggttatccgcagaactcagtcaggctgtatggtgcggtttccggcggccgcgtgggaatctggtggcgcagtcgctggcggcgcacggtagcgaccctttagccgcgacgctggttgggcgtcgcgtaagccgtatcgcagtgcaccccgctcgccagcgtgaaggcatcggtcagcagttgattgcctgcgcgtgcatgcaggcggcgcagtgtgattatctttccgtcagcttcggctatacgccggagctgtggcgtttctggcaacgctgcggctttgtactggtacggatgggcaaccatcgggaggcgagcagcggttgctatacggcgatggcgttattgccgctgagcgacgcgggaaaacggctggcgcagcaggaacaccaacgtttgcgccgcgatgcggatatcctgacgcagtggaacggcgaggcgataccgctggcggcgttagatgaacaggcgcttaatgatgaagactggcgtgagctggtcggttttgcgttcgcgcaccgtccgctactgacatcgttaggttgcctgcatcgtttactgcaatacagcgcattgccattaccggcgctgagagggcggctggaggaaaaagccagcgatgccgaactgtgcgcccggctacgcatttcaggccgtaaagctctgctggcgttgcaacgtgcgcaggcggcgcaggcgctgattgcgttggatgccggacgaacgcagcgtttacgcgacgtaatgcccggcggtggggagcatgccggatag

SEQ ID NO: 369893 - DNA, 864 bp, Salmonella enterica
atgcgctggcaagggcgtcgtgaaagtaacaatgtagaggacagacgtaatcggccaggcggcccctcgctgggtggtcctggctttcgtcttccgcgcggaaaaggcggcatcattctgttggtggtggtgttggtcgcagggtactatggggtggatttaaccggtctgttgaccggtcagccggtttcgcagcagcagtcgacgcgttcgataagccccaatgatgatgaagcggcaaaatttacctcggtgattctggcgacgaccgaagatacctgggggcaactctttcaaaaaatggggcgcggctatcagcagccaaaactggtgatgtaccgtggtatgacgcgcaccggctgtggtgcgggtcagtccgtgatggggccgttttactgcccggcggacggcaccgtctatatcgatctctcattttacgatgatatgaaaaataagctgggcgcggacggtgattttgctcagggttatgtcatcgcccacgaagtcggccaccacgtacaaaaactgttaggtattgagcctaaagtacgccagttacagcaaaacgcgtcgcaaacggaggtgaatcgcctttcggtgcgcatggagctacaggcggattgctttgccggcgtgtggggacacagtatgcagcagcaaggtgtactggaggcgggcgatctggaagaggcgctcaatgccgcacaggctatcggcgacgatcgcttacagcaacaggggcaggggcgcgtcgtgccggatagttttacccacggcacctcagaacagcgctacagctggtttaagcgtggatttgacagcggtgacccggcgcaatgtaatacgtttggcaaaaacttttga

SEQ ID NO: 369894 - DNA, 714 bp, Salmonella enterica
atgcaaaagcaagctgagttgtatcgtggtaaagcgaaaaccgtatacagcacggaaaacccggacctgttggtgctcgaattccgcaatgatacgtcagcaggggatggcgcgcgcattgaacagtttgatcgcaagggcatggtaaataacaaattcaaccatttcattatgaccaaactggccgaggcgggcatcccgacccagatggaacgtttgctgtctgataccgagtgtctggtgaagaagctggagatggtgccggttgaatgtgtggtgcgcaaccgtgcggcagggtcgctggtcaagcgtctgggcgtggaagaaggcatggagcttaacccgccgatcttcgatctgttcctgaaaaacgacgcgctgcacgacccgatggtgaatagttcctactgtgaaacgttcggttgggtaagtcaggaaaatctggcgcgtatgaaagagctaacctacaaagccaacgacgtactgaaaaaactgtttgatgacgcgggtcttatcctggtggatttcaaactggagtttggcctgtataaaggcgaagtggtgctgggcgatgagttttcgccggacggcagccgcctgtgggataaagagacgctggacaaaatggacaaagaccgcttccgccagagtctgggcggtctgattgaagcctatgaagccgtcgcgcatcgcctgggcgtgaaattagattaa

SEQ ID NO: 369895 - DNA, 1035 bp, Salmonella enterica
atggcttactcagtacaaaagtcgcgcctggcgaaggttgcgggtgtttcgcttgttttgctgctcgctgcctgtagttccgattcgcgctacaagcgccaggtaagcggcgatgaatcctatctggatgccgcgccgcttgctgaacttcacgccccggcaggaatgatcctgccgataatgaccggcgactacgttattccggtcacgaaggggagcggcgcggttggtaaggcgttggatatccgtccgccagcgcagccgttagcgttagtgagcggcgcgcgtacccagttctctggcgataccgctacgctattggtggaaaatggtcgtagcagcacgctgtggccgcaagtcgtcagcgtgattcaggcgaaaaattatccgattgaaaaacgtgacgatgccagccagaccctgacgaccgattgggtgaactggaaccgcctggatgaagacgaacagtatcgtggacgttatcaaatctcggtgaagccgcagggctatcagcaggcggtaacggtaaaactggttaatctggaacaggctggcaagccggtcgctgacgcggcgtcgctgcagcgctatagcacggaaatgatgaacgtcatttccgccggtctggataagaccgctacggatgcggcaaatgccgcgcagaaccgttccgccgcaacgatggatgtgcagagcgccgctgatgataccggtttacctatgctggtcgttcgcggtccgttcaacctcgtgtggcaacgcctcccggccgcgctggaaaaagtgggcatgaaagtcaccgacagcactcgctctcagggcagcatggcggtaacgtacaaaccgttgtctgacagcgactggcgggatctgggcgctagcgacccgggcctggcatccggagactataaattgcaggtcggcgatttagataaccgcagcagcttgcagtttatcgatcctaaggggcatactctgacgcaaagccagaacgacgcgctggttgccgtcttccaggcagcgttcaacaagtaa

SEQ ID NO: 369896 - DNA, 879 bp, Salmonella enterica
atgttcacgggaagtattgtcgcgcttgttacgccgatggatgagaaaggtaacgtcagtaggtcttgcctgaaaaaactcattgattatcatgtcgccaacggtacctcggcgattgtttcggttggcactaccggcgagtctgccacgctaagccatgatgaacatggcgatgtcgtgatgatgacgctggaactggctgacggacgtattccggttatcgccggcacgggcgcaaacgcgaccgcggaagcgattagcctgacgcagcgttttaacgatagcggcattgttggctgcctgacggtaacgccgtactacaatcgccccacgcaggaaggtttgttccagcatttcaaagccatcgcggaacacactgacttgccgcaaattctgtataatgtgccgtcccgtaccggttgcgacatgttgccggaaaccgtgggtcgtctggcggaaataaaaaatattatcgctatcaaagaggcgacagggaacttaacccgcgttcaccagatcaaagagctggtttcagacgattttattctgcttagcggtgatgacgcgtctgcgctggactttatgcaactgggtggtcatggcgtgatttccgttacggctaacgtagcggcgcgcgatatggctgacatgtgcaaactggcggcggaagggcaatttgccgaggcgcgcgctatcaaccagcgtctgatgccgttacacaacaaactatttgtcgaacccaatcctatcccggtgaaatgggcatgtaaggcattgggtcttgtggcgaccgacacgctgcgcctgccaatgacgcctatcacagaccatggtcgtgacatcgtcaaagcagcgcttcagcatgctggcctgctgtaa

SEQ ID NO: 369897 - DNA, 573 bp, Salmonella enterica
ttgacaccgtcatcacaacactatttggttatcactgcgctgggcgccgacaggcccggtattgtgaataccattactcgccatgtcagcagttgcggctgtaatatcgaagacagccgactggcgatgctgggcgatgaattcacgtttattatgctgttgtccggcacgtggaacgcgattaccttgattgaatcgacattgccgttaaaaggcgcggagctggatctgctgattgtgatgaaacggacgtccgaccgcccccgcccggcaatgcccgcgacggtatgggttcaggttgaggtcgccgactccccgcatttaattgagcgattcaccgcgctgtttaatagtcatgaaatgaatattgcggagctggtctcccgcacgcagccggctgaaggtgataaagctgcgcaattatttattcaaatcaccgcacatagcccggcgtcgcaaaattccgcaaatattgagcaagcctttaaagcactatgtacagaactcaatgcgcaaggcagtataaacgtcgtcaattactcacaacatgatgaacaggatggagttaagtaa

SEQ ID NO: 369898 - DNA, 471 bp, Salmonella enterica
atgaatccactgaaagccggtgatatcgcaccgaaatttagcttgccggatcaagacggggaacaagtaaatttgaccgacttccagggacagcgcgttctggtttatttctacccaaaagccatgacacccggctgtaccgtgcaggcctgcggcttacgcgataacatggacgagctcaaaaaagcaggcgtggacgtgctgggcatcagcaccgataaacctgaaaaactctcccgtttcgctgaaaaagagctgctgaactttacccttttgtccgatgaaaaccatcaggtgtgtgaacagttcggcgtctggggcgaaaagtcgtttatgggcaaaacgtatgacggcattcaccgcatcagctttttgattgacgctgatggtaagattgaacacgtctttaatgattttaaaaccagcaatcaccatgatgtggtgctgaactggctgaaagaaaacgcgtaa

SEQ ID NO: 369899 - DNA, 1140 bp, Salmonella enterica
atgaaaattgttattgctcctgattcatttaaagaaagtttgtccgcaatggcggtcgctgaggcgatagaaaaggggttccgcgaaatttatcctgacgccgactacgttaaagtgcccatggcggatggcggggaaggaaccgtacaatcaatggtggaggccagcggcgggcgttatattgaccagtgggtacaaggcccgctagggcaaccggtggccgcgcgctggggaatgctgggcgatagcgataccgccgtgattgaaatggcggcggcatccgggctgcatcacgtttcgcctgaattgcgcaacccgcttaataccaccagctacggcaccggcgagttaatcgtcgcggcgctggagcgtggcgtaaagcgtattattctgggaattggcggcagcgcgacgaatgacggcggcgcggggatgatgcaggcgcttggcgttatattgcgcgataaacaggggcgctcgctttctccgggcggcgaggcgctggcggcgctggcctctatcgatctgtccggttgtcacccattgctgcgtaaggtatcgataaccgtggcgtgcgatgtcaacaatcctctgtgtggtccccagggcgcatcggccatttttggcccacaaaaaggggcgacagcggaaatggtgaacaccctggacgcggcgctggaaaactggggccgacatatttatcaggctacggggcgtgaggtgattaatgctcccggcgcgggcgcggcaggtggaatgggcgccgcgcttttaggattgctcaatgcggaattacgcgccggcgtagagattgtcgtggaaacgctacagcttgagcaggcggttaaagatgccgatctggtgattaccggagaagggcggctggacagccaaagtatttgcggcaagacgccgattggcgtcgccagagtggcgaagcggtatcataaaccggttatcgcgctcgccggtgggctgcaacacgatcatcacgttgtgtatcaacagggtatcgatgcagcgctgtcgattttgtcgcatatcgttacgctgccggaagccttacacgaggcggaatataacctgagcctgtcggcgcgcaatgtggcggcgatatggcgtctggcgcggcaagcctga

SEQ ID NO: 369900 - DNA, 1269 bp, Salmonella enterica
atgacgtcgatatccaccctgggagccattgccgcattggttgtggccatcgtattaattttaagaaaagtgtcgccagcctacggcatgatggcgggcgcgctggtcggcggtttgattggcggcgccgatcttctgcaaaccgtgtcgctgatggtgtcaggcgcgcagggcatcgttaatgccgtattgcgtattctggccgcaggcgtactggcgggcgtattaattgagtccggggcggcgaatacgattgctgagacgattgtccgcaaagtgggggaaacccgggcgttattggcattagccattgccacactatgtctgaccgccgtcggcgtatttattgatgtggcggtgattaccgtcgcgccgattgcgctgtcgattgcgcgtaatgcaggcctgtcaaaaagcgctattctgctggcgatggtcggcggcggcaaagcgggtaacgtgatgtcacccaacccgaacgctattgccgcctccgatgcgtttcatgttcctcttacctctattatgctggcgggcgtggttccggacatcgttgggcttattatcgcctatctgttagcgaaacggctgaataataaaggcgcgggcgtcgccgatcatgaagtgactcaccatgatgactccgtcgccagacccggttttctggtggcgattagcgcgccgctggtcgctattttcctgctttctctccgtccgtttgccggcatttccattgacccgttaattgccctgcccgtagggggattggtcggtctgctgttgatgggacgcgcgcgccactgtaaccagtacatggtcgctggtctgatgcgtatggcgcctgtcgctattatgttgctgggaaccggtacgctggccggcattatcgctaattccgaacttaaagatgtcctgattcatggcctcaccgcttcgggattgccatcctggctgctggcgcccgtgtctggcgccatgatgtcaatggcgacggcctcaaccacggcgggaacggcggtggcgtctggcgttttctctcccacgttacttgaacttggcgtttccgccctggcgggagccgctatgatccatgcgggcgccacggtgctggaccatctgccgcacggcagctttttccacgcgacgggcggcagcgtcaatatgcaaattcatgaacgtttaaagctaatgccgtatgaaacgctggtggggttagccattacctttatttctactctgatgttcggtttctttggttttgcaggataa

SEQ ID NO: 369901 - DNA, 1182 bp, Salmonella enterica
gtgttgagaaaacattacttgaaagggtataccgcgcggcaaattgtacagcgagccatgaaaattattccttactcggtaaacgtcatggatgagcatggcgtcattatcgcgtctggcgaaccttcgcggcttcgccagcgtcacgaaggggccattctggcgctgaaggaaaatcgttttgtagaaattgattccgctaccgccaatcagcttaaaggcgtgcgatccggcattaatcttcccatctcttttcatgaacagcttatcggcgtggtcggcattaccggcgagccggaggaggttcgcgcgtatgccgagctggttaaaatggcggcggagctggtgatcgagcatatggtgctgatcgaacagcgacaatgggataaacgctatcgcgaagagctgatcaaccaattgattttgcgagaaaattcaacagagtcgttgcgctccatggcggcctatctgggtattgatctggcggttcccagagtggtgctgattattgaactttcccagccggatcgcgaagcgctgcgcaatgtaatggattatttcgagaatcacgcgcgtaaccatttggtgacgtttaccgaatttaatgaattaatcattattaagcctatcacgttaaaagagggaaagtggaatacccgccaggaaatgggcgaattgcagatttttaaatcatgggctgcatcatcgggctttagccgtattttggttgggggctattttgccggcgagacgggattgcaccgatctttgctcacagcgagagccacgcaggcgatggcgaaaagacaaaagctgcgcagccagtacattttttatcatgaccacgcgcttcccgcgctgctaagcgggctgtctgaaagttggcaagtgcaggagttatcgcgtctgtggctgcaactggcgcaacatgacgcgaaaggcgtattgcaacagacgctgcggacttggtttgaacataattgtgacctgacgcaaacggccaaagcattgcatattcatgtgaatacattgcgctatcgcttacagcgctgtgaggatattacgcacataaaaatcaacgagttaaaaagtacgctttggctttatatcggtatggagcttcaggccgaatctgtaccgtccgacaagttaccgctgcctggtcgaatcgaaatttgttga

SEQ ID NO: 369902 - DNA, 1068 bp, Salmonella enterica
atgctcgaaatgttaatgcaatggtatcgccgtcgcttcagcgacccggaggcgattgccttgctggtcattctggtggctggttttagcatcctctttttctttagcggcctgttagcgccgctgctggtcgcaatcgtactggcctacctgctggagtggccgacggcgcgcctgcaggcgattggctgttcccggcgctgggcagcctccattgtccttatcctctttgtcggcattctgttattaatggcgtttgtggtgatgccgattgcctggcagcagggtatttacctgattcgtgatatgcccggtatgctgaataaactgtccgatttcgccgcgaccttgccgcgacgctatccggcgctgatggatgcgggcattattgatgctatggcggaaaacatgcgtacccggatgcttaacatgggcgattcggtggtgaagtattcgctggcgtcgttagtcgggctactgacgctggcggtatatctggtgctggtgccgctgatggtctttttcctggtaaaagataaagagcagatgctgaatgccgtgcgccgcgtgctgccgcgtaatcgcgggctggcggggcaggtgtggaatgagatgaatcagcagatcaccaactatatccgcggaaaagtgctggagatggtagtggtgggcgtggcgacctggctgggctttttgctgtttggcctcaactattcgctactgttggcggtactggtgggcttttcggtcctgatcccctatatcggcgcctttgtggtgacaattccggtggtgggcgtcgcgctgtttcagtttggcctggggacggaattctggagctgttttgccgtttatctgattattcaggcgctggatggcaatttgctggtaccggtacttttctccgaagcggtgaatttgcatccgctggtgattattctgtcagtggtgattttcggcggtctgtggggattctggggggtgtttttcgccattccattggcgacgctgattaaagccgttgtccatgcctggccggatggtcaggtgacggatgcctcatcctga

SEQ ID NO: 369903 - DNA, 1464 bp, Salmonella enterica
atgttcaggcagttgaaaaaaaacctggtggcaaccctcattgcagcattggctctcggtcaggtcgcgcccgcatttgccgaccctgccgacacgctgcccgatatgggaacctcggcaggaagcacgctttctatcggacaagagatgcaaatgggcgacttttatgtgcgccagctacgcggcagcgcgccgttaatcaacgatccgctgctggtgcaatacattaacgcgctgggtatgcgtctggtctcgcacgccgactccgtcaaaacgcccttccattttttcttgatcaataatgacgaaatcaacgccttcgcgttctttggcggcaatgtggtgctgcactcggcgctttttcgctacgcggataacgaaagccagctagcttcagtcatggcgcatgaaatctcccacgtgacgcagcgccacctggcgcgcgcgatggaagatcaaaagcgcagcgcgccgcttacctgggtgggcgcgctgggttccattttgctggccatggccagcccacaggccggtatggcggcgctaaccggtactctggcgggaacgcgccagggaatgataagtttcacccagcaaaatgagcaagaagccgaccgtattggtattcaggtactgcaacgcgccggatttgacccacaggcgatgccctctttcctcgaaaaactgctcgaccaggcgcgttactccacgcgtccgcctgaaattttgctcactcaccccttaccggaaagccgccttgcggatgcccgcaaccgtgccaaccagatgcgcccggtcgtggtgcaatcttccgccgacttttatttcgccaaagcgcgcgccctgggaatgtacaattccggacgtaaccagctcaccagcgacctgctggatcagtggtctaaaggcaacgtgcgtcagcaacatgcggcgcaatatggccgggcgttgcaggcgatggaagcgagcaagtacgatgaagcgcgcaaaacgttgcagccgctgttaagcgcagaaccgaacaatgcctggtatcttgacctcgccaccgatattgacctcgggcagaaaagagccaacgacgcgattaatcgcctgaaaaatgcccgcgatctgcgcgttaatcctgtgctgcagttaaacctcgccaatgcgtacctccagggaggccagccaaaagcggcggaaaccattctgaatcgctacacctttagccataaagatgacggtaacggctgggatctgcttgctcaggccgaagccgcgctgaacaaccgcgatcaggagctggcggcgcgcgctgaaagttatgcgctggcgggacgactggatcaggcaatttcactgctcagtagcgccagcgcccaggcaaaactgggtagccagcaacaggcgcgttacgatgcgcgtatcgaccagctgcgccagttacaggaacgcttcaagccatacacgaaaatgtaa

SEQ ID NO: 369904 - DNA, 360 bp, Salmonella enterica
atgaccgacacgattaaaatctaccataacccgcgctgctcgaagagccgcgacacgctgaacctactgaaatctaacggcgtggaaccggaagtggtgctttatctggatacgcccgccgacgccgccaccgtgcgggaactgctgcgtatgttgggcatgtccagcgcgcgcgaactgatgcgccagaaagaagatctctataaaacgcttcacctggcggatagccagctgagtgaagaggcgttaatccaggcgctggttgaacaccctaaactgatggagcgccccattgtggtggcaaatggtcaggcgcgcattggccgaccgcctgagcaggtgctggacatcctcggttaa

SEQ ID NO: 369905 - DNA, 726 bp, Salmonella enterica
atgtcatcctgggttgaggtatctctgaacacaccggcacagctctctttgccactttatcttcctgacgacgaaactttcgcaagtttctggccgggggataacgcctctctactggccgcgttacaaaacgtgttgcgccaggaacatagtggatatatctacctttgggcgcgtgaaggcgcgggccgcagccatttgctgcacgccgcctgcgctgaattgtcgcagcgtggagatgcggtaggctacgtcccgctcgataaacgtacctggttcgtgccggaagtgctcgacggtatggaacacctctcgctggtgtgtattgataacattgagtgtgtcgctggcgatgaactgtgggagatggcgatctttgatctctataaccgcattctggagtccggtaagacgcggttattgatcaccggcgatcgtccgccaagacagttaaatctgggcttgcccgatctcgcttcccgtctggattgggggcaaatctataaactccagcctctttccgatgaagacaaacttcaggcgctacagttgcgtgcccggttacgggggtttgaactgccggaagatgttgggcggtttttactcaaacgtcttgatcgcgaaatgcgcacgctgtttatgacgctggatcagctcgatcatgcgtcgatcactgcccagcgaaaactgacgatcccgtttgtcaaagagattctgaaactgtaa

SEQ ID NO: 369906 - DNA, 1290 bp, Salmonella enterica
atgacgcgccgtgctatcggggtgagtgaaagaccgccgcttttacagacaatcccgcttagtttacagcaccttttcgccatgtttggcgcgaccgtgctggtgccagttctgtttcatatcaatcccgcgacggtgctgctgtttaacggtatcggaacgttgctgtatctctttatctgcaaaggtaaaattcctgcctacctcggatcgagctttgcctttatttccccggtactactgttgttgccgctgggttatgaagtggcgctgggcggttttattatgtgcggcgtgttgttctgtctggtctctttcatcgttaaaaaagcgggcaccggctggctggatgtgatgttcccgcctgcggcaatgggcgcaatcgttgccgtcatcggtctggagctggctggcgtcgcggcggggatggccggattgctccctgcgcaagggcagtcgccggacacgaaaacaattattatctccatggtcacgctggcggtgacggtgttcggctccgtactgtttcgcggtttcctggcgatcattccgattttgatcggcgtgctggcgggctatgcgctgtcattcgcgctgggggtggtcgataccacgccgattgcccaggcgcactggtttgcgctgccgaccttctatacgccgcgttttgaatggttcgctatcctgacgattctgcccgcggcgttggtcgtgattgccgagcatgtcggtcatctggtggtgacggcgaatatcgtcaaaaaagatttagtgcgcgatcccggtttgcaccgctcgatgttcgctaacggattgtcgacgatcatttccggtttcttcggctccacgccgaataccacctatggggaaaatattggcgtcatggcgatcacccgcgtttacagtacctgggttatcggcggcgcggcgattttcgccattctgctttcctgcgttggcaaactggcggcggcgattcagattatcccgttacccgtgatgggcggcgtctcgctgctgttgtacggcgttatcggcgcgtcggggattcgcgtcttgatcgaatcgaaagtcgactacaacaaagcgcaaaacctgatcctcacctcggtgattttgatcatcggcgtgagcggcgcgaaagtgcatatcggcgcggcagaattgaaagggatggcgctggcgaccatcgtcgggattggcctgagcctgatttttaaactgattagcctgttgcgtccggaagaagtggtactggaggcaaatgatgcggagcctccgcatcagtaa

SEQ ID NO: 369907 - DNA, 627 bp, Salmonella enterica
atgaagatcgtggaagtcaaacacccactcgtcaaacacaagctgggtctgatgcgtgaaaacgacattagcactaaacgctttcgtgaactcgcctcagaagtaggcagcctgctgacgtatgaagcgacagccgacctggaaacggaaaaagtcaccatcgaaggctggaatggcccggtggaaatcgaccagatcaaaggtaaaaaaattaccgttgtgccgattctgcgcgcgggtctgggcatgatggaaggcgttctggaaaatgtaccgagcgcgcgtatcagcgtagtcgggatgtaccgtaacgaagagacgcttgagccagtaccttatttccagaaactggtatcgaacattgatgagcgcatggcgctgatcgtcgacccgatgctggcgaccggcggttctgtcatcgcgaccatcgacctgctgaaaaaagcaggctgtagcagcattaaggtgctggtgctggtcgccgcgccggaaggcattgcggcgctggaaaaagcgcacccggacgttgaactgtacaccgcctctatcgatcaggggcttaacgagcacggatacattattccggggcttggcgatgccggcgataagatttttggtaccaaataa

SEQ ID NO: 369908 - DNA, 1038 bp, Salmonella enterica
gtgaccgataagacctctcttagctataaagatgccggcgtcgatattgatgcgggtaacgctctggttgatcgaatcaaaggcgtagtgaagaaaactcgccgcccggaggttatgggcggtctgggcggtttcggtgcgctgtgcgcgttgccgcaaaaatatcgtgaaccggtactggtttccggcactgacggcgtaggcaccaaacttcgcctggcgatggacttaaagcgccacgacgctatcggtattgatctggtggcaatgtgcgtaaacgatctggtcgttcagggcgcggaaccgctgtttttcctcgattactatgccacgggtaaactggatgtcgataccgccgccagcgtgatcaacggtattgccgaaggctgcctgcaatccggctgcgcgctggtcggcggcgagacggcggaaatgccgggcatgtatcacggcgaagattacgatgtggcgggtttctgcgtcggcgtagtcgaaaaatcagaaatcatcgacggctcccgggttgccgaaggcgacgtgctgattgcgctcggctccagcggcccgcactcgaatggatattcgctggtgcggaaaattattgacgttagcggctgcgacccacaaaccactctgctggaagggaagccgctggccgatcatctgcttgaaccgacccgtatctacgtaaaatcggttctggaactgattgaaaacgtcgatgtgcacgctatcgcccacctcaccggcggcggcttttgggaaaatattccgcgcgttctgccggagaatacccaggcggtaattaatgagtcgtcatggcagtggcccgccatctttacctggctgcaaaccgccggtaatgtcagccgacatgaaatgtaccgtacctttaactgcggcgtcggcatggtgattgcgctctccgctccggaagcggacaaagcgcttgctctgctaaacgagaaaggtgaaaacgcatggaaaatcggtatcatcaaagcctttgattccgaacagcgtgtggttattgaataa

SEQ ID NO: 369909 - DNA, 639 bp, Salmonella enterica
atgaatattgtggtgctgatttccggcaatggaagcaatttacaggcgattatcgatgcctgcgaagcgaagaaaattaaaggcaccctcagggcagtattcagcaataaggccgacgcgttcggccttgaacgcgccagagaagccggcattccggcgcaagcgctgactgccgatcggtttgacagccgcgacgccttcgatcgcgagttgattcgcaagatagacgcgtatgcgcccgatgtggtcgtgctggccggttttatgcgtattctgagtccgatgtttgtcgcgcattactacgggcgtctgctgaacattcacccttccctgctgccaaaatatccggggttgcatacccatcgccaggcgctggaaaacggcgatgaggagcacggtacctcggtacatttcgtgacagacgaactcgacggcggcccggtcattctccaggcgaaggtgccggtttttgccggcgacagcgaagatgatatcaccgcacgcgtacagactcaggaacatgcgatttatccgctggtgattagctggtttgcgcaggggcgtctaaagatgcgcgataacgccgcctggctggacgggcgtcgtctgccgccgcaaggttatgcgtctgacgaataa

SEQ ID NO: 369910 - DNA, 2067 bp, Salmonella enterica
atgggtcaggaaaagctatatatcgagaaagaactaagctggttagcatttaacgaacgcgtgttacaggaagcggcggacaaatccaacccgttgattgagcggatgcggttcctgggaatctattctaataacctcgacgagttctacaaagtgcgtttcgctgaactgaaacgacgcattattatcagcgaagaacagggttcaaattctcattcacgccatttgttaggcaaaattcagtcccgcgtgttgaaagcagaccaggagttcgacggcctgtacaacgaattactgctggaaatggcgcgtaatcaaatctttctgatcaacgagcgtcagctctcggtgaaccaacaaagctggttgcgccactattttaagcactatttgcgccagcatattaccccgattcttattaaccgggagacggatcttgttcagtttttaaaagatgattacacctatctggcggtggagattatccgcggcgacaccatcaactatgcgctgctggagataccgtccgacaaagtcccacgcttcgttaatctgccgccggagacaccgcgcagacgcaagccgatgatcctgctggataatattctgcgctactgcctggatgacatttttaaagggttcttcgactatgacgcgcttaatgcctattcgatgaaaatgacccgcgatgccgaatatgacctggtgcatgagatggaatccagtctgatggagctgatgtcttccagcctgaagcagcgcctgaccgctgagcctgtgcgctttgtctatcaacgcgatatgcccgccgcgctggtcgacgtactgcgggaaaaactgacgatctcccggtatgactcaatcgtacccggcgggcgctaccacaattttaaagactttattaattttccgaatgtcggtaaagccaacctggtcaataaaccgttaccgcggttacgccatctttggtttgataaagagaagtttcgtaacggtttcgacgcgattcgtgaacgtgatgtgctgctctattatccttatcacacctttgaacatgtgctggaactgctgcgtcaggcgtcgtttgacccaagcgtgctggcgatcaaaatcaatatttatcgcgtagcgaaagactcgcgcattattgactcgatgatccatgccgcccataacggcaaaaaagttaccgtggtggtggagttgcaggcgcgcttcgatgaagaggcgaatattcactgggccaagcggttaaccgaagcgggcgtccatgttattttctctgcgcccgggctgaaaattcacgccaaactctttctcatctcacgaaaagagggtgatgacgtggtgcgttatgcgcatatcggcaccggtaacttcaacgaaaaaacagcgcggctgtataccgattattcgctgctgaccgccgatgcgcgcattaccaatgaagtgcgtcgggtctttaattttattgaaaacccctatcgcccggtcactttcgattatttgatggtttctccacaaaactcacggcgtctgctgtatgagatgatcgatcgtgaaatcgccaatgcccagcaaggcttaccgtcagggattaccttaaagcttaacaacctggttgataaagggttggtcgacaggctatacgccgcgtcgggttcgggcgtccaggtcaatctgctggtacgcggtatgtgttctcttattccgcaactggaaggcattagcgataatattcgcgcgattagcatcgtggatcgctatctggaacacgatcgagtttatattttcgaaaacggcggtgataagcaagtttggctctcttcagctgactggatgacgcgtaatattgactaccgtatcgaagtcgctacgcctatcctcgacccgcggcttaaacagcgcgtcctggatatcattgacattctgtttagcgacacggtaaaagcgcgttttatcgataaagaactcagcaaccgctacgtaccgcgcggcaatcgccgtaaagtccaggcgcagctggcaatttatgactacatcaaatcactcgagcaaccagactaa

SEQ ID NO: 369911 - DNA, 1542 bp, Salmonella enterica
atgccaatttacgataaatcccctcgtccgcaggagttcgctgcggtcgatctcggctcaaacagctttcatatggtcattgcccgcgtggttgacggcgcaatgcagattatcgggcgtttaaaacagcgcgtccatctggcggacgggctgggcgcagataataaactcagcgaagaagccatggaacgggggcttagctgtctgtcgctgtttgctgaacgcttacaaggtttctccccttccagcgtctgtatcgtaggcacccatacgttacgtcaggcgcaaaatgccgctgattttctcaaacgcgcggaaaaggttattccctacccgatagagattatttccggtaacgaagaagcgcgcctgatttttatgggcgtagaacatacgcagccggaaaaaggccgcaagctggtgatcgatatcggcggcgggtcaacagagctggtcattggcgaaaacttcgaacccaggctggttgaaagccgtcgtatgggctgcgtgagcttcgcgcagctctactttcccggcggcgttatcaataaagaaaacttccagcgcgcccgaatggcggcggcgcaaaaactggaaaccttaacctggcagtatcgtattcagggttggaacgtagcgatgggcgcttccggtacgattaaggccgctcatgaagttctcctggcgctgggtgagaaagatggcttcattacgccggatcgcctcgataaactgaagtcagaagtgttgaagcaccgctcctttaatgcgctcagcctgccgggtctgtctgaagaacgaaaagcggtctttgtgccgggcctggcgattctgtgcggcgtttttgatgctctggctatccgcgagcttcgcctttccgacggcgcgttgcgcgaaggcgtgctgtatgaaatggaaggccgcttccgccatcaggatgttcgcagccgtaccgcaaaaagtctggccaatcaatacaacattgacagagaacaggccagacgcgtgctggaaaccaccatgcagatgtacgagcagtggcaggcccagcagccaaaactggcgcatccgcagcttgaagcgttgctccgctgggcggcaatgctgcatgaggttggactgaatattaatcacagcggtttacatcgccattcggcttatattctgcaacacagcgatttgcccggctttaatcaggagcagcaaatgatgatggcgacgctggtgcgttaccatcgtaaagccataaaactggatgatatgccccgctttacgctgtttaagaaaaaacagtatctgccgttaattcagctacttcggctgggcgtattactgaacaaccagcggcaggcgaccactacgccgccgacgctgcgactaacgaccgatgacagccactggacgttatgttttccgcatgactggttcagccagaatgcgctggtactgcttgatctggaaaaagaacagcagtactgggaagctgtaactggctggcgtctcaatattgaggaagaaagctcgccggagatcgccgcgtaa

SEQ ID NO: 369912 - DNA, 2214 bp, Salmonella enterica
atgaaactaaataaaacttatataaatatcagagataaatggtggggactaccgctcattctcccttcgattttactgcctgttttaagtagcgcaaatacttatgcgcttaccagcactggaaatgtggttcttttttacctgccgttagcttttatgcttagcctgatgctctttttcggctgggcagcactgccgggcattgtgcttgctatcttctggcgcagatacccgcagacagggctgtatgaaaccctttctgtgacgatgcactttatcattactatcgtgctaagctggggcggctatcgtgtcttttccccccggcgaaacaatgtttcccacggcgacgcccacctgctgtttcaacgaatattctggcaggtattttgttcagcaacattatttctggtcatctaccagtttgccgcttttgttggcatgtacgaaagtaaagccagcctgatgggggtaatgccctttaatatcaacacgctgattaattaccaggcgttactggtcggtaaccttgtcggcgtgccattgtgctattttattattcgtactctccgtaatccgctgcacctgcgggggtattatcagcaattaaagctacagattgatagcaaggccactaaaaaagagatcgttatttggctggccgtattgactacactaatgtttatactgtgtatgccattgactgataatagttcaatatttagtaccaactatacgctttcgttattattgccggtcatgctgtggggtgcgatgcgctatggctataagtttatttcaattatctgggccgtcgtgctaattacgtcgattcattattatcagcgttatatgccctggtattcaggttatgatacgcaattagcgattacctcttcgagctatctggttttttcttttattgttaattatatgtctgtactggccacgcgtcagcgcgtagtgagtggtcgcgcacggcggctggcctatcttgacccggttgtacatcttcccaatttacgtgcgttaaaccgcgcgctccaaaatgcgccctggtctacgatctgttttttacacgtgccgggcctggagctattgggtaaaaattatggcgtcatgctacgcatccagtataagcaaaagctctctcactggattacgccgatgctggcctcaaatgagtgcgtctaccagatgtcagggcacgacctggtgctgcgtcttaatacagaggcgcatcagcagcgtattgaagcgctggataaacatattaagcagtttcggtttatctgggatggactgccgctacagccgcctgtcggcgtgagctactgctgcgtgcgttctccggttagccacctttatcttctgctgggcgaattaagcaccagttccgatctttcgttgacgactaacgcgccggaggatttacagcggcgcggcgcaatgcacctgcagcgcgatttgaagggcagaattgcgatgatgaatcgcctgcaacaggcgttggagcacgatcattttttcctgatggcgcagcctattttcggtgttcgtggggacgtttaccatgaaattttactgcgactcagggatgacaacggcgacgttatcaacccggacaattttttacccgtggcgcatgagtttggtttgtcttccgctatcgatctctgggtgattgaaaacacgctgcggtttatggcggccagccgggaatatatgcccgcgcatcgttttgccattaatctgtcgccaacatcggtatgccgcgctcgtttccctgcagaagttaagcagttgcttacgcaatatcaggttgaaccctggcaactggtttttgaggtaacggaaagcaactctctcaccaatgctgagcaggcgcagttgacgctgggacagctacagcagtttggctgtcagatagcgattgatgatttcggtactggctacgccagctatgcgcggctgaaaaacgttgacgccgatattcttaaaattgatggcagttttattcgcaatatagtgtcaaacagtctcgattatcagattgtggcttctatttgtcatttagcgcgaatgaaaaatatgcaggtcgtcgcggagtatgtcgagagcgaagaaatacgaagcgtcgtgctctcgttggggatcgactatcttcagggatatttaattggcgagccgcagctattatctgagattcagtaa

SEQ ID NO: 369913 - DNA, 192 bp, Salmonella enterica
gtgagtcaggccaacagtatgcgaaaacgacatcgatttaacactcgcatgacccgtatcgtactgcttatcagttttctcttcttctttggacgtttcgtctactcttctatcggcgcctggcagcaccatcaggataaaaaagaagcgcaacagtcatcgctttctgtcaccacgccgggacaacgttaa

SEQ ID NO: 369914 - DNA, 234 bp, Salmonella enterica
gtgacctttgagtatacgtttacggtaaagcactgcatcgacacaatagcgggtttcctgaagtgcgttgaggttgagccgcatccggttatcgcagagatactcacacagtttgagagtaccgtacgtcagtgcccgctgggattccagatttgccctgaacttgtgccagctaccgggagtttaaccacgctgaaggctatcgggttttgtattcggtcgagggaatcttag

SEQ ID NO: 369915 - DNA, 315 bp, Salmonella enterica
atgagagatattgagaaagaaattatcgattttatcgatcaggaatataacactaaaaagtactttctctgtgggccaaagcgaaccatcacgcttgatatcagtattagggatgatctaaaactcgtttttgaagatagtgaagaacttctacaagagtacttcaagcgttggaatgtagattcagaaggatttgacatactcaactatctgaatccagagtactttggaagtaaagagcctgatccgcgtaagccactaacagttggtatgctcgttgaaagtgctaaaactggacgttggttatatagttga

SEQ ID NO: 369916 - DNA, 288 bp, Salmonella enterica
atgacaaaagacattgtcctgaatgcgcttctgatggccgtgtggcgacgtcatccccaaaaacaggtgctggttcagtctgatcagggtagtcagtacacccgctatgaatggctgaaatcgcacggactggagggcagtatgagccgtcgtggcaactgtcataatgcggttgcagaaagctttttccagctactgaagcgtgagcggataaagaaaaagatctaccaacgactcagaagtgtccaggttatccgtggcgattcagcccaaataaggggtatttaa

SEQ ID NO: 369917 - DNA, 1578 bp, Salmonella enterica
atgacggaaaacattcataagcatcgcatcctcattctggacttcggttctcagtacactcaactggttgcgcgccgcgtgcgtgagctgggtgtttactgtgaactgtgggcgtgggatgtgacagaagcacaaattcgtgacttcaacccaagcggcattattctttccggcggcccggaaagcaccaccgaagaaaacagcccgcgcgcgccgcagtatgtctttgaagcaggcgtgccggtatttggcgtttgctatggtatgcagaccatggcgatgcagcttggcggtcatgtagaaggttctaatgagcgtgaatttggttatgcgcaggtcgaagtgttgaccgacagcgcgctggttcgcggtattgaagattccctgaccgcagacggcaaaccgctgctggacgtgtggatgagccacggcgataaagtgacggcgattccgtccgacttcgtgaccgtcgccagcaccgagagctgcccgttcgccattatggccaacgaagaaaaacgcttctacggcgtacagttccacccggaagtgactcacacccgccagggtatgcgcatgctggagcgttttgtacgcgatatctgccagtgtgaagcgttgtggacgccggcgaagatcatcgatgacgccgtggcgcgcattcgcgagcaggtaggcgacgataaagtgatcctcggtctctccggcggcgtggattcttccgtcaccgccatgctgctgcaccgcgcgatcggtaaaaatctgacctgtgttttcgtcgacaacggcctgttgcgcctgaacgaagccgagcaggtgatggacatgtttggcgaccattttggtctgaacattgttcacgtaccggcagaagatcgcttcctgtccgcgctggctggtgagaacgatccggaagccaagcgtaagatcatcggccgcgttttcgttgaagtgttcgacgaagaagcgctgaaactggaagacgtgaaatggctggcgcagggcaccatctaccctgacgttatcgaatctgcggcgtctgcaaccggtaaagcgcacgtcatcaaatctcaccacaatgtcggcggcctgccgaaagagatgaagatggggctggttgaaccgctgaaagagctgttcaaagacgaagtgcgtaagattggtctggagctgggcctgccgtacgacatgctgtatcgccatccgttcccggggccgggcctcggcgtgcgcgtactgggcgaagtgaagaaagagtactgcgacctgctgcgtcgcgcggacgctatcttcattgaagagctgcgcaaagcggatctgtacgacaaagtcagtcaggcgtttaccgtcttcctgccggtccgttccgtaggcgtgatgggcgatggtcgtaagtacgattgggttgtctctctgcgtgctgtcgaaaccatcgactttatgaccgcacactgggcacatctgccgtatgatttcctgggtcgtgtttccaaccgcatcatcaatgaagtcaacgggatttcccgtgtggtgtatgacatcagcggtaaaccaccagctaccattgagtgggaataa

SEQ ID NO: 369918 - DNA, 1467 bp, Salmonella enterica
atgctacgtatcgctaaagaagctctgacgtttgacgacgtcctccttgttcccgctcactccaccgttttgccgaatactgccgatctcagcacgcagttgacgaaaactattcgtctgaatattcctatgctttctgcggcgatggacaccgtgacggaagcgcgcctggcaattgccctggcccaggaaggcggcattggttttatccacaaaaacatgtctattgagcgccaggcggaagaagttcgccgcgtgaagaaacacgagtccggcgtagtgaccgacccgcagaccgtcctgccaaccaccacgttgcatgaagtgaaagccctgaccgagcgtaacggttttgcgggctatccggtggtgactgaagataacgagctggtgggtatcatcaccggtcgtgacgtgcgttttgtgactgacctgaaccagccggtgagtgtctacatgacaccgaaagagcgtctggtgaccgttcgtgaaggcgaagcccgtgaagtcgtgctggcaaaaatgcacgaaaaacgcgtagaaaaagcgctggtcgttgatgataacttccatctgcttggcatgattaccgtaaaagatttccagaaagcggaacgtaaaccaaactcctgtaaagatgagcagggccgtttacgtgtcggcgcggcggtcggcgcaggcgcgggcaacgaagagcgcgttgacgcgctggtggcggcaggcgttgacgtactgctgatcgactcctctcacggtcactctgaaggcgtgttgcaacgtatccgtgagacgcgtgctaaatatcctgacctgcaaatcatcggcggcaacgttgcgacgggcgcaggcgctcgcgcactggcggaagccggttgcagcgcggtgaaagtgggtatcggcccgggttccatctgtacgactcgtatcgtgactggtgtgggcgttccgcagatcaccgctgtttctgacgcggtggaagcgctggaaggcaccgggattccggttatcgctgacggcggtatccgtttctccggcgacatcgccaaagccatcgccgcaggcgcgagcgcggtaatggtgggttctatgctggccggtaccgaagaatccccgggcgaaatcgaactctaccagggccgttcttacaaatcttatcgcggtatgggttctctgggcgcgatgtccaaaggttcctccgaccgttacttccagagcgacaacgccgccgacaaactggtgccggaaggtatcgaaggccgcgtagcctataaaggtcgcctgaaagagatcattcaccagcagatgggcggcctgcgctcctgtatggggctgaccggttgtgctaccatcgacgaactgcgtactaaagcggagtttgtgcgtatcagcggtgcgggtatccaggaaagccacgttcacgacgtgaccatcaccaaagagtccccgaactaccgtctgggctcctga

SEQ ID NO: 369919 - DNA, 1350 bp, Salmonella enterica
atgttatcctctcaaacttcctcaatttttaccgtaagccgccttaaccagacggttcgtctgctgttagaacaggagatgggacaggtatggatcagcggcgagatttctaatttcacgcagcctgcgtcgggccactggtactttacgctcaaagacgataccgctcaggtgcgctgtgcgatgttccgtaacagcaatcgccgggtgacgttccgcccgcagcacgggcagcaggtgctggtacgcgccaacattacgctgtacgagccgcgcggcgattatcaaatcatcgccgaaagtatgcagcccgcgggcgaaggcttgttgcagcagaaatatgagcagctaaaagccaaactgcaggccgaaggcttgttcgatcagcagcataaacagccgttgccctccccggcccactgcgttggggtgatcacttcgaaaaccggcgcggcgctgcacgatattctccacgtgctaaagcgtcgtgacccatccctgcccgttattatctatccaaccgcagtccagggcgacgacgcgccggggcagatcgttcgtgctatcgaactggcgaacgcgcgcggcgaatgtgatgtactgatcgtcggacgcggcggcggttcgctggaagatttgtggagttttaacgacgaacgcgtggcgcgggcgatttttgccagccgcattccggtggtcagcgccgtcggtcacgaaacggacgtcacgatagctgattttgtcgccgacctgcgcgcgcctacgccatcagcagcggcagaaattgtcagccgtaaccagcaggagttgttgcgtcagatccagtccgcccagcagcgtctgggcatggcgatggactactacctcgccaatcgcagccgccgtttcacgcagatttttcaccgtctgcaacagcaacatccgcaactgcgtctggcccgtcagcaaaccgcgctggaacgtctacgccaacggatgggatttgcgcttgaggccaggattaagcaggccaatcaacgccaacagcgcgtaagtcaacgcctgagccagcaaaatccgcagccgcgcattcaccgcgcgcagtcgcgcatccaacagctggaatatcgtctgacggagaatatccgctcacggttaagcgaacagcgcgagcgttttggcaacgcggtcacgcatctggaagcggtcagcccgttagccacgctggcgcgcggctatacggtttcgacgacaacggacggcaaggtgctgaaaaagatcaaacaggtcaaagcaggcgatatcatgaccacgagactggaggacggctggcttgaaagtgaagtcaaatccgtcacgccgggcacgtaa

SEQ ID NO: 369920 - DNA, 5910 bp, Salmonella enterica
ttgaacaggacttacagtattgtctggagcgccgtgcgaaatatgtatgtcgtggcttcagaactggcgcgaggccacagcaaagttaaagcgcaagtatgcgcgagtgaaatccattctccaaaccaaaagtccgaatatggacaaataataaaagcaacgcgcgcggcgctggcttgcgccgtggctgcagcgctcggatttttcagcccgctggccatggccgacaatcaggtatcatatgctgatgcgcagacccacgttctggatgcgtcaacgccgccgatgagctattcgggcaccgatgaaggcgcggcgctatatgtctcgggtgtcgccaccgtcggctggcagcccaccacggtcacagggacggggctcgtcattgaaacaagcggaggcggagctgatgatccggatggcggtaagtatgtttccaacgcaatttcgctggatcattacgctatccttgagcttaccgacgcgaagataaccactacgggcatttatacccagggtatttccgcagcggatggcagcacactgacgttaacagacagtacgctaacgattgacggcaatttcggcgtaatgacgttgtatacgggttcagaagcaacgctggacggtaccatcgttgaggcagctaacagcagcagcgcgcaggtgcaacaaggcagtacgctgaacgtgctggacggtagcacaatcaccctggcgcaaggccagataaacgttgttgccggaaacaccgcgacagacgagggttccaccctgaacctgtctgatagctcggtcagctctgcaggtacgatgagcaccatccagggtaccaataaggccgctcttaatctcaccaacgcgaccataacacataccaatgccagcggcgcggcggtacaggccaataacgccactaccctggatattacaggcggcaacattacctctgccggtacgggcgtgtatattctggcgtcggacgccaggatcgacggcgccaccatcaacgccgacggcgacggtatctttataaccagcaaaagaaaactcgacgggtatgaagatctcaacgcgctgacggtcaacaaagcacaggttaattcagacacgattgcgctgcatgtggacactggcacgacgattaacgctcctatcgtgctgaccgacagcacatttgaagcgccggaagtgatcaagcttggcagcaaggcggtcattcaggccaacaatacgacattgatcggtgacgttgctcagagtgacatgtcatcgtcatcgctctctttaagccagggggccacgttaaccggtagtgtagatgcgatgtttactacgctgtcgctcgacgacaccagccagtggaacatgaccgacccgtcaaccgtcggcaatctgaccaacgacggcgatattacgctgggcaacgcgagcggttcgacaggtacgctgctgacggtggacaataccctgaccttacaggataacagccagataaacgcgacgctggataccgccaacagcgcgccaattatcaaagccgccaacgtcacgctggacgggacgctgaaccttagctcaacggccacctttgtcgcgcccgaaaccgacgaacactttggatcgatcacgctgattgattcacaaagcgcaatcactaccgattttgacagcgtaacactggatgctgacacctccgctatgccggattatctgacgatcaacgcgggcgttgatgcgaatgataataccaactacgagttgtctacgggcttgagttggtacgcgggcgcaaattctgcgcgcgctgcgcatggcacttttaccgttgatgcaggcagtacctttaccgtcaccagcgaactggacgaaaccacggcgacctccaactggaacggcagcaagctaaccaaacaaggcgacggcacgctgatcctcagcaacaccggcaacgactacggcgatactgaaattgacggcggcattctggccgccaaagacgccgccgcgctcggcactggcgatgtgacgattgcagaaagcgcaacgcttgcgctgagccagggcacgctggataacaacgtgaccggcgagggccaaattgtcaaaagcggtagcgatgagctgatcgtgaccggcgataacacttacagcggcggcaccactatttccggcggtacgctgacggctgaccatgcggattcgctgggtaccggggctgttgctaacagcggcgtgcttcaggtcggcgaaggcgagctggaaaatacgctttccggcagcggctcgctggtgaaaaccggcacaggcgagctgacgctaagcggcgacaacacttactccggcggcaccaccattaccggcggtacgctgacggctgaccatgcggattcgctgggcagcggcgatatcgataacagcggcgtgcttaaggtgggcgaaggcgatctggaaaatacgctttccggcagcggttcgctggtgaaaaccggtaccggcgagctgacgttaagcggcggcaacgattactccggcggcaccaccattatcggcggtacgctgacggctgaccatgcggatttgctgggtaccggagctgttgccaacagcggcgtgcttcaggtcggcgagggcgagctggaaaatacgctttccggcagcggttcgctggtcaaaaccggtacgggcgaactgacgttaagcggcgataacagttactccggcggcaccaccattatcggcggtacgctgacggctgaccatgcggattcgctgggtaccggagctgttgccaacagcggtgtgcttcaggtcggcgagggcgagctggaaaatacgctttccggcagcggttcgctggtgaaaaccggtacgggcgagctgacgttaagcggcgataacagttactccggcgataccaccatcgccgacggcacgctgattgccgccaacgtcaacgcgctgggcagcggcaatatcgacaacagcggtacgctgatgctggatgccaacggcgcatttgagcttgcgaacatcaccacccataccggcgccacgaccgcgctggcggcgggcagcacccttgacgcgggccagctcacccaggaagacggcagtacgctaagtattgacctcggcgcggccaccgacgacgccgtgattaccgccgacagcgtcacgctgggcggcactctgaatgttaccggcatcggcagcgttacagacagctggacgcctgaggcatacacctatacgctgattgacagcgacagcgccattacgagcgatttcgacgatctgaccattgcagggatgaaccgcgaagatgttgacttcctgactatcgacggaaaagtcgatgaagcagacaacacccactatgatctgacggcctccctctcctggtatgcggacagagacaacgccactaccgacgcccacggcacctttaccctgagcgaccctgacggcagctttaacgttgcggctacactgacagacgttgatgacacgctggatccgggtagcagatgggacggtaaatcgctgaccaaagaaggcgcaggcactctgatcctctccggcgacaacgactacagcggcggcaccaccatcaatgaaggtacgctggtcgccgccagtacgacggcgctgggcaccggtctggtagacaataacgccacgctggtgctggacgtagacggtgaagtcagcgcggtgggcggcatcaccactcatagcggcgcgacgacccaactggcgctcggcacctcgttggatctcggcgacagcgcgttaattcagcaagatggcagtacgctgaacgttgagctgaatagtgactcagtgcaaccgctgatcaccggcggcagcgccacgcttggcggcgatttggtcgtcagcgacgccagcctgcaagcgcgcgcctccgacgcggagttccagtcctttaaactgatggatatggacagcgatatcagcggcgactttaccagcctgacgatgaacctcaccgaccagccggactatctgaccgtaaccgggacaatcaatcctgcagatgcgtcagaatatttgcttaccgaagggctgagctggaatgcgaccgccacgtcagcgacgccagcacacggcacgtttaccctgggcgcaggcgacagttttgaagtcaccagcgtactgggcgataaaaccggcaacggcgactgggacggtaaatcgctgaccaaactgggcgcgggtaaactgacgctgagcggcgcgaacacctacaccggcgatactaacgtacaggaaggcacgctatggctgtccggagacggctcgattggcgagatgggcagccagcaggcggtgaacgtcgcctccggggcgaccttcggcggcagcaatggtacgaccgttaacggtaaggtgaccaacgaagggacgctggtcttcggcgacagcgaggagacaggcgctatcttcaccctcaatggcgatctgatcaacatggggacgatcgccagcggcagcacctccagcacgccgggcaatacgctttatgttgatggcaattacaccggcaacggcggctcgctttatctgaataccgtcctgggcgacgatgattcggcgaccgataagctggtgattaccggcgatgcctccggcaccaccgatctgtacatcaacggcatcggcgatggagcacagaccactaacggtattgaagtggtggatgttggcggcgtatcgaccagcgatgcgtttgagctaaaaaatgaggttaacgccagtctgtatacctaccgtctgtactggaatgaaagtgacaacgactggtatctggcgtcaaaagcacagtctgatgatgacgacagcggtggtgatgacagtgatgtcacgccttcggatggcggtgacgatggcggtaatgtcacgcctccggacgacggcggcgatggcggcgatgtcgcaccacagtaccgtgcggatatcggcgcgtacatgggcaaccagtggatggcgcgcaacctgcaaatgcagaccctctatgaccgcgagggcagccagtatcgtaatgccgatggcagcgtatgggcgcgcttcaaagcgggtaaagcagaatcagaggctgtcagcggcaatatcgatatggacagcaactactcccagttccagttaggcggcgacattctggcctggggcaacggccagcagagcgttaccgttggcgtcatggcgagctacatcaacgccgataccgacagcaccggtaaccgtggcgcggacggtagccagttcaccagtagcggcaacgtagacggctataaccttggcgtctatgccacctggtttgccgatgcccaaacgcatagcggcgcgtatgtcgacagctggtaccaatatggtttctacaacaacagcgtagagagcggtgatgcgggatctgaatcttatgattcaaccgctaacgccgtctcgctggaaactggttatcgctacgatattgcgcttagcaacggtaatactgtcagtctgacgccgcaggcgcaggttgtctggcagaattactcagcggatagcgtgaaggataactacggcacccggatcgatggtcaggatggcgacagttggacaacgcgtctgggtctgcgtgttgacggcaagctgtacaaaggcagccgtacggttatccagccgtttgctgaagctaactggctgcacaccagcgatgatgtgtcggtatcgtttgatgatgctacggtgaaacaggatcttccggctaaccgtgcggagctgaaagtgggtctgcaggcagatatcgataagcagtggagcgttcgcgctcaggttgccgggcagactggcagcaatgactttggcgatctgaacggtagcctcaatctgcgctataactggtaa

SEQ ID NO: 369921 - DNA, 1971 bp, Salmonella enterica
atgtatcaggacaccgccagcccgtgcgatcggctggggttgccgacggtaaatgatttacagacgctatataccgattatcccaatggcgcactcacgacaacgcttggcctaccggtggcatcaggaaaatattggggggcgggtaactcagtaccggatgccacgcactcagacagtcagttccagtatgtcagactcagcgataataatacgctgacaaccaaagccaataccgccacggcgcagctttgtctggcaaagcgccgggacttgtcgatagaactcacctccagcgccatggatgcggataaaggcgctccagtggcgaagaagggcgagagcctgccgttgaccgtcactgtgagggatggttccggcacgccgcagcccaataccactatccgtttgggacgaacgctttcgatagaccgggcgggtgtcgttgatggcagttccggcggaggcatggtactcacatcggttgcgccgtctacgggctcaatgacgtttaactgcacggtatcttcgtgcacaagttattggtatggcattacggatgaggatggtaaagcgcaactcgaagtgacgcaggatgattcccgtggcctgagaacaccgctgcaggcgatgcttgtcgacgatccgctgacagttagcgatatggacgtcattttcaccgtcattaccagcccggacagcgataaagccaaatactggggacacatgccggaaaccgtgaccaacagcgcgggcgtgaagttccggcgtccgctgctggcggcggagatgacgtcgaatagcggtacttacctggttaacaatgaaacatggcccttagtcaccgcagcgaacactgaaaaagctggcgcaaccggctgtgatgcggaataccagccgttgtcgggcgatctgcaaacgttgtatagcgacaatcctaacggcgcaatcggtacaaattacggctggccggtggcggggaacaaatcctggtgggcggcggatcgtgcgccgaataccggatattaccaatttataaacctgaatagcggcggtaagggcaccgccagttcatcgactgccaccggtgctcaggtgtgtctggtcgagccgcgtacttctactcctgccagtattacgctgacctcgacggcgatggacagcgcgaaaaatgcggcggtagtgccgaagggaagcgcgatgccgttaacggtgacggtaaaagatagcagcggtaacccggtcgccaacgttggttttacgttgtcacgtggcgattcgaaaaatcgggcaggtatggtgataacggatggcgacgtggcagcggatgccggagcagacgatctcatgcttaaagagctgactcccgcaagcgccagccaaagtatgaccaccaccgggattgtctttaccggcactaccggcagcgacggtacggcaacgtttacgcttaatcaggataaaagcctggggttgaaaacgccactcacggtgaaagtgacggacaatacgactcttcacgcatcgctggatgtgatttttatggtacttaccagcccggatacggataaagcgttgttctggggaaatatgtcggatacgacatccgtcaacggaaaaacgctgcatcgtccgtggcttcaggctgagatgctgtcaggcgtgacgccagtatttaccaacggagtgcatgcaaataacgagtactgggcgatggcgcatacggtggacaacacgaaatgggatattgccaaacagtgcggtagccttagcaaagcaccggataataacgacctgttgacgctgtatcattcaattagctcgttaggctggccgacgctgggctatccctatttatctaaatcaacctcgagcagcggcatgtattgcggcgtagatgagaataccaagagtcaaaactgcgccattaagccggcaggcacagcgggttatgcgacgtgcgtggagtaa

SEQ ID NO: 369922 - DNA, 5235 bp, Salmonella enterica
gtgaaatcgaaaaagtgtgtcggttttttaccctggctgctgctatgcgccctcagtttaacgcctttcttcgcgcaggccgtgcgaagcagcggcgcatggcaggaactcactgagcaaactgcggctattaatggcactccgcctcaggccgacagtgtaacgatcccggtatatcagggcagcgtgcagttgcgctctgatgcggcgaatcctgttgactactccgcgaagcccagccagttcagcaccagtgatgctggcagcgcgctgaccttaaccaatccgcacgacaccgaaggcgatatcttcgccgtgccgccgctggtctggcaggctgaacgcgcgcccaccgtcacgctggtgtgggccgacgccgccacgccggacacgccgcttgatccacaacccgtcagcaatataagtttctgcgcgcagaatctggcgggccgccatctggtggtctggtcgcaactggatacctcaaccgccataccgccgctgtggttgcttacccgcaccggcgtgccttataacacggcggtcgaagtgcttgatcaaaagtttgccgtggatatcgcgcccgccgtgggcgacccggtaacgctcgccgccgatcatctggacgagtcgctcaacgccgcgaaggtcaaagcgggcgaaagcatcacgctgacggtaacgaccaaagactgcggcggcgaaccggagggcaacgttgatttcgtgattacccgcggcgacgcgcaaaaccgccagggcgtggtaaacaatgccgcgccggtgcgcgtcggcaacaccgaactgaccaccaccgccacggaatatcacggtacgaccaacgccgagggcgtggcgaccgtggtcgtcacccaggcgaacggcccgggcgttaaaacgccgctgatagcgcacccgtcgagcgcgccagcgctgaaagccagcgtggacgtgatttttaccaccctcaccagcccggacagcagcagcgccaacatgtacggtcatatggcagagacgtccaccgccacggtggacggcgcaagctacaccttttaccgccccaaactggcggcggaaaccgacggtgaagaccgcaccgccagcatcaacaatgaaacctgggcgcagttcaactggggccacgccgacgcgcactgcgatattctgccggatgcacgccaactggaagggttaaaaattgcgcgcggcgatctggccaccaccctcggctggccggtagggctgacatccggtgatgaagagtactggtcctcctcccagggatcgactgccactgaccatatcagcattgatatgcgcagccgcagcctcacgcagatgccggacgccacgcaatcgctggttagctgcgtggataaagccccgcctgcggtcacgccgaaattagtgattagcgccgacaattttgattcaacggtcaacgcggcgaaagtaaaggtgggcgaagagatcaacatgaagatcaccgtcaccgacagcgccaccaataaaccgctgccttatcgctaccttaacgtctacctgggcgacgagcaaaatcgccagaatcaaaagaatgccgatattgatagcgggcatcagtggacggatgatccggtaattatcaccaatctggaaggcagcgacggtcactatcacggcgtcaccgacgccaacggtcagttctcgctggtgttgactcaggacaagggggcgggcgtattaaccccggtgcgcgtggtgctgttcgacggcacggaagcgacgcagaacgtgatttttaccgtcgtcaccagcccggacgtggcgcaggcgcgcatgtggggccatatgcagggcgtggtggaagcgggcaatatctacaaacgcccgctgctggcggacgaagccgcgcaggataccggttccgaatttgagaataacgaatactgggcgacgtttaactcggtaacggcggcgacgaaccagtgcggtaccggccaggtgccggggcaactgttgctggatacgctgtatcaggcccattccggcaacgcgatggaaacgacctacggctggccgacgcagaaacacagctatatcgcggcggatactgatggttccaccaccgcgcacgtcaacctggcgaccggtgcggacagcacgttcagcggcaccgaaccgaactatctctcctgctccggcaatgagttggtgaccagtctggacgtttactttaatggcgatgagtcgttacgcaatgcggtagccaaagtcggcgaacaaatcacgatgaacgtccattccgtcaatgcgctgaatgggttaagcgtgcccaacgccagctttatcgtcaccatggcgcacggcaaaaatcgcgacaacgccacgacgggctttaccgactccagcgacggaacgctggtgatgggcggaacgcctttcggctcttcccaggcgtcgatgacgtatcagggcatgaccgacaatgagggcaacgccacgctggtgattgaacagccgcagggcgtgggcttgctgacgccgctgagcgtactgccggtcaactcactgattaccacgcccgtcaaccgcagcgtgaaatttaccgttcccaccagtcccgatacgccggaggcgcagatgtggggtcatatggcggacacgctcaccgtgggtgatatggaattccagcggccaaagctggcggcggaagcgactgccgccacccgtacccaggagcaggataacgaaacctgggcgcgtgtcagccacgccgacgcgctgaataaccccaacgccgggggctgcgaggccggccatctgccgcgcgccgatcagcttgccgcactgtatgcctccagcgacggcaataaaatccacacagtatccggctggccgacgacgtatgactactggtcttccaccttcgccagcgccgctacatggcaggcggtatcactggctgcgggcggctataccgcttccggcgatgcgtcggactacgtgagctgtctggtcagcaaaaatccgacggcggcgtctatcaccattgagccggtggatgcggcattgtggtataacgcaaacagcgaacacgcggtgaaggtgaaaaagggcgatacgctccagcttaaagtgacggtaaaagacgccagcggcaatccgctgccgcaggcgccgttcgtgttaagccgcggcgacggctatacccgccagggggagaaacatatcgccggtagcggcgacggcatcgtctcggcggtggtgattgacggcgattcgctcaacgacagcgccacccaaatcggcggtatgaccggtgaaaacggcagcaaaatcatcaacgtcacccgcccggatgcccacgggacgaaagtcgcgattacggcggcgctgtacaataacgccagcgcgacggccagcattgatactatttttaccgtggtcaccagcccggacagcgacaaagccaaaatgtggggccatatgccggaaacgacgacggcggccaacggcgaggtgtttaagcgcccgctgttatcggctgaaatcgccagcggcgttacccacggcgacaatacggaaaacaacgaagcgtggggaatcgtcgattttgaaatggcgaacgacgcctgcggcgcgggatacgtgccgacccttgccgatatgcaatcgctgtacgacgccaggcccggcggcgccatgaatacccagcagggctggccgctggatggtaaaaactaccaggacagcaccgccgatttgagccggagtacgcaaaaccgctacgttaagtcgattaatctgcgcgacggcggcgtcggttcgctattgtggaatgaacaactctattttgtctgcctgcaaaacgcccatccggcggcgacgcagataacgctcacttcgcctgtgtataacgacagcgacggattcgccaaagcgaaagtcggcgagaccatcccggtcatcatcaccacgcgggatgcccagggcaacccggccgccgacacgccggttatctttacgcgcggcgacagcgtcgggcgcgcgaatcaggaggtgaatagctcggcggcggcggatatacagataaaccacagcgacgggcgtagcagcggcgctaactattacaccgccacgggcgccgacggcacgctgacgctgaatatcagccaggacagcggcgcgggctttaaaacgccgctgacggcggcaatagagcacaacggcgtaacgagcgcgccgctgccggtcatctttaccgtggtcaccagtccggacacgccgaaggccaactactggggccatatggcggaaacgctgaccgacagcagcggcgtggcgtacaggcgtccgctgctggccagcgagtttagcgctacgcccggcaaaacgctgaccatcgccaacggctactacgacaaaggcgaaacctggggcatgataaccgtcgataaagcctggaacggcaccggtggcggctgtgggcgcgacacgctaccgaccgtagccaacctccagacgctgtacgggacatacccggataacgccatgcgcagccgtaacggctggccgatgaccagttcaggcaacaacaacgtcagccgctactggtgggcgggggattacgtgatatcgtcagacggcacgaagtcgctctacgcggcggtcaacctgtttaacgacggcaatgatgtcaaaacgacgaccagcacctcgatgtactacatgcagacctgtcttgcctcgccgcgcagcgccgccgccagcctgacgctgacgctggcaggccaggatgaaaccaccggaagcgcaaaggcgaagaagggcgagcagatggccgccaccatcgacgtgaaagacgccgcaggtcagccgatgaaaaacgtgatggtgaaaatcagccgcggatcttcgtacaatcgcgccaacagcgccacatcgtcctcaagcgtcacagacgatattacgctgcgtaatgtgatgccgtccggcctggcgacatacctgctggatacctcggcgaaatatctgtatgcgcaaactgatgcccagggacaggtgacatttacccttgcgcaggacagtaccgccggtttaaaaaccactatcagcgccgccacgatggacggcagcaacctgacagacagcaaagacgcaatctttaccgtagtgaccagcccggacagcgataaggccaaatactggggccatatgccggaaacctttaccaacagtaagggggtttaa

SEQ ID NO: 369923 - DNA, 5580 bp, Salmonella enterica
gtgaataaagttgtacatttcttactgacattactgatcatgtttgcagtgtcgatcgcacctgcgcaggcgctattgaagggcggaacctggcaagagctgaactcagtcaccggtgcggttaacggcaccgcgccgctggccgacggcgctattatccccctttaccagggaagtacgctgcttgacccgagcaaaacccacgatattgaattcagcgccatgccgcgcgattttagcgcggatgctacctcaacctcgatgcgggcggtcaattccaccgataccgaaggcgatctctttagcgatccgcccaccatcgcctgggaaaaccgccagccgcccgccatgggcctggtatgggccgatgccgccacgcccgacacgccgctctcgccgcagccggttccgaacctgaccttttgcgcccaaaacctcgccgggcgacagctggtggcctgggcgcaggtggaagatgaaaccaacgttcccgcgctgtggctctttacgcgtaccggggtgccgaattatgcgaccattccgctgttaagcccgaaagtggcgctgaatatcaaaccagcggtgagcgaccctgtttctgtgagcggcgatcatgtcgatgccagttttgaagcatcgaaagttaaggtcggagaaagtattactcttactgtcaccaccaaagcgtgtgatggcgaacctgcgatcaatgcgccgtttgtgatccgtcgcgaggatgcaataaatcgccagggtgtggtcaataacgctaacccggtgcgcgttggcaataccgagttaacgactgcgcaaacagaatatcatggtgtaacggacgggcagggcaacgccacggtggtggtaacgcaagagaacggtccgggggtaaaaacgcgacttatcgtctcttcgcaaaactatcccacgctgaccgacaatgtcgacgtcattttcaccaccatcaccagtccagacagcgataaggccagtatgtacggccacatgatagagagcgctaccgcgacgctgaacggtataacctacaccttcacccgcccgaagctggcggcggaagcgagcggcgctgacaaaagcgtcgtcgataccaacgaaacctgggcgctgttcgactggaacggcgccgataaccattgcaatattctgccggatgccgaacaactggtgcagatgcgacatgagcacagcacgctggcaacgtacaccggctggccggcgacggacgatgccgaatactggtcgtcgaccaaagatcagatgagcggctaccacgctgccgtacatatgaacagcgcatcggtcgtcagggccgccgacagcgacacgctgctggtcagttgtgtggataaagcccagcctgcggcgcacccgcagattactctctccccacaaggaccgtataaagcgcaggtgggggagtcgattgatctgacgatgaccgtagttgaccgggacacgcaaaaaccgctgccttaccgctacatggagctgtttatcgacccggcgaaaaaccgcaaaggggaacatcaggacgcatgggataacctgcgggtcaccgttgattccgaaggtatgagcgcctcgtcgccggagcactataccggcgtgactgacgtcaacggccaggcgcacctgacgttaaaacataacagcggcctgggcgtcgaaacgcccatccgcatcgtgatgccggacgacgaaggcggcaacgtcgagctgtcctttagcgtaattttcaccgtggtcaccagcccggacgtggacggcgccaacatgtggggccatatgcgcggcgtggtggacgcgggcaacctgtacaaacgtccgctgctggcggtggaggccagccataaagacggccaattcagcgaaaataacgaagagtgggcgacgtttaactccgtggcgtcggccaccgcgcagtgcggtgtcggccaggtgccggatcagtcgtcgctggcgcatttgtacagcgaacatgcgggcggacagatggaaagcgagcacggctggccgactgaagattatttcatcgccgccgacagcgacgcctccgggacggtacacgtcaacctcgaaaacggcgatagcggcaaatttaccgatacgcccaactacctgacctgctcggccaatgaaatggtggcggtgctggacgtctacttcaacgacgacccggtgatcaaaaacgccgacgccaaagtgggtgaacaggttaagatgaacatccattcgcgcaacgcccttaacggcatagcgatcggcaataccgacttcaccatcaccatggcgaacggcaggcggcgtgacgggctgacgaccggctttaccgataccagcaacggcgagatgcagtttgacgacgtgggctacgttgccgggcaggtttatcacgggatcaccgacgctaacggcgatgcgaccattatcctcacccagaaaaagggcgtggggctgctgacgccgttaagcatcgtgcccgtcaattcatacatcaatacgccggtttcccgcagcgtgaagtttaccgtcgcgaccagcccggatacggcaaaagccaaaatgtggggccatatggccgacacgattaccgtgggcgactggacttttgagcggcccaaactggcgggtgaagtgagcaacccgctgcgtacccaggacgagagcaatgagacctgggcgcgcgtggcccatagcgacgcggtgggcaacccggatgcgggcggctgcgcggcgaaccgcctgccgcgcatcgaccagcttgaggcgctgtataacgccaacagcggcggcaagattcacagcattcagggctggccgacctatcttaactactggtcgtccacctaccagagcgccaccacctggaaactgatcgcgctgacgaacggcagtgaatttgccaacagcaacgtctcgatttacgccagctgcctggccagcgataacccggtggcggcgtccatcaccattgaaccggtcaatccgtcgcagtggtacgacggcagcgacgtccacgcggtcaaagtgaaaaagggcgagacgatgcagctcaaggtgacggtgaaggacgccagcggcaacccgatcccggaagcgccgtttgtgctcacccgcggcgacggttacgatcgccggggcgaaaagtataccgctcaggacggtgacgatctgcaaggcatcgtgacgcccgtggtgatcgacggcgaatcgctggcatggaccaccaccaaaatggggtcgcagaccggcactgacggcacccgtatcatcagcgtcacccgcccggacacccacggcacccgcaccgcgattaacgcgacgctgtatgaaaatgccgccgtgagtgccagcatcgacactatctttaccgtcgtcaccagcccggatgtcagcgtcgcccgcatgtgggggcatatggcgccatcgctgacggcggcggatggcgcggtgtaccagcgcccgctgctgtacgctgagctgtccagtacggacaatactgcgtctaagcaagaaaccaacgaaacctgggcggtttttcatgggccagccagtgaaggggccaatccggcccgttgcgcggcgggctattaccctgccgttgaggcgctggattcgctctacagcaaatacccgagccgaacgataaataccgcccagggctggccggtctactattcttactggagcggatcgaactcgacgtcattttccagcggggcaaaacttgacttctattacgcagtcgatctggctgatggttcgcgtcggtcagaaaacagcgcgaccagcactgcctggcagtatcaaatttgcgccacgacgccgctgccgcaggccacgcagattaccctcacctccccgcaggcgatggatgacgctattcaggcggtgaaggcgaaaaacagcgagtcgatcccgctactcatcaccactaccgatgcgatgggcaacccggtgccttatgcgactttttcgcttaaacgcgacgccgggaaggcgcgcaacaccgactataataaatttgtagccactaacggcaccaacatgacggtgacgccgctcaccggtgcgcagcaacagttttactatgccacatcggttctgaccggcgccaccggcgcggatggtacgctggccctgacgcttgccgaacccggcggcatagggttgaaaaaccagctgaccgcgaatctgaacgatacgccgacggcgacctcatcgctgccggtggtgttcaccgtcctcaccagcccggacagcgacaaggccaacatgtacggccatatgccggagaccttcaccgccagcaacggtgcggagtttaagcgcccgctggtggcaggcgagccctcatcggaggcgcacacggatacatatttcgaaaccaatgaaaactggatcatggtgaatagttttaataccggcaattacggcgggtgtccgatgaaccagatggctgcgatagatgatttcactgcgctgtacaacgatcacccaagcggcaaggtggcgaccgatattggattgcccgtcgggaagcggtggtgggcgggggatagcctgctgaaaggctcaaccctttactggcagtataaagatctcaagacggggaaaaactacagcatgtcggaaaacccgggtaactactacttacaactctgcctgacaacatcgcgcagcgggctgaatatcgcgctctcttccgacgcatggaacgccgataaatcggcggccgtggcgaaaaaaggcgaaacgataccgatgacggtaacggtgactaacgacgccgggcagccgcaggccggggtggccgtactgttgacgcgtgattacgcttattcgcgcggtgcggtggataagcaatacattgaaccaggcgtgattggcgagccggttccgtttacaacttcgcctgcgaatatgatgctgacgccggttgcacctgcgggtacggcagtggcgtttaataaccagaatggcctcagcacaaaatggtctggcttcaccggcgatgacggtaagttgcggtttacgttaactcaggataaatcgctggggttaaaaacgtctgtcacggcggcgcttgcgaatcaatttgatgaggcggcgagcgtagatgcaatctttacggtacaaaccagcccggacacgccgtatgcgtcatactggggtcatatgccggataccgtgcaggtgaacggcgttacgctgcgccgcccgtacctgaaagccgagctctctgccgcgccccgggatacctggccgtttaataatgaaatctgggggacgaactattattatcagtccgaacacgtggaaacgtcgttgacgcatctttgcggatcgcaggaaaatatagcctcgctggacgatctgaaagcgttgcagagcgttatcggcacgttgcaatggccgacgacatcatcctgggactatgtgtcgcaagatgaaggtcaaagcaataagtactactgttcatttaacgaaacgaccggccagacaacctgtactcgtgaaaaagcgacgacctcaggcttaggctcgtgccgggtgccgtag

SEQ ID NO: 369924 - DNA, 960 bp, Salmonella enterica
atgcaagcaacagtaaaacggcggctgacgaaggtcgctttagcattagtagttgccgggtattgcgccgcgccagcggtggcggcaaacggtaatctgaaatcggggcaatggcagattgtctctgaacagacgggcaccattcagggtacggtgccgtggattacccgtgcggcggataaaactgcggataccgacaaagatcacgtaacggtaactatcgatcgcggcgatcgtaaaattgtgaccgaaggcgataagcagttccacgttggcgataaggtcacggtgaactgggcgattggcgatacggaaggcgacctggacaccgacaacacggcaactaaagccaccgtgaaatgggtgagctttagcgatcagaatggcagcgaccccaaagatcttggtactggtgacagttatgaaatccaggccgctgatgcggatcgttatatcggtatcaaaatcacgccaaccactaccaccggtgaccctgccgtggcaaccgaactgctgttgaaagacttgtcgaccgatgcgggcggtggttcggatgatgacgaaattccggaaggtccggtggtggatgaaaacgtccatgtggttattcatgagaaagattcgaataccaacctgttgaagaattcagggacgacactcaaaacgaatactacctatcaggtattgctgtggagcgataaaaacggcaacggcacctatgatgccggtgaaaacgttaccgaccagtatgactaccgctggaaattcgtcggcaccagtaaaattgcaggtaccggtactggtggtatcgtcaacgaaaactggaacgataaagaccttgtcatcccgcttaccaacgccgaagcgaaagaggcgttcgagggtgcggaaggcggcgttaccgtgggtagcgacggtgtccagggctttggtctgtccatcgactacaaacgcaaataa

SEQ ID NO: 369925 - DNA, 1881 bp, Salmonella enterica
atgtcaccttatggcaagatccgtaccagcctgtccgtgggcgaaggcggcgatctggacggcagttcgctggattattttattccctggtatgacaaccagagcacgcttttctttagccagatttcggctcagcgtaaggaagaccgcaccattggtaactttgggcttggcgttcgccagaacgtcggcaactggctgcttggcggcaacgcattctatgactacgattttacgcgcggtcaccgtcgattaggtctgggaaccgaagcctggacggattacctgaaattctccggcaactattaccatcctctttctgactggaaagactccgaagatttcgacttttatgaagaacgacccgcgcgcggctgggatatccgcatggaaagctggctgccgttttatccgcagcttggcgctaaattagtttacgaacagtactacggcgatgaagtagcgctgtttggcaccgataatctgcaaaaagatcctcatgccgtcactttggggctggaatatacgccggtaccgctggtcacggttggtacggattacaaagccggtactggcgatagtaacgactttagcgttaacgcgaccgtgaactaccagataggcacgccgctggcggcgcagctcgatccggaaaacgttaaaattcagcactccttaatgggcagccgcaccgattttgtcgatcgtaacaatttcatcattctcgaatatcgtgagaaagatccgctggacgtcacgttgtggctgaaggctgacgccaccaacgaacacccggaatgcgtgattgaagatacgcctgaggccgcggtggggctggagaaatgtaagtggacggtcaacgcgctgattaaccaccattacaaaattatttctgcctcctggcaggcgaaaaacaacgccgcccgtacgctggtgatgccggtggtaaaagctaatgcgttaaccgaaggcaacaataacagctggaatctggtgcttcctgcctgggttaatgccgataccgaagagcagcgcaccgccctgaacacctggaaagtacgcatgacgctggaagatgaaaagggcaataagcagaactccggcgtggtggaaatcaccgtccagcaggatcgcaaaattgagctgatcgtcgacaacattgccgataccgatcgcagcgatcacagccatgaagccagcgcgctggccgatggcgaagacggcgtggtgatggatctgctgatcaccgattcctttggcgactccacggatcgcaatggtaacgaactggtggacgatgccatgacgcccgtgttgtacgacagcaatgataaaaaagtcaccctggcccagacgccctgcaccacggaaaccccctgcgtgtttattgccagtcgtgacaaagaagcggggacggtgacgctttccagcaccctgccggggactttccgctggaaggcgaaagcagacgcctatggcgacagtaactacgttgatgtcacttttatcggcgacaacctgagcgcgctgaatgcggtgatttatcaggtcaaagccgccaaccctgtcaaccttatcggcaaagaagataagcaccctacggtcaataatgcttaccgtttcctgctgtggcgcgacaaaaataaagacggcgtattccagatgtccgagcagctcacggaagaagagatggcgctgtacgactaccagtgggagtttaccgggcagagtacaaacggacataccggcgcgctggccaacaccatgaatgaagatcttgtcctgccagtaaccaataaagaggcggcgcagaagtttgccgccaatgtggaagatggcgttcagggttacggcatacgcgttacgtatagtcagaaatag

SEQ ID NO: 369926 - DNA, 222 bp, Salmonella enterica
atggaaataacctgccccgtttgccatcacgcgctggagcgcaatggcgatactgcgcattgcgagacatgcgctaaagatttctcgttacaggcactttgtcctgactgccgccagccgttacaggttttgaaagcctgcggcgcagtggactatttttgccagaacggtcatggtttaatttcaaaaaaacgggttaatttcgtcatttccgatcaataa

SEQ ID NO: 369927 - DNA, 1473 bp, Salmonella enterica
atggtacctgtggtcgcgcttgtcgggcgccctaacgtcggaaaatccacgctatttaaccgtctgacccgcacccgagatgcgctggttgcggatttcccgggtctgactcgtgaccgtaagtacggtcgtgcggaggttgaaggccgcgagtttatctgtatcgacactggcggtattgacggcaccgaagacggcgtcgaaacgcggatggcggaacagtcgctgctggcgattgaagaagcggatgtggtgttattcatggtagatgcgcgcgctggcctgatgccggcggatgaagcgattgccaaacatctgcgttcccgtgaaaaaccgaccttcctggtggcgaataaaacggatggtctcgatcccgatcaggcggttgtcgatttttactcgctgggattaggcgaaatttaccctatcgccgcctcacatggtcgcggcgtattgagcctgctggaacatgtgcttctgccgtggatggatgatgtcgcgccgcaggaagaggtggatgaagacgcggaatactgggcgcagttcgaggtggaacaaaatggtgaagaagcgccggaagatgattttgacccgcaaagcctgccgataaagctggcgattgtcggtcgcccgaacgtaggtaagtccacactcactaaccgtattctcggcgaagagcgcgtggtggtatacgacatgccgggcaccactcgcgacagcatttatatcccgatggaacgcgacgaacgggaatatgtgctgattgacacggcaggggtgcgtaagcgcggaaaaatcaccgatgcggtagaaaagttctcggtgattaaaacgttgcaggcgattgaagacgctaacgtcgtactgttggttatcgatgcgcgcgaggggatctccgaccaggatttgtctctgctgggctttatcctcaatagtgggcgctcactcgttatcgtagtcaacaaatgggatggcctgagccaggaagtcaaagagcaggtgaaagagacgctggatttccgtctgggctttattgattttgcccgcgttcattttatctctgcgctacacggcagcggtgtcggcaacctgtttgagtccgtacgcgaggcttacgacagttccactcgccgggtgagcactgcgatgctgacccgtatcatgacgatggcggtggaagatcatcagccgccgctggtgcgcggtcgccgtgtgaaactgaaatatgcccacgctggcggctataacccgccgattgtggttattcacggcaaccaggtaaaagatctgccagactcctataagcgctatctgatgaactacttccgcaagtcgttggaagtgatggggacgccgattcgcattcagtttaaagaaggggagaacccgtatgcgaacaagcgtaacacactgacgccaacgcaaatgcgcaaacgtaagcgtctgatgaaacatatcaagaaaagcaagtaa

SEQ ID NO: 369928 - DNA, 1179 bp, Salmonella enterica
atgcaattgcgtaaattacttctgccagggttgctttccgttaccctgctcagcggctgttcactgtttagcggcgaagaagatgtcgtcaagatgtctccattaccgcaggttgaaaaccagtttaccccgaccactgtctggagcacctctgtcggtaacggaattggcgaattttattctaaccttcatccggtaatggcagataacgtggtctatgcagccgatcgcgcgggcgtggtaaaagcgctcaatgcggatgatggcaaagagatctggtctgtgaatctgggcgagaaagacggctggttctctcgttcgtccgcgttgttgtccggcggcgtcactgtcgcgggcggtcacgtctatatcggcagtgaaaaggccgaggtttatgcgctgaataccagcgacggtaccacagcatggcagacgaaggtcgcaggcgaagcgttgtctcgtccggttgtcagtgatggaatcgttcttatccataccagcaacggtcagttgcaggcgctaaatcaggcggatggcgcaattaaatggacggtgaacctggatatgccttcgctgtcgctgcgcggcgaatctgcgccggcaaccgcgttcggcgcggctatcgttggtggtgataatggccgcgtcagcgccgtgctgatgcaacaagggcagatgatttggcagcagcgtatctcccaggccactggcccaacggaaattgaccgtctgagcgacgtcgataccacgccggttgtggtaaacggcgtcgtttacgcgttggcgtataatggtaacttaacggcgctggatctgcgcagtggtcagattatgtggaaacgcgagctgggttcggtcaatgactttatcgtcgacggagaccgtatctacctggtcgatcagaacgatcgcgtgctggcgctgaccactgacggcggcgtaacgctgtggacgcaaagcgatttgctgcaccgtttgctgacctccccggtgctgtataatggtgatttagtcgtcggcgatagcgaaggttatctgcactggattaatgttgatgacgggcgttttgtggcccaacaaaaagtagacagttccggttttctgaccgaaccgacggtggcggatggtaaactgctcatccaggccaaagacggtacggtctacgcgattacgcgttaa

SEQ ID NO: 369929 - DNA, 621 bp, Salmonella enterica
gtggaaatttacgagaacgaacacgaccaggtggatgcgattaaacgcttctttgccgaaaacggcaaagcgctggctgtcggagtgattttaggggttggcgcgctggttggctggcgttactggagcagccatcagacggagtccgcgcgtgctgcttctctggcgtatcaaaatgcggtgacggcggtaagcgccgataagccggatagcattcccgccgctgaaaaattcgcggctgagaataaaaacacctatggtgcgctggcgtctatggaactggcgcagcagtttgtggataagaatgaacttaaaaaagccgaagcccagttgcagcaggggttggcggccaccagcgatgaaaatctcaaagcggtgattaatctgcgtctcgctcgcgttcagttgcagcttaagcaagccgacgccgcgctgaaaactctggatgccgttaaaggcgaaggatggacagccattgtcgctgatttgcgcggcgaagcgttgctgagtaagggtgataaaaaaggcgcgcgcagcgcatgggaagcgggcgtcaatagcgatgcttctccggcgttgagcgaaatgatgcagatgaaaatcaataatttgtccatctga

SEQ ID NO: 369930 - DNA, 1275 bp, Salmonella enterica
gtggcaaaaaacattcaagccattcgcggcatgaacgattatctgcctggcgaaaccgccatctggcagcgcattgaaggcacactcaaaaacgtgctcggcagctacggttacagtgaaatccgcttgccgattgtagagcagaccccgttattcaaacgtgcgatcggtgaagttactgacgtggttgaaaaagagatgtacacctttgaggatcgcaacggcgatagcctgacattgcgccctgaaggtacggcgggctgtgtacgcgccggcatcgaacatggtctcctgtacaatcaggaacagcgtttgtggtatatcgggccgatgttccgtcatgagcgtccgcaaaaaggccgctaccgtcagttccaccagctaggtgccgaagtctttggcttacaaggcccggatatcgacgcggaactgattatgctgaccgcacgctggtggcgcgcgctgggcatctctgaacacgttagcctggagctgaactctattggttccttagaggcgcgtgcgaactatcgcgatgcgctggtcgcgttcctcgaacagcatcaagagacgctggacgaagactgcaaacgccgtatgtataccaatccgctgcgcgtgctggattcaaaaaatccggacgtgcaggcgctgctcaacgacgcgcccgctctcggcgactatctcgatgacgattcacgcgagcactttgccggcctgtgtaaattgctggacgcggcggggattgcctacaccgtcaaccagcgtctggtacgcggtctggattactacaaccgcaccgtatttgaatgggtaacaaacagtctggggtcacaaggcaccgtctgtgcgggtggtcgttatgacggtctggtggaacaactgggcggtcgcgctaccccggcagtgggctttgcgatgggcctggaacgacttgttttgttagttcaggcagttaatccggaatttattgcctctcctgttgtcgatatatacctggtagctgccggcgcacaaacgcagtctgcggcaatgacgctggcggagcggctgcgcgatgaaatgccaggcgtgaagctaatgacaaaccacggcggcggcaactttaagaaacagtttgcccgcgccgataagtggggcgcccgtattgcactggttcttggcgaatctgaagtcgccgatgggactgttgtagtgaaggatttgcgctccggtgagcaaacggcagtggcgcaggacagcgtcgccgcgcatttgcgcactttattgggctaa

SEQ ID NO: 369931 - DNA, 1119 bp, Salmonella enterica
atgcataaccaggctccgattcaacgtagaaaatcgacacgtatttacgttgggaatgtgccgattggcgatggcgcccccatcgccgtccagtcgatgactaacacgcgtaccactgacgtggaagcgacggttaatcagatcaaagcgctggaacgcgttggcgcagatattgttcgtgtttctgtaccgaccatggacgccgccgaagcgttcaagcttatcaaacagcaggttaacgtcccgctggttgccgatattcacttcgactaccgcattgcgctgaaagtagcggaatacggcgttgactgcttgcgtatcaaccccggcaatatcggtaacgaagaacgcattcgcatggtggtggactgcgcgcgcgacaaaaacatccctattcgtataggcgtaaatgccggatcgctggaaaaagatctgcaggaaaaatacggtgagccgacgccgcaggcgctgctggaatcagccatgcgccatgtcgatcatctcgatcgtctcaactttgatcagttcaaagtgagcgtaaaagcgtccgatgtattccttgccgttgagtcttatcgtttgttggctaaacagatcgatcagccgctgcatctggggatcaccgaagcgggcggcgcgcgtagcggggcggtcaagtcggcgatcggtttaggtctgctgttatcggaaggtatcggcgacacgctgcgcgtatcgttggcggccgacccggtggaagagatcaaagtcggtttcgatattctgaagtcgctgcgcattcgcgcgcgcggcatcaatttcatcgcctgcccgacctgttctcgccaggagttcgacgttatcggcacggtgaacgcgctggagcagcgtctggaagatatcatcaccccgatggacgtctcgatcatcggttgcgtagtgaacgggccgggcgaagcgctggtatcgacgctgggcgtgacgggcggcaataagaaaagcggcctgtatgaagacggcgtgcgtaaggacagactcgataacgacgatatgatcgcgcagcttgaatcccgtattcgcgcgaaagcaagtcaacttgatgaagcgcgtcggattgacgtgctgcaggttgaaaaataa

SEQ ID NO: 369932 - DNA, 1005 bp, Salmonella enterica
atgaatactgaagccacgcacgaccaaaatgaagcacaaaccaccggcgttcgtctgcgcaatgcccgtgaacaactcggactcagccagcaggctgtcgctgagcgactttgcctgaaggtttctacggtacgcgatattgaagaagataaggcgccgtccgatcttgcttcaaccttcctgcgcggatatatccgctcatatgcgcgtctggtgcatgttccagaagaggaactgctgccggggctggaaaaacaagctccgctgcgcgccgctaaagtcgccccgatgcagagtttctcattaggaaagcgtcgtaaaaaacgcgacggctggttaatgtcttttacctggctggtactgtttgtggtcgtagggctgaccggcgcctggtggtggcagaaccacaaggcgcagcaggaagagatcacgacgatggccgatcaaagcacggctgaactgaacgcagataaagacagcggccaaagcgtaccgctggacaccggtgccgtgacaagccaggatacgacgccagcgcaaacggctccggcgcctgcgacgccggttgattcgacggcggcgacgcaaacgccagcgccaacggcggcggcaacgcaaaatacggtagtcgcgccttcgcaggcgaatgtcgatacggctgcgacatctgccgcgccagcggcaacggagacgccgtccgcgctgccgaccagtcaggctggcgtagcggcgcctgctgccgatccgaacgcgctggtgatgaattttaccgctgactgctggctcgaagtcactgacgccacgggtaagaagctgtttagtggtatgcagcgtaaagatggtaatttaaacctaaccggtcaggcgccttataaacttaaaattggcgcgccggccgcggtgcagatccagtatcaaggaaaacctgtcgatctgagccgctttatcagaactaatcaggttgcgcgtctgacccttaatgccgaaccgacaccggcgcagtaa

SEQ ID NO: 369933 - DNA, 1167 bp, Salmonella enterica
atgtctgaacaaattgtcacacctgaaagcagtaccccggtagttcttaacaacgaaacaaaaatcaacctgctggatctcaaccgtcagcagatgcgcgagttttttaaaaacttaggtgaaaagcctttccgcgccgatcaggtgatgaaatggatgtatcactattgctgcgataattttgatgagatgaccgacatcaacaaagtgttgcgcggcaaattaaaagaggtcgcggaaatccgcgcgccggaggtcgttgaagagcagcgttcctcagacggcaccattaagtgggcgattgctgtcggcgatcagcgcgttgaaacggtctatatcccggaagacgaccgcgctacgctgtgtgtctcttcacaggtaggatgcgcgctggagtgcaagttttgttcaactgcgcagcagggctttaaccgcaacctgcgcgtatcggaaattatcggtcaggtctggcgtgcggcgaaaatcgtcggcgcggccaaagtcaccggccagcgtccgatcaccaacgtggtcatgatggggatgggcgagccattgcttaacctgaccaatgtcgtaccggcgatggaaattatgctcgatgactttggtttcggcctgtccaaacgtcgtgtcacgctctcaacgtcaggcgtggtgcctgcgctggataaactgggcgatatgatagatgtcgcgctggctatctccttacatgcgccgaatgacactattcgcgacgaaatcgtcccgatcaacaaaaaatacaatatcgaaacgttcctgggcgcggttcgccgctatctggagaaatccaacgccaatcaggggcgcgtgacgattgaatacgtgatgcttgaccacgtcaacgacggcactgaacacgcgcatcaactggcggagctactaaaagagacgccttgtaagattaatctgattccgtggaacccgttccctggcgcgccgtatggccgcagctctaacagccgtatcgatcgcttttctaaagttttgatgagttatggtttcacgaccatcgtacgcaagacgcgtggcgatgacattgatgcggcatgcggacagttggcaggcgatgtgattgaccgtactaaacgtaccctgcgtaagcgtatgcagggagaggtgattgacatcaaggctatttga

SEQ ID NO: 369934 - DNA, 432 bp, Salmonella enterica
atggctattgaacggactttttccatcattaaacccaacgcggtggcaaaaaacgttattggcagcatctttgcgcgctttgaagctgcagggttcaaaattgttggcactaaaatgctgcacctgaccgttgagcaggcgcgcggcttctatgctgagcacgacggcaaaccgttctttgacggtctggtggagttcatgacctctggccctatcgtggtatccgtgctggaaagtgaaaatgcggtacagcgtcaccgcgatctgcttggcgccaccaatccggcgaacgcgttggcgggtacgctgcgcgccgactacgctgatagcttaactgaaaacggcacccacggttcggattcgctggaatccgcgcagcgcgaaatcgcctttttcttcggtgaaggcgaagtgtgcccgcgcacccgttaa

SEQ ID NO: 369935 - DNA, 864 bp, Salmonella enterica
atggttaacctgacgatcgatccggcggtagacgtgacgcaggcttgcgtccgtcgtcgctttcgtttttcttcctgccgcgcttgcgccgatgtttgtccggcgcaggcgttttcgctggcgcaggggcaggtcagcatagatacgacacgctgcatagcctgtggcgactgtctgtttgtctgtcctgttgacgccattaccggtatcaaaccggttaaacgctttgtgcagggggatacgttggtggggccgttttcgctacaggcgccaacggtcgatgaactgcttctctggcacagccagtacggtattcgctttattgatattgcggtggagcgatcggcgcagtggctgatggcgctggcggggctaaatttagcgctgcgccgctacggcgagccgggctggtctttcaaacacgttgtcggcgcggagattaacgcctcgcggcgcactctgtttcatgttccgcgcgacgccattaccccgtgtgccgtcgagccggggaaacggcgtctcagacaggcgttttccgcgttcagcgaatgcgtacccgaaatcagtccgcaagagtgcaggatgtgcggcgcctgctggcgaagctgcccggagaacgttatccagtttgacgacaataccctgacgatagcggcggcgcgttgtacgggatgcggcggctgtgcggcggtatgtccgcatcaggcgctgcggctgcggtttgacgtggaacccgcctcaacgcggcatagtgcggcgcatacgctcacctgcgacatctgcaaacgtactttccatgctctcacgcctgaacacacgcactgcgtgctgtgtcagtcccctgagtttgctgtgcgtctttaa

SEQ ID NO: 369936 - DNA, 810 bp, Salmonella enterica
atgcatgagttaccgctgctgatttttacgctctgtttgcaagggtctgtgggtgtgacagtgtggctggcgttgggccgccagtacgccgtagagggacgcgtgcctgcacgcggcgcgcttcccgcgatggcgggggcgtttgtactggcctgcgtagggctgcttgcttcagcgctgcacatgggctatcccctgaatgcgctaaatgcgttacgtcatgtcgccagttcgtggctgagtcgcgaaatcgtctttgccagcctttatctggcggcgctgggactgggggttgtgctgctgtttttccgaaagccaggctggcagccgctgctggcgttggcggcagcgttcgggctggtggatgtattctgcatggcgcaggtttatatccatgcctcggtggcgacctggcagcatagcaacacgctggcgctgttctttggcacatcaggcattatcggctcggtagtcattgcgctggcttatctgcgcaacgctggcgccgcaatgcgctgcgctgtggtggtggtcgcactgatggtgctgattcgcctgatcatgcagccgctatggctggcggatattaatgcagtggatacgacggtcgtcactttcccgcatcatccgctacaggcgctggcgcagttgcgcgacgtctatcttctcggctggtgtgtctcagcggcgggaatgctctgctttgccgcaggcggtctgcgaaacgccagaggaactctggtggcgggcagcgtattgctgcttatcggcgagattatgctgcgctacgtcttctttagtattggctga

SEQ ID NO: 369937 - DNA, 630 bp, Salmonella enterica
atgagtcagtttacacattacccgccggtgagcgataaacaactggggtttttcatcgactcctcacgctgctccggttgtaaagcctgccaggtggcctgcaaagacaaaaacaatctggaagtaggccgtcgtttccgccgcgtctatgaagtcaagggcggaagtttcatcccgaccgggcagggcggggtcagcaataacgtatttgcttatacgctttctatttcctgcaatcactgtgcggaccctgtctgcaccaagaattgcccgactaccgctatgcataaacgcccgggcgacggcatcgtgcgcgttgataccgacaaatgcgtcggctgtggctattgcgcttggtcctgcccttacggcgcgccgcagcttaacgagcagaccggccaaatgtccaagtgcgacatgtgcgttgatttactggcgaaaggtgaaccgcccgtctgtgttgcgacctgtccgctggaggccatcaagtttgctccgattgatgaactgcgcgcgaagtacggtagcgtatgcgacgttaacgggctgccagattcatccataaccaaacctaatctggttgtcaaagcgcatcagggcgcagaaaaagagggtaaacgccatgcatga

SEQ ID NO: 369938 - DNA, 2379 bp, Salmonella enterica
atgaaaaatataaaaagccagggaaatggcgaacagcccgctatttctcgccgccactttatccaggccagctccgcgcttattgcgttaccgtttgtctcctcgccagctaccgctcaggcgcgcgctgtgacggccactgaaaacaggcctgcggaaaaagtcgttcagacatgcagcacttttgactgcgggggcaaatgcgatattcgggcgcatgttagtgacggtatcgtgacgcgaatttcaacgcgaccggataatgcgctggatgcgcaaatgccggtgatgcgtgcctgtgttcgtggacgcgcataccgtaaatttgtttatcaccccgatagacttaaatatcccatgaagcgtgtaggaaaacgcggtgaaggaaagttcgagcgaatttcctgggatgaagcgacaaccttaatcgccgataatttaaaatcgattactgaaaaatatggcccggcttcgcgctatgttcatgttggcaccgccgtttccggcggcaccttttccggcgataaaatggcgcgtcgcctgctgaatctgaccggcggctatctcgaaagctaccattctgtgagtatgggcaatacggcggccgcgacgccttatacttacggcattgccgccagcggcagttcgctggatacgcttttggacaccaaactggtgattctgtggggccataacccgacggagaccatttttggtcataccaactatttcttgcagaagatgaagcagaacggtacgcggtttatcgtggtcgatccgcgctattccgacaccgtttcctcgctggcggatcagtggatcccgctgctgcccaccaccgacaatgcgctgatggacgcgatgatgtacgtcatcatcagcgagaatctgcacgatcgcgcatttattgcgcgctacgctatcggttttgacgaagactcaatgccggaaggcgtaccggctaacgaatcgctggtggcgtatctgaccggcgccaaagacggtgtcgttaagtcccccgagtgggcggaaaagatcacccatgtgccggcgcaaaccatacgccagttagcgtgtgattacgcgaataccaaacccgccgcgttgattcaggggtggggaccacagcgccacaactgcggcgagcgcaccgcgcgcggctcgaccctactggcgaccattaccggtaatgtcggcatcaaaggcggttgggctgcgggttatggcggctgcgctaaccgtaaatttgccgcgggtccggagatgccggataacccggtaaaagccaaaatttcggtgatgaactgggtgcaggccgcagacgacgccagcaaagtgacgccggatatggggctgaaagatgccgataagctggacagtaacatccgtattctgttctcgctggccgggaactatctggcgaatcagaaccccgatctgcaccaggcggtacgcgtactggaggatgaatcaaagatccagtttattgtcgccagcgatctgtttatgacgccgagcgcgaaatacgctgatctactgctgccggaaaccagctttatggaacgctggaacatcggtgaaacctggggcacggcaagctacctgatactctctgaaaaactgatcgagcctgaatttgagcggcgctccgactacgactggctacgtgaggtggcggcgaaattaggcattgaaaacgaatttagccaggggcgcgatgagaaagcgtggattgaacacatctgggaacagacgcgcctggcgatgccggacgaaaatctaccggatttcgccacgctgcaaaagacccgtcagcatctgttcaaaagcgcgccatttatcgcctttgaagacaatattcgcgatccggacaatcatccgttcccgacgccgtcagggaaaatagagatcttctcgaagcgcctgtacgacatgcagcatccggaaatcccggcgttgtcgcactacgttcccgcgcatgaaggcccggaggatgcgctggtgaaagattttccgctccagttaattacgtggaaaggaaaaaaccgcgccaactcaacgcaatacgctaacccgtggctgattgaagtgcagcagcagacattgtggatcaacccgcaggatgcgcaaaagcgcggcattacgcatggcgacatggtgcgtattcataactcacgcgggatttgcgaaatcccggcggaagtgacgccgcgcattattcccggcgttgtcgcaatgcaggctggcgcctggtggcagccggatgaaaacggcgttgataaaggcggctgtgcgaacgtcctcagctcggcccgtattaccgcgctggcgaagggaaattcacatcaaaccatgctggtggaggtggctaaagcatga

SEQ ID NO: 369939 - DNA, 2316 bp, Salmonella enterica
atgaacggttggcgtggtaaacgtggccgctggctgtggctggcgggcgcgccgctttttattttcctggcgttatgggcagcggataaactctggccgctgccgctcaatgaggtccatcctgcgcgggtcgtggtagcccatgacggtacgccgctgtggcgctttgccgacgccggggggatctggcgctatccggtgacgattgaagaggtctctccccgctacctggaggccttaatcaattacgaagatcgctggttctggcggcaccctggcgttaaccctttctccgtcgcgcgcgcggcatggcaggatcttaccgccgggcgcgttatttccggcggcagtacgctgactatgcaggtggcgagactgctggacccgcattcgcgcacgttcggcggtaaaatccgccagctttggcgcgccctccagcttgaatggcatttgtccaagcgcgatatcctgacgctgtacctgaaccgcgcgccgttcggcggcacgctacagggtattggcgctgcaagctgggcctacttcggcaagccgcccgcgcgcctgagctacgctgacgcggcgctgctggccgtattgccgcaggcgccgagccggttacgccccgaccgctggcctgcgagagccgaagcggcacgaaataaagtgctggatcggatggcggcgcagggcgtctggcctgccgaaacggtacgcgagtcgcgtgaagagccggtctggctggcgccgcgtcaaatgccgcaactggcgccgctttttgcccgaatgatgttgagtaaaagccggagcgacaaaattgtgaccacgctggacgccgggttgcagcggcaactggaagatctggcgcgggcatggaaagggcggctgcctgcacgcagttcattggcgatgatcgtcgtcgatcataccgatatgagcgtgcgcggctgggtaggatcggtagaccttaatgacgacagccgttttggtcatgtcgacatggtaacggcgatccgatcgccgggatcggtactcaaaccctttgtgtacggtctggcgctggatgacggcttgatccatcccgcatcattattacaggacgttccgcgccgcaccggagattaccgcccgggaaacttcgacagcggatttcacggcccggtcagcatgagcgacgcgctggtacgctcgctgaatctgcctgccgttcaggtgcttgaagcctatgggccgaaacgatttgcggcaaaactgcgtaacgtcggcctgccgctatatttgcctgctggcgcggcgcccaatctttcgctgattctgggcggcgcgggcgcgcggcttgacgagatggcggcggcatacagcgcgttcgctcgtcatgggaaagcggcgaaactacggttacagccggacgatccgctgtcggaaagaccattaatgtcgccgggagcggcgtggatcattcggcggattatggcggatgaagcgcaacccttgccggataacgcgctgccgcgcattgtgccgttggcgtggaaaaccggcaccagctacggctatcgcgatgcgtgggctattggcgttaacgcgcgctatatcatcggcatctggacaggcagacccgacggcacacctgtggtggggcaatttggttttgccagcgcggtgccattgcttaaccaggtcaataatctgttactggcgcatacgggacgcctgccggaagatccgcgtccgcagacggtaagccgcggcgtcatttgctggccgggcggacagactctgcctgccggagacagcaactgtcgccgccgactggcgacatggctgctcgatgacagccagccgcccacgctgctgttacctgagcaggaagacatcaacggtattcgtttcccggtctggctggatgatacggggcggcgtgtcgctgccgactgtccgcaggcgtgtgcgcatacgtttatcgtctggccgcggccgctggagccgtggctgccgcctgcggaaagacgtagcgcccgcttgcccgcggcgtccgaccactgtccgccgctacagggcagtgatgccgcgccgttaatgctgtcaggagtgagggatggcgcggtgatcaggcaattgccaggccaggaaaacgttacgctgcccgtctcgactaccggcggtaaagggcgtcgctggtggtttttaaatggcgaacctgttaatggcgaaaataatcgcctttctttattactcaatatcgctggacgttatcaacttgtcgtaatggatgagtccggtcaggttgctgcggttaattttgaattaatacgttaa

SEQ ID NO: 369940 - DNA, 4935 bp, Salmonella enterica
atgaaacatttacgcgtggtggcctgcatgatcatgctggcgctggcgggatgcgataacaacgataaaaccgccccgacgactaaaagcgaagcgccagccgtagcgcagccctcgcccgcgcaagacccggcacagctacaaaagctggcgcagcaaagccagggcaaagcgctcacgctattagacgcctccgaagcgcagcttgacggcgcggcgacgctggtgctgacgttttcaattcctttagatcctgaacaggatttctcccgtgtggttcacgtggttgataagaaaagcggcagcgttgacggcgcatgggagctggcgccaaatttaaaagagctaaggttacgtcatctggaacctgaacgcgtgctggtggtcacggttgatcccgccgttaaggcgctgaataacgccaccttcggcaagtcttatgaaaaaacgattaccacgcgtgatgtccagcccagcgtcggctttgccagccggggatcgctgctaccggggaaaatagcggaaggactgccggtcatggcgcttaacgtcaaccacgttgatgtgaactttttccgcgttaagcccggatcgctggcgtcatttgtcagccagtgggagtaccgtagttctctctctaactgggagtccgaccatctgctgaaaatggcggatctggtttataccggtcgttttgatcttaatccggcgcgcaatacgcgtgagaaactgctgctgccattaagcgatattaagccgctgcaacaggcgggcgtatatgtggcggtaatgaatcaggctggacactacaactatagtaatgccgctacgttgtttacccttagcgatatcggcgtgtccgcgcaccgttaccataatcggctggatatctttacgcaaagcctggaaaacggcgcggcgcagtcgggaattgagatcgttcttctgaatgataaaggtcagacgctggcgcaggcgacgagcgacgcgcagggacatgtgcaactggaggctgataaagcggcggcgctattactggcgcgtaaagaggagcagaccacgctgctcgatctcacgcttccggctctggatctgtcggaatttaatgtcgctggcgcgcccggctacagcaagcagttctttatgttcggcccgcgcgatctctaccgcccgggcgaaacggttatcctcaacggattactgcgcgatagcgacggtaaaacgctgcccgatcaacccgttaagctggaagtggtaaaaccagacggacaggtgatgcgtaccgtcgtcagccaggcggaaaacgggctataccgtttgaattatccgctggatatcaacgcgccgaccggcttgtggcatgtccgcgccaacaccggcgataatttgctgcggagttgggatttccacgtggaagactttatgccggagcggatggcgctcaacctgacggcgcaaaaaacgccgctggcgcctgcggatgaggtgaaattctccgttgtcggctattacttgtatggcgcgcctgctaacggcaataccctgcaagggcaacttttcctgcgtccgctgcgcgacgctgtcgcggcgttgcctggcttccagttcggcaatattgctgaagagaatctttcgcgcagcctggacgaagttcaactgacgttggataaaggcggacgtggtgaagtgagtgctgccagccagtggcaagaagcgcattcgccgctgcaggtaattctacaggccagcctgctggagtctggcggtcgtccggtcactcgtcgcgtagagcaggcgatttggcctgccgatacgttaccgggaattcgtccacagttcgccgccaaagcggtatacgactaccgtacggataccaccgttaatcaaccgattgtcgacgaagacagcaacgccgcattcgatattgtttacgccaacgcgcagggcgagaaaaaagcggtgtccggtttacaggtgcggctcatccgcgagcgtcgcgactattactggaactggtcggaaagcgaaggctggcagtcgcagtttgatcaaaaagatctggtggagggcgagcagacgctggatctgaacgcggatgaaaccggaaaagtcagcttcccggtggaatggggcgcgtaccgtctggaggtcaaagcgccgaatgagacggtcagcagcgttcgtttctgggccggctatagctggcaggataacagcgacggtagcggcgcggcgcgtccggatcgcgtcaccctcaaactggataaagcgagttatcgtccaggcgataccatgaaattgcatatcgccgcgccggtcgctggtaaaggttatgcgatggtggagtccagcgacggtccgctgtggtggcaggcgatcgatgtgccggcacaaggtctggagctcacgattccggtggataaaacctggaatcgccacgatctctatctcagtacgctggtggtgcgtcccggcgataaatctcgttccgcgacgccaaaacgcgccgtggggttactacacctaccgctgggggatgaaaaccgccgcctcgatctggcgctggaaagcccggctaaaatgcgcccgaatcagccgctcaccgtcagggtgaaagccagcgttaaacacggcgaaatgccaaaacagatcaacgtgctggtctccgcggtcgatagcggcgtattgaatatcaccgattacgcgacgccggacccgtggcaggcgttcttcggtcaaaaacgctacggtgcggatatctacgatatttacggccaggtcattgaagggcaggggcggctggcggcgttgcgttttggcggcgatggcgacgaccttaagcgcggcggaaaaccgccggtaaaccatgtcaatatcatcgcgcagcaggcgcagccgatcacgctcaatgagcagggcgaaggggtcgtaacgctgccgattggcgactttaacggcgaactgcgggttatggcgcaggcatggacagcggacgattttggtcgcggcgaaagcaaagtcgttgtcgccgcgccagtgattgccgagctgaatatgccgcgttttctggcgggaggggatgtttcgcgactggtgctggacgtcaccaatctgaccgaccgcccgcagacgctgaatattgcgctcgccgccagtgggttactggaactgcttagtcaacagccgcaaccggtcaacctggcgccgggcgtgcgcaccaccttattcgttccggtacgtgcgctggaaggttttggcgaaggcgaaatccaggcgaccattagcggtctgaatctgccgggagaaaccctcggcgcgcagcataagcagtggcaaatcggcgtgcgtccggcctggcctgcccaaacggtaaatagcggcattgcgctggcgccgggagagagctggcatgtaccagagcagcatctggcaaacgtctcgccagccacgttacagggacaactgctgttaagcggaaaaccgccgctcaatctggcgcgctacattcgcgagctgaaagcatatccgtacgggtgcctggaacaaaccaccagcgggttattcccggcgctgtataccaatgccgctcaattgcagtcgctcggtattaccggcgatagcgatgaaaaacggcgcgccgcggtggatatcggcatctcccgcatactacagatgcagcgtgataacggcggttttgcgctatgggatgaaaatggggcggaagagccctggctaacggcctacgcgatggatttcctcattcgcgcgggcgagcagggatatagcgtcccgccggaggccattaaccggggcaatgagcgactgctgcgctatctgcaggatcccggtacgatgctgattcgttatagcgataatacccaggccagtacttttgccgctcaggcttacgccgcgctggtactggcgcgtcagcagaaagcgccgctcggcgcgctgcgcgaaatctgggagcgccgtagtcaggcggcttcaggactgccgctgatgcaattgggcatcgcgttaaacacgatgggtgatgccagacgcggcgaagaggccattacgctggctctgaatacgccgcgtcaggacgaacggcaatggatagcggattacggcagttctctgcgcgataacgctctgatgttgtcgttactggaagagaacaacctcagaccggacgcgcaaaacgcgctattaagctcgctttctgagcaggccttcggtcagcgctggctctctacccaggagaacaatgccttgttcctcgccgcgcattcgcgacaggccagcgcgggcgcctggcaggcgcagacctcgttagaggcgcagccgctgtcgggcgacaaggcgctgacccgtaatctggatgctgaccagctggccgcccttgaggtgacgaacaccggtagccagccgctatggctgcgtctggatagcagcggctatccctcatctgcgcctgagcctgccagcaacgttttgcagattgaacgacaaatactggggaccgatggtcagcgtaaatcgctgtcctcgttgcgtagcggcgaactggtgctggtctggttaacggtagtggccgatcgcaatgtgccggatgcgctggtggtggacctgctcccggccgggctggagctggaaaaccagaatctggctgacagcagcgccagcctgccggagagcggtagcgaagtgcaaaatctgcttaatcagatgcagcaggcggatattcagtatatggaattccgcgacgatcggtttgtggctgccgtcgttgtcaatgagggccagcccgtgacgctggtctacctggcgcgcgcggtaacgccggggacgtaccagcttgcgcaaccgcaggtggaatcgatgtacgcgcctcagtggcgggcaaccggcgcgagcgaggggctgctgattgtgacgccttaa

SEQ ID NO: 369941 - DNA, 843 bp, Salmonella enterica
atgaccaccgccttttttgtcgccgccgactggcttgccgaacatattgatgatccggaaatacagattcttgacgcccgtatggcgccgccaggacaggaacatcgtgatatggcgggcgaatatcgcgccggacatattcccggcgcgctgttttttgatattgaagcgctttccgatcgcgcatcgccgctgccgcatatgatgccgcgcccggaagcgtttgcggtggccatgcgtgaactgggtgttcgccaggataaacacctggtcatatacgatgaaggcaatctgttctccgctccgcgggcatggtggatgctgcgcacgttcggtgccgagaaagtgtccattctggcgggcggactggcgggctggcagcgcgacgaatggctattgcgcgaaggcgaagaagcgcatgaaggaggcgagtttgaggcgaaattcgcgccgcaagccgtggtgcgtctcaccgacgtattgctggcaagccatgaaaaaaccgcgcaaatcgttgacgcgcgtccggcggcgcgttttaacgctcaggctgatgaaccgcgtccgggactgaggcgcggacacattcctggcgcgctaaacgtcccgtggacggaactggtgtatgagggcgaattaaagaccactgacgaactgaatgaggtttttttcagccacggcgtgagtttcgacagaccgattatcgccagctgcggttccggtgtgacggccgcggtcgtggtgctggcgctcgccacgctggatgtgcctgacgtcacgctttacgatggcgcgtggagcgaatggggcgcgcgtaccgatttaccggttgaacccgcttaa

SEQ ID NO: 369942 - DNA, 225 bp, Salmonella enterica
gtgaaaaccaaaacagcggtgatgatactccttatacccggcgtaaagtatttaccgataaaaaataggattttattaagagaaaataatgcccgtttgcaggacagtggaaaagagctgaataaaaacaatgtctgtagatcgttttacatcagcctgaacggtaggccggataagcgtgagcgccatccggcatggcagatattaagcgggttcaaccggtaa

SEQ ID NO: 369943 - DNA, 669 bp, Salmonella enterica
atggatatttcacgcgctaatttaattgagttagttaaaaaggttaatcgcaataaggtgcctaatcctatgcctgccgaggaaataagtcgtctgcgagtgcgtaagtatcgcgatccgcaaaatacggaaaccactgagttacctgaaagcctgaaggcgctactggcctacgaccgcgatctacttagcaattataatatgcctgtgattgaaacattacaaagatctattgataaagagggagtaattcattcttactcccctgatgaagaggcgtattacggcgctggcatggatagctcaggtattgatattgaagatctgatgcctgtctggagtaacgatccccgtcttccggcattaattcgtatcgatcatgtcggcgatcaggccatttttatctatatcacagaacgggatgccaacggcgaataccctattgcccgcatggaacgaaatgaattctggctggcggagtcttctctggtggaatatctctataatattatttcgggcgctaaagacattggctttaccgaagaggatttacatctttcgcaatggaaggcacagcaaaaaatgaatgaaaaacgcgatgccgctttacttgacctggaggattatcatgaggcgttttgggcaaaactggacgcgctcgtcgattaa

SEQ ID NO: 369944 - DNA, 777 bp, Salmonella enterica
atgtccgaaactaaaaatgaattagaaatcttgctggagaaagcggcgactgagcccgcgcatcgtccggcatttttccgtaccttactggagtccaccgtctgggtgccgggaagcgctgccgaaggcgaggcgatagtggaagacagcgctctggatttgcagcactgggaaaaagaagacggcacgaccgtcattcccttctttacttctctggaggcgctgcagcaggccgtggaagacgaacaggcatttgtggtgatgccggcgcgcacgctgtttgaaatgacgcttggcgaaacgctattcctcaacgctaaattgccgaccggcaaagagtttatgccgcgtgaaatcagcctgcttctcgctgaggaaggcagtccgttaagtacgcaggaagtgctggaaggcggcgagtcgcttattttatccgaagtggccgagccgccgtcgcagatgattgattccctcactacgctgtttaaaaccatcaaaccggtgaaacgcgcatttctctgcgcgattaaagaacatgcggacgcccaacccaatctgctgattggcattgaggctgacggcgaaattgaagagatcattcacgcagcgggcaatgtggcgaccgacacgttaccgggtgacgaaccgatcgatatttgtcaggtgaggaagggcgagcagggtatcagccactttatcactgagcatatcgcgccgttctacgagcgccgctggggcgggttcctgcgcgattttaaacagaaccgcatcatctga

SEQ ID NO: 369945 - DNA, 180 bp, Salmonella enterica
atgtatatgggttgtaggcctgataagacgcacggcgtcgccatcaggcaaaatgccgggtggcgcttcgcttacccggcctacaaaaacaccgctcaggcggtcagcaaattcgcgatggtgcgcacacccagaccggttgccccggcagcccactgctcaaccggcgctttgcgataa

SEQ ID NO: 369946 - DNA, 1284 bp, Salmonella enterica
atgacagaagccatgaaaattacgctttccacgcagcctgccgatgcgcgctggggcgataaagccacttacagtattaataacgacggtattaccttgcatcttaacggtaaagacgatctggggttgatccagcgtgcggcgcgtaaaatcgacggcctgggaataaaacaggtcgcgctgacaggcgaaggatgggatatcgagcgttgttgggcattctgggcgggttataaaggaccaaaaggcgtccgtaccgtaatgtggccggatttagacgatgcccaacgtcaggagctggataaccgcctgaccattattgactgggtgcgcgacaccattaatgctccggcggaagagcttggaccggagcaactggcgcagcgcgcggtggatctgctgtgcagcgtcgcgtgcgatagcgtcacttaccgtatcaccaaaggcgaagatctgcgcgagcagaactatatggggttgcataccgtaggccgtggttctgagcgtccgccggtgctgctggcgctggattacaacccgacgggagacaaagatgcgccggtttatgcctgcctggtcggtaaaggtatcacctttgactccggcggctacagtatcaaacaaagcgcttttatggactcaatgaaatccgatatgggcggcgcggcgacagtaacgggcgcgctggcgttcgccattacccgtgggttgaataaacgcgtaaaactgttcctgtgctgcgccgataatctgatcagcggcaatgcgtttaaactgggcgatattattcgctaccgtaatggtaagaatgtcgaagtcatgaataccgatgcggaagggcgactggtactggcggatggcctgattgacgccagcgcgcaacacccggagctaatcattgatatggcgacgttaaccggcgcggcgaaaacggcgctgggtaacgactatcatgcgctattcagttttgacgatacgctggcggggcgcttgctgaccagcgcggcgcaagagaatgaaccgttctggcgtctgccgctggcggagttccaccgtaaccagctgccgtctaactttgcggaactgaacaacaccggcagcgcggcgtatcccgctggggcaagcaccgccgcgggttttctgtcgcactttgttgaaaattaccgcgaaggctggctgcacattgactgttccgccacttatcgcaaagcgccggttgagcagtgggctgccggggcaaccggtctgggtgtgcgcaccatcgcgaatttgctgaccgcctga

SEQ ID NO: 369947 - DNA, 201 bp, Salmonella enterica
atgggactcaagtggaccgatagccgcgagatcggcgaagcgttatacgacgcatatcctgatgtcgatcctaaaaccgttcgtttcaccgatctgcatcagtggatctgcgaactggacgattttgacgacgaccctaacgcatccaatgaaaaaattctggaggcgattctgctagtctggttggatgaagcagagtaa

SEQ ID NO: 369948 - DNA, 336 bp, Salmonella enterica
atgccgaagattgttattctgcctcatcaggatctttgtccggatggcgcagttctggaagctgagaccggtgaaaccattcttgacgttgcgctgcgcaacggcatcgagattgaacacgcctgtgagaaatcgtgcgcctgcaccacctgtcactgtattgtacgtgaaggcttcgactccttgccggaaagttcggaagaagaagacgatatgctggataaagcgtgggggctggagccggaaagtcgactgagctgccaggcccgcgttaccgacgacgatctggttatcgaaattccacgttacacaatcaaccatgcgcgtgagcattaa

SEQ ID NO: 369949 - DNA, 1851 bp, Salmonella enterica
atggccttattacaaattagtgagcctggtctgagcgccgcgccgcatcagcgtcgtctggcggcgggcatcgacttaggcactaccaactctctggttgcgacggttcgcagcggccaggcggaaactctgcctgaccacgaagggcgccacctgttgccttcagtggttcactatcagcagcagggccatacggtcggttacgctgcgcgcgacaatgccgcgcaggatacggccaacactatcagctctgtgaaacgcatgatgggacgctcgctggcggatatccaggcgcgctatccgcatctgccttaccggtttaaggcaagcgttaatggactgccgatgattgacacggcggctggattgctcaatccggtacgcgtatcggctgatattctcaaagctctggccgcgcgggctagcgaatcgctctccggcgagctggatggtgtggtgattaccgttcccgcctatttcgatgatgcccaacgtcagggaacgaaagacgccgcgcggctggcaggcctgcatgtactgcgcctgctcaacgaaccgacggcggcggcgattgcctacggtctggactcaggcaaagaaggcgttattgctgtttacgatctcggcggcggtaccttcgatatctctatcttacgcctgagccgcggggtgtttgaagtgctggcgacgggcggtgattctgcgctcggcggcgacgactttgaccatctgctggcggactatattcgcgagcaggcgggaattgccgatcgtagcgacaatcgcgttcagcgcgaattgctggatgccgcgattgccgcgaaaatcgccttaagcgatgccgatactgttcgagttaacgttgcgggctggcagggggagatcactcgcgagcagtttaacgatctcatttccgcgctggttaagcgcacgctattggcctgccgtcgcgcattgaaagatgccggcgttgatccccaggacgttctggaagtggtcatggtcggcggttcgacccgtgtaccgctggtgcgtgagcgggtgggcgaattttttggccgcacgccgttaaccgctattgacccggataaagtggtcgctatcggcgcagcgattcaggccgatattctggtcggcaacaagccggacagcgaaatgttgctgttggacgtgattccactctctcttgggctggaaacgatgggcggcctggtggaaaaagtcattccgcgcaacaccactatcccggtggcgcgcgcgcaggatttcaccaccttcaaagacggccagaccgcgatgtctatccatgtgatgcagggcgaacgcgaactggtgcaggactgccgctcgctggcgcgctttgcgctgcgcgggattccgccgctgccggcgggcggggcgcatattcgcgtgaccttccaggtagacgccgatggcctgttgagcgtcaccgcaatggaaaaatccaccggcgtcgaggcctccattcaggtcaaaccttcctatggcctgaccgatggcgaaatcgcctcgatgatcaaggattccatgagttttgccgagcaggacgtgaaagcgcgtatgctggcggagcaaaaagtcgaagccgcgcgcgtgctggaaagtttgaccggcgcgctaactgccgacgccgcgctgttaagcgccgcagaacgtcaatgcattgatgatgccgccgcacatttaagcgcggtcgcacaaggcgatgatgttgacgccatagaacaagccattaaaaacgtagataaacaaacccaggaatttgccgctcgccgcatggaccagtcggttcgtcgcgcgttgaaaggccattccgtagacgaggtttaa

SEQ ID NO: 369950 - DNA, 516 bp, Salmonella enterica
atggattacttcaccctctttggcttaccagcccgttatcagattgacacccaggcgctgagccttcgttttcaggatctgcaacgccagtatcaccctgacaaatttgccaacggcactcaggcgcagcagcttgccgccgtccagcaatccgccacgatcaaccaggcctggcaaacgctgcgtcaccctttgacgcgcgcggagtatctgctctccttacacgggttcgatctggccagcgagcaacatacggtacgcgacaccgcgtttctgatggaacaactcacgcttcgcgaagagctggacgatatcgaacaatcaaaagacgacgtgcggctggaaagcttcatcaaacgcgtacaaaagatgtttgatgctcgccttcagcaaatggtggaacagttggacaacgccgcgtgggacgcggcggcggatacggtgcgcaaactgcggtttctcgataaactgcgaagcagcgcagaacaactcgaagaaaagctgctcgatttttaa

SEQ ID NO: 369951 - DNA, 324 bp, Salmonella enterica
atgtcgattacacttagcgacagtgcagcagcgcgagttaataccttcctggccaaccgtggtaaagggtttggtctgcgtctgggcgtgagaacctccggctgctcaggtatggcttatgtactggaatttgttgacgagccaacggcggaagacaccgtgtttgaagacaaaggcgttaaggtagtggttgacggcaagagcctgcaatttctggacggtacacagctggacttcgtaaaagaaggtctgaacgaagggtttaaattctccaacccgaatgtgaaagatgagtgtggttgcggcgaaagcttccacgtgtaa

SEQ ID NO: 369952 - DNA, 387 bp, Salmonella enterica
atggcttacagcgaaaaagtaatcgatcactatgagaacccgcgtaacgtagggtcgtttgacaacaacgacgataacgtgggaagcggcatggttggcgcgccggcctgcggcgacgtcatgaagttgcagattaaagttaacgatgaaggtatcattgaagacgcgcgcttcaagacttacggctgcggttccgctatcgcctccagttctctggtaacggagtgggtgaaagggaaatccctggacgaagcgcaggcgattaaaaacaccgacattgcagacgaactggaactgccgccggtgaaaattcactgctctattctggcggaagacgcgattaaagccgctattgcggattacaaaagcaaacgcgaagcgaaataa

SEQ ID NO: 369953 - DNA, 1215 bp, Salmonella enterica
atgaaattaccgatttatctcgactactccgcaaccacgccggtggacccgcgtgttgccgagaaaatgatgcagtttctgaccctggacggaacctttgggaacccggcgtctcgttcacaccgtttcggctggcaggctgaagaagccgtcgatatcgcccgcaaccagattgctgaactggtcggcgccgacccgcgtgaaatcgtctttacctcaggggcgacggagtctgataacctggcgattaaaggcgctgccaacttttatcagaaaaaaggcaagcacatcatcaccagcaagaccgagcacaaagcggtgctggacacctgccgtcagcttgagcgcgaggggtttgaagtaacctacctggcgccgcagcgcaacggcatcatcgatctcaacgagctcgaagcagcgatgcgtgacgacaccattctggtttccatcatgcacgtgaacaacgaaatcggcgtggtgcaggatatcgcgaccatcggcgaaatgtgccgcgcgcgcggtatcatctaccacgttgacgccacccagagcgtgggcaaactgcctatcgacctgagccaactgaaagtggatctgatgtccttctccggtcataaaatttatggtccgaaaggcattggcgcgctgtatgtgcgtcgtaagccgcgtattcgcattgaagcgcagatgcatggcggcgggcacgaacgcggtatgcgctctggtactctgcctgtccaccagatcgtcggcatgggcgaagcttaccgtatcgcgaaagaagagatggagaccgaaatggcccgtctgcgcggtctgcgtaaccgtctgtggaacggcatcaaagatattgaagaagtttacctgaacggcgaccttgagcagggcgcgccaaacattctcaacgtgagctttaactacgttgaaggcgagtcgctgatcatggcgctgaaagacctggcggtctcttccggttccgcctgcacctccgccagtctggaaccgtcttacgtgctgcgcgcgttgggcatgaatgacgagctggcgcatagctctatccgtttctctttaggtcgttttaccactgaagaagagatcgactacaccattgatctggttcgtaaatccattggccgtctgcgtgacctttctccactgtgggaaatgtacaagcagggtgtggatctgaacagcatcgaatgggcacatcattaa

SEQ ID NO: 369954 - DNA, 495 bp, Salmonella enterica
atgagactgacatctaaagggcgttatgccgtgaccgcaatgttagacgttgcgctcaactccgaagcgggcccggtaccgttggctgatatttctgaacgtcaggggatttccctttcttatctggaacagctattttcccgtttacgtaaaaacggtctggtttccagcgtacgcgggccgggcggcggttatctgctgggtaaagatgctggcagcattgcggtcggcgaagtgatcagcgcggttgatgaatccgttgacgcgacccgttgccagggcaaaggcggctgccagggcggcgataaatgcctgacccatgcgctgtggcgtgatttaagcgatcgcctgaccggttttctcaacaatattaccttaggcgagctggtgaataaccaggaagttctggatgtgtctggtcgccagcacacgcatgacgcgccgcgcgccagtggtcgtgcgcaggacgctatcgacgttaaattacgcgcttaa

SEQ ID NO: 369955 - DNA, 732 bp, Salmonella enterica
atgctgcaaaacattcgaattgtgctggtggaaacctcccacaccggcaatatgggctccgtggctcgcgctatgaaaaccatgggcttaactaacctgtggctggtaaacccgttggtgaaaccggactcccaggccatcgccctggcggcaggcgccagcgatgtgatcggtaatgcgcagatcgtcgatacgctggatgaagcgttggctggctgtagcctggtggtcggcaccagcgcccgttcccgcactttgccgtggccgatgcttgatccgcgcgagtgcggcttaaaaagcgtggcggaagcggcaaatacgccggttgcgctggtttttggtcgtgagcgtgtcgggctgactaacgatgagttgcaaaaatgccattatcacgtcgctattgccgctaacccggagtacagctcgttgaatctggcgatggcggtacaggtcatcgcgtatgaagtccgcatggcctggctggcgacgcaggaaaacggcgacgcagcagatcatgaagagacgccgtatccgctggtggacgatcttgaacgtttctacggccatctggagcagacgttgctctccactggctttattcgcgaaaaccatccggggcaggtgatgaataaattgcgccgtctgtttacccgcgcccgaccggaaagccaggagttgaatattctgcgtgggattctggcgtctattgagcagcagaataaaggcaagtaa

SEQ ID NO: 369956 - DNA, 804 bp, Salmonella enterica
atgcatccgatgctgaccatcgccgtgcgcgcagcgcgcaaggcgggtaatgtaattgccaaaaactatgaaactccggacgctgtagaagcgagccaaaaaggcagtaacgattttgtgaccaatgtagataaggccgctgaagcggtgattatcgacaccattcgcaaatcttacccgcaacacactattatcaccgaagaaagcggtgagcacgttggcacagatcaggatgttcaatgggttatcgatccgctggatggcaccaccaacttcatcaaacgtctgccacacttctctgtttccattgctgtacgcattaaaggccgtactgaagtggctgtcgtttacgatccgatgcgtaacgaactgttcaccgccacccgcggtcagggcgcacagctgaacggctaccgtctgcgcggcagtaccgcgcgcgatctggacggcactatcctcgctactggcttcccgttcaaagccaaacaatacgcgaccacctacattaatattatcggcaagctgttcagcgaatgcgccgatttccgccgcaccggttccgccgcgctggatctggcctatgtggctgcaggtcgtgtcgatggtttctttgaaattggccttcgtccgtgggatttcgccgcgggcgaactgctggttcgtgaagcgggcggtatcgtcagcgatttcaccggaggtcataactacatgatgaccggtaatatcgtggcggggaatccgcgcgtcgttaaagccatgctggcgaatatgcgcgacgaactgagcgatgcgctgaagcgctaa

SEQ ID NO: 369957 - DNA, 879 bp, Salmonella enterica
atgacccttcaacatacccgacgcatcgtcaaatccctttttattctgtttatcattgtggtctgtatttatctgctaccccgcgtagcgatcaatgccttttattacccggacaataaagtctatgggccaacccctgccgaagctgaatccattacctttaccgccaaagatggcacgcatctgcacggctggtttattcccactgctttcggcaggccggaaaacgccgtcgcgacggtgattcatgtccatggcaacgccggaaatatgtcggcgcactggccgttagtcagttggctgccagaacgcaacgtaaacctgtttatgtttgattaccgtggttttggcgaatcggagggtaccccatcacaagaggggctactggacgatacgaaaagcgcgatagattatgtgcggcatcgcgccgacgttaaccccgagcgcctggtactgctggggcagagcctgggcggcaataatgtactggccgccgtaggccactgcgtaggctgcgcaaatatgcgctacgccgaccaggcgggcatacgtgcgattatccttgactcaacgtttttatcctattcctccatcgccaaccagatgatcccgggcagcggctatttgcttgatgaccgctatagcgcggatcgcaatattgccagcgtcagccccattccggtattgattcttcatggcacggcagaccatgttattccctggcaggacagtgagaaattgtatgccctcgcccgggagcccaaacaaaaaatcttcattcctgacggcgatcacattgatgctttttccggacgttatgcaaacctttaccgtgatgcaatgattaaatttattcagacagcgctatccgctaaatag

SEQ ID NO: 369958 - DNA, 1044 bp, Salmonella enterica
atggctatcaaaattacgcctgacgagtttagtttgcttatccagcgattaaacaaaaaatggcgcgtgtttgccccgtccgcagagtttcgcggcggacgtttttccgacactgacaacattatttatcaacggattagcggctggcgcgatctcatctggcacgagaaatcgcacatgtcgccgaataccattatcgcccctatcaccgaaacgctcttttatttcgataaagacaccattcaaattgccgagacagacatttccccgataatcatctttgcccgcgcctgcgacattaacgccatgtcgcggctggattatatgtatttatcaaatgggaataattccgattacagttatcaactgctacgggagcatattcgtttcgtccttattgagtgtgaagaaagcttcgaaaattgtttctgcgtctcaatgggtaccaataaaactgactgttatagcgccgccatgcgttttagcgatgagggcgcgcttgtcagcatccgcgatccctttatcgaggcggcgatacaagggctggggcaggaggctgactataccccctctttcgtcagcgaaaaccgggaaaccgtcgtcacgccggacagcgtttgccgcgatccgcaaaaaattcgcgacattctcacccgccacccgctatgggacgcctacgacagccgctgcatcagttgtggccgctgcactaccgggtgcccaacctgtacctgctatagcgtctttgacgtcgcctatgatgaaaatccgcagcgcggcgaacgccgtcgccagtgggcaagctgcatggtgccgggctttagcgacatggccggcggtcatggttttcgcgaaaaacccggcgagcgtctgcgctaccgcgccctgcataaggtcaatgactacaaagcgcgcaacggcattgaacatatgtgcgtcggctgcggccgctgcgacgatcgctgcccgcaatacatcaaattttctttgattatcaataaaatgaccgctgccgttcggcaggcgctggcagaggaggcataa

SEQ ID NO: 369959 - DNA, 819 bp, Salmonella enterica
atgtcacattgttcctgtcatgataaaccgcagcacagtttgctgcctgcggcgtaccgcatcctcagtattactcgccacacgccgctggagtggaatttccgcgtggccgtcgattttcccgcgcactgggggcaatttgttgaggtgtcgctgccgcgcgtcggcgaagcgcccatctccgtttccgactacggcgacggctggatagatctgctgattcgtaatgtcggaaaagtgaccagcgccctctttacgctgaaagaaggcgacaacgtgtggctacgcggctgctatggcaatggctatccggtcgatacgctgcgccataagcccttactggttgtcgcaggcggtacgggcgtcgcgccggtgaaaggcttaatgcgctatttcgttgagaatccccaggaaattggtcaactggatatgattctcggctataaaaatcgcgattgcgtgctgtacaaagaagaaatggcgacgtggcgcggcaaacataatctggtactcacgctggatgaaggcgaggctgatgaccgttaccagattggccgggtgaccgatcggcttgccgacatgacgcttagcgatatcgacactatgcaggccatcgtcgttgggccgccaataatgattacctttaccgtaaaaatgctgctgcaaaaagggctcaagccggagcaaatctgggtggactacgaacgccggatggcctgctccgtcgggaagtgcggccactgccgtatgggcgaagtgtatgtctgcaccgacggtccgatatttaactacgccgtcgcgcaacgttttgccgattaa

SEQ ID NO: 369960 - DNA, 1014 bp, Salmonella enterica
atgagcattgatattgatatcattaaagcccgtgcgaaaaacgaatatcgcctgtcaaaagtgcgcggcgaagccatgatcagcgtccgcattcccggcggtattttgcccgcgcatttgctaacggtggcgcgtgacatcgccgaaacctggggcaacggacaaattcacctcactacccgccagaagctggcgatgccgggtatccgttacgaagatatcgacaacgtgaacgctgcgctggagccgtttcttcgcgagattgaaatagaactgtgcgacgtccaggttgaggataccaaagcgggctatctcgctattggcgggcgaaatattgtcgcctgtcaggggaaccgcatttgccagaaagccaacactgacacgaccggtctgtcccgtcgtcttgaaaaactggtctatcccagcccttatcatctcaaaacggtcatcgttggctgcccgaatgattgcgcgaaggcgtcaatggccgatctgggaattattggcgtggcgaaaatgcgcttcactgccgatcgctgtatcggctgcggcgcctgcgtgaaggcctgtagtcaccacgcggtaggctgcctggcgctgaagaacggcaaagcggtcaaagaagagtccgcctgtatcggctgcggcgagtgcgtgctggcctgtccgacgctggcctggcaacgtaagccggatcagctctggcaagtccgtctgggcggacgcaccagtaaaaagacgccgcgcgtcggcaagctcttcctcaactgggtgactgaagatgtgataaagcaggtgatcgttaacctgtatgaatttgaaaaagagatgctcggcggaaaaccgatctatctacatatgggccatctgatcgacaaaggcggctatctgcgttttaaagaacgggtactgcgcggcgttcagctcaatccggaagcgatggtcgccgaacgcatttactgggccgaagacgaatccgtcgcgcggatgcatctcaaacccgccggacactaa

SEQ ID NO: 369961 - DNA, 987 bp, Salmonella enterica
atgtcagtaattttttctcaacgcactccggggcgacgctggctctcgctgtggccattggcgttattcctgctgctgatgctggttggcggtctgtggatatggcaggcctggccgcaggtgatgttgaaaagcgctctttggcagcgggacgtaaatcagcagttgagcgcgctgcttaatgcggtggcgacgcatcctgagcgggcgggcggatcgttgcttctgctgagttttatgtatggcgtgcttcatgcgctggggccgggacacggcaaagtggtgatcgcgacatggctggcgacgcatccttcgaagttgaaatcgagtatcgtgttaaccctcgccgccgcgttattacaggggctcgtggctatcgggttggtggtgggcgtgctgaccgtattgcaacttccggccaggcagctccatctgagcggcttctggctggaaaaggggagctatgcgttagttggcgggctgggcattttgctgtgctggcgggccataaaaaggttacgcgcgctgctacgtaaacctgtctttatcgcttttacgccgcgccatgttcaccatgaaaaatgcggctgcggacatcagcatttaccgacgcaggaacaattgcatagcggcgatgactggcgcgcgcgactcatgatcgtactgtctatggggatgcggccctgttccggcgcgataatggtgctgttattcagtaaagtgattggcgtttttagctggggaatggcgtcggtactggcgatggcggcgggaacctcgctaacgattacctcgctggcgctgctggtacacacttttcgtgatctggcggtgaaactcagtggaaacaaagcgccggcgttatggcggcaggtaggctggtcaacgctggcgctggccggagggggcatactgcttgttgcggcgctggtcatgtggtttagcgtgccgcagcctgtgggcgggctgcggccatggcgtggttga

SEQ ID NO: 369962 - DNA, 639 bp, Salmonella enterica
atgaagccagtgaaacgcagcgccttaacactatttcttgccgttttatctttcgtggcggcggcgcatccgcacagcttcatccgtctgcaaacgcaggtggtcagtgaaaatgagcaatttgtggcgttaaaaatgcgctggacaatggacgcgctgacgtccgcagatctgctgtatgacgccggaaacgcggcaccggggtcagaaatatggaaaaagttggcggcggaagtgatggctaacgtacttgggcagcactactttacagaagtgtggcgcaatggcgcgaaagtgaagtttaaaaacaggccgacagaatacggtatgacgcgtgacgcgcatcaggcggtattgacctttacgctaccgctggctgaaccgcagccgttaagcggacagacttataccttttcaacgtttgatccctcttattatgtcgatatgcattatgaccaggacagcgatatcacgatgccggaaccgctgcgcgaaaagtgtcggattcaggtttatactcctgcgcccggcgaagagacgctacgtttcgcccagtcgctggataaagaggacgcgccgccggaggatatggatttaggtaaacagtttgcccaaacggtgaccttgcaatgtcagtaa

SEQ ID NO: 369963 - DNA, 1278 bp, Salmonella enterica
atgatgccgacaattgccccaccatctgtactttccgctccccagcgccgctgtcaggtattgctgacgcttttccagccggagccaattgccacggtggaaatcttcagcgcgcttaatggcgttgatgatgatactgcccgtgaggatatcactgagacaagcctggagatccagcgctatcatcgccttgccatcacaacatgccagaacggttgctatcggatcgaaggtacagcactcgatcagcgcctttgccttttacactggctcaggcgcggcctgcgtttatgcccgaccttcgtcacgcaacagtttaccccggccttaaaaaacgcgctaaagcagcgcggtatcgcgcgtccgctgtatgacgatattaatctgcacgcgctcatcaatctgtgcgcccgccggttgcaaaaaccatttgaacatcgcgacgtgcagttcctgcgtctctttttacagtattgtctgctacaacaccatgccggcatcaccccggaattcaaccctgtgcagcagatttgggcgcagtcgtgcgcggaatatccactcgcccaggaaattggtcgtcactggcagcgccacgtgatgcaggccgcaccgctcaatgaagcgctgtttatggcgttactgttttcaatgattcgcctccccgacccgattcgcgacacgcatcaacgggcgcagcaactgcgactggaggtggcgcggctggtgctgcgctttcgagaaaaagggaacgtacgcttcagcgacgaacaagggcttaacgatcagctgtatgtccatctcgcccaggcgctgaaccgaagtttattcacgattggcatcgataatacgcttccggaagagttcaaccgtctttatccgcgtctggttcgcaccacacgtgaggcgctcgccgggtttgaagccgaatatggtatccacttttccgaggaagagacggggctggtggcagtgattttcggcgcctggctaatgcaggataacgatttgcatgagagacagatcgtattgttagcggataaaaatgatgcgctggagacgcatattgagcagcaactgcgtgaactgaccctgttgccgctgaatatcagacggctatcgctccaggcatttcaaaaagagggatgcccgcgcggcgtagcgctgattgttaccccttacgccacgccgctaccgctcttctcaccgccattaattcatgcggatcgcaccctcacagagcaccaacagcagcagatccgcaagatcctggaatcatga

SEQ ID NO: 369964 - DNA, 1140 bp, Salmonella enterica
atggcattgcattccacgcgctggctggcgctcagttatttcacctacttctttagttacggtatttttctgcccttctggagcgtctggctcaaaggtcttgggctaacgccggaaaccatcggtcttctgctgggcgtgggtctggtcgcgcgttttctcggtagtctgctcattgcgcctcgcgtaagcgatccttcgcggttgatctccgcgctgcgcgtactggcattgctgacgctggtatttgcgctggcattttgggcaggaacgcatgtcgcgtggctaatggtggtgatggttgggtttaacctcttcttttcaccactggtgccgctgaccgatgcgctggccaatacctggcaaaagcaaattaccctggactatggtcgggtgcggctgtgggggtccatcgccttcgtgatagggtcggcgctgaccggtaagctggtgagtttatacgattaccaggcgattctggcgctactgacgctcggcgtcgcctcgatgttgctgggtatgttgttacgtcccagcgtgccgccgcaaggggaaagccgtcagcaggagagcgcaggctggcccgcctggcgtacgctggtggcacaaagttggcgttttctcgcctgcgtctgtttgctgcaaggggcgcacgccgcctactacggttttagcgccatctactggcagggggctggctattcagcatcggcggtcggctatttatggtcgttgggcgtggtggcggaagtgatcattttcgccctgagtaaaaagctatttcgccggtttagcgcccgcgacttgctgttgctttccgctgtgtgcggcgtggtacgctggggactgatgggctggagtacggcgttgccgtggctgattgtgatacaaatcctgcactgtggcacgtttaccgtttgccatctggccgccatgcgctatatcgctgcgcgtcagggaagcgaggtgattcgtttgcaggccgtctattccgctgtggcgatgggcggcagcatcgcgattatgacggtatttgccggttttctgtatcaacatctgggcggcggcgtgttctggattatggcgctggtggcattgcccgctatcttccttcggcccaaagtggttgccgcgtcatga

SEQ ID NO: 369965 - DNA, 1254 bp, Salmonella enterica
atgttaaagcgtgaaatgaacattgccgattatgatgccgaattgtggcaggctatggagcaggaaaaagtacgtcaggaagagcacatcgaactgatcgcctccgaaaactacaccagcccgcgcgtgatgcaggcgcaggggtctcagctgaccaacaaatacgctgaaggatatccgggcaagcgctactacggcggttgcgaatacgttgatgtcgtagagcagctggctatcgaccgcgcgaaagaactgttcggcgccgactacgctaacgtgcagccgcactccggttctcaggctaacttcgctgtttacaccgcgctgctgcagccgggcgataccgttctgggtatgaacctggcgcagggcggccacctgactcacggctccccggttaacttctccggtaaactgtacaacatcgtaccttacggtatcgatgagtccggtaaaattgactatgacgagatggcgaagctggccaaagagcacaagccgaagatgattatcggtggcttctctgcctactccggcgtggttgactgggcaaaaatgcgtgaaatcgctgacagcatcggcgcatacctgtttgtcgacatggcgcacgtggcgggcctgattgccgcaggcgtttacccgaacccggttccgcacgctcacgttgtcaccaccaccacccacaaaaccctggcgggtccgcgcggcggcctgatcctggcgaaaggcggcgatgaagagctgtacaaaaaactgaactccgccgtcttcccaagcgcgcagggcggcccgctgatgcacgtgatcgcgggtaaagcggtggcactgaaagaagcgatggagccggagttcaaagtttaccagcagcaggtggcgaaaaacgccaaagcgatggtggaagtgttcctgaaccgcggctacaaagtggtgtctggcggcactgagaaccacctgttcctgctggacctggtggataaaaacctgaccggtaaagaagctgacgccgcgctgggccgcgctaacatcaccgtgaacaaaaacagcgtgccgaacgatcctaagagcccgttcgtgacttccggtatccgtatcggttctccggcggtcactcgtcgcggcttcaaagaagcggaagtgaaagagctggctggctggatgtgtgacgtgctggacaacatcaatgatgaagccaccattgaacgcgtgaaagcgaaagtgctggatatctgcgcccgcttcccggtttacgcgtaa

SEQ ID NO: 369966 - DNA, 1191 bp, Salmonella enterica
atgcttgacgcacaaaccatcgctacagtaaaggccaccattcccctgctggttgaaacaggaccgaaactgaccgcccacttctacgaccgtatgtttacgcataacccggagctcaaagaaatcttcaatatgagcaaccagcgtaacggcgatcagcgtgaagccctgtttaatgctatcgcggcctacgccagcaatatcgaaaatttaccggcgttgctgccggcggtagaaaaaatcgcgcagaagcacaccagcttccagattaagccggagcagtacaacatcgtcgggacgcatctgctggcgacgctggacgaaatgttcaacccgggccaggaagtgctggacgcgtggggcaaagcctatggcgtactggctaacgtctttattcatcgggaagccgagatttatcacgagaacgccagcaaagacggcggctgggaaggcacgcgccccttccgcatcgttgcgaaaaccccgcgtagcgcactgatcaccagctttgagtttgaaccggtcgacggcggtacggtggcggaataccgtcccgggcagtatctgggggtctggctgaagccggaaggttttgcgcatcaggagatccgccaatattcactgacccgtaaacccgatggcaaagggtaccgtattgccgtgaagcgtgaagacggcggccaggtatcaaactggttacaccatcacgccagcgtgggcgatgtggtgcatctggctgcgccggcaggtgacttctttatgaatgtcgccgctgatacccccgtttcgctgatttccgctggcgtcggccagacgccgatgttagcgatgctcgatacgctggcgaaagaacagcataccgcgcaggtgaactggttccacgcggcggagaacggcgacgtccatgcgtttgccgacgaagtgagcgagctgggccgtacactgccgcgtttcactgcccatacctggtaccgcgagccgactgaggccgatcgcgcccaacgcctcttcgacagcgaagggctgatggatttaagcaaactggaagctgcgatcagcgatccggcaatgcagttctatctttgcggcccggtaggttttatgcagtttgccgcaaaacaactggtttcacttggcgtgaatcacgaaaacattcattacgaatgcttcggcccgcataaagtgctgtaa

SEQ ID NO: 369967 - DNA, 1545 bp, Salmonella enterica
atgcagcaacctgttgtacgcattggagagtggctggttacaccttctgttaatcagatcagtcgtcagggacgccagattactcttgaaccacggctgatcgatcttctgatgtattttgcgcatcacccggatgaagtgttaagccgggataacattattgatcatgtctggatgcgcaccatcgtgaccaaccatgttgtcacccaaagcatttctgaactacgcaaatcattaagagatggcggagacagcaatgctgaatacatcgttaccgtacctaaacgcggctataagctgacggcgccggttatctggtgcgaagaaaatagcgatgagatcgataattcatcaacgtcgccgccgccgccgatcgcagcgacgaatgcagaaccgacagagggggttactgccgctacgcctgtgccgcccgcctctttgcaaacgccgactaaaaaggcgaaaaagccgcgtatcgccgctttctggacgtgggtgatgttcctgctctcgctggcgacgctggtggtgtttatcgtgatgtcggtggtagatcataatgccgcggtaacaaaaacgcggttattacttaacccacgagatatagatgttcgttttgaaggcggcaattcctgtaataactgggtctcgcaggagtcctacgctatcggtctgggcggcttaatcaccgacttgctgaacacctactcgacctttatggtacatgataaaaccaattaccgggtcaatgagccaagcagctccggtaagacgttaaccattcagtttgtcaatcagcgccactatcgggcgcagcagtgctttatgtctgtggtgctcattgataacgccgatggttcaaccatgctggataagcgttatttcgtcaccaatactaaccagttgtccatccaggatgatctgtttaatagcctgtctttcgttttaacacagccctggcctaatcgtatgcgagaacaactggccctgttcagaacgccgcaaaataccgcgctgatgcgtttttatgaggcgcgccagcttattctgagcggcgatgcgcaggcgctaggtaaagccagcgatattctgaatggcattattaaggaaacgcctgatttcaactatgcctatgaatataaagtgctggtagatgtattacggcaatcacaacagccgtttgataaagaacaagtggctgcgctgaacgaagagtttaaaaaaatagatcaaattccgggcgttgagaaaacgtctgtttattataaaatcaagaccgttgatcttttgggcaaaggtgatatcgatgcagcgtatgaggaaatcaataaaagcatcgagcttgaaatgtcgtggtttaactatgtcctgttggggaaagtttacgaaatgaaaggtgagaatcgtctggccgctgatgcctatctgaccgcctttaatttacgtccaggtgaaaacacgctgtactggatcgagaacggcgtatttcagacatccgttcagaaaattgtcccttatctgaatagttttctggcagaagattaa

SEQ ID NO: 369968 - DNA, 1332 bp, Salmonella enterica
atgagttctgtcaaaaagatcgggctatttgcctgtactggcgtcgttgccggtaatatgatggggagcgggattgcattattacccgccaaccttgccagtattggtggcattgccatctggggctgggtaatttctattattggggcaatgtcgctggcttatgtttatgcgaggctggcaaccaaaaaccctcaacagggtggccctatcgcttatgctggggaaatatctccggcgtttggtttccagaccggcgttctttattatcacgcaaactggattggtaacttagccatcggcattaccgctgtttcttatctttctacgttcttcccggcattaaataatccaataccggcaggtattgcctgtattgctatcgtctggctgttcacctttattaatatgctgggtggggcctgggtcagccgcttgacaacgattggcctattcctggtgctgatcccggtagtcttgaccgcagtcgccggctggcattggttcgatatcgcgacctatcacgcgaactggaacacgtccacgacgaccgactctcacgccattgttaaaagtattctgctctgcctgtgggcgttcgttggcgttgagtctgccgccgtcagcaccggcatggtgaaaaacccgaaacgcaccgtaccgctggcaaccatgctgggtaccgcgctggcaggcatcatctatatcgccgcgactcaggttatcgccgggatgttcccagcttccgttatggcctcttccggcgcgccgttcgctatcagtacctccacgattctgggtggctgggctgcgccgctggtttccgcctttaccgctttcgcctgcctgacgtctctgggctcctggatgatgctggtcggccaggctggggttcgcgccgccaacgacggcaacttcccgaaaatttacggtgaaatggataaaaacggtattccgaaaaaaggtctgctgttggctgcggtgaaaatgacggcgctgatgattctgatcaccatcatgaactccagcggcggtaaagcgtccgacctgttcggcgaactgaccgggattgccgtactgcttaccatgctgccgtacttctactcctgtgttgacctgattcgcttcgaagggttcaacatccgtaactcggtaagcctgatttgttctgtactgggctgcgcattttgcttcatcgcactgatgggcgccagctccttcgaactctccggcacctttatcgtcagtctgatcatcctgatgttctacggtcgcaaaatgcaccagcgccagaacaacgacagcgacaacaatacggctgaagcgctttaa

SEQ ID NO: 369969 - DNA, 2145 bp, Salmonella enterica
atgaacgttattgctatcatgaaccacatgggcgtctactttaaagaagagcctattcgtgaactgcatcgtgcactggaaggtttaaatttccgtatcgtctatccaaacgaccgagaagacctgctgaagctgattgaaaataactcccgcctttgcggcgtcattttcgactgggataaatataaccttgagctttgcgaagagattagcaagctgaacgagtatatgccgctgtacgccttcgccaacagctactctacgctggacgtcagcctcaacgatctgagaatgcaggttcgcttctttgaatatgctttaggcgccgcagccgatatcgcggcgaaaattcgccagaataccgatgaatacatcgacaatattctaccgccgctgacaaaagcgctgttcaaatatgtgcgcgaagggaaatatactttctgtacgcctggccacatgggcgggaccgctttccagaaaagccccgtcggcagcatcttttatgatttcttcggcccgaacacgatgaaatccgatatttcgatttccgtttctgaactgggttcgctgctggaccactccggcccgcataaagaagcggaagagtatatcgcccgcgtctttaacgccgaacgtagctacatggtgacgaacggcacctctacggcgaacaaaatcgtcggtatgtactccgcgccggcaggcagcacggtactgattgaccgtaactgccataaatcgctgacccatctgatgatgatgagcgacattacgccgatttatttccgcccaacccgtaacgcctacggtattcttggcggtattccgcaaagcgagttccagcacgccactatcgctaaacgggtaaaagagacgcctaacgcgacctggccggtccatgctgttattactaactcaacctatgacggtctgttgtataacactgactacatcaagaaaactctggatgtgaagtccattcattttgactccgcctgggtgccttataccaatttctcccctatttatcagggtaaatgcggtatgagcggcgaccgtgtagaaggcaaaatcatttatgaaacccagtccacgcataaactgctggcggcgttttcacaggcatccatgattcatgttaaaggcgacattaacgaagaaacctttaacgaagcctacatgatgcataccaccacttctccgcactacggtatcgtagcgtctactgaaaccgcagcggcgatgatgaaaggtaatgcgggtaaacgcctgattaacggctctattgaacgtgcgattaaattccgtaaagaaattaaacgcctgaaaagcgaatccgacggctggttctttgacgtatggcagccggaacatatcgatggagctgagtgctggccgctgcgttcagatagcgcatggcatggcttcaaaaatatcgataacgaacacatgtacctcgacccgatcaaagtcactatcctgacgccggggatgaagaaagacggtacgatggatgaattcggtattccggcaagtctggtcgccaaatatctcgatgaacgcggcatcatcgtagaaaaaaccggtccatacaacctgctgttcctgttcagcattggtatcgacaaaaccaaagctctgagcctgctgcgcgcgctcactgaatttaaacgcgcctttgacctgaacctgcgcgtcaaaaacattctgccggcactgtaccgcgaagcgcctgagttttatgaaaatatgcgcatccaggaactggcgcagaatattcataaactggtcgaacatcataatctgccggacttaatgtaccgtgcgtttgaagtgctgccgaaaatggtgatgacgccgtatactgcgttccagaaagagctgcatggcgaaacggaagaggtgtatcttgaagagatggttggacgcgtcaacgccaacatgatccttccttaccctccgggagtgccgctggtgatgcctggtgaaatgatcaccgaggaaagccgtccggtactggaattcctgcaaatgctgtgcgaaatcggcgcccactatccgggcttcgaaaccgatatccacggcgcctatcgtcaggcagacggacgttacaccgttaaagtgctgaaagaaaatacgaaataa

SEQ ID NO: 369970 - DNA, 1461 bp, Salmonella enterica
atgaaaacaccctcacaaccgcgcgcgattttttacatcgtggcgattcaaatttgggaatacttcagcttttacggcatgcgtgccttactcatcctttatcttacccaccagcttggttttaatgacagccacgcgatcaacctcttcagcgcctacgcctctttagtttacgttacccctattcttggcggctggcttgccgaccgcctgcttggcaaccgcgtggcggttatcaccggcgccttattgatgacgctgggtcatgtggtattgggcttagaatctgattcaacgctgagtttatatgcggcgctggccattattatctgcggctacggcttgtttaaatccaatattagctgtctgctgggcgaactttacgcccctgatgacaaccgccgcgacgggggattctcgctgctctacgccgccgggaatattggatcgatagccgcgccgatcgcctgtggtctggcggcgcagtggtatggctggcatgtcggctttgcgctggcgggcgtgggaatgttcatcggcctgctcatctttttaagcggtcatcgccactttcagcagacgcgtggggttaatcgccccgcgctgcgggcggttaaattcgcccttccaacctggggttggctggtattaatgctgtgtatcgcgccggtattcttcaccctcctgctggaaaataactggtctggctatgtgctggccattgtctgcgtcttcgcggcgcaacttatcgcccgtattatggttaaatttcccgagcaccgtcgcgccttgtggcaaatcgttctgttaatgatcaccggcactctcttttgggttctggcgcagcagggcggaagttcgatcagtttattcatcgaccgttttgtcaaccgccactggctgaatatgaccgtccccaccgcattgttccagtcggtcaatgcgattgcggtgatggcggcgggcgtggtgctggcgtggctgagcagcccgaaagagagcgcccgctcggtgctgcgcgtctggcttaaatttgccgtggggctggtattaatgggcggcggttttatgctgctggcgctaaacgcgcatcaggcccggttagacgggcaggcatcaatgggaatgatgatcgcagggctggcactgatgggctttgcagagctgtttattgatccggtcgcgatggcgcaaattacccgcctcaacctgcctggcgtcacgggcgtgctgaccggtatttatatgctggcgaccggcgcggtcgctaactggctggctggcgtcgtcgcgcaacaaaccacggaatcgcaaattagtgatacggcggtagccgcctacggacactttttctcgcaaatgggcgagtggacgctaagttgcgtggcgctgatcgtcgccattgtcggcctgagatgggtttgcacccggactacatcggcgctaccgcagggcgattaa

SEQ ID NO: 369971 - DNA, 339 bp, Salmonella enterica
atgaaaaagattgatgcgattattaaacccttcaagctggacgatgtccgtgaagcgctggccgaggtaggtattaccgggatgacggtcactgaagtcaaaggctttggccgtcaaaaaggccacaccgagctgtatcgcggcgcggaatatatggtggattttctgccgaaggtaaaaattgagatcgttgtgcctgacgacatcgtggatacctgtgttgacaccatcattcgtaccgcgcagacggggaaaatcggcgacggtaagatctttgtctttgatgtcgcccgcgttattcgtatccgtactggcgaagaagacgacgcggctatctga

SEQ ID NO: 369972 - DNA, 1338 bp, Salmonella enterica
atgataagccgtaaaccggcgcacctgctgctggtcgatgacgatcccggattactgaaattgctcggtatgcgcctgaccagtgaaggatacagtgtagtgaccgcagagagcggccaggaaggactgcgggtactgcatcgggaaaaagtggatctggtaataagcgacctgcgcatggatgaaatggatggtatgcaactgttcacagaaattcagaaagtacagccgggaatgccggttatcattctgacggcgcatggttctattccggatgcggtggccgctacccagaaaggcgtattcagctttttgacgaagccgatcgacagagacgcgttatataaagcgatagatgaagcgctggagcagtccgctcccgcgacggacgatagctggcgcaacgctatcgttacccgtagcccgctgatgctgcgactgcttgaacaggcgcgcatggtcgcgcagtcggatgtcagcgtattgattaacggacaaagcggcaccgggaaagagattttcgcacaggcgattcataatgccagcccgcgcagtaacaagccgtttgtcgccatcaactgcggcgcgttgccggaacagttgctggagtccgaattattcggccatgcgcgcggcgcctttaccggcgcagtgagcaatcgtgaagggttgttccaggcggcggaaggcggcacgctgtttctggatgaaattggcgatatgcccgcgccgttacaggtgaagctgctgcgggtgttacaggagcgtaaagtcaggccgctgggcagcaatcgcgatattgatatcgacgtgcgaattatttccgcgacgcaccgcgatctgccgaaggcgatggcgcggggcgaatttcgtgaagatttgtactaccggctgaatgtcgtgagcctgaaaattccggcgctggcggagcgtaccgaggatattccgctgctggctaatcatctgctcagacagtcggcacagcggcataaaccgtttgttcgcgccttttctactgatgcaatgaaacggctgatgacggcaagttggccgggcaacgtgcgccaactggtcaacgtcattgaacaatgcgtggcgttaacctcttcgccggtgatcagcgatgcgttggtcgagcaggcgctggaaggcgaaaacaccgcgttgccaacttttgccgaagcgcgaaaccaatttgaactgaactatctgcgcaagttactgcaaattaccaaaggtaacgtgacgcacgcggcaaggatggcggggcgcaaccgcacggaattctataagctactctcccgccacgaactggatgcgaatgatttcaaagagtag

SEQ ID NO: 369973 - DNA, 687 bp, Salmonella enterica
gtgggcatatcgtgtctggcgctgaccgcatgtgttccccatgcttcacagcaactgcccggtagcgcagcgcaggacacgctcccccattatcaactggcggattatctcccgacggcgtgcgcggatatctggtcgctacgcgggcaggcggtggagacgaatccgctgtactggctacgcacgattgactgcgccgatcgtctgatgccggttcagtcgcgcgcagaggcgcgcgcgttgacggatgataactggcaaaatgccttcaggcgcgggattttactggcggatgcaaaaattacgccgccggagcggcgcgccatagtgacccgtctggaggcgttaagcgcgcaaataccggctcaggtacggcccgtctaccaaatctggcatgacggtcaggcgctgcaattagcactttctgccgaacgtcagcgttatagcaagctccagcaaacgtcagatagtgagcttgatgcgctgcgccagcagcaacaggccttgcaaacgcagctcgatcttaccacccgtaagctggagagtttaaccgatattgagcgccagctttcgacacgaaaaccggcagggaattacaacgccgatacgccgcatacgaatgacaaacccgcgacgtctgaagatggcgcggcgccgtcgccgtcacaagatgaggtaacgccatga

SEQ ID NO: 369974 - DNA, 1386 bp, Salmonella enterica
atgctggcctttttgctgatcctgctgccgttgctggttctggcctggcaggcgtggcaaagccttaacgcgttaagcgatcaggctgcggtgactaaccgcagcacgcttattgacgcccggcgcagcgaggcgatgaccaacgtcgcgctggagatggagcgaagctaccgacagtattgtgtgcttgacgatccgacgctggcaaaagtgtatcaaagccagcgtaagcgctatagcgatatgctggacgcccatgccggcgtcttgccggatgataagttgtatcaggcgttacgccaggatttaaacgcgctggcgcaattgcagtgtaaagatagcggcccggaagcggcagcggccgcgcgtctggaggcctttgccaacgcgaatacggaaatggtgcaggcgacgcgtactgtggtttattcgcgtgggcaacagttacaacaagaaatcgccgagcgcggacaatttttcggctggcaggcgctggtgctatttctggtgagcctggcgatggtgctactttttacccgcatgattatcgggccggtgaaaggaattgaacggatgattaatcgcctgggcgaaggccgttctttagggaataccgtcacctttaccggtccgcgtgaattacgatcggtggggcagcgcattatctggctgagtgagcgtctggcgtggctggaatcccagcgccatcagtttctacgtcacttgtcccatgagctgaaaaccccgctggccagtatgcgcgaggggacagagctgctggccgatcaggtggttgggccgctgacgccggagcaaaaagaggtggtcgatattctggatgacagcagtcgtaatttacaaaaattgattgagcaattgcttgattacaaccggaaactggtagacagtgccacagagctggaagcggtcgatatcgcgccgcttgtggatatggtggtttccgcccacagtttgcctgcccgcgctaaaatgatgcataccgatgtcgacctggaggccgaacgctgcatagcagagcccatgttgctgatgagcgtgctggataatctctattccaacgcggtgcactatggcgctgaatccggtaacatttgtatccgtagtcgctctcagggctccacggtttatatcgatgtggttaatagcggcgagccgattccgcaaaccgaaagagaaatgatttttgagccttttttccagggaagccaccagcgaaaaggggcggtaaaaggcagtgggctagggctgagtatcgccagagattgtattcgtcgaatgcagggagagatccaactggtggatgacaaagcgcaggaagtctgttttcgcatctcgctgccgctgcctgcatctgacaaacactaa

SEQ ID NO: 369975 - DNA, 3888 bp, Salmonella enterica
atgatggaaattctgcgtggttcgcctgcactgtctgcattccgtatcaataaactgctggcgcgctttcaggctgccaacctccaggtccacaatatatacgctgagtatgtccattttgctgacctgaacgccccgttaaatgatagcgagcaggcgcagcttacccgtctgttgcaatacggcccggcgcttaacagccatacgccggcgggtaaactcctgttggtcacaccgcgtcctggtaccatctccccctggtcttcaaaagcaacggatatcgcccacaactgcggcctgcaacaggttgatcggctggagcgcggcgtagcgtactatatcgaggcttcgacgttgacggcggaacagtggcgacaagtggccgcagagctgcacgaccgtatgatggagacggtgttctcttctttaaccgatgcggaaaaactgtttatccaccatcagcctgcgccggtttccagtgtcgatctgctgggagaaggccgtcaggcgttaattgacgccaacctgcgtcttggtctggcgctggcggaagatgaaatcgactatttgcaggaggcgtttaccaaactggggcgcaacccgaacgatatcgaattgtacatgttcgcccaggcgaactccgagcactgccgccacaagatttttaacgccgactggattatcgacggtaaaccgcagccgaagtcgctgtttaaaatgattaaaaacaccttcgaaaccacgccggactatgtgctctctgcctataaagacaatgccgcggtgatggaaggatctgcggtggggcgctacttcgccgaccacaatactggccgttacgattttcatcaggagcccgcgcacattctgatgaaggtcgaaacgcataaccacccaaccgccatctctccgtggccgggggcggcgaccggttccggcggcgaaattcgtgatgaaggcgccaccgggcgtggcgcgaaaccaaaagccgggctggtaggcttctccgtttccaacctgcgtattccgggctttgaacagccgtgggaagaggattttggcaagccggaacgtattgtcaccgcgctggatatcatgaccgaaggtccgctgggcggcgcggcgtttaacaacgaatttggtcgcccggcgctgaccggttacttccgtacttatgaagagaaagtgaacagccacaacggcgaagagctgcgcggctaccataagccgatcatgctggcgggcgggatcggtaatattcgcgccgatcacgtgcagaaaggcgagatcgtcgtgggcgcgaagctgatcgtccttggcggcccggcgatgaatatcggcctcggcggcggcgcggcatcgtcaatggcttccggccagtctgatgcggatctcgattttgcctctgttcagcgcgacaacccggaaatggaacgccgctgccaggaagtgatcgaccgctgctggcagttgggcgacgctaacccaatcttgtttatccatgatgtgggcgcgggcggtctctccaatgcgatgccggagctggtgagcgacggcgggcgcggcgggaaattcgaactgcgcgacattcttagcgacgagccgggcatgagcccgctggaaatctggtgtaacgaatcccaggagcgctacgtactggcggtcgcggctgaccagttgccgctgttcgacgaactgtgtaagcgcgaacgcgcgccgtatgcggtcattggcgatgctaccgaagaacagcatctctcgttgcatgataaccatttcgacaatcagccgatcgacctgccgctggatgtcctgctgggcaaaacgccgaaaatgacccgcgatgtgcaaacattgaaggcgaaaggcgatgcgctgaaccgcgcggatatcacgattgccgacgcggtaaatcgtgttctgcatctgccgaccgtggcggaaaaaaccttccttgtcactattggcgaccgtaccgtcaccggtatggtggcgcgtgaccagatggttggcccgtggcaggtcccggtggctgactgcgcggtcactaccgccagcctcgacagctactacggcgaagcgatgtcgattggcgagcgcgcgccggtggcgctgctggactttgccgcctccgcccgtctggccgtcggtgaagcgttgactaacattgccgcgacgcagattggcgatatcaagcgcattaagctttccgctaactggatggcggcagccggtcatcctggcgaagatgccggtttatatgacgcggttaaagcggtgggagaggaactctgtccgcagcttggcctgacgattccggtgggcaaagattcgatgtcgatgaaaacccgctggcaggaaggcaacgaacagcgcgaaatgacctcgccgctgtcgctggtgatttccgcgtttgcccgcgtggaagacgtgcgtcacacccttacgccgcagctgtcaacggaagataacgccttgttgctgatcgatcttggcaagggccacaacgcgctgggcgcaacggcgctggcgcaggtctatcgtcagcttggcgacaaacccgcggacgtgcgtgacgtcgcgcaactgaaaggcttctatgacgccatgcaggcgctggtcgctgcgcgtaaattactggcctggcacgaccgttccgacggcggtctgctggtgacgctggccgagatggcctttgccggccactgcggcgtgcaggtcgatatcgccgcgctgggcgatgaccatctggccgcactgttcaacgaggagctgggcggcgtgattcaggtacgcgctgaagacagagacgcggtcgaagcgctgttggcgcagtacggtcttgctgactgcgtccactaccttggtcaggccctggctggcgatcgctttgtgattaccgctaatgaccagacggtattcagcgaaagccgcactacgctgcgtgtctggtgggcggaaaccacctggcagatgcagcgtctgcgcgacaatccgcaatgtgctgatcaggaacatgaggcgaaagcgaatgatgccgatccgggcctcaacgtgaagctgtcgtttgatattaatgaagatatcgccgcgccgtacattgcgacaggcgcacgaccgaaagtcgctgtactgcgcgagcagggggtgaactctcacgtggagatggcggcggcgttccatcgtgcgggctttgacgcgattgacgtccatatgagcgacctgctgggcggtcgtatcggtctgggcaacttccatgcgctggtggcttgcggcggcttttcctacggcgacgtgctgggggcgggcgaaggctgggcgaaatccattctgtttaaccatcgggtgcgcgacgaattcgaaaccttcttccatcgtccgcagacactggcgctgggcgtgtgcaacggttgccagatgatgtcgaatctgcgcgagctgatcccgggcagcgaactgtggccgcggtttgtacgtaaccattctgaccgcttcgaagcccgcttcagcctggtggaagtgacgcaaagcccatcgctgctgctgcaaggaatggtaggctcacagatgccgattgcggtttcccatggggaagggcgcgttgaggtacgtgacgatgcgcatcttgccgcgcttgagagcaaaggcctggtcgctctgcgctacgttgataactttggtaaggtgactgaaacctatccggctaacccgaacggttcgccgaacggcatcacggcggtgacgaccgaaaacggtcgggtgacgattatgatgccgcatccggaacgcgtattccgcaccgtcgccaactcctggcacccggaaaactggggcgaggatagcccgtggatgcgtatcttccgtaatgcgcgtaagcagcttggttaa

SEQ ID NO: 369976 - DNA, 1545 bp, Salmonella enterica
ttgaaaaaattaaagattaattatctgttcatcggcatattgacgctgctgctggcagcagccctttggccctcaatcccctggttcggtaaaaccgaaaaccatatcgccgcgattcaagcccgggggatactgcgcgtcagtacgatcgactcgccattaacctattccgttatcaacggtaaaaaatatggtctggactatgaactggcgcagcagttcgccaactatctcggcgtgaagctgaaagtgacggtgcgccagaatatcagccagttgtttgacgatctggataacggcaatgccgacctgctcgcggcagggctggtctacgacagcgcacgcgttaaaaactatcagcccggtcccatgtattactcggtttcgcaacagctcgtctaccgggtcggacaatatcgcccacgttcgctggcgaccgttaacgagaatcagcttaccattgcgccagggcacgtcgtggtcaatgacttacagcgtttaaaagagacaaagtttcccgacctgagctggaaagtggatgataaaaaaggctcgacgacgctgctggaagaggtcatcagcggcaaactggattacaccattgccgattcagtggcgatcagtctgtttcagcgcgttcatcccgagctggccgtggcgctggatgtcacggatgaacagcccgtgacctggtttagccgactggacgacgataatacgctctccgccgcgctgctcgattttttcaattcgatcaatgaagacgggtcgttggcgcggatcgaagagaaatatctgggacatggcgatgatttcgactacgttgatacccgctctttcctgcgagcggtagataacgtcctgccggagctggaaccgttatttaaaaaatatgccaaagagatagactggcgcctgctggcggcgatttcttatcaggaatcacactgggacccgctggcgacctcgccaaccggcgtgcgcggcctgatgatgctgactaaaaataccgcccaaagtctggggctgaccgaccgtaccgatgcggagcaaagcatcagcggcggcgctcgctatcttgaagatatgatggctaaagttcccgaaaccgttccggaagacgagcgtatctggtttgccttagccgcctacaatatgggttatgcgcacatgctcgatgccagatcgctgacggtaaaaaccaaaggcaatccggatagctggaccgatgtgaagcagcgtttgccgctattaagccaaaaaccgtattacagtaagttaacctacggttacgcgcgtggacatgaggcttatgcttatgtggaaaatatccgtaaataccagataagtttggtggggtatttgcaggaaaaagaaaagcaggaagcggaagctatgaaactggcgcaggattacccggcggtgtcgccggaggagctgaataaagcacccttccccttcctgtcgtttttatcgcagtcatcaggctacctgacgcattcgccgtctttactgtttacgccgcagaagaaagaagaaaaatag

SEQ ID NO: 369977 - DNA, 519 bp, Salmonella enterica
ttgtctgatgtcgaattagatcacgaatactggatgcgccacgcgctgacgctggcgaaacgcgcctgggacgaacgcgaggttccggttggcgcggtattggtgcataaccatcgcgtcattggcgaaggctggaaccgacccattggccgccacgatcctactgcgcacgctgaaataatggcgctgcgtcagggcggtctggtattgcagaattatcggttactggataccacgctgtatgtcacactggaaccctgtgtgatgtgcgcaggcgctatggtgcatagccgcattggacgcgttgtctttggcgcgcgcgatgcaaaaaccggcgcggccggatcgctaattgatgtgctgcaccatccgggaatgaatcaccgggtcgacattattgaaggggtgctgcgcgatgaatgtgcgacgctgctcagtgattttttccgtatgcgtcgtcaggaaattaaagccctgaagaaagccgaccgtgcggaaggcgcggggccggcagtatag

SEQ ID NO: 369978 - DNA, 636 bp, Salmonella enterica
ttggtcagccacgagcgtcgtgtcgtcttttttgatttggatggaacgttacatcaacaggatatgttcggcagttttctgcgttatttgctgcgccgtcagccgctaaatgcgctgctcgtactgccgctgttgcccattatcggtatcggtttactggtaaaagggcgtgcggcccgctggccgatgagtctgttattgtggggctgtacttttggccatagcgaaacgcgtttgcaggcgcatcaggcggattttgtccgttggtttcgcgctaacgtcacggcgtttccggtagtacaggagcgtctgaccacctatctattgagctctgacgcggatatctggcttattaccggttctccgcaatcattggtagagcaagtctattttgatacgccgtggctgccgcgcgttaacctcatcgccagccagatggcgcgacggtatggcggctgggtattaaccgtgcgctgtctgggccatgaaaaagtcgcgcaactggaacgtaaaatcggtacgccgctgcgtctttatagcggctacagcgacagcaaacaggataacccgctgctttatttttgccagcatcgctggcgggtgacgccgcacggcgagttgcagcagctcgaatag

SEQ ID NO: 369979 - DNA, 1362 bp, Salmonella enterica
atggataagacggcagcgctcgccagcgacattttacgtggtatcggcggagagcaaaatattctgcgcctggaaaactgtatgacgcgagtcagggtggaggtacaggacgacagccaactggatattccgcgcttaaaagcgttgcctggcatcagtggatacgtaaagcaaggggagcaacatcagctgatcgttggaccggggaaggctgcacaggtggttgatgcgatgcgcgtgcagattgccgtaggtggtgtaaagccggatgacgctatggcgcgtaccaaatccgaggcgaaagcgaagtataaagcgccgatgagcgatgcgttgcgtaagctggcgaatgtttttataccgcttatccccgcctttatcgcatccggcttgattaccggcattatcaacattcttaaacgtccggatatcgtcggcgatgttgccgtccactatcctaacctgctgggcctgatggggatatttggtagcgcggtgttcgctatcatgaacattctggttggcgtcaataccgcgaaagtctttggcggatcgcaggcgttaggcggcgtgatggcggggatcctttccagcccgcaactggcgcagattacgctctttggcgaggcgcttcagccgggacggggcggcgttatcgccgtcctgctggtggtggcgttaatgtgctggattgagcgccagttccgtaagctgctgccggggtcgctggagttaattcttaaccctttattgacgactgttatcaccggcgcggtagcgattgtcgctctgcaaccgcttggcggctggatttcagacgctatcgctcacggcgcgtcctgggctatcgatcgcggcggttttctggtgggcgcggtgctagccggaactttcctgccgttggtactgaccgggctgcatcaggggctggtgcctattcatgtggagctggtgcaagcgcacggctataacgcgctgtttcccatcctggcgatggcgggcgttggtcagataggcgcggccattgccgtactgatgaaaacccgcaatgcgcggctcaaaaaggtgattaaaggcgcgcttccggtcggactgctggggattggcgagccgctgatttttggcgtcacgctgccattgggtaagccatttattggcgcttgcctcggcggcgcggtaggcggggcgttgatcagctactggaaagtggcgacggtaattacctttggtatttccggtttgccgctggcattaacaattgttgccggaaaagtcctgttctatctgttaggctatttaatagcggtaattgccgggtttatttttacctggctgctggggttcaatgatccagaggagtaa

SEQ ID NO: 369980 - DNA, 894 bp, Salmonella enterica
atgaatcttggtaccttagtgtctgaaacccgtaacccgcaaacgatggatctggatgcgttgcctactcctgaattagttaagcgttttaatgaacaggatacgcgggtagcggaagcggtaaaagccactctgcctgacgttgcgcgtgcggtggatgccgctgtggcggcgctgaagtctggcggacgtatcatctatatgggcgcgggcaccagtggtcggcttggcgtactggatgcctcagaatgccccccgacgtttggcgttccgcacggtctggtcgtcgggctgattgccggtgggccgggcgcgttgctgaaggcggtcgaaggcgcggaagacagccaacaggcaggcgaagacgatcttgtcgcgctaaatctgcaagaacaggatctggtcgtggggctcgcggcgtcgggtcgtacaccctatgtgattggcggcctgcgctatgcgcgacagtccggttgtaccactgttgccgtctcctgtaatccagattcgcctattgcgcgggaggctaatatcgccatttcgcccgttgtcgggccggaagcgcttaccggctccacgcggctgaaatccggcaccgcgcagaaaatggtactcaatatgatttctaccggcgcgatggtgaagttcggcaaggtctatcaaaacctgatggtggatatgaaagccaccaacgtcaaactggtcgatcgcgcgtgtcggatggtcgttgaagcgaccgggataggtcgtgaagaggcggaaacgttgctgaaacagaccgattttgaggttaagcccgccattttgatggcgcttacggggctggatgctgcagccgccagggaaaaactcgccgctcatcagggctttttaagggcggcgttagaacactaa

SEQ ID NO: 369981 - DNA, 849 bp, Salmonella enterica
atgaactgtttgattcgtattcgccagcgttatccggatctcgcgcaaagcgacaggaaactggcggattatctgctcgcgcaaccggatacagcgcgacatctgagctcgcagcaactggcggccgaagcgggcgtcagccaatccagcgtagtcaaattcgcgcaaaaactggggtttaaagggtttcctgcattgaaactggctatcagcgaagcgttggccagcaatcctaatccgcattccgttcccgttcataaccagattcgcggcgacgatccgatgcgcctggtcggggaaaaattaattaaagagaatgtggcggcgatgcacgccacgctggacgttaacagtgaagaaaagctgttagaaagcgtcacgatgctgcgccacgcccgccgtattgtgatcaccgggattggcgcctctgggctggtggcgcaaaattttgcctggaagctactgaagattggcattaacgcggtggttgagcgcgatatgcacgccctgctggcaacagtgcaggcgctggcgccggaggatctgctgctggcgatctcttattccggggaacggcgcgagctgaacctggcggcggacgaaacattacgcgcaggcgcgaagatcctggccattaccggtttttctcccaacgccttgcagcagcgcgccacccgctgtctgtatacgattgccgaagagcaggcgacgcgcagcgccgctatctcctcgacacatgcgcaaatgatgttgaccgacttactgtttatggcgctggtacaacaggatttagagcgggcgccggagcgtattcgccatagcgaggcgctggtaaaaaaactggtttga

SEQ ID NO: 369982 - DNA, 918 bp, Salmonella enterica
atgaaaattgcaatcgcaggtgcaggcgctatggggtgtcgttttggctatatgctgctggaggccgggcacgacgtgacgcttatcgatagctggcaggagcatgtcgacgctattcgtagcaaggggttgtttgtcgaaacggaaacgactcagaagtattaccccatccctgctatgttggctgatgaatcccagggggagtttgaactggttattctgtttaccaaagccatgcagctggatagcatgttactgcgtattaagccgctgctgccagccgcgaaggtcgtgatgattttatctaacggcctgggaaatattgaaacgctggagaaatatgtcgatcggcagaaaatctatgcgggtgtgacgttatggtccagcgaactggagggggctgggcatattatggccaccggtaccggaacgattgaactgcagccgattgccagccaggattcggctcaagaggctaaggtcattgccactcttaatagcgcgggattgaatgctgaaataagccctgacgtattattatcgatctggaagaaagcagcctttaatagcgtaatgaacacctattgcgcgctactggattgtaatgtcggcggatttggtcagcggcctggtgctttagatttagcgcaagcggtagttgatgagtttgtattggttgctgccagccagaatattccgttgactgagcaaatggtgatgaatacggtgaagaaagtgttcgatccgcgtgagagcggccaccactatccttctatgcatcaggatttacataaaggccgactgactgaaatcgactatttaaatggtgcgattgcgcgaatcggcgctcagaacaatattgccgtaccggttaacacactcctgacgcaattgattcacgcgaaagaagcgcaataa

SEQ ID NO: 369983 - DNA, 1197 bp, Salmonella enterica
atgtcggcatcaatcaaccgctggggaatgcttgccgctcacgtgtgcatcaattttgtgctcgggggcgtctacgcatttagctatttcaaaacaccactcatggcgcaatatcactgggatccggctacgctggcgttagcattctctatcaatatggggatcattcctttaccgatgatttggggcgggagaatgatcgacaatggtaaaggaaagcaggcgatagttatcggtggtatcctgttttctttaggttttatcttgtccgggtttgtggataatttgcccatgctgtttttaacctacggcgtcattgccgggttgggatcgggcctggcttttacgggtaatcttaataatattctgaaatttttccctgaccgtcgcggtcttgccagcggtatcgtactggcgggtgttggcgtcgggacgctactttgcacccgcctggccgaatattttatggcgcaaactcacgatgttagtcgggcgttgttatatctgggtattgtttatctggtggttatttttatcgtccagttctttattcgtagcgcgccagcaaaagatagcggaggaattaaagcgtcgccactggataaagactatcggcacatgctgaaagatctgcgcttctggctgctgtttatgattctggcgctgggcgtgttctctgggatggtaattagctcaagctctgcgcaaattggtatgacgcagtacggtttactgtccggtgcattagtcgttagcctggtctcgatatttaactcgatcggtcgcctgttctggggagggttaaccgataaattaggcggctataatacgctggttattgtttacctctttacctgcttgtgtatgctgctgttatttttcttcaatggcaatacttcggtattttatttcagcgctctgggcgtgggctttgcttatgccggtatattagttatcttccctggtttgaccagccagaattttggtatgcgtaaccaggggctaaactacggctttatgtattttggttttgccgtcggtgcggttattgctccttatgtaacgtccgctattgcaaaatataccggaagctacaatacagtatttattttgacaacggtgctattgcttattggagtcgtgttgaccctgataacgaaaaaatatgtcgcaacggttttagccaaaattcattaa

SEQ ID NO: 369984 - DNA, 927 bp, Salmonella enterica
atgaatatcaaacaactacactccttcctgatattgtgtgatgaattacattatggtcgggcagccagtcgcctgtttatcactcagccatcattaagtcagcaaatcaaacaacttgagtcatcacttaaaacaatattatttaagcgaaaaggtagaggaattaaattaacaaaagcaggcattattttgcaacgacacgctaacaaaataatgctggatttaaaaaatgccgaaaatgaacttcttccctatcaggaccaacagcgcgatactatttcaatcggggtgtcaggcagttacctggtcctgcccgcttttcgcaactttatggcgcaccatccggaaatatctttaaatgttaaagagttctcaactgagcaaaccattaaaaagctgacggatagcgccgttgatattggcattgtttatcgaacagcgctccctgcccagctaagctcgaccatgctgtttgaagatgaaattatcgctgcaatcccactttctcatcctctggcgacacgcgaacgtctgcatttaaaagatttaaacgaccagcccattatcgtgcttaatgactctctgctattaagagggatcatcaccacagaatttaataaccgcaaagtcgttcctaacgtcatctgcgaactggataaccactactcatgccttgagtatgccgaagcgcagattggcatcgcatttattacccgctcgctaacccatttatcgacacccaaaaatgttcgcctggtttcactgggcatccccgcattctttattcctgtcatgctggtgcacagtaatgacctttcactggataacgcaaccatctgcctgctcaagcagatcaaaaatttttacacggtagataacaaatcagcgccagaaaagagctggcccgagcagaaaataggcgtataa

SEQ ID NO: 369985 - DNA, 261 bp, Salmonella enterica
atggcgctgttaatcaccaaaaaatgtatcaattgcgatatgtgcgagccggagtgcccgaatgaggcgatttcaatgggcgacagcatttatgagattaacagcgacaaatgcaccgagtgtgtaggccattacgaaacgccgacctgtcagaaagtctgcccgatccccaatacgattttgcaggatcccgcccatgtcgaaaccgaagaacagttgtgggataagtttgttctgatgcatcacgcagataaactgtaa

SEQ ID NO: 369986 - DNA, 381 bp, Salmonella enterica
atggcgattctcggcctgggaacggatattgtagagattgcccgcattgaggcagtgatctcccgttccggcgaacgtctggcaaggcgtgtgctcagtgacaacgagtgggctatctgggagacgcatcagcagccggtgcgttttctcgccaagcgttttgcggtcaaagaggcggcagcgaaagcttttggcaccggcatccgcaacggtctggcgttcaatcagttcgaagtgtttaacgatgagctgggaaaaccacgtttgcggctgtggggcgaggcgttaacgctggcggaaaaactcggtgtggcgcatatgcatgtcacgttggccgatgaacgccattacgcctgcgctacggtcattctggaaagttag

SEQ ID NO: 369987 - DNA, 732 bp, Salmonella enterica
atggctgaattactgttaggcgtcaatattgaccacattgccacgttacgtaatgcgcgcggcaccgactatccggatccggtacaggcggcgtttattgctgaacaggcaggcgcggacggcattaccgtacacctgcgcgaagatcgtcgccacattaccgatcgcgatgtgcgcattctgcgtcagacgctgcatacgcgtatgaatctggagatggcggtgaccgaagagatgctggcgatcgccgtagaaaccaggccgcatttctgttgtctggtgccggaaaaacgccaggaagtcaccaccgaaggcggtctggatgtggccggacagcgcgataaaatgcgtgatgcctgtgcgcgcctggcggcggctggcatccaggtttcgctctttatcgatgccgatgaaacgcaaatcaacgcggcggcggaagtcggcgcgccgtttatcgaaatccataccggctgctacgccaacgcagaaaccgatgcggaacaggcaaaagagctggcgcgtatcgccagcgccgcgaccctggcggcccgtctggggctaaaagtaaatgcgggtcatggtctgacctaccataacgtcaaagctattgccgcactgccggaaatgcacgagctcaatatcggtcatgccattattggtcgggcggtgatgacggggctgaaagaggcggtggctgaaatgaaacgtttgatgctggaagcgcgcggctaa

SEQ ID NO: 369988 - DNA, 729 bp, Salmonella enterica
gtggaagggtggcagcgcgcatttgtcctgcacagtcgcccctggagcgaaaccagcctgatgctggacgtcttcacggaagaatcggggcgcgtgcgccttgtcgccaaaggcgcgcgatctaaacgttccaatctgaaaggcgcgttgcagccttttacgccgttattgctacgctacagcggacgcggcgaggtgaaaaccctgcgcagtgccgaggcagtttctttggcgctgccgttaagcggtattacgctctatagcggcctgtacatcaacgaactcctctctcgcgtactggaatatgaaacgcgcttctccgaactcttttttgattatctgaactgtattcaggcgctggcgggaaccaccggctcgcctgaaccggcgttgcgacgtttcgaactggcgttgctgggtcatctggggtatggcgtcaatttcacccactgtgcaggcagcggcgaacgggtggatgacaccatgacctaccgttaccgcgaagaaaaaggctttttcgccagcgtcgtcatcgataacaacacctttaccggacggcacctgaaagcgttggaggagcgggaatttccggatgtagataccctgcgtgccgctaaacgctttacccgtatggcattaaagccgtatcttgggggaaaaccgttaaaaagccgggagctgttccggcaatttatgcccaaacgcacagtaaaaatgaagaaagattaa

SEQ ID NO: 369989 - DNA, 906 bp, Salmonella enterica
atgagcactgacaaaacttactgcggatttattgccatcgtcggacgtccgaacgttggcaaatccaccttgctgaacaaactgcttgggcagaagatttcgatcacttcccgtaaagcgcagaccacgcgccaccgcattgtcggtattcataccgaaggcccgtatcaggcaatttatgtcgataccccgggactgcatatggaagaaaagcgcgccattaaccgtttgatgaataaggcggcgagcagttcgattggcgacgttgagctggtgattttcgttgtggaaggcacccgttggacgccggacgacgaaatggtcctgaacaaactgcgcgatggcaaagcgccggttattctcgccgttaacaaggtggataacgtgcaggaaaaagccgatttgctgccgcacctccagttcctggcaagccagatgaactttcttgatatcgtacccatctctgctgaaacgggtatgaacgtcgataccattgccggtatcgtgcgtaaacatttaccggaagcgattcatcacttcccggaagattacatcaccgatcgctctcagcgctttatggcgtctgaaatcattcgtgaaaagctgatgcgttttctcggcgccgagctgccgtattccgttaccgttgagattgaacgttttgttaccaacgaacgcggcggctatgatatcaacgggctgatcctcgtcgagcgcgaagggcagaagaagatggtgattggcaacaaaggcgccaaaatcaaaaccattggtattgaagcgcgtaaagacatgcaggagatgtttgaggcgccggtacacctggaactgtgggtgaaagtgaaatccggctgggccgatgacgaacgcgctctgcgcagtctcggttacgtagacgatctgtga

SEQ ID NO: 369990 - DNA, 738 bp, Salmonella enterica
gtgtatcaggtctgtttcgtgtgctggattgttgacgcattcatttattggtatcgcatgaaccccatcgtaattaatcggcttcaacggaagctgggctacacttttaatcatcaggagctgttgcagcaggcattaactcaccgcagcgccagcagtaaacataacgaacgcctggaatttttaggcgattcaatcctgagcttcgttatcgctaacgcgctttatcaccgttttccacgggtggatgagggagatatgagccgtatgcgcgccacgttggtacgtggtaatacgctggcggaattagcccgtgaatttgatttaggcgagtgcctgcgtttagggccgggcgaattaaaaagcggcggattccgtcgagagtccattctggcggacaccgtggaagcgttaatcggcggagtatttctcgatagcaatatccagaccgtcgagcagttaatccttaactggtataaaacccgtctggatgagataagcccgggcgataaacaaaaagatcctaaaacgcgcttgcaggagtatttgcagggtcgccatctgccgctgccatcttacctggttgtgcaggtacgcggcgaggcgcacgatcaggaatttactatccactgccaggtcagcggcctgagcgaaccggtggttggcacgggttccagccgtcgtaaggcggagcaggctgccgccgaacaggcgctgaaaaaactggagttggaatga

SEQ ID NO: 369991 - DNA, 975 bp, Salmonella enterica
atggcgagcatgtttgccctgattctggtgatagccacactggtgacgggcattttatggtgcgttgataagtttgttttcgcgccaaaacgtcgggcgcgccaggctgccgcgcaaacggcgtcgggagatgcgctggataacgctacgctcaataaagtggcgcctaagccgggctggctggagaccggggcgtcggttttcccggttctggcgatcgttctgatcgttcgttcatttctttatgaaccctttcagatcccgtcaggctcaatgatgccgacactgcttatcggcgattttattctggtggaaaaatttgcctacggcattaaagatccgatctaccagaaaaccctgattgaaaccggtcatccaaagcgcggggatattgtggtatttaaatatccggaagatcctaagttagattacatcaaacgcgcagtcggtttgccgggcgataaaatcacttatgatccggttgcgaaagaggtgacgattcagcctggctgtagctccggtcaggcgtgcgaaaatgcgctgccggttacctactctaacgttgagccgagcgattttgtacagacctttgcccgccgtaacggcggagaagcgaccagcggtttctttgaggttccgctaaacgagacgaaagaaaacggcattcgcctgaccgaacgtaaagagacgttaggcgatgtgacgcaccgcattctgatggtgccgatagcccaggatcagttgggcatgtattaccaacagccaggacaaccgctggcgacctgggttgtaccaccgggacaatatttcatgatgggcgacaaccgcgataacagcgcggatagccgttactggggatttgttccggaagcgaatctggtcggtaaagcggtcgctatctggatgagctttgacaagcaggaaggggagtggccgacaggcgtacgcctgagtcgtatcggcggtattcactaa

SEQ ID NO: 369992 - DNA, 1800 bp, Salmonella enterica
atgaagaacatacgtaacttttcgatcattgctcacattgaccacggtaaatcgacgctgtctgaccgtattatccaaatctgcggtggcctgtctgaccgtgaaatggaagctcaggtacttgattcgatggatcttgagcgtgagcgcggtattactattaaagcccagagtgtgacgctggattttaaagcgtctgatggtgaaacttatcaactgaactttatcgacacgccgggacacgttgacttttcctatgaagtttcccgttcgttagccgcctgcgagggcgcgctgctggtggtggatgccggccagggcgtagaagcgcaaacgttggcgaactgctacaccgcgatggaaatggatcttgaagtggtgccggtgcttaacaagattgacctgccggccgccgatccggagcgtgtggcggaagaaatcgaagacattgtcggtatcgatgcgacggacgcggtacgctgctccgccaaaacgggtgtcggcgtgacggatgttctggaacgcctggtgcgcgatatcccgccgccgcaaggcgatccggacggcccgctgcaggcgctgattattgactcctggttcgataactacctgggcgtggtatcgctggtgcgtattaaaaacggcaccatgcgtaaaggcgacaaaattaaagtgatgagcaccgggcagacctacaacgctgaccgcctggggatcttcacgccaaaacaggttgatcgtaccgagctgaagtgcggcgaagtaggctggctggtctgcgccattaaagatatcctcggcgcgccggttggcgataccttaacctcagcgcgtaacccagcggaaaaagcgttgccgggctttaaaaaggtgaaaccgcaggtctatgcaggtctgttcccggtcagctccgacgattatgaaagtttccgcgacgcgctcggcaagctgagcctgaacgatgcctcactgttttatgaaccggaaagctcctcggcgctgggctttggtttccgctgcggcttcctcggcctgttgcacatggagatcattcaggagcgtctggaacgcgaatacgatctggatctgatcaccactgcgccgaccgtggtttatgaagtagaaacaacggcgaaagagactatctatgttgatagcccctccaagctgccgccgttgaataacatttatgaactgcgcgagcctatcgccgagtgtcatatgctgttaccacaagcctatttaggtaacgttattacgctgtgtattgagaaacgcggcgtacaaactaacatggtgtatcacggtaaccaggtcgcgttgacctatgaaatcccgatggcggaagtggtgctcgacttctttgaccgtctgaaatcaacgtcgcgcggctatgcgtctctggattataacttcaagcgcttccaggcttccgatatggtgcgtgttgatgtgttaatcaacaacgagcgtgtcgatgcgctggcgctgatcacgcaccgtgataactcgcaaagccgtggtcgcgagctggtggagaagatgaaagatttgattccacgccagcagtttgatatcgcgattcaggcggcgattggtacgcatattattgcccgttcgacggtaaaacagttacgtaaaaacgtgctggcgaagtgctacggcggtgatatcagtcgtaagaaaaaactgctgcagaaacagaaagaaggtaagaaacgcatgaagcagatcggtaacgtcgagctgcctcaggaggcgttcctcgccattctgcatgtcggtaaagacaataaataa

SEQ ID NO: 369993 - DNA, 480 bp, Salmonella enterica
atgattaaagagtgggcaaccgttatctcctggcagaatggtcaggcggtggtgagctgcgacgttaaagcgtcatgcagcagctgcgcctcccgtgcgggatgcggcagtcgcgtgctgaataaattagggccgcaaaccacccataccattgttgtgccaagcgcggagccgctggcgccggggcagaaagtcgagttgggcatcgccgaaaaaagccttttaggttcggcgttgctggtctatatgtcgcctttagcggggctatttctttgtgcggcgctttttcagatgctgtttggatctgaccttgccgcattaagcggggccgtgctgggcggcgtgggcggttttctggttgcccgcggctattcccgaaaactggcggagcgcgacgcctggcagccggtgattttaaacgttgccctcccgccggaccttgttcgcgtcgaaactacctcaatcgaaacgcgccagtaa

SEQ ID NO: 369994 - DNA, 957 bp, Salmonella enterica
atgaagcaactttggtttgccatgtcccttgtggcggctagcctgttcttctcagcaaacgcctcggccgaccctgcgtccggggcgttattgcagcagatgaacatcgccagtcagtcactgaattacgagctgtcattcgtcagcatcacgaaacaaggcgttgaatctctgcgttatcgacacgcacgcctggatggtcgcccgcttgcgcaattgctacagttggacggtccccgccgggaggtcgtacagcgtggtaatgaaatcagttattttgaaccgggccttgagccgttcaccctgaacggtgattatattgtcgattctctgccttccctgatttacaccgacttcaagcgcctggcgccatactacgactttatttctgtcggacgcacccgtatcgcagacagattgtgcgaagttatccgcgttgtggcgcgcgatggtacgcgttacagctatattgtctggatggacatggacaccaaactaccgatgcgcgttgatctgctggatcgcgatggcgagacgctggagcagttccgcgttattgcgttcacggtgagtcaggatatcggcagcaacatgcaggcgctggcgaaggcgaatctgccgccgctgctttctgttcccggtggcgaaaaaacgaaatttaactggagtccatcctgggtgccgcaaggctttagcgaagtttccagcagccgtcgtccgttgccgacgatggataacctgcctatcgaatcgcggctttattctgacggtctgtttagcttttccgtcaatgtgaaccgggcgacgcaaaacagcagcgatcagatgctgcgcaccgggcgccgaacggtttatagcagcgttcgcgacaacgcggaaatcaccattgtcggcgagcttccgccgcaaacggcgaagcgcattgccgacagtatcaaattcagggcagtacaatga

SEQ ID NO: 369995 - DNA, 651 bp, Salmonella enterica
atgcagaaagaaaaactttccgctttgatggatggcgaaacgttggatagtgagctgctcaaagcgcttacgcacgacccggaaatgcagaaaacctgggagagttatcacctgatccgcgattcaatgcggggggatacgcctgacgttctccatttcgatatatccgctcgcgtgatggccgctattgaaaacgagccagtacgtcaggtgtcgccattaatccctgaggcccaacccgctccgcagcaatggcagaaaatgccgttctggaaaaaagtgcgtccgtgggcggcgcagcttacccaaatgggcgtggcggcgtgcgtttcacttgcagttatcgtcggtgtccagcactataatgggcaatctgaaacatcccaacaacctgaaacgccggttttcaataccctgcctatgatggggaaagccagcccggtaagtctgggagtgccttctgaagcagcgcctgtcggcagtcagcaacagcaggtacaggagcagcgtcgtcgcattaatgccatgttgcaggactatgaactgcagcgccgactgcactccgaacagcttcagtttgagcaggcgcaaacccagcaagccgcggtacaggtgccaggaatccaaactttaggaacgcaatcgcagtaa

SEQ ID NO: 369996 - DNA, 576 bp, Salmonella enterica
atgagcgagcagttaacggaccaggtcctggttgaacgggtccagaagggagatcagaaagcctttaacttactggtagtgcgctaccagcataaagtggcgagtctggtttcccgctatgtgccatcgggcgacgttcccgatgtcgtacaggaatcatttattaaggcctatcgcgcgctggattctttccggggggatagtgctttttatacctggttgtatcgtattgcggtcaatactgcgaagaactacctggttgcgcaggggcgtcgtccgccttccagtgatgtagacgcgattgaagcagaaaactttgaaagcggcggcgcgctgaaagaaatttcgaaccctgagaacttaatgttgtcagaagaactgagacagatagttttccgaactattgagtccctcccggaagatttacgtatggcaatcaccttacgggagctggatggcctgagctatgaagagatagcggctatcatggattgtccggtggggacggtgcgttcacgtatcttccgggcgcgggaagctattgataataaagttcaaccgcttatcaggcgttga

SEQ ID NO: 369997 - DNA, 1623 bp, Salmonella enterica
atgatgacaactcctgaactgtcctgtgatgtgttaattatcggcagcggcgcggccgggctctcgctggcgctgcgtctggctgaaaagcataaggttatcgtcctgagtaaagggccggtgagcgagggctccacgttttatgcgcagggcggtattgccgccgtgtttgatgaaaccgacagtattgcgtcgcatgttgaagatacgctaattgctggcgccggaatttgcgatcgccacgcggtggagtttgtcgccagcaacgcccgtacctgtgtgcagtggcttatcgatcagggcgtcctgtttgatacgcatgtccagccaaacggcaaggagagctatcatctcacgcgtgaaggcggccatagccatcgccgtatccttcatgccgccgacgctaccggaaaggaagtcgaaaccacgttggtcagtcgggcgcaaaatcatcctaatattcaggtgctggaacgcagcaacgccgttgatttaattatctccgataaaatgggtctgccggggcctcgccgggtcgtcggcgcctggatctggaatcgcaataaagagtgggttgaaacctgtcatgcgaagtcggtggtgctggcgaccggcggcgcctcaaaggtttatcaatataccactaacccggatatttcctccggcgacggtatcgcgatggcctggcgcgcaggctgtcgggtcgctaatctggaatttaaccagtttcatcccaccgccctttatcacccgcaggcgcgtaattttctccttaccgaagcgctgcgcggcgaaggcgcataccttaaacgtccggacggttcacggtttatgccggacgttgacgaacgcggggaactggcgccgcgcgatattgtcgcccgcgctattgaccatgagatgaaacgactcggcgcagactgtatgtttctcgatatcagccacaagcctgacgattttgtccgccagcacttcccgatgatctatgcgaaactgctcgatttggggatggatttaaccaaagaaccgattcccattgttcctgccgcgcactatacctgcggcggcgtggtcgtcgatgattatggtcgtaccgatgtagacggcttatatgccattggcgaagtcagttacaccggcctgcacggcgctaaccgtatggcgtccaactcgttgctggaatgcttagtgtacggctggtccgcagcaatggatatcgacaggcgaatgccttctgtccacagcgttgacgtccttcccgcctgggatgaaagccgcgtggagaacgccgatgagcgggtggtgattcagcataactggcacgaactgcgtctgctgatgtgggactatgtggggattgtgcgcacgacgaaacggctggagcgcgccctacggcgtattactatgttgcaacaagagattgacgaatattacgccaactttcgcgtctcgaataatttactggagctgcgcaatctggtgcaagtggccgaactgattgtgcgttgcgcgatgatgcgtaaagagagccgggggctgcactttacgctggattatccgcaacaactggctgaatcaggcccatcgatcctttcgccattaacgcctcacataaacagataa

SEQ ID NO: 369998 - DNA, 738 bp, Salmonella enterica
atgtctcagtctggctccgttcttcgtcgtaacggatttacgtttaaacagttttttgtcgcacacgatcggtgtgcgatgaaagtgggaactgacggtattttactcggggcgtgggcgccggtcgcggatgtaaagcgaattctggatatcggtactggaagcggtctgctggcgttaatgctggcgcagcggacggatgacaatgtgcctattgacgccgtggaactggatgccggggctgccatgcaagcgcaggaaaacgtggctcactctccctggccgcatcgaataacggtgcatactgacgatattcagagttgggcgcctcgccagacggtacgctttgatcttattatcagcaacccgccttattacgaacccggtgtggaatgcgccacgccgcagcgggagcaggcgcgttacaccgctacgctggatcaccagacgttattggctattgcggcggattgtattaccgaagatggctttttttgcgtagtcttgccggaacaaataggtaacgcttttacgcagcaagcgctcaacatgggatggcatttgcggctacgtactgacgttgcggaaaacgaagcgcgcttgccgcaccgggttttgctcgcattctccccgcaagccggggagtgctttagcgacagattagtaattcgcgggtcagaccagcattattctgaaagttatacggcgctgacccaggcattttatctgtttatgtga

SEQ ID NO: 369999 - DNA, 1335 bp, Salmonella enterica
atgactgtaacgactttttccgaacttgaactcgacgaaagcctgctggatgccctccaggataaaggtttcactcgcccgaccgccattcaggctgccgccattccgcctgcgctcgatggccgtgatgtactcggttctgcgccgacaggcaccggtaaaacggcggcatatctgctgccggcgttgcagcacctgctcgactttccgcgtaaaaaatcggggccgccgcgcattctgatcctgacgccaacccgcgaactggcaatgcaggttgccgatcacgctcgtgaactggctaagcatactcatctggatatcgccacgattaccggcggcgtggcctatatgaaccatgctgaagtgtttagcgaaaaccaggatatcgtggtcgccacgacgggccgtctgctgcaatatataaaagaagagaactttgactgccgggcggttgaaacactgatccttgacgaagctgaccggatgctcgacatgggcttcgctcaggacattgaacatatcgctggtgagacccgctggcgtaaacagacgatgctgttctccgccacgctggaaggcgatgcgattaaagattttgccgagcgcctgctggaagacccggttgaggtttccgccaatccgtcaacccgcgagcgtaagaaaattcaccagtggtactaccgtgccgacaatttcgaacataaagttgcgctgttgaagcacctgctaaaacaagacgatgcaacccgttctatcgtgtttgtacgtaaacgtgaacgcgtccatgaactggccgaaacgctgcgtctggcagggatcaacaattgctatcttgaaggtgagatggcgcagatcaaacgtaacgaaggtattaagcgtctcaccgacggtcgcgttaacgtgctggtcgcgaccgacgtcgcggcacgtgggattgatattcctgacgtcagccacgtcattaacttcgacatgccgcgcagtggcgatacctatctgcatcgcattggtcgtacaggccgtgctggccgcaaaggcactgcaatctcgctggtagaagcccacgaccatctgttgctgctgaaaatcggccgctacatcgaagagccgctaaaagcgcgcgtcattgatgagcttcgcccgaccacgcgtgcgcccagcgaaaagctgaccggcaaaccgtcgaaaaaagtgctggcgaaacgcgccgagaagaaaaaagagaaagaaaaagagaagccgcgcgtgaagaaacgtcaccgcgatacaaaaaatatcggtaagcgccgcaagccaagcggtacaaaaatgcaggagcaatccagcgaagagtga

SEQ ID NO: 370000 - DNA, 900 bp, Salmonella enterica
atggatctgcgtcggtttattacgctgaaaacggtagtggaagagggctcgtttctgcgggcttcgcaaaagctgtgctgcactcagtcgacggtaacttttcatattcaacagcttgaacgtgagttttccctgcaactgttcgagaaaatagggcgccgaatgtgcctgaccactgaggggaaaaagctgatgccgcatatccatgaactgacgcgtgtgatggagttgattcgtgaagccgcaaggcaggatgcagaacccggcggagagctgcgcgtggcgacaggtgaaaccttactggcgtacaaaatgccgcaggttctacaacgttttaagctgcgagcgccgaatgtcaaattgtcgctacagtcgctgaattgctatgtgatacgtgatgcgttgctgaatgacgaggtcgatctgggcgttttttatcgcgtaggtaatgatgacgcgctcacgatgcagcaactgggggagcagtcgctggcgctggtggcctctccactgctacaggatgctgattttacgcagccagatcagcatatcccctgcagcttcatcatcaatgaaccgcaatgtgtcttccgccagctatttgaaagtacgctacggcagaggcggattacgctggaaaacaccattgaactgtggagtattgaaagtattaaacagtgtgtggctgctaacctgggcatcagctttttaccacgttttaccgttgaacgagaacttagtaccggtcagttgaaagagctgccgtttggcgcgccgtcgctatcgatcatggcgctgtgcgcccatcatgccgggaaagcggtcagcccggcaatgcagatatttatacagtgtatggaggcgtgttttaccgtggaagataaaaaaatgccgggttaa

SEQ ID NO: 370001 - DNA, 588 bp, Salmonella enterica
gtgacaccgatgcttttaagcgctttctggacttatacattaatcaccgcccttacccccggcccaaacaatattctcgcgcttagcgcagcaactgcacatggttttcggcagagtattcgtgtactggcaggtatgagtctgggatttttggtcgtcatgctgctgtgcgccgggatcgcgttttcccttgcggttatcgatccggcaatcattcatttgctcagttgggtaggggctgcgtatatcctgtggctggcgtggaaaattgccaccagtccagcggcggatgagaaggtcagaccaaaaccggttggcttttgggtaagctttggcctgcagtttgtgaacgtcaaaattattctgtacggcattaccgctctgtctacatttgttttaccgcaaacgcaggcgctgaactgggtcatcggcgtcagtatattgctggcattgatcggcacgttcggtaatgtgtgctgggcgctggcgggacatctgtttcagcgggcgtttcgccattatggtcgccagttaaatatcattctggcgttactgctggtgtactgcgcggtgcggattttttactga

SEQ ID NO: 370002 - DNA, 384 bp, Salmonella enterica
atgattacaggtatccagattactaaagccgctaacgacgacctgctgaattccttctggctgctggacagcgaaaaaggcgaagcgcgctgcatcgttgcaaaatccggctttgctgaagatgaagttgtggctgtcagcaaactgggcgagattgaataccgggaaattccgatggaagttaaaccggaagtacgcgttgaaggcggtcagcatctgaacgttaacgttctgcgtcgtgaaactctggaagacgcggttaagcatccggaaaaatacccgcagctgactattcgtgtttctggttatgcggtgcgttttaactccctgacgccggaacagcagcgcgacgttatcgctcgtacctttaccgaaagcctgtaa

SEQ ID NO: 370003 - DNA, 690 bp, Salmonella enterica
atggcgactgagttaacctggcacgatgtgctggctgatgagaaacagcaaccttactttatcaatacgcttcacactgttgctggcgagcgtcagtcgggtatcacggtctacccgccgcaaaaagatgtgtttaacgcctttcgcttcacggaactgggcgacgttaaggtggtgatcctgggacaagatccttaccacggccccggccaggcacatggtctggcgttttccgtgcgccctgggatcgctcccccgccgtcattagtgaatatgtacaaagagctggaagcctccattcccggctttgttcgcccagcgcacggttatctggaaagctgggcgcgccagggcgtactgttactgaatacggtgctcacggtacgggcaggccaggcgcactctcatgccagcctggggtgggaaacctttacggataaagtgataagcctgattaaccaacaccgcgaaggggtcgtcttcttgctgtggggctcgcacgcccagaaaaaaggcgcgattattgatccacagcgccaccatattctgaaagctccgcatccctcgccactctctgcgcaccgcggattttttggctgtaaccattttgcgctaacgaaccaatggctggaacaacacggcgagaaaactatcgactggacgccagtattaccggctgagagtgaataa

SEQ ID NO: 370004 - DNA, 1038 bp, Salmonella enterica
atgaacgatgaattaaaaaacaaaagcggcaaagtcaaagtgatgtatgtccgtagtgatgatgactctgataaacgcacccataacccgcgtaccgggaaagggggaggccgcccagcaaagtctcgcactgacggtggacgtcgccccgcccgtgatgagcgaaataatcagagccgtgaccgtaaacatgaaacttcgccgtggcgcaccgtgtcccgcgcgccaggcgatgaaacgcctgagaaagtcgatcatggtggtattagcggtaaaagttttattgaccctgaagttttgcgtcgccagcgtgcggaagagacgcgcgtctacggtgaaaacgcctgccaggcgctattccagagccgtcctgacgccatcgtgcgcgcatggtttatccaaagcgtaacgccgcgttttaaagaggcgctgcgctggatggcggcgaatcgtaaagcctaccatgtggtggatgaagccgaactggcaaaagcttccgggactgagcaccacggtggcgtgtgtttcctgattaaaaagcgtaacggtacgaccgttaagcaatgggtaaagcaggcggcggatcaagactgcgtgctggcgttggaagatgtcgctaacccgcataatctgggcggcatgatgcgtagctgcgcgcacttcggcgtgaaaggcgtggtggtacaggatgcggcgttgctggagtccggtgcggcgattcgtactgcggaaggcggggcggagcatgtccagccgattactggtgaaagcattgttgacgtactggatgattttcgtcaggcggggtacaccgtggtgacgacgtccagcgatcgcggtcaggcgctctttagtacgaccctgccggaaaagatggtgctggtcttaggccgtgaatatgactacctgccggaagcggcgcgcgaacccgacgatctgtgcgtgaaaattaacggcaccgggaacgtggaaagcctgaatgtgtcggttgcgacaggcgtgctgctcgccgagtggtggcgacagaataaagcgtaa

SEQ ID NO: 370005 - DNA, 420 bp, Salmonella enterica
atgaacaccgtttgtacccattgtcaggccattaaccgcatccccgacgatcggcttcaggatgcggcaaaatgtggacgctgcggtcatgagttgtttgacggagaagtcattaatgcgaccggcgaaacgctggacaaactgttgaaggacgatcttccagtggtgatcgacttttgggccccctggtgcagcccttgccgtaactttgcgccaatcttcgaggatgtcgcagaagagcgcagcggtaaagtccgtttcgtcaaagtgaataccgaggcggaacgggaactcagcgcccgtttcggtatccgcagcatcccgacgattatgatttttaaacatggacaggtggtcgatatgcttaatggcgcagtgcctaaagcgcctttcgacagctggctgaacgaagcgctgtaa

SEQ ID NO: 370006 - DNA, 681 bp, Salmonella enterica
atgaccaataacgctgtccttcagttacgcgccgaacggcttgcgcgcgctactcgcccttttcttgccagaggcaatcgggttcgccgctgtcaacgctgcctgctgccgctaaaatcttgcctgtgtgatacgttaacgccttctcaggcgaaaagccgtttttgtctggtcatgtttgacactgaaccgatgaaacccagcaataccggccggctgatagccgatattttgccggataccgcggcgtttcagtggtcgcgtaccgagccgccacaggcgttgctggagttggtacagcatccggattatcaaccgatagtggtctttcctgcgtcctacgccggcgaagcgcgcgaggtcatttccaccccgcccgccgggaaaccgccgctgtttattatgctggacggcacctggcccgaagcacgtaaaatgtttcgtaaaagcccttatctggatcatctgccggtcatttccgtcgatttatcgcgtctttcagcttatcgtctgcgtgaaatccatgccgaagggcaatattgtaccgccgaagtcgcgatagcgttgttagatctggcgggagataccgaggcggcaaccagtttaggtgaacatttcacccgttttaaaacgcgctatctggcaggaaaaacgcaacatccgggaaacgtcacagcataa

SEQ ID NO: 370007 - DNA, 2661 bp, Salmonella enterica
atgagccagcaaggactggaagcgctactgcggccaaaatcgatcgcggtgattggcgcatcaatgaagccccaccgcgcgggttacctgatgatgcgtaacttgttggcgggcggattcaatggccccgtccttcccgtgacgcccgcctggaaagccgttttaggcgtcatggcctggccggatatcgccagtctccctttcacccccgatctggctattttatgcactaacgccagccgtaacctggcattactggacgcgcttggcgcgaaagggtgtaaaacgtgcattatcctttctgctcccacgtcgcaacatgaagaacttcttgcctgtgcccggcattataaaatgcgtctgctgggtccaaacagtcttgggctcctcgcgccgtggcaagggctgaatgccagcttttctcccgtcccgattaaacagggcaagctcgcttttatttcccagtctgccgccgtttccaatactattcttgactgggcgcaacagcgtgaaatgggcttttcctactttatcgcgctgggcgatagcctggatattgatgtcgatgaactactggactatctggcgcgcgacagcaagaccagcgcgattttgctctatctggaacagttaagcgacgcccgccgttttgtttccgccgcccgtagcgcttcacgtaacaaaccgattctggtgattaaaagcggccgaagcccggcagcccagcgtttacttaataccagcgcgggaatggaccctgcgtgggatgcggccatccagcgcgcaggcctgctgcgagtccaggatacgcacgagcttttttccgccgtcgaaacactgagccatatgcgtccgctacgcggcgacagactgatgatcatcagcaatggcgccgcgcctgccgcgctggcgttagatgagttgtggtcgcgtaacggcaagctggcgacgttgagcgaagagacctgcctgcaactacggcaggcgcttcccgcgcacattgatattgccaatccgctggatctgtgtgatgacgccagcagcgaacattacgtcaaaacgctggatatcctgctcgccagtcaggattttgacgcgcttatggttatccactctcccagcgctgccgcgccgggtacggaaagcgcccatgccctgatcgagacgattaagcgccaccccagaggcaagcttgttacgctgctgacaaactggtgcggcgagttctcgtctcaggaggcaagacggctattcagcgaagccggattaccaacctaccgtacgccggaaggcacgattaccgcgtttatgcatatggtggaataccggcgtaaccagaagcaactgcgagaaacgccagcgttgccgagtaacctgacgtccaataccgctgaggcgcataatctgttacagcgggcgattgcggaaggcgccgcctcactggatacccatgaagtacagccgattttacacgcctatgggctgcacacgctcccaacctggattgccagcgacagcgctgaagcggtgcatatcgccgaacagataggctatccggtagctctcaagctgcgctcgcccgacattccgcataaatctgaagttcagggggtcatgctttacctgcggaccgcaagcgaggtacaacaggccgcgaacgccatttttgatcgtgtaaagatggcctggccgcaagcgcggattcacggtttgctggtacaaagcatggctaaccgcgccggcgcgcaggagcttcgtgtggtggtcgagcacgatccggtgtttggtcctttgattatgttgggtgaaggcggcgtagagtggcgtccggaagagcaggctgtcgtcgcgctgccgccgctcaacatgaacctggcgcgctatctggtgattcagggcattaaacagcggaaaattcgcgcccgtagcgcgctgcgtccgctggatattgtcggtttaagccaattgctggtccaggtttcaaacctgattgtcgactgcccggaaattcagcgtctggatatccatccgctgctggcttccgccagtgagtttaccgcgctggatgtgacgctggatattgccccgtttgatggcgataacgaaagtcgacttgcggtacgctcctatccccaccagcttgaagagtgggtggagatgaaaaatggcgatcgctgcctgttccgtcctatcctgccggaagatgagccccaactgcgacaattcatcgcacaggtcaccaaagaggatctttactaccgttatttcagcgagatcaacgaattcacccatgaagatttagccaacatgacgcagatcgactacgatcgagaaatggcctttgtggccgtgaggcggatggacaatgctgaagagatcctcggcgtaacgcgcgcgatctccgatcctgacaacgtagatgccgaatttgccgtattggtacgttcagatctcaaagggttgggtttaggacgccgtttaatggagaaattgattgcctatactcgcgatcacggattgaagcggctgaacggtattacgatgccaaacaatcgcggcatggtcgcgctggccagaaaactgggatttcaggtcgatattcagctcgaagagggcatcgtgggattgacgctgaatctggccaaatgtgatgaatcgtga

SEQ ID NO: 370008 - DNA, 1356 bp, Salmonella enterica
atgttgtcaaaatttaagcgtaataaacatcaacaacaccttgcccaactccctaagatttctcagtcagttgatgatgtagatttcttttatactcctgctacttttcgggagacactgctggagaaaatcgccagcgcgacgcagcgtatttgtatcgttgccctgtatctggaacaggacgatgggggtaaaggtatactcgacgcgctctatgcggctaaacggcagcgtcctgaactggacgtgagggtgctggtcgactggcatcgcgcgcaacgcgggcgtattggcgcagcggcctcgaataccaatgcagactggtattgccgactggcgcaggaaaaccccggcattgatgtcccggtttacggcgtaccgattaatacgcgagaagcgcttggcgtactgcattttaaaggctttatcattgatgatagcgtcctgtacagcggcgccagcctgaacgatgtctatctccatcagcatgacaaatatcgctacgatcgctaccagctgattcgcaatcggcaaatggcagacatcatgtttgactgggtgacgcaaaatctgatgaatggccgtggtgtgaatcgtctggataatacccagcggccgaaaagcccggagattaaaaacgatatccgcttataccgtcaggagctgcgtgatgcgtcatatcattttcagggtgacgctaatgacgagcaactctccgttacgccgctggtcgggcttggcaaatccagtctgctgaacaaaaccattttccatctcatgccctgtgcggagcataagctcaccatttgtaccccttatttcaatctaccagcggtgctggtgcggaatattattcagctactgcgcgacggaaagaaagtcgaaatcattgttggcgataaaaccgcgaatgatttttacattccggaagatgaaccgttcaagatcattggcgcgttgccctatctctatgagattaacctgcgccgcttcctgagccgtttacagtattacgtcaataccgatcagcttgtggtgcgtctgtggaaagatgacgacaatacctatcatttgaaagggatgtgggtagatgataaatggatgctactcaccggcaacaatctgaatccccgcgcctggcgtctggatctggaaaacgccattctgatccacgatcctaagcaggagcttgcccctcagcgggaaaaagagctggaacttatccgaacgcacacaaccatcgtaaaacattatcgtgacctgcagagcattgccgactatccgataaaagtgcgtaaattgattcgccgtctgcgccggatccgcatcgacagattaattagtcgtatcctgtaa

SEQ ID NO: 370009 - DNA, 324 bp, Salmonella enterica
gtgcgcgtgttgattccttttacggtgttgtttctctccgggtgcagccatctggctaacgaccactggagcggtcaggataaagcccagcattttatggcatcagcgatgctatcggcagccggtaatgagtatgcgcgtcaccagggagtaagccctgaccgcagcgcagcgatagggctgatgttttctttgagtctcggagcctcaaaagaactctgggacagccgcccggaaggcagcggctggagctggaaagattttgtctgggatgtcgctggcgcgacaaccggttacgctatctggcaaatggcgcgatactaa

SEQ ID NO: 370010 - DNA, 1302 bp, Salmonella enterica
atggcagaaattattcagcgtatagataaaaataacgctgaggctccggagatgcggcgacgcatatgggctatcgtgggggcctcttccggaaacttagtggaatggtttgatttctacgtctactctttctgctcgctctattttgcacatatcttctttccttctggtaataccactactcagcttttgcaaacggcaggcgtctttgccgccggttttttaatgcggcctatcggtggttggctgtttggacgcattgccgatcgacgcgggcgcaaagcctcaatgttgatttcggtgtgcatgatgtgcatggggtcgctggtgattgcctgcttacctggttacgataccatcggcacctgggcaccggcgctgctacttattgcaaggttatttcaggggctctcggtagggggagagtatgggaccagcgcgacatatatgagtgaagttgcgcttgaaggtcgtaagggatttttcgcgtcgtttcagtacgttacgcttatcggtggccaactactggcattgctggtcgttgtgattttgcagcaggttctggaggatgctgagcttcgtgcctggggatggcgtattccctttgcgctgggcgccgtgctggcggttgtggcgttatggctacgtcgccagctggatgaaacctcgaagcatgagactcgcgcattaaaagaagccggttcgttgaaaggtttgtggcgtaatcgcaaagcctttttgatggtgcttggtttcaccgcggcaggctcgctgtgcttttataccttcaccacctatatacagaaatatctggtaaatacagcaggtatgcatgccaatgtcgccagcggcattatgacggtcgcgctgtgtgttttcatgtttgtgcagccgttattcggcgcgttatccgataagattggcaggcgcacctctatgctatgttttggcgcactcgcgacgcttttcaccgttccaattctctccgcgttgcagaatgtgacgtcgccttatgccgcatttgctttagtgatgtgcgcgctattgattgtgagtttctatacctcgattagcgggatcctgaaagcagagatgtttccggcgcaggttcgcgccctgggcgtcggtttatcttacgcggtagcaaacgcgttatttggcggctctgcggaatatgtcgcgctgtcgctaaaatctgtcggtatggagagttcgttcttctggtatgttaccgcgatggccgttctggctttcctggtttcgttgatgttgcaccgtaaaggaaagggcttacgcctttag

SEQ ID NO: 370011 - DNA, 456 bp, Salmonella enterica
ttggctatcaaaccttttaactaccagcaggacttttccagcattgacttccgccagcagcctgaattgtatcaggttggacgaggcgagcagggggtgctactggttgaaccctacaaaagcgaaattcttcctttctggcgctataaagatgaagcatcggcgatgaaatccgcagaacaggtctaccagttgttcgaagcttaccggcagcaggatgatttcgttggtatggacatggcgcgtaaatttattcagatgggatacacccgcgccaggcgatacgctaactataaaggcggtaaaaagtatgcagaagacggcagcctgaatacacggggtaatgatcctattaaggccgcggcggcaacggttttcaaaggttggtgggataaaatccgtcaggacgaagactatctgaaacggaaacgccagcatcaggcacggtggggataa

SEQ ID NO: 370012 - DNA, 531 bp, Salmonella enterica
atggcaaaagagaccatgataccgctactcgccattgccgcatggagcggcacgggaaaaacaacactgctgaaaaaactgatcccagcactttgtgagcatggaattcggccagggctgattaagcatacccatcatgatatggatgtcgataaaccgggtaaagatagctacgagctgcgtaaagccggggcggcacagacgctggttgccagtcagcagcgctgggcgttaatgactgaaacgccggggcaagaagagttggatctggcatggctggtgagccggatggatgcatcaaagctggatatggtgctggtagaagggtttaaacacgaggcagttgcgaagatcttactttttcgtcagggatgtgggcacagcgaggaagaattaattcttgatgagcatgttattgcagttgccagtgatattccacttgccgtagcggtacccgttttggatcttaatgatgtatcgcagatttctgccttcattttgcggtggttagagaaagcacgttccttgtag

SEQ ID NO: 370013 - DNA, 585 bp, Salmonella enterica
gtgaatctggatgaagtaataaccggcgtggtgctggcaggcggtaaagcccggcggatgggaggtgcggataaaggtctgcttgaactgaacgggaaaccgctctggcgacacgttgccgacgcgctcgcgccacaacttgcaacggtcgtcattagtgctaatcgccatctggatatctaccaggccagcggcctgaaagtcattccggattcaatcgctgactttcccggtccgctggcgggtatgctttccgtttttcagcaggtagcaagcgactggtttctgttttgtccctgtgacaatccctgtatcccccacaacctggtcgatcgtttagcagcgcagcgtcatggcgcacccgtggtttgggttcatgatggagagcgcgatcatccaacgatcgcgttgattaatcgtgccgttgagccccagttgacagcttatttgcaagcaggcgagcggcgggtaatgatttttatgcgccaggtaggcggacacgccgttgatttcagcgattgtaaggaggcatttgtgaacgtcaacacgccggaggaactcgcgcaatggcaaaagagaccatga

SEQ ID NO: 370014 - DNA, 270 bp, Salmonella enterica
atgaaatgtaaacgcctgaatgaagtcattgaactcctccagccagcctggcagaaagagcctgatcttaatctgacgcaatttttgcagaaactggcgaaagagtcaggttttgacggcaaactggaagatttaactgatgatatcctgatctaccatctgaaaatgcgcgattccgccaaagacgccgccattccagggattcaaaaagactatgaagaggactttaaaacggcgcttttacgcgcccgcggcgttattaaagagtaa

SEQ ID NO: 370015 - DNA, 987 bp, Salmonella enterica
atgaacgacaacgcttttactttccagacgctacacccggaaaccatcatggatgcgctgtttgaacaggggatcagggtggattccgggctgactccactaaacagttatgaaaaccgcgtctatcagtttcaggatgaagaccgtcgacgttttgtcgttaagttttatcgtcctgaacgctggtctgttgatcaaattcgggaagaacaccaattcgcgcttgaactggtgaaggatgaggttccggttgctgctccgctcgcgtttaatggccagacactgttagcgcatcagggctatcattatgccattttccccagcgtaggcggtcgtcagtttgaagcagataatatcgatcagatggaggcggtagggcgttatcttggtcgattgcatcagacggggcgaaaacgtcctttcactttccggcctgacattgggcttgcagagtatctttttgaacctcgccaggtattcgaagatgccgcactgattccctccgggcaaaaagcggctttcctgaaagccactgatactctactgtctgcagttaccgaatgctggcgcaccgatttcgccacgctgcgattgcacggcgattgtcatgccggcaacattctatggcgtgatggaccgctgtttgtcgatttagatgatgcccgtaacggtccggcgatacaggatttatggatgctgctgaacggcgacaaagccgaacagcgaatgcagcttgaaaccattattgaagcttatgaagaagttagtgagttcgatacggctgaaattggtctcattgaacctttacgcgccatgcgtttagtttattatcttgcctggttgattcgtcgttggggcgatcctgcgtttccaaaaaactttccctggttaacaggggaagattactggcagcgacagacaacgacttttattgagcagactaaaattttgcacgaaccccctttacaattaacgccaatgtattaa

SEQ ID NO: 370016 - DNA, 624 bp, Salmonella enterica
atgaaaaagatttggctggcgctggctggtatggttttagcttttagcgcctcggcagcacagatcagcgacggtaaacagtatatcacgctggataaaccggtcgctggcgaaccccaggtactggagtttttctccttctactgcccacattgttatcagtttgaagaagtgcttcatgtgtctgacaatgtgaagaaaaagctgccggaaggcaccaaaatgaccaagtaccacgttgagttcctggggccgttgggcaaggagctcacccaggcatgggcggtggcgatggcgttgggtgtagaagataaagtcacggtcccgctgtttgaagccgtacagaaaacccagacagtacaatctgccgcggatatccgtaaagtgttcgttgatgcgggcgtcaaaggcgaagattacgatgcggcatggaacagcttcgtggtgaaatcactggttgcgcaacaggagaaagccgcggctgacttgcaactgcagggcgttccggcgatgttcgtcaatggcaaataccagattaacccacaaggcatggataccagcagcatggatgtttttgttcagcagtatgctgataccgtgaaatatttggttgataaaaaataa

SEQ ID NO: 370017 - DNA, 909 bp, Salmonella enterica
atgacgagaatactcgcggctatcacgctcccattgagtatcgtattgaccatcctggtcactattgtttgctcagtaccgatcatcgttgccggtatggtaaagctccttttgcctgttccctgtatctggcgcaaggtctccattttctgcaatttcatgatgtattgctggtgtgctggtcttgcagcgctgttacgccttaatccgcacttgcaatgggatgtagaagggttagaagggctgagcaagaaaaattggtatttactgatttgtaatcatcgcagctgggccgatatcgttgtgctttgcgttctgttccgcaagcatatcccaatgaataagtactttcttaaacagcaattggcctgggtaccgttcattggcttggcgtgctgggcattagatatgccgtttatgaagcgctactcccgtagctacctgctccgccaccccgatcgacgcggcaaagatgttgaaacaactcgtcgctcttgcgaaaagtttcgtcggtatcccaccactatcgttaactttgttgaaggctcgcgatttacgcatgagaaacgtcagcaaacgcattcaccttatcaacatctgttgccgccaaaagcagccggtattgcaatggcgattaacgttttaggctcacagttcgataagctgcttaatattacgttgtgttacccaaacaacgatcgccaccctttctacgatatgctaagcggtaggctgacgcgtattgttgttcgggtgcaactggaacccataaatgaagaactgcacggcgattacgtgaacgacaaaacattcaaacgccgttttcaacgttggcttaatacgctgtgggataagaaagatatacagatagaagagattaaaacatcttataaaaacgccggtcagtga

SEQ ID NO: 370018 - DNA, 2787 bp, Salmonella enterica
atggttcagatcccagaaaacccacttattctcgtagatggctcatcctatctctatcgcgcctatcatgcgtttccgccgttaaccaacagcgcgggagaacctacgggcgcaatgtatggtgtcctcaacatgttgcgcagcctgatcatgcagtatcagccgacgcatgctgcggtggtgtttgacgccaaaggaaaaaccttccgtgatgagctctttgaacactacaaatcgcatcgtcctccgatgccggatgatctgcgagcgcaaatagagccgttacatgccatggttaaagccatggggttacctctgctggcagtctctggcgtagaagcggatgacgttatcggtacactggcgcgagaagcggagaaggtggggcgtccggtattaatcagcaccggcgataaagatatggcacagttggtgacgccgaatattacgctgatcaacaccatgactaacaccatcctcggcccggatgaagtcgttaataagtacggcgtgccgcctgagctgattatcgactttctggcgctgatgggggactcctcggataatattccaggcgtaccaggcgtgggtgagaagacggcgcaagccttgcttcagggattgggcggcctggatacgctgtacgccgagccggaaaaaattgccggtctcactttccgcggcgccaaaacgatggccggtaaattagcgcagaataaagacgtagcgtacctgtcttataaactcgccaccattaaaacggatgttgagctggagctgacctgcgaacagcttgaagtgcagcagccgattgcggatgaactgctgggcctgtttaaaaaatatgagttcaagcgctggacggcggacgtcgaggcaggcaagtggctacaggcaaagggcgcgaaaccggcggccaaaccgcaggaaacggtcgttattgatgaatcgcccagcgaaccggcagcggcgctctcttatgaaaattatgtcacgattctggacgacgttacgctggaaagctggattgaaaagctgaaaaaagcgccagtttttgctttcgacacggagaccgacagtctggataatatcgccgccaacctggtgggcctctcgtttgctatcgaacctggcgttgccgcgtatgtacctgtcgcgcatgattatctggacgctccggatcaaatctcccgccagcgtgctctggaactgctgaagccgctgctggaagatgaaaaagtgcgcaaagtggggcaaaacctcaagtacgatcgcggcgtcttgcaaaattacggtattgagctgcgcggtatcgccttcgataccatgcttgagtcttacattctgaacagcgtcgccggacgccatgatatggacagtttgtccgatcgttggctgaagcacaaaactatcacctttgaagacattgccggtaaaggtaaaaaccagctcacctttaaccagatcgcactggaggaagcggggcgctatgcggcagaagatgcggatgtcacgttacagttgcatctcaaaatgtggcctgagctccagcagcacaaaggcccgctgaatgttttcgaaaacatcgaaatgccgttggtgcctgtactgtcacgcgttgagcgcaatggcgtaaaaatcgatcctgccgtcctgcacaaacattcggaagaaatcacgctacgtctggcggaactggaaaagaaagcgcatgacattgcgggcgaggcgttcaacctgtcctcgacgaagcagttgcagaccatcctgtttgaaaagcagggtattaagccgctgaagaaaacgcctggcggcgcgccgtcaacgtcggaagaggtgctggaagagctggcgctggactatccgctgccgaaagtgattctggagtatcgtggtctggcgaagctaaaatccacctataccgataagctgccgctgatgattaacccgaaaaccgggcgcgtccatacgtcctatcatcaggcggtaacggcgacgggacgtttatcgtccaccgatccgaacctgcaaaatattccggtgcgcaatgaagaaggccgccgcattcgtcaggcatttattgcgcctgaggattatctcatcgtgtctgcggactattcacagattgagctgcgtattatggcgcatctttcccgtgataaaggactgctcacggcgttcgccgaagggaaggatattcaccgcgcaacggcggcggaagtctttggcttgccgctggatagcgtgaccggggaacagcgccgaagtgcgaaagccattaactttggcctgatttacgggatgagcgccttcggtctttctcgccagcttaatattccgcgtaaagaggcgcagaagtatatggatctctacttcgaacgctaccctggcgtgctggaatatatggagcgcacccgcgctcaggcaaaagaacaaggctatgtggaaacgctggagggacgccgcctttacctgccggatattaaatccagcaacgcggcgcggcgcgcgggggcggaacgcgcggcgatcaatgctcccatgcaaggaacggctgccgatatcatcaagcgcgccatgattgccgtcgatgcctggctacaggccgagcagccacgcgtgcggatgattatgcaggtacacgatgaattagtgttcgaggtgcataaagacgacttagatgcggtagcaaaacgtatccatcagttgatggaaaactgcacgcgtattgatgtgccgttgctggtggaagtcggtagcggagaaaattgggatcaagcgcactaa

SEQ ID NO: 370019 - DNA, 633 bp, Salmonella enterica
ttgactaacctgaattatcaacagacgcattttgtgatgagtgcgcctgatattcgccatttaccttccgattgcggaattgaagtggcttttgctggccgttccaatgcaggcaaatccagcgccctgaacacgttgaccaaccaaaaaagcctggcgcgcacctctaaaacgccgggccgtacccaattgattaacctgtttgaagtcgtagagggcaaacggttggtcgacctgccgggctatggctatgcggaagtcccggaagagatgaaacgcaagtggcaacgcgcgctgggggaatatctggagaaacgtcaaagcctacagggcttagtcgttttaatggatatccgccatccgttgaaagacctcgaccaacagatgatccagtgggctgtagagagcaatatccaggttctggttctgctgaccaaagcggacaaactggccagcggcgcgcgcaaggcgcagttgaatatggtacgtgaagccgtgctggcttttaatggcgatgtgcaggtagaagcgttttcctcgctgaaaaagcagggcgtggataagttacgtcagaagctggatagctggtttagtgaactggcaccggtcgaagagattcaggacggggaataa

SEQ ID NO: 370020 - DNA, 198 bp, Salmonella enterica
atgcacatagcgaggacgctaacaggatcaacgactcaggatgagggtcaggagcgccaggaggcgaagacacaggattgtcaggaagacaaacgtccggagacgttagtaaaaggaaatggaaacaacatggaatgttccaggctaagggaaaaacagggcgtgttgatagccaacagggatggtggaacccgttaa

SEQ ID NO: 370021 - DNA, 516 bp, Salmonella enterica
atgaaaaaaccaacctctgcaccgcgcagtaaagcctttggcaaacagcgtcgtaaaacgcgtgaagagttaaaccaggaggcgcgcgaccgtaaacgcctgaaaaaacatcgcggtcatgcgccgggaagtcgcgcggcgggcggcaattccgcttcgggcggcggcaatcagaatcaacaaaaagatccacgtattggcagtaaaacacctgttccattgggcgtgactgaaaaagtgacccaacagcataaaccgaaaagtgagaaacctatgctttcaccgcaggcggagttggatttactggaaacggatgagcgcctggatgcgctgttagaacgtctggaagcgggcgaaaccctgagtgcggaagatcaagcctgggtagatgccaaactggatcgtattgatgaactgatgcagaagcttggtctgtcttacgatgacgacgaagaagacgacgaagaggacgagaagcaggaagatatgatgcgcctgctaagaggcggcaactaa

SEQ ID NO: 370022 - DNA, 1374 bp, Salmonella enterica
atgtctgaacagcaaatagactgggatctggccctgatccagaaatataactattccgggccacgatatacctcgtacccaaccgcgctggagttttctgaagacttcgaggacgccgcattcttgcaggctgtggcgcgttatcctgagcgtccgctctcgctgtatgtgcatatcccgttttgtcacaagttgtgttatttctgcggctgcaacaagattgtcacccgccaacagcataaagctgaccagtatcttgacgcgcttgagcaggaaattcgtcatcgcgcgccgctgtttgcagaccgtcatgtcagccagcttcactggggcggcggtacgcctacttacctgaataaaacgcaaatcagccgcttaatgacgctgttgcgtgaaaatttccactttaataccgatgcggaaatctcgatcgaagtcgatcctcgtgaaattgagctggatgtgctcgatcatttacgtgcggaaggttttaaccgcctgagtatgggcgtgcaggactttaataaagaggtgcagcgcctggttaaccgcgagcaggatgaagaattcatctttgcgctgcttaatcacgcccgcgatatcggctttacctcgaccaatatcgatttgatctacggtctaccgaaacagacgccggaaagcttcgctttcacgctgaagcgtgtgacggaactgaaccccgatcgtttgagcgtctttaactatgcgcatctgccaacgctttttgccgcccagcgtaaaattaaagatgctgatttacccagcgcgcagcagaaactggatattttgcaggagacgatcgtatcgcttacccaggctggttatcagtttatcgggatggaccattttgcccgtccggacgacgaactggccgtcgcgcagcgcgaaggcgtgttgcaccgtaattttcagggctatacgacccagggcgataccgatctgctggggatgggggtttctgctatcagcatgattggcgatggctacatgcagaaccagaaagagctgaagcgttattaccagcaagtggatgagcggggcaatgcgctatggcgtggtattacgctgacccgtgatgattgcattcgtcgcgatgttatcaaggcgctgatttgtaacttccgcctggattttaacgctgtcgaacagcagtggggtttgcatttcgctgagtattttgccgaagatttgcagttactgtcgccgctggcgaaagatgggctggtggatattagcgagaagggaattcaggtgacggcgaaaggtcgtttgctgatccgcaatatctgcatgtgctttgacgcgtatctgcgccagaaagcgcggatgcagcagttctcgcgcgtcatttag

SEQ ID NO: 370023 - DNA, 1410 bp, Salmonella enterica
atgcaacgaggaatagtctgggtcgtcgatgatgatagttccatccgttgggtgcttgaacgtgctctcgccggggcagggttgacctgtaccacctttgagaatggtaatgaagtactggctgcgctggccagtaaaacgccggacgtcttgctgtcggatatccgaatgccgggaatggacgggctggcgctattaaagcagattaaacagcgtcacccgatgcttccggtcatcattatgaccgcgcattccgatttagatgccgccgtgagcgcctatcagcagggggcgtttgattatctgcctaaaccgtttgatattgatgaagccgtcgctctggtcgagcgcgcgattagccactatcaggagcagcagcagccgcgtaatatcgaggttaacggcccgacaacagacatgataggcgaagcgcccgccatgcaggatgtgtttcgcattattggtcggctgtcgcgttcttcgattagcgtgctgattaacggcgaatcagggaccggtaaagaactggtcgcccatgcgcttcaccgccatagcccacgcgccaaagcgccgtttatcgcgctcaatatggcggccatcccgaaagatttgattgaatccgaactgtttggccatgagaaaggcgcttttaccggggcgaataccatccggcagggccgtttcgagcaggctgacggcggcacgctgtttctggacgaaattggcgatatgccgctggatgtccagactcgtctgttacgcgtgctggctgacggacagttctaccgcgtgggcgggtacgcgccggtaaaagtggatgtgcgcattatcgccgccacccaccagaacctcgaacgacgcgttcaggaagggaaattccgcgaagacctgttccaccgcctgaacgtgattcgtatccatcttccgccgttgcgcgagcgccgtgaggatattccgcgcctggcgcgccattttttgcaggtcgccgcccgtgaattaggtgtggaagccaaattattacatccggaaaccgaaacggcgttaacgcgcctggcatggcctggtaacgtgcgtcagttagaaaatacctgccgctggctcaccgtcatggccgccggacaggaggtattgatccaggatttaccgggcgaactgtttgaagcctcgacgccggatagcccgtcccacctgccgccggatagctgggctacattactggcacaatgggcggaccgcgccttgcgatccggtcatcaaaacctgctttctgaagcgcagccagaactggagagaacgctactgaccacggcattacgccatacgcagggtcataaacaggaagccgccaggctgctcggttgggggcgaaacaccctaacgcggaagttgaaagagctgggaatggagtaa

SEQ ID NO: 370024 - DNA, 1050 bp, Salmonella enterica
atggcaagcggcatacagcccgatgctgggcagatcctcaattcgttaatcaacagcgtgctggtggtcgacgacgcgctggcaatccattacgccaaccctgccgcgcagcagttgctcgcgcaaagctcacgcaaactgttcgggacgccgttacctgaactgttgagctatttttcgttaaacattgacctgatgcgcgaaagtttagcggcagggcaaggctttaccgataacgaagtgacgctggtgattgatagtcgctcgcatattctctctttgaccgcccaacgtctgcccgacgattttatactgctcgaaatggcgccgatggataaccagcgtcgtctgagtcaggagcagttgcagcacgcgcagcaaatcgccgcccgcgatctggtgcgcggtctggcacacgaaatcaaaaatccgctcggcggcctgcgcggcgcggcgcagctactcagcaaggcgctgcccgacccggcgctaacggaatataccaaagtcatcattgaacaggccgacaggctacgcaaccttgtcgatcgtttgctggggccgcagcacccgggaatgcacattaccgagagcatacataaagtcgcggagcgcgtggtggcgctggtgtcgatggaactgccggataatgtccggcttatccgcgattacgaccccagtctgccagaactgccgcatgacccggaacaaattgagcaagtactgctgaatattgtccgcaatgccttgcaggcgctggggccggatggcggcgaaattacgctgcgtacccgtaccgccttccagttaacgctgcatggcgaacgctatcgcctggcggcgcgtatagacgttgaagacaatgggccgggcattcctccccatttacaggatacgctgttctacccgatggtcagcggtcgcgaaggcggcaccgggcttgggttatctatcgcccgcaatcttatcgatcaacacgccggcaaaattgaatttaccagttggccggggcataccgagttttcggtttacctgccgattcggaaatag

SEQ ID NO: 370025 - DNA, 1410 bp, Salmonella enterica
atgtccgctgaacacgttttgacgatgctgaacgagcacgaagtgaagtttgtcgatctgcgcttcaccgataccaaaggcaaagaacagcacgtcacgattcctgctcatcaggtaaatgccgaattctttgaagaaggcaaaatgtttgacggctcctctatcggcggctggaaaggcattaacgaatccgacatggtgctgatgccagacgcatccaccgcagtgattgacccgttcttcgcggactctaccctgattatccgttgcgacatcctggagcctggcactctgcaaggttatgaccgtgacccacgttccatcgcaaaacgtgcggaagactacctgcgcgcgaccggtatcgccgataccgtcctgtttgggccggaacctgaattcttcctgttcgatgacatccgcttcggcgcatctatctccggctcacatgtggcgattgacgatattgaaggcgcctggaactcctctaccaaatatgaaggcggcaacaaaggccatcgtccgggcgtgaaaggcggttatttcccggttccgccagttgactccgcgcaggatatccgttctgaaatgtgtctggtcatggagcagatgggcctggtcgttgaagcgcaccaccacgaagtagcgaccgcaggtcagaacgaagtggcgacccgctttaacaccatgaccaaaaaagccgacgaaattcagatttacaaatatgtcgtacataacgtggctcaccgcttcggtaagaccgcgacctttatgccaaaaccgatgttcggcgataacggttctggtatgcactgccacatgtcgctggcgaagaacggcaccaacctgttctctggcgacaaatatgccggtctgtctgagcaggcgctgtactacatcggcggcgtcatcaaacacgccaaagccatcaacgccctggcgaacccgaccaccaactcctacaagcgtctggtcccgggttacgaagcgccggtgatgctggcctactccgcccgtaaccgttccgcctccatccgtattccggtggtggcgtctccgaaagcgcgccgtatcgaagtgcgtttcccggacccggcggctaacccgtatctgtgctttgccgccctgctgatggccggtctggacgggattaagaataagattcacccgggcgaagccatggacaaaaacctgtatgatctgccgccggaagaagcgaaagagatcccacaggtagcgggttctctggaagaagcgctgaacgcgctggatctggaccgcgagttcctgaaagcaggcggcgtgttcacggatgaagcgatcgatgcgtatattgcgctgcgtcgcgaagaagatgaccgcgtgcgtatgaccccgcacccggtagagtttgagctgtactacagcgtttaa

SEQ ID NO: 370026 - DNA, 1824 bp, Salmonella enterica
gtgatcgaaaatttgcgtaacatcgccatcatcgcgcacgttgaccatggtaaaactaccctggttgataagctgctccagcaatccggtacgttcgacgcgcgtgccgaaactcaagagcgagtgatggactccaacgatttggagaaagagcgtggtattactatcctcgctaaaaacaccgctattaaatggaatgattaccgtatcaacatcgttgatactcccgggcacgctgacttcggtggtgaagtagagcgcgtcatgtccatggttgactctgtgctgctggtggttgacgcatttgacggcccgatgccgcaaacgcgcttcgtgaccaaaaaagcctttgctcatggcctgaaacctattgtggttatcaacaaggttgaccgtcctggcgcgcgccctgactgggttgttgaccaggtattcgacctgtttgttaacctcgacgcgaccgacgaacagctggacttcccgatcatctacgcttcggcgctgaacggtatcgcgggtctggaccacgaagatatggcggaagacatgaccccgctgtatcaggcgatcgttgatcatgttccggcgccggacgttgacctcgatggtccgttgcagatgcagatctcccagctggactacaacaactatgttggcgttatcggcattggccgtatcaaacgcggcaaagtgaagccgaaccagcaggtcactatcatcgatagtgaagggaaaacccgtaacgcgaaagtaggtaaagtgctgacgcatctgggtctggagcgtatcgacagcgatatcgccgaagcgggcgatatcattgcgatcaccggtctgggcgagctgaacatttccgacaccatctgcgacccgcagaacgttgaagcgctgccggcgttgtccgttgatgagccgaccgtgtctatgttcttctgcgttaacacctcgccgttctgcggtaaagaaggtaagtttgtgacttctcgtcagattcttgaccgtctgaacaaagagctggtgcataacgtggcgctgcgcgttgaagaaaccgaagatgcggatgcgttccgtgtatccggtcgtggcgaactgcacctgtccgtgctgattgaaaatatgcgtcgtgaaggtttcgaactggcggtttcccgtccgaaagttatcttccgtgaaatcgacggtcgtaaacaagagccgtacgaaaacgtgacgctggacgtcgaagagcagcaccaggggtctgtcatgcaggcgctgggcgagcgtaaaggcgacctgaaaaacatgaatccggacggtaaaggccgcgtacgtctcgactacgtgatcccaagccgtgggctgattggtttccgttcagaattcatgaccatgacttccggtacgggtctgctgtactccaccttcagccattacgacgatattcgtccgggtgaagtgggtcagcgtcagaacggcgtactgatctctaacggtcagggtaaagcggtggcgtttgcgctgttcggtttgcaggatcgcggtaagctgttcctgggtcacggcgcggaagtttatgaaggccagattattggtattcacagtcgctccaacgacctgacggtaaactgcctgaccggtaagaagctgaccaacatgcgtgcgtctggtacggatgaagcggtgattctggttccgccaattaaaatgagccttgagcaagcgctggagttcattgatgacgacgaactggtagaagtcaccccgacctctatccgtatccgtaaacgtcacctgacggaaaacgatcgccgccgtgcgaaccgtggtcagaaagaagagtaa

SEQ ID NO: 370027 - DNA, 735 bp, Salmonella enterica
atgcgatatcgtttaatcgcttttgatcttgatggaacgctgctaaaccgtaataaacaaattctgccagagtcgctaaccgccatccgtcagatgcaagacatgggctgccgaataatgcttgtcaccggccgctctcatcgtgaagcctatgcgtattatcaaacgctggcgctcaccgaaccgatgatctgttgtaacggaagttatatttatcaaccggctcaacagcagatccttcatccactgccgctgacgcacttacaaacggaaaaaatactggcgcgggtatatccgcttaaaccgacaattcgtgctgatgataaaataatctttcaggctgatgagctaagcagtagggagaatatttggcaaatcagcgtcgttcatcggcacataaaacaactacaaaatattgctgagtttatacagcatgaattacagctaagctgtacctggtcctggcatcatcaactggatattctccagaaggggtgtagcaaagggcaaagcctcgccagatatgcacagcaacagcatatcgcaatgcgcgaagtgatggcgtttggcgataatgataacgatgcggaaatgctacgtttagccggattgggcgtagcgatggggaatgccagcgcccgggcaaaggtttatgcggacagcgtcattggtcggcataatacgccagcaattgctgattttttggcaaccttatccctttctcaacgtgaataa

SEQ ID NO: 370028 - DNA, 879 bp, Salmonella enterica
atgagcgcccccgccctgcgcgatattcacacgctgttttatcgcggctatcttaaatcgtgtaattatcattgcggctattgcccgttccataaacacgcccgcaacgataaaaaacgcgacgaagccgcgctatggcgcatggttgaccatttgcctcttttaggtacgccgttgaatgtgatgattacgccttatggcgaggcgctacgcttgcgttattacatggcggcgttggcagaaattagccgctatcctcatgttcaggcggtcggcatacaaactaacgcctctttttcgttaatgtcattgctggaatcatttcgtgccggcggcggagatatctcaaagcttcggttatggtgttcttttcatccctcacaaattaccgctgagcgctttctccagcagtgtttagcgctctctgccgccggaataacctggtgcgcgggggctgtcgccagtatgaaagatatcgcccagtttcgttggctacgccagcagttgcctgaccagaattatttttggtttaacgccaacgagtgtgccaatacccggcataccgttgaggaaaccatcgccttcagcgaactcgatccgctgtatgtggttgaaacgcagcagtggccagcgcagctggatatctgtaccgcaggaagaaaaagtatttttatgaatgcagaaggcgatctttttgcttgtcatatcagcaaaattaaaatgggtaatttatatcagcaacggcttaattctcccgcctgccaggcaaaacaatgccactgttttctcgcttatcagcaccgtctcgatattccattgctgaatcacctggatacctcacgctgttttaggatcgggcgctcatgcgatatcgtttaa

SEQ ID NO: 370029 - DNA, 1242 bp, Salmonella enterica
atgaataacaatgatatttatcgtcagtatatgtacagttatccgcataagacggcttatcgggaggtggagaacgtcagctttagcgaagtaaaaccgcggatttacgagcacgacacacatctgtatgttcatatgcccttttgtcaaagtcgctgcgggttctgtaatttatttacctgcactggcgcagataatacgttcattgatagctatatcgacgcgattattacccagggccgacaaatggcgctggcgcccgcccactgggcaagctttaccgtaggcggcggcacacctctgctattaaatattgcgcaattagagaagttatttttttccgtctttgatgtgctcaatgttgactggaatatttataaaacgattgaaacttcccctacggataccacggcagaaaaagtagcgctattaaacgccttttccgttaatcgcgtcagtattggcgtacaaagttttcatgatagcgagttacatacgctgcaccgccgccacaatgccgccagcgcgcaccaggcgctggaatggctaaaggcgggtcattttccatcactcaatattgatattatttatggcattcccggccagactcacgcaagcctgacggaatcgttacatcaggcgctcgtttatcaaccggaagagctgttcctttatccgctttataatatgcctcgccaggaaaatatgcatagctactacgttttagcccgcgatcttttacgcaacgcgggctacacccaaacgtccatgcgccgtttcgtccttaatccagcgccatccgccgcggcggaaagctgcggatttgaaaactcactggcgctcggcgcgggcggcagaagttatcttggcaatctgcattactgttcaccgtggtcgtcgaacctgcaaacatcacgaaaaatcattcaggcgtttatcgacagcccggataaaaccgtcattaatcacggttatctgcttccccctgatgaaatgaaacgccgctttatcattaaaaatctatttttctggcagggactttctcttagcgattatcagcaatattttgccagcgatgcgctaagggatttccccgaccttgaacgcttcatacggcagggttactgctatcagaatggcagtcgcctccggctaacggagaccggtatggcattatccgattgccttgctcctgtgttcgtttcgcctgaggtgatgctacgggagaatcggcagagatga

SEQ ID NO: 370030 - DNA, 876 bp, Salmonella enterica
atgtataattcaatggatgaagtccccgtctcgctgcacgcgtcgattgacacaggcgatggcgaattcgatatgaatacgctaattagtaataacgctcatattctttttattgtgctggactcgttacgctacgatattgcgcttcaggaacaaaccgccggaaatacgcccaaccttaatcattatggacaatggacgaaatgcgaggcggccggtaattttacctggccttcgcatcacgccatgttttcaggttttatgccaaaacctattgatgataccgttaatcagaccatgctgtttttcccaaaagatatcggacttggtcgtaaagggccgaaaaatgcatttgcctttgatgacgcaacatggataaaaagtctggaaaataaaggctaccagaccatctgtattggcggcgtctctttctttaataaccgctccggcatgggaaaagtgttcccgtcgatgtttaaagagagttactggcatccacgatttgcctgtacggttaaagaaagtatggataaccagatccattatatccagaaaatcatggccgagcgtgctggcagccaaccggtcatgatgtatatcaatatcgacacgattcattaccctaaccatttttacgttgagggcgcggcccctggcgataccgttgagacccatgccgccgcgctacgctatatcgacgcccgcatcgacggattactaaacattttccgccaaaccggcggcgaaacgttcgttattgtctgctccgatcacggtacctgctatggcgaagacgggaaatatttccatagttttaatcatccgatcgttaataccgttccctatatgcatttcttgctgagctgtaatcattaa

SEQ ID NO: 370031 - DNA, 987 bp, Salmonella enterica
gtgattacgctcattggcccccgtcagagcaagcgcacgcattattttatgcaggctgccgccgtacttggggaacccgtcacggcgctgactcatccgcaagcgctggacgcttcgctgacctctggcatcgttaaaatcgacccgccagtacacagtgaaacagacatccgcaaaataaacgcgatcggtctggactatatccattttttgcagaacatggcggcgcgtcctggcgtcacctggcttaaccatccggcgggcctcattcacctgttggataaaaaactctgcaagcggcgcttactggaacacggcatccccacgccgccgttggtagcggaagacgtaaaaagttttgtacagctcaccgccatcatggaggaaaaaagggtcgccagcgtgttcattaagccctcgctgggttctggcgcggcgggcgttatcgctttgcgccgccaccctgatggcataaagcaggtgctttacagcgcgattgccatatcaggacaacagctatttaacagcaaaaaaatccaacagtatcgtcagaaagaagatatccagctcattattgatggcgttcttcagcaggaaaacctcgtcgaacagtggctgcccaaagccaacgtaaagcataaaacctatgatttacgcatcgtctgcctggatggcgaaattatctggcgagtggtcagaacctcctcgcagcccattactaacttacatctgcaaaaccaggcttactgcttcgaaagtctggagttatctgccgcaaaagtgactgagatcgatacgctctgtcaaaatgccatgcggcttttccctggcattcgcttagcgggtattgatgttttacttactaccagcctgacgccgtatgttattgaaattaatggccagggtgatttgatttatcaggatgcgcagcagaataatctaatttatcaggcgcaaatccgggccatgaggaagcaaaatgtataa

SEQ ID NO: 370032 - DNA, 849 bp, Salmonella enterica
atgaataagcgatttaatattgattgggacaatgaattaacccaggaacagctcattaatttgattttaaccgatgaagatctgccaaagcttcgctcactgaccattggtaactggggtgattgttgggaagacgaaacctgccagcctattattgatatgattgtggagaacgcctcccgctttactcacctggaatcactgtttatcggtgatatggagagcgaagactgcgagatctcctggattaaacaaggtgactattccaggctctatgcggcgttacccaatctgaaagaactgattattaaaggcgcgtcggatctgcgactgggcgctatacatcatgagaaactggagcacctggaaatcatttccggcggcatcccttctaacgtacttgccgaactacaaaatgcgcagctccctgcattaaaaacgctgaagctcttcctgggcgtagaggaatacggttttgacggttcgctggatgacgtgatggcactggcatcgaaagaccttttccctcagctcacccatctggggttgatgaacagcgaagagcaggatgatatcgcccgccgggtgctggaaagtaatatcctgccgcagcttaacgtgctggaactctcatgcggtaccttaacggacaacggcgcagaggcgctgctggagcataaagaccgaattgcgcatctggaaacactcgatctccaccaccactatttgacgccggagatgcaggaaaagctaaaagccacactgccgataaacctgaatctttcagaagctctggagcctgatgattacgatggcgatatttatatgaatgcgatgtacaccgagtga

SEQ ID NO: 370033 - DNA, 693 bp, Salmonella enterica
atgaaatctctgaatactctagtgatattaacttcagtaatatccacctctgtttttgctggcgcttatgtagaaaaccgtgaggcctataacctggcgtctgaccaaatggagtttatgctgcgcgtcggctataactccgatatgggggccggaattatgttgaccaatacctatacgctacagcgtgatgatgaattaaagcacggttataatgagattgagggctggtatccattatttaaacctacagataaattaaccatccagcctggggggttaataaacgacaaaagcattggttccggcggcgccgtctatctggatgttaactataaatttaccccgtggtttaatcttacggtacgtaaccgatataatcacaataattatagttcaaccgatttgaatggcgaactggataataatgacagctatgaaatcggtaactattggaattttatcattaccgataaattttcttatacctttgaaccacactatttttataacgttaatgattttaatagtagtaatggtacgaagcatcattgggaaatcactaataccttccgttatcgtatcaatgaacactggttgccctactttgaattacgctggttagatcgtaacgtgggtccctaccatagagagcaaaaccagattcgtatcggggcgaagtatttcttctga

SEQ ID NO: 370034 - DNA, 597 bp, Salmonella enterica
atggatgggtttttcagcatgggctgtatcctgattggtgttttattagtacctgctgcggtaaaacgcttcgggaaaaaacaggtttatcttggtggtctgatattgtgggccgttggcgatatcctgaattttatctggggtggaacgtcattcctgtttgttattttctcttgtatcgccttcttcggtaccgctttcgtcaacagcctgaactgggcactggttccggatacggttgactacggtgaatggaaaacgggtattcgcgctgaaggctcggtgtatacgggttataccttttcccgcaaaatttccgctgcgcttgctggctttttgccaggtattatgctgacgcaaatcggttatatccccaacatagctcaaagtgacaccacgttgcttggtttgcgtcagctcatttttttatggccttgcggtcttgccattatcgcagcactaacgatgggctttttttataagctcaatgaacaacgtttcgcttttattatcgaggaaattgcccaacgaaagaaaacaggtaatcaaattgtcgcgactaataataaacaaagtatttctactgtaaataattaa

SEQ ID NO: 370035 - DNA, 858 bp, Salmonella enterica
atgtctaatcatgatccgctaacgctaaagttgagcctgcgggaaaaatgcgcctatggcgtgggcgatttcggctcaaatctgatgctgtgtatcggtacgctgtatctactgaagttttataccgatgaactcgggatgcctgcatattacggtggaattatctttctggtggcgaaattcttcaccgcttttaccgatatgctcaccggcgtattgctggactcacgccgtaatattggcacaaaaggaaagtttcggccttttattctgtatgcgtcatttccagtcgctctggttgctactgcgcaattctttgccactcactttactttacccgttaaaacagccttcgcgacggtgctgtttatgttgttcggtctgttctacagcctgatgaactgctcatacggcgcgatggtacccgctattaccaaaaatccgcatgagcgggcccagctcgccgcatggcgacaaggcggcgctaccattggccttcttctttgtaccgtaggttttatgcccattcaggcgctgtttacccgttccccttcgctgggttatctgattgcagcagtcatcttttcggtctgcgggctgttcagcatgtggtggtgctttagcggggtgaaagaacggtatatcgaaaccgtacctgacacgcataaacccagcatattgaagtccttctgcgcgatttttcgtaatccgccgctgctggtgctctgcgttgccaatttgtgcacgctggccgcctttaatatcaagctggccattcaggtttattacactcagtacgtgctgaacgatattcatttgttgtcatggatgggtttttcagcatgggctgtatcctga

SEQ ID NO: 370036 - DNA, 1383 bp, Salmonella enterica
atgagtcaaacatcatcgaatccggcaaccctacgcttgccgtttaaagaaaaacttgcctatggactgggggatttaggttccaatatcctgttagatatcgggaccctctatttactcaagttttataccgatgtccttggtttaccgggaacttatggcggtatcattttcctgatcgccaaattttttaccgcatttaccgatatgggtaccggcattatgctcgactcgcggcgtaaaattggtccgaagggcaaattccgcccgttcgtgctttacgcggcatttccggtaacgctactggcgattgctaactttgtcggcacaccgtttgaggtgacgggaaaaaccgtcgtcgcaacgatgctgtttatgctgtacgggctggttttcagcatgatgaactgctcgtatggcgcgatggtacccgcgattaccaagaacccggatgaacgcgcctcgcttgccgcctggcgtcagggcggcgccactctcggcctgctgctgtgtaccgttggctttgtgccggtcatgaacctgatcgaaggcaatgcccaactcagctatattttcgccgccacgctattttcattgtttggcctgctatttatgtggctgtgctacgccggcgttaaagagcgctacgtcgaagtgaaacctgtcgatagcgcgcaaaagcctggattattgcagtcgttccgcgccatcgccggtaaccgtccgctgtttattctgtgtatcgccaacctttgtactcttggcgccttcaacgtcaaactggcgattcaggtttattacacccagtacgttcttaacgacccgatcctcctctcctggatgggcttctttagcatgggctgtatttttatcggcgtttttttgatgcccggcgctgtaaggcgttttggcaagaagaaagtctatatcggcgggctgttaatatgggtggcaggcgatctgctcaactacttctttggcggcggctcggtcagttttgtcgccttctcctgcctggcgttcttcggttccgccttcgtcaacagcctgaactgggcgctggtttccgacacggtggagtacggtgaatggcgcaccggcgtccgctcggaagggacggtttacaccggcttcacgttcttccgtaaggtctcccaggcgctggcagggttcttccccggctggatgctaacgcaaatcggttatatcccgaatgtggtgcaatcggcaggcaccgtcgaaggcctacgccagttgatctttatttatccttgcgtgctggcggtcatcaccattattgcgatgggctgtttctacaacctcaacgagaagatgtacgtgcgaattgtggaagagattgaggcccggaaacatacggtttaa

SEQ ID NO: 370037 - DNA, 2037 bp, Salmonella enterica
atgaattctctaccacaacggtcaaccgattttgaactgacaacatcacaggatggttttgcgcttagctggcaacagcgcctgattttacgccacagcaccgaaaatccctgtctgtggattggcgcgggcgttgccgacattgacatgtttcgcggcaacttcagcatcaaagacaaacttaacgaaaagattgcattaacggaggccaccgtcagcgagctacccgacggctggctggtacaattcagccgtggcgcaacaattagcgccacccttcgcatctccgccgatgaggcgggacgcctgaagctggatctgcaaaacgacgacctgcaccataaccgtatctggttacgcctcgcagctaatccagacgaccatatctacggctgcggcgaacagttctcttatttcgatttgcgcggcaagccgttcccgctgtggaccagcgaacagggcgttggccgtaataaaaccagctatgtcacctggcaggcagactgtaaagagaacgccggcggcgactattactggaccttcttcccgcaaccgacctttgtcagcacgcagaagtattactgccacgtcgataatagctgctatatgaatttcgacttcagcgcgccggagtatcacgaactggcgctgtgggaagataaaactacgctacgttttgagtgtgccgacacctacatcgccctgctggaaaaactgactgcgctgttaggtcgccagccggagctgccggactgggtttacgacggcgtcacgctaggcattcagggcggtacggaagtttgccagcaaaaactggataccatgcgcaacgcaggcgtaaaagtgaacggtatttgggcgcaggactggtccggcattcgcatgacctcctttggcaaacgcgtgatgtggaactggaagtggaatagcgacaactatccacagctggatagccgtatcaaacagtggaaagaagaaggcgtccagttcctctcttatatcaacccatacgtcgccagtgataaagacctctgcgccgaggcggcgaaacacggctacctggcgaaagacgccacgggcggcgactatctggtcgagtttggcgaattctatggcggcgtggtcgatctgaccaatcctgaagcttacgactggttcaaagacgtcatcaaaaagaacatgatcgcgctcggctgcagcggctggatggcggatttcggcgaatacctgccaaccgacacttacctgcacaacggcgtcagtgccgaaattatgcataacgcgtggcccgcactgtgggcgaaatgtaactacgaagcgctacaggagaccggcaagctcggcgagatcctgttctttatgcgtgcgggctacaccggcagtcagaagtactccaccatgatgtgggcaggcgatcaaaacgttgactggagccttgatgatggactggcctcggtcgttcctgccgcactgtcgctggcaatgaccggtcacggtctgcaccacagcgatatcggcggttacaccacgttgtttgacatgaaacgcagcaaagagctgttgctgcgctggtgtgatttcagtgccttcaccccaatgatgcgcacccatgaaggcaaccgccctggcgataactggcagtttgatggcgatgaggaaaccattgcccactttgcccgtatgaccaccgtctttaccacgctgaaaccgtatctcaagcaggcggtggcgcaaaacgcggataccggtctgccggtcatgcgtccgctattcctgcactacgagaacgatgccgcaacctacaccctgaaatatcaatatctgctcggtcaggatctgctggtcgcgccggttcacgagcaggggcgttgcgactggacgctgtacctgccggaagatcactgggtgaatatctggaccggtgaagttcaccacggcggtgaaattaccgtggatgcgcccattggcaaaccgccggtcttctatcgcgcgaagagcgagtgggcttcactttttgcttctttacggaatatctaa

SEQ ID NO: 370038 - DNA, 843 bp, Salmonella enterica
atgcatagcggtggaaaaactattcagcttaatgcgggccattaccaggcgaaaatcgtcacggttggcgcaggtctggcggaactgactcatcatggacgtcatgtggtcatcccgcataaaccggaagaaatacccatggcgcatctggggaaagtattgattccctggccaaatcgcgtgacaaatggctgctactcctataacggcaaagttttccagcttgccgttaacgacccggtttcgcagaccgccattcacggtctgttagcctggcgagactggcagattaattatcagtcgacgacggaagcgtcgctaacgatttttctgccgccctcttacggctatccctttgcgttgatatcggaagtgatttatcggttagatgccgccagtgggctgcacgtattgattcgtacgcaaaacattggcgatgaatcagccccttatggcgcgggcgcacatccttatttgacttgtaacctgcaaagcatcgatagctgtgtattaacactgccggcaagcgaagaattgcccgcaggcagagatttttccgcatcatgcctgctcggcgaaacgcgccttgatcatgcggttaagaccgcgactaccccggctgagtgggaggtcagacttaccagcccaacgcagaacatgtccacatttttacgcagcacccagccctggttgcagatctataccggcgaaaaactcagccgaaaaggtctcgcggtagagcctatgagctgcccgcccgatgcatttaattccgggatcgcactgattcatcttgccccaaaagcgatccatcaactgcatttttccatcggctgcgactag

SEQ ID NO: 370039 - DNA, 1242 bp, Salmonella enterica
atgaaatggtttaacacgttgagccacaaccactggctggagcaggaaaccgaccgcatctttaatttcggtaaaaacgccgtggtgccgacaggcttcggctggctgggaaataaagggcaaattaaagaagagatgggcacccatctttggatcacggcgcgtatgttgcacgtttattccgtggcggcgtcgatgggccgaccgggcgcttatgatctggtcgatcatggcatcaaagccatgaacggcgcgctgcgcgataaaaaatacggcggctggtatgcctgcgttaacgatcagggcgtggtggatgcctctaaacagggttatcaacacttcttcgccttgctgggcgcggccagcgccgtcacgaccgggcatcctgaagccaggaaattgctggattacaccatagaagtgattgagaaatacttctggagtgaagaagagcagatgtgcctggagtcctgggacgaagccttcagccagacggaagattaccgtggcggtaacgccaatatgcacgccgtcgaagcgttcctgattgtttatgacgttacccatgacaaaaaatggctggatcgcgcgctgcgtatcgcgtcggtaattattcatgatgtggcgcgcaacggtgattaccgcgtcaatgagcacttcgattcacagtggaaccctatccgcgactacaacaaagataatcctgcccaccgtttccgcgcctacggcggtacgccaggtcactggattgaatggggccgtctgatgctccatctccatgctgcgctggaggcccgcttcgaaacgccacccgcctggctgctggaagacgcgaaaggtctgttccatgccactatccgcgacgcctgggcgccagatggcgcagacggttttgtctactcagtcgactgggacggtaaacctatcgtacgtgaacgcgtgcgctggccgattgtggaagcgatgggtacggcctacgccctccacaccctgacgggcgatagccagcatgaagagtggtatcagaaatggtgggactactgcattaagtacctgatggactatgaaaatggttcctggtggcaagagctggacgccgataacaaagtgaccaccaaagtgtgggacggcaagcaagatatttaccatctgctgcactgtctggtcattcctcgtctgccactggcgccgggcctggctccggcggtcgcggcgggtctcctggatatcaacgcgaaatag

SEQ ID NO: 370040 - DNA, 879 bp, Salmonella enterica
atgaacaactacaccatcaaagacattacgcgagcgtccggcgggtttgccatgctggctgtcgatcagcgcgaggcgatgcgtttaatgtttgctgctgctggtgcgaaaacacccgttgccgatagcgtgctgacggatttcaaagtgaatgcggcgaaaattctttccccgtatgcctctgccgttctgctggatcagcagttctgttatcgccaggccgtagaacaaaacgcggtcgctaaaagctgcgccatgatcgtcgcggcggatgatttcatcccgggcaacggtattcccgttgataacgtggtcattgataaaaaaattaatgcgcaggcggtaaaacgggatggcgcgaaagccttaaaactgttggtgctgtggcgcagcgatgaagacgcgcagcagcgtctggatatggtcaaagaattcaatgaattatgtcactccaatggtttgctgagcattatcgaaccggttgttcgtccgccgcgctgcggcgacaagttcgatcgcgagcaggcgattatcgatgcggccaaagagctgggcgacagcggcgccgatctttacaaagttgaaatgccgctctacggcaaaggcgcgcgttccgatcttcttaccgcctcacaacgcctgaatgggcatatcaatatgccgtgggtcatcctctcttccggtgtggacgaaaaactgttccctcgcgcggtcagggtcgccatggaagctggcgcatccgggttcctggcgggacgcgcggtctggtcatcagtgattggtctaccggataccgagctgatgctacgtgatgtttccgcgcctaagttgcaacgtctgggcgagatcgtcgatgaaatgatggcgaaacgtcgttaa

SEQ ID NO: 370041 - DNA, 897 bp, Salmonella enterica
atggcagttatagcatttatcgggttgggacagatgggctcccctatggcgagcaatctgctaaagcagggccatcaactcagcgtcttcgatgttaatcccgacgccgtacagcgtctggtagacaaaggcgcgcaacctgcaagcagcccggctcaggcaaccatcggcgctgaatttgttatcaccatgctcccgaacggcgatctggttcgttccgttttgtttggcgagcaaggcgtttgtgaaactctttcccatgaagcgctggtcattgatatgtccactattcatccgttgcaaaccgataagctgattgccgacatgcagagcaaagggttcagcatgatggatgtgccggtaggccggacatccgacaacgcgattaccggcacattgttgctgctggcaggcggtacggcggagcaagtagagcgtgctacccctgttctgatggcgatgggtaatgagctggtcaacaccggcggcccgggaatgggtattcgcttaaaactgatcaacaactacatgagtattgcgctaaatgcgctctccgccgaagccgccgtgctgtgtgaagcgctggggctttccttcgacgtggctttaaaagtgatgagcggcactgccgcaggcaaagggcatttcaccaccacctggccgaataaagtgatgaaaggagatctgtctcccgccttcatgatcgatctggcgcacaaagatcttggcatcgcgttggatgtcgccaatcaactgcacgtaccgatgccgctcggcgccgcctcccgtgaagtttataacctggcgcgggccgcaggccgcggtcgggaagactggagcgccatcctggaacaggtgcgcatcagcgccgggctgaccgccaacgtaaaaaagtaa

SEQ ID NO: 370042 - DNA, 897 bp, Salmonella enterica
atggttcgtattgcttgtgtaggtattaccgtgatggatcgcatctattacgtggaaggattaccgacagaagggggtaaatatgtggcgaagcgctatacggaagtgggcggcgggcctgcggcgaccgctgccgtggctgcggcgaaattgggcgcgcaggtggactttattggccgtgtgggcgatgacgacaccggaaacagcctgctggcggaactggaatccctgggggtaaatacccgctatacccgccgctacacgcaggccatgtcctcgcagtcagcgattatggtggatgccaaaggagagcggattatcgttaattatcccagcccggatttattacctgacgccgactggcttaacgacatcgatttttcgcagtgggatgtggtgttggcggatgtgcgctggcatgacggcgcaaaacaggcgtttacgctggcgcgtcaggctggcgtcatgactgttcttgatggcgatattacgccgcaggatattagcgagctggtggcgttaagcgaccacgccgccttctccgagccagggctggcacgcctgacggggatgagcgaagccattgatgcgctaaaaaaagcacaaatgctcacaaatggacatgtctatgtcacgcgaggcagcgaaggctgcaactggttggaaaaagcggcggtacgccaccaaccgggttttaccgtggaggtggtggatactactggcgcgggcgatgtttttcatggcgcactggcatttggcctggcaagcggatacgccatcgaagaggctgtcagattcgccagcggcgttgccgcgctgaagtgtacgcgcccgggtggccgggcgggtatccctgattgtgagcaaacccgatctttcttgtcactttttgtataa

SEQ ID NO: 370043 - DNA, 804 bp, Salmonella enterica
atgagtcttaccgaactgaccggtaatccgcgacacgatcggctgttaatgctaattgatgaacgcggctatatgaatatcgatgagttagccagtttgttggaggtctctacccagacggttcgccgcgatattcgtaaattaagcgagcaggggctgattacgcgtcatcacggcggcgctggcagagcgtccagtgtggtcaataccgcctttgagcagcgagaggtctcctggacgcaagagaaaaaagccattgcggaagccgtggctgactatattccggatggctccacgatatttatcacgattggaacgacggttgagcaggtggcgcgcgcgctgctcaaccataatcatctgcgcattatcaccaatagcctgcgcgtcgcgcacattctttataataaccctcgctttgaagtgatggtgcctggcggcacgctgcgcccgcataatagcggcattatcgggccatccgcggcggcgtttgtggcggggttccgggcggactatctcgtcaccagcgtaggcgcgatagagagcgatggcgcgttactggagtttgatgtcaacgaagccagcgtagtgaaaaccatgatggcccactcgcgacatattctgctggccgccgatcatacgaaataccatgcttctgcggcggttgagatcggcaatgtgtcacagattaccgctctgtttacggacgagtatcccggtccggcattacagaatttacttcaatcccagcaaatcgaagtggttcaggtgagtccttcgctggacgacgccgtttcagcgtga

SEQ ID NO: 370044 - DNA, 600 bp, Salmonella enterica
atgctctacatctttgatttaggtaatgtgattgtcgacatcgactttaaccgcgtattaggtgtgtggagcgacctgagtcgagtaccgctggcttcgctgaagcaaaaatttacgatgggcgagacttttcaccaacatgaacgcggtgagataacggacgaagcgtttgctgaagctttctgtcatgaaatggcgttatcgctcagttatgaacaatttgcgcacggctggcaggcggtatttgtcggattacggcccgaagtgattgctatcatgcataaactgcgcgagcaggggcatcgcgtggtggtgctatccaatactaaccgactgcatacccacttctggccggaagaatatccggaggtgcgcgctgccgccgaccatatttatttatcccaggatttgggaatgcgtaagccggaagcgcgtatttatcagcacgtcctgcagaaagaaggtttttctgctgccgatgcggtctttttcgacgacaatgccgataatatagaaggggccaaccagttggggatcaccagcattctggtgaaggataaagccaccatccctgactatttcgcgaagctgttatgctaa

SEQ ID NO: 370045 - DNA, 780 bp, Salmonella enterica
atgacgactctggcgggaaatctcgcttatgtctcattactctccttagtaccgcttattgccgtcgtttttgcccttttcgctgcttttccgatgttttctgatgtcagcattcagttacgccattttatttttgctaactttatgccagccaccggagacgtgattcagcgctatattgagcagtttgtcgctaactccaacaaaatgacggcggtgggtgcctgtggactgattgtgacggcattgctgttgatgtacgccattgatagcgccttaaacactatctggcgcagcaaacgcacacggccaaaagtgtactcttttgcggtgtactggatgatcctcacgctcggcccgcttctcgccggtgccagcctggcgatcagctcctacctgctttctttacgctgggccagcgatctgaatacggtcatcgacaatgtattgcgcatccttccgctgctgctctcgtggatctcattctggttactttacagtattgtcccaacaactcgcgtaccgaaccgtgacgcccttgtcggcgcgtttgtcgcagcgttgctgttcgaggccggaaagaaaggtttcgcgctttatatcaccatgttcccgtcatatcagctcatttatggcgtactggcagtgatccctatcctgtttgtctgggtatactggacctggtgtatagtcttgcttggcgcagaaataactgtcactctcggggaataccgaaaactcaaacaagccgcagaacaagaagaagctgaccaaccatga

SEQ ID NO: 370046 - DNA, 438 bp, Salmonella enterica
atgattgcattaattcaacgcgtaacccgtgccagcgtcaccgtggaggacgaggtgacgggtgaaatcggcccaggacttttggtgttattgggtgtcgaaaaagaagatgacgaacaaaaagcgaatcgtctgtgcgagcgcgtgctgggataccgtatcttcagcgatgctgacggcaagatgaatctgaatgtacaacaggctggcggcagcgtgctggtggtgtcgcagtttacgctggcggcagataccgagcgtggtatgcgaccaagcttttccggcggggctgcgccggatcgcgcgcaggcgctttatgaatattttgtcgaacgctgccgccagcaggcgatagacacgcaaaccggacgcttcgctgccgatatgcaggttgagctggttaatgacggccccgtgacattctggctccaggtatga

SEQ ID NO: 370047 - DNA, 942 bp, Salmonella enterica
atgtatcaccttcgagttccgcaaacagaagaagaattagaacgttactaccagtttcgctgggagatgctgcgtaaaccgctgcaccagccgaaagggtcggagcgggatggctgggatgcgttggcgcaccatcaaatggtggtggacgaagaaggaaatttagttgcagtgggccgcctgtatatcaatgcagataacgaggcgtctatccgttttatggctgtacatccctcggtacaggataaagggctggggacattaatggcgatgaccctggagtctgttgcccgccaggaaggcgttaagcgcgtcacctgcagtgcgcgcgaagatgcggttgagttctttgccaaactcgggtttgtcaatcagggggagattactacgcccacaaccacgccaatccgccattttctgatgattaaaccggtagcatcgctggatgatatcctgcatcgcggcgactggtgcgggcagcttcagcaggcctggtatgagcacattccattgagtgaaaagatgggggtgcgcattcagcagtacaccgggcaaaaatttatcaccacgatgccggaaaccggtaatcaaaatccgcatcacacggtgtttgccggcagcttgttctccctggcgacgctgaccggatggggacttatctggctgatgctccgtgaacgccacctgggcgggacgattattcttgctgacgcccatattcgctacagtaaacccattagcggaaagccaaacgccgtggctgatttggggtcgctaagcggtgatttggacaggctggcgcggggtaaaaaagcgcgtgtccagttgcaggttgaactgttgggcggcgagaccgctggggcaattttcgaaggcatttatatcgtactacctgcgaaaccgttcggcccgtatgaagagggcgggaatgaggaggagtag

SEQ ID NO: 370048 - DNA, 447 bp, Salmonella enterica
atgagaactcatcgtcagatggatgcaaccagcgcaaaaaagatcgttgataccttcagcgatgcggtaaaaagcgtcccactgatgggggaagaccgaaatgacaatgagtatcgcagggcactagcgctagtggagtttctggtcgaccacgacgatcttgaaaacccactatttgaattgctctgtgcccgaatcagtgaatacgaaaaacatgcgccggaattcaaagcactcaaccaacacctggagaaaacgccccctggcgtttcagtattgcgaacgctcatggatcaatacggtctcaaagcagcagatcttgccaacgaacttggttctaaatcgaacgtcagcaacatcttaaatggccgcagagcactaacggttaatcatattaaagcgcttacacaacgcttcaaactaccagcagatgccttcatcgagtag

SEQ ID NO: 370049 - DNA, 312 bp, Salmonella enterica
gtgcatgttatcagccgaaaaccgttcaatgaagcgatgctcatgtatccaaaccatgagcttgctctcactgagttgctgaatgttctggagaaaaaaacactcactcagcctgaagagatgaagcggtatattccttcactggataattttaagcacagagataaatggtgggtgattgatgtttctggtaacagcctgagactcatttcctacatagatttcaggttacataagatatttgtgaaacatatcgtttcccatgccgaatatgacaaactgaccgcatatgatcggggtaataaagaatga

SEQ ID NO: 370050 - DNA, 930 bp, Salmonella enterica
atgccactggaaaaaggaattgccgaactggtcgctgggtttatcgccgcgggacgcccctcttctcgcgaacagaatattgatgaccggagggcgggctacatcgccagcacgacgctggcaggagaaacagaaacccgcgtccaggttgaagatattgaactcgatgccatgacgtttcgcgtggtttcgccgctcaatgccacagggaaattaccctgcatcatttattatcatggtggctgctttgtcagcggcggttttgccactcacgataaccagttaaggcagttagctttttacagccgttgtcgcgtgattgcggcacagtaccgacttgcaccagagcacaccttcccggccgcacataacgatgccgaaaccggagctaatactatctggaaatatgcccagaaactggggatagatcgcgagaacattacgcttgccggtgacagcgcgggtgggcatctggcgctggtcaccgcgctacgcctgaaagccgcccgtcaatggcaacctgcacagctgattctgatctaccccatgctggacgcaaccgccaggtttgcgagctacacctgtaatgggctggattacattatcacgcgtgacacgctgctttcaggctacgagatgtatatgccgcgaaccgatccactgcatcctgaagccagtccgctctggcgtgaggacttcgccggactgccatccacgcacatcattactgccgaattcgacccactgcgcgatgagggcgaggccctgtatcaacggttccaggaacagggtgtggaatgcacttgccagcgctatctcggtgtcatccatggctttttccagctaggaggcgtgagccaggcggcacgaagcgccatgcgagatgtggcctggcgtgttgtaagtccatcaacaggcaaaatgacctaa

SEQ ID NO: 370051 - DNA, 312 bp, Salmonella enterica
atgcaatttatagaaacggaactctttactgaagatgttaaaaaactgctcgatgaggatgaataccataagcttcaggtttttatggctcagcatccagattgtggtgatgtcattcaggaaacgggcggcctgagaaaaatgcgctggggagcgcgaggcaaaggaaagcgtagtggcgtgcgaattatctattttcaccgtagtcaacggtatgagattcgcttgcttctgatttatcaaaaaggcattaaagatgatctcacgccgcaggaaaaagcggtgcttcgtatgctgaatgagaggtggtag

SEQ ID NO: 370052 - DNA, 291 bp, Salmonella enterica
atggataaagtgttatttgagcgattaactcaaagtatgtctcaaatgaatgaaatcattgaagggacccgtgagccttctcgtacctttcatattgatgcaatgaagattaaagaaatacggcaggcatctgggttgtcgcaatctaagtttgcagaactgatttcggtcaacgtggatacgctgcgcaactgggagcaaggaagacgttcaccgacagggccagccaaagcgttacttcgcgccattgccaacgacccgagaaacgttatacaagcattgcgttattga

SEQ ID NO: 370053 - DNA, 930 bp, Salmonella enterica
atgagtattcgcataatcccgcaagatgagctggggtcgagcgagaaacgtacggcggatatgattccgccgttattgttcccccgactcaaaaacgtctacaaccgccgcgccgaacgtctgcgcgagctggctgaaaataacccgctgggcgattacctgcgctttgccgcgcttatcgcgcacgcgcaggaagtggtgctgtacgatcatccgctgcggatggacctcaccgcgcgcattaaagacgcgaacgatcagggcaaaccgccgctggatattcacgttctgccgcgcgacaagcactggcatacgctgctgcactcgatgattgctgaactgaagccggaaatgagcggcccggcgctggcggttatcgaaaacctggagaaagcctccgagcaggagctggagcagatggccagcgcgctgtttgcctcggattttgcctccgtcagcagcgataaagccccgtttatctgggccgcgctctccctttactgggcgcaaatggccagcttgattccaggcaaagcccgcgcggaatacggtgaagcgcgccagtattgcccggtgtgcggttcgatgccggtctccagcatggtgcagatcggcaccacgcaggggctgcgttatctgcactgtaacctgtgcgaaaccgaatggcatgtcgtgcgcgtaaaatgcagtaactgcgaacagagccgcgacttacactactggtcgctggaaaatgagcaggctgcggtgaaagccgaaagctgcggcgattgcgggacttacctgaagattctctatcaggaaaaagacccgaaagtggaagccgtggccgacgacctcgcctcgctggtgctggacgcgcgcatggagcaggaagggttcgcccgcagttccatcaacccgttcctgttcccgggggaaggggaataa

SEQ ID NO: 370054 - DNA, 636 bp, Salmonella enterica
atgaaacgacgtgacaccatcgtgcgctatacggcgccggaacgcatcaaccactggatcgtcgccttctgcttcgtgctggcggcggtgagcgggctgggctttttattcccatccttcaactggttgatgcatatcctgggcaccccacaactggcgcgaattctgcacccgtttgtgggcgtggttatgtttgcctcgttcatcatcatgtttttccgttattggcaccacaatctaatcaatcgggatgatatcttttgggcgaagaatattcgtaagatcgtcgtcaacgaggaagtgggtgacaccgggcgttataacttcggccagaaatgcgtattctgggcggcgattatcttcctagtgctgctgctggtgagcggggtaattatctggcgtccgtactttgcgcctgctttctcaatcccggtgatccgattcgcgttaatgttgcattcttttgccgcagtagcgttaattgtggttatcatggtgcatatctacgccgccctttgggtgaaaggtaccattaccgcgatggtggaaggctgggtaacccggtcgtgggcgaagaaacatcacccacgctggtaccgagaagtccgcaagacaacggaaaaagaaactgaatga

SEQ ID NO: 370055 - DNA, 903 bp, Salmonella enterica
atggcttatcaatcgcaagacatcattcgtcgttccgccactaacggtttcacccccgcgccccaggcgcgggaccaccaggaagaggtggcgaaactcatcgacgtcaccacctgtatcggctgtaaagcgtgtcaggtggcgtgctccgagtggaacgacatccgtgatgaagtgggcaataacgtcggggtgtatgacaacccggcggacttaactgcgaaatcctggacggtgatgcgcttctcggaagtggaacagaacgacaaactggagtggctgatccgtaaggatggctgtatgcactgcgccgatcccggctgcctgaaggcctgtccggcggaaggggcgatcattcagtacgctaacggtattgtcgacttccagtccgagcagtgtatcggctgcggctactgtatcgctggctgcccgttcaacgtgccgcgcctcaacccggaagacaaccgcgtctataaatgtacgctgtgcgttgaccgtgtggtggtcggccaggaaccggcctgcgtgaagacctgtccaaccggcgccattcattttggctcgaaagaggatatgaaaacgctggcgggcgagcgggtggcggaactaaaaacccgtggttatgacaacgcgggtctgtacgatccggcgggcgtaggcggtacgcatgtcatgtacgtgctgcatcatgccgacaagccgaatctgtatcacggtctgccggagaacccggaaatcagcgaaaccgttaagttctggaaaggcgtctggaaaccgctcgccgcgttcggttttgccgcgacctttgccgccagcgtcttccactatgtcggcgtcggcccgaaccgtgcggaagaggaagatgacaacctgcatgaagagaaagacgaggtgcgcaaatga

SEQ ID NO: 370056 - DNA, 2415 bp, Salmonella enterica
atgaccaaccactgggtcgacatcaagaacgccaacctcgtcgtggtgatgggcggtaacgccgcagaagctcacccggtcgggttccgctgggcgatggaagccaaaattcacaacggcgcgaagctgattgtgatcgatccgcgcttcacgcgtaccgcgtcggtggccgatttctatgcgccaatacgctctggtactgacattgccttcttgtcaggcgtgatgctgtatctgctgaccaacgaaaaatacaaccgtgaatacaccgaggcctataccaatgccagcctgatcgtgcgtgaagattttggcttcgatgatggtctgttcaccggctatgacgcagacaagcggcagtacgataaaaccagttggcactatgagctggacgaaaacggttttgccaaacgcgatacgacactgcaacacccgcgctgtgtctggaatctgttgaaacagcatgtctcgcgctatacgccggacgtggtagaaaatatctgcggtacgccgaaagcggacttcctgaaagtgtgcgagtacattgcagaaaccagcgcaaaagataaaaccgcgtcgttcctgtacgcgctgggctggacgcagcattccatcggcgcgcagaacatccgtactatggcaatgatccagcttctgctcggtaacatggggatggccggcggcggcgttaacgccctgcgcggtcactccaatattcagggactgaccgacttaggactgctgtcgcaaagtctgccgggctacctgacgctgccgagcgaaaaacagaccgacctgcaaacctatctggctgccaatacgccgaagccattgttgaaggatcaggtcaactactggggcaactatccgaaattcttcgtctcgatgatgaaggccttctttggtgataaagcgacagcggaaaatagctggggctttgactggctaccgaagtgggacaaagggtacgatgtactgcagtacttcgagatgatgaaacagggcaaggtcaacggctatatctgccagggctttaacccggtggcctcattcccgaacaaaaacaaagtggtcgcgtcgctttccaaactgaagtacctggtgactatcgatccgctcaacaccgaaacgtccaccttctggcaaaaccacggtgagtcgaacgacgttgatcccgcaaaaatccagaccgaagtgttccgtctgccttccacctgttttgccgaggaaaatggttccatcgttaactccggtcgctggttacagtggcactggaagggcgcggacgccccgggaattgccatgaccgacggcgaaatcctcgccggtatcttcttacgcctgcgtaagatgtactctgaacagggcggcgccaacccggaacaggtgctgaatatgacctggaactacaccaaaccatacgaacccgcctctgaagaagtggcgatggaaagtaacggtaaagcgctggccgatcttatcgacccggcaaccggcgcggtggtggtgaagaaaggtcaacagctcagttcgttcgcgcaactgcgcgatgacggtacgacgtccagcggctgctggattttcgccggtagctggacgccggaaggcaacatgatggcgcgtcgtgataatgccgacccgtctggtctcggcaacacgctgggctgggcatgggcatggccgcttaaccgccgcatcctctataaccgcgcctccgccgatccgcagggtaatccctgggacccgaaacgtcagctactgaaatgggaaggcggcaaatgggccggatgggatattccggactacagcgccgccgcgcccggcagtgacgtcggaccgtttatcatgcagccggaagggatgggtcgcctgtttgctatcgataagatggcggaagggccgttcccggaacactacgagccgtttgaaacgccgctgggcactaacccgctgcacccgaacgttatctctaaccctgccgcccgtatctttaaagacgatgccgacgcgctgggtaaagcggataagttcccgtatgtcggaaccacttaccgtctgaccgagcacttccactactggaccaagcacgcgttgcttaacgctatcgcccagccggaacagtttgtggaaattggcgagaagctggcgaataagctcggcatcgcgcatggcgataccgtgaaggtctcctcgaaccgcggctatatcaaagccaaagcagtggtgaccaagcgtattcgcacgctgaaagcggacggcaaggatatcgataccatcggtattcctattcactggggctacgaaggcgtggcaaaaaaaggctttatcgccaatacgttaacgcctttcgtcggcgatgcgaacacgcaaacgccggagtttaaatccttccttgtgaacgtggaaaaggtgtaa

SEQ ID NO: 370057 - DNA, 588 bp, Salmonella enterica
atgcaggtcagcagaaggcagttctttaagatctgcgctggcggtatggcaggcaccacggcggcggcactgggcttcgcgcccggcgtagcgctagcggaaacacggcaatataaactgctgcgcacccgcgaaacccgtaacacctgcacctactgttccgttggctgcgggctgttgatgtacagcctcggcgacggtgcgaaaaacgccaaagcatctattttccatatcgaaggggacccggatcatccggtaagccgtggcgcgctgtgcccgaaaggggccggtctggtggactttatccactctgaaagccgcctgaaattcccgcaataccgcgcgccgggttcagataagtggcaacagatcagttgggaagaagcgtttgaccgcatcgctaaactgatgaaggaagatcgcgacgccaactatcaggcgcagaacgccgaaggcgttaccgttaaccgctggctcaccaccgggatgctgtgcgcttccgcatccagtaacgagacgggttatttaacgcaaaaattctcccgcgcgctgggtatgctcgcggtcgacaaccaggcgcgtgtctga

SEQ ID NO: 370058 - DNA, 837 bp, Salmonella enterica
gtgaacaatatactgtctgaagaagtcctaaatgtgactgatttcacaacctcacgccagttgactctctggaaacgcgaggatttgcagtccccccaacttgatgatgttgccgaggaagtgcctgtggcactggtgtataacggcatttcgcatgttgttatgatggcctctccgaaagatctgacgcatttcgcaatggggttttctctgtcggaagggatcattgacagcccgcgtgaaatctatggcatggacgttgtaccgtcctgtaacggacttgaagtgcagattgatctttccagccgtcgatttatggggctgaaagcgcgtcgtcgcgcgctggccggacgcaccggttgcggcgtgtgtggcgtggaacagctcaatgacatcggtaagccggtgcaaccgctgccgtttagccaaacgtttaatctcggtaaccttgatcgcgcgttaaaacatctgaatgattttcaaccgacgggtaagctgacgggttgtacgcacgctgcggcgtgggtcatgccgtcgggtgaactggcggggggccatgaagatgtcggacgccacgttgcgctggataaactgctcggccgccgcgctacggaaggtgaggaatggcggcaaggcgcggcgctggtttccagtcgtgcgagttacgaaatggtgcagaagtcggcgatgtgcggtgtggaaattttgtttgcggtttctgctgctaccacgctcgcggttgacgtcgctgaacggtgtaatcttacgctggtggggttctgtaagccgggtcgggcgacgatttatacccatccgcagcggttaatcgcagactaa

SEQ ID NO: 370059 - DNA, 444 bp, Salmonella enterica
atgagtgggcagcatgcggctaatgaaattaaggcgaccgagaagaaagaaggtaaatccattaagtactatacgcttttgacgatgcaggaagccgagacgcttaatgacgctgtagctgatgattcttttgatgtggcggcagtaagcaaacagctcgctgattttgaagagcatactcagaagctaaacgagaagatcaacgttgatatagataaacatcgtagcttccctggttttatttctgagctggaaaaattccagggcaaggtgaaaaaacgcattcggcgcgtgcgcgataacgtggcgtatacctcgcatgagcaggactacctcaatagcggcagcggtgatatggtagatggttcttatgaggctgtggttaaagcttataacgagctcatcgatacctataatggctatcatcttgagcgtgagttctaa

SEQ ID NO: 370060 - DNA, 600 bp, Salmonella enterica
atgaaaaaggatttgttatcatcaattattatcgctatgctgatgactgccgggctaagcgcttgtgatgaaaaaaaagcggacgaacaacctgtagctcagagtgcggactcatcagcgagcaatacacaatccacatcagcggaaagcgcagatgcgaacgatgttcttaaccaaaagctaaatgtttacattgattgttataataatctccaggcaggtatttaccgcgctgtaaatcgttatgctaacacattcgacgatttccgcaccggtcctaccggtaaggaagacgatccctctccgctggttcctgtgtatcctgcacttatccaggactgccggaaagacatcaaggcggcggctgaattaaagccggcgtttgcctctctggatagtgctgctctggcatttattaatgcggctggaccactagctgaaacaatcaatagtatgaataaatactatgatcaagataacttcaaggatgatgcctttgctggcgctaaagcgttccataaaacgtttataaaacagttcgatgagtttgatcccattgcgcgccgagattaccattatgagtgggcagcatgcggctaa

SEQ ID NO: 370061 - DNA, 1101 bp, Salmonella enterica
atgaaaaggaatttattatcctcagcgataatcattgcgctaatgaccctgggcgcaacaggatgtgataacaataatgttaaaaccgaggcgacgccggccgccagcagtcagcctgcgacgccagcgccttctcagacgccggaaacgcaatctgacgaaagtccagcgcagccctcagcagcgaagccagaaacggcaactcagcccccggcggcgaagccagaaacgccagctcagccggaggttgacgctgaagaagtttatagtgaaaaaatggatgtctatatcgattgttttaataaacttcaattgcccgttcagcacagtctggcgcgttacgcggattgggtgaaagactttaaaaaaggtccgacagggaaagagagcctggtttatggcatttatggtattacggagtcttacataacgaattgccagaaagagatgaaacaggtggccgccttaacgccattacttgagcctattgatggcgttgccgttagctatattgatagcgccgccgcgctgggtaataccattaacgacatggaaaaatattatacccaggaaaactataaagatgatgcctttgctaaaggtaaggcgctgcatcagacattactgaagaatatcgaggattttaaacccgtctcggaaaaatatcatgaggctattcaggaaataaatgacaggcggcaattgacacagttgaagagaatagaagaagcggaaggtaaaacatttaactattattctctggctgtcatgatttcggcaaagcagatcaacaaggttatttctgccgatacctttgatgccgaagcgatgatgaaaaaagtcgcggaactggaaacaatgattgcacaattgaaagaagtgaatactgatggccgtaattcttctttcatcagctctgcggctgattatcagctacaagctaaaaaatatattcgtcgcatcagagacaatgttgagtattctgattttgaaaagaaacgggtgcaggaccctgcaacaggatggatggttgcggattcttatccggcgtcgttgagaagttataacgagatggtggatgattataaccgcctgcgttga

SEQ ID NO: 370062 - DNA, 324 bp, Salmonella enterica
atgggcaatatgacgctatttattatcggtattgctcttttgtctgcgggaacctatttgatgcgcctcggcggcgctaaacttggcagccgtctggcgctgtctgagcgttcacaggcgctgctctcggatgcggcaacggtgctactattctccgtcgcgctggcgaccaccttttacgaaggcgaacattttgccggaatggcgcgcgttcttggggttggcttcgccgtatttttagcctggcgtaaaatgccgcttattgtggtgattatcgccgctgcggtggtgaccgcgttattacgaatggcgggtattaattaa

SEQ ID NO: 370063 - DNA, 660 bp, Salmonella enterica
atgaaacactatttttcctgtctcaagggagacacgataaaagcgatatttttagtgtgcctggccgtgggcgtcgtcggcatgtcctatggctcactggcgatggcctacggtttcccactgtgggtgccgtttgtcctctctatttttgtgctggcgggcgcgtccgaatttatgtttatcggcattgttgccagcggcggcaatccgttagcggcggcggcggcaggactgctggtgaatgcgcgccacgtgccgtttggcgtaacggtgcgcgatttggttggcacccgcgccgccagctttttcggctgccatattatgaatgatgagagcgtggtgttcggcctgtcgcaaaaaacacccgaacaacgtaaagccgcctactggctatgcggtctgggcgtcgccctattctggccgattggcacactgattggcgctggtgtcggcaaactgcttccggccccagaaaccatcggtctggatgccgtattcccggcaatcttactggcgctggtgatcccggcgtttaaaaaccgcaccacattgattcgtggttgcagcggcgccgcgctgtcgcttgccgccgttccctttgtagctgccggattgccggtgttgctttcgctgcttggcctactggcgaggaaaaaataa

SEQ ID NO: 370064 - DNA, 549 bp, Salmonella enterica
atgacacaacctattagcgtcattgccagaagtctggtacgcgaacgccagcgaaccggactgtcgctggcggagattgcgcggcgcgcaggcatcgctaaatctacgctttcacaactggaagcagggaacggcaaccccagcctggagacgttatggtcgctatgcgtcgcgctcgacattccctttgccaggctgctggagccgcaggtacaaaaaacgcaggtgattcgccgcggagaaggcaccaaagtggtggcggagcaggcgcattatcaggcgatattactggcggcatgtccgcccggcgcgcggcgtgatatctatctgctgttgacgcagccgggggccgaccggatctctcacccgcatccgccggggtcggtggaacatattattgttacgcagggaaaagccctcgtcggcttaaccgaggcgccggaagagctggcggagggcgattacatttgttatcccggcgatcaggcgcatatctttaaagcgctggaaccggatactcaggctatcctggtagcggagcagaattga

SEQ ID NO: 370065 - DNA, 315 bp, Salmonella enterica
atgatccgcaaagcctttgtgatgcaggtaaatgccgacgcgcacgaggagtatcagcgtcgtcataacccaatctggccggagctggaagccgtattaaaatctcacggcgcgcatcactacgcgatttatctcgatcaggagcgcaatctgctgttcgccaccgttgagattgaatccgaggagcgctggaacgccgttgccagcaccgacgtttgccagcgttggtggaaacatatgcgtgacgttatgcccgcgaatccggataacagcccggtcagcgcagagctaaaagaggtgttctatctgcagtaa

SEQ ID NO: 370066 - DNA, 1149 bp, Salmonella enterica
atgagctttatgttggcactgccaaaaattagcctgcatggcgctggagcgattgccgatatggtgaacctcgtggcgaataagcaatggggcaaagcgctgatcgttaccgatggtcaactggtaaagcagggcctgctggatagcctgtttagcgcactggatgaacatcaaatgtcttaccacctgtttgatgaggtgttcccaaatccgacagaagagctggtgcagaaaggttttgcggcgtatcagagcgcagaatgtgactacattatcgccttcggcggcggcagcccgatcgataccgcaaaagcggtgaaaatcctcaccgccaacccaggcccatctaccgcctactccggcgtcggcaaagtgaaaaacgccggcgtaccgctggtagcgattaatactacggcaggtaccgcggcagagatgaccagcaacgcggtgattatcgactcttcccgtaaggtcaaagaggtaatcatcgacccgaacatcatcccggatatcgccgtggatgacgccagcgtcatgctggaaatcccggcgtctgtgaccgccgcaaccggcatggatgccctgacccatgcggtggaagcctatgtctccgttggcgcgcatccgcttaccgacgctaacgcgctggaagcgattcgcttaatcaatttgtggctaccgaaagcggttgacgatggccataacctcgaagcccgtgagcaaatggcattcggccagtacctggcgggtatggcgttcaacagcgccggtttggggctggttcacgcgctggcgcaccagccgggcgcaactcacaacctgccgcacggagtctgcaacgctatcctgctgccaattgtcgagaactttaaccgtccgaacgccgtcgcgcgttttgcccgtatcgcacaggcgatgggcgtagagacgcgcggtatgtctgacgaagccgcaagtcaggaagcgattaacgctatccgtacgctgagcaaacgcgtcggcattccagaaggtttcagcaagctgggcgtcacaaaagaagatatcgaaggctggctggataaagccctcgccgacccgtgcgcgccgtgtaacccgcgcaccgccagccgcgatgaagttcgcgggctgtacctggaggcgttatga

SEQ ID NO: 370067 - DNA, 828 bp, Salmonella enterica
atgcaaaatattaccgattcctggtttgtccagggcatgattaaagccacgtctgatgcgtggctgaaagggtgggacgaacgtaatggcggtaacctgacgctgcgtctggatgaagccgatatcgcgccttttgcgactaatttccacgaaaaaccacgctatatcgcgctaagtcaacccatgccgctgctggcgaatacgccgtttatcgttaccggttccggcaaattcttccgcaacgtgcagctcgatccggcagccaatttaggcgtggtcaaaatcgacagcgacggcgcaggctaccacattctgtggggcttaacccacgacgcggtacccacctctgaactcccggcgcatttcctttcccactgcgaacgcatcaaagccacccacggcaaagaccgcgtcattatgcattgccatgcgactaacctgatcgccctcacctacgtactggaaaacaacactgcgctgatcacccgcaaactgtgggaaggcagcaccgaatgtctggtggtattcccggacggtgtcggcattctgccgtggatggtgccaggcaccgatgaaatcggccaggccaccgcgcaagaaatgcagaaacattcgctggtgctgtggccgttccacggcgtgttcggaagcggacctacgctggatgaaaccttcggtttgatagataccgcagagaaatccgctgaggtattagtcaaaatctattcgatgggcggtatgaagcagaccatcacgcgcgaagaactggtcgcactcggcaaacgttttggcgtgacaccgctggccagcgccgtagcgctgtactga

SEQ ID NO: 370068 - DNA, 1260 bp, Salmonella enterica
atgaccactcaactggaacaagcctgggaactggcaaaacaacgtttcgccgcagtaggtattgatgtcgaggaggcgctgcgccagctcgatcgcctgccggtttccatgcactgctggcagggcgacgatgttgccggattcgagaacccggaaggttcgctgacgggcggaattcaatcgaccggcaactatccgggcaaagcgcgtaacgccaccgaactgcgcgccgatctggaacaggcgctgcgtctgatcccaggcccaaaacggctgaacctacacgccatttaccttgagtcggatacgccggttgctcgcgaccagatcaaaccggagcattttaaaaactgggtggagtgggcgaaagcgaaccggctggggctggatttcaaccccacctgtttttctcatccactgagcgctgacggttttaccctctctcatcccgacgcgaaaattcgccagttctggatcgatcactgcaaagccagccgccgcgtctcggcatactttggtgagcagctcggtacgccgtcggtgatgaacatctggattccggacggcatgaaagacattaccgtcgaccgtttagccccgcgccagcgcctgttggaagcgctggatgaggtcattagcgagaaattcgacccggcgcaccacatcgacgccgttgagagcaaactgtttggcatcggcgcggaaagctacaccgtcggctccaatgagttctacatgggctacgccaccagccgtcagaccgcgctgtgccttgatgcgggccacttccatcccaccgaagtgatttccgacaaaatttccgccgccatgctctacgtgccacggctgctgctgcacgtcagccgcccggtacgctgggatagcgaccacgtggtgctcctggacgatgaaacccaggcaattgccagcgagatcgtccgtcataacctgttcgaccgtgtgcatatcggcctggatttcttcgacgcctctatcaaccgtgtcgccgcgtgggttatcggtacccgcaacatgaaaaaagcgctgctgcgcgctctgctggaacccacagatcaactgcgtcagcttgaggccagcggcgattacaccgtgcgtctggcgctgctggaagagcaaaaatccctgccgtggcaggccgtctgggaaatgtattgccagcgtcacgacacgccgactggcagccagtggctggacagcgttcgcacctacgaaaaagagatcctgagcaaacgtagctga

SEQ ID NO: 370069 - DNA, 1470 bp, Salmonella enterica
atgacttttcgccattgtgtcgcggttgatctcggcgcatccagcgggcgcgtgatgctggcgcgttacgacagcaaacaccgtaccctgacgctacgtgaaattcaccgttttgtgaactgcctacaaaaaacagacgggtttgacacctgggacatcgacagtctggaaaaggatatccgtcttggtctgaagaaagtctgcaatgaaggcattcttatcgacagcatcggcatcgacacctggggcgtcgattatgtcctgctggataaacaaggtcagcgtgtcggcctgccggtctcctaccgcgataaccgtaccacgggcatcatgccgcaagcgctggtccagatcggcaaaagcgaaatctatcgccgcagcgggattcagtttctgccgtttaacaccatctatcagctacgcgcgctgacgaaacaacagcctgagttaacggcgcaggtcgctcatgcgctgctgatgcccgattatttcagctaccgcctgaccggtgaaatgaactgggaatacaccaacgccacgaccacccagttggtcaatatcaataccgatgactgggacgataccctgctggcgtggaccggcgcgaaaaagagctggttcggccgcccctcgcaccctggcaatgttatcggcgactggatttgcccgcagggcaaccgtattccggtggtagccgtcgccagccacgataccgccagcgccgttattgcctctccgctggcaaataaacatagcgcttacctgtcttcaggcacctggtcattgatgggttttgaaagcaaaatgccctacaccactgatgaggcgctggccgccaatatcaccaacgaaggcggcgcggaagggcgttatcgggtactgaaaaacattatgggtttgtggctgctccagcgtgtgctgaaagaacggcgcattaccgatctgcctgcgcttatcgcccaaacagaagcgctgccggcctgccgtttcctgattaacccgaatgacgatcgctttatcaatcctgacgatatgcgcgctgaaatccaggccgcctgtcgcgagaccgaccagcccgttcccgtcagcgatgccgaactggcgcgctgcattttcgacagtctggcgcttttgtatgccgacattctgcacgaactggcaaatctgcgcggtgaaaaatttacccaactgcatattgtcggcggcggatgccaaaactcgctactcaaccagttgtgcgccgatgcatgtggcattcgcgtgatggccgggccggttgaagcctccacccttggcaatattggtattcagcttatgaccctcgacgaattaaacaacgtcgatgacttccgtcaggtcgtcagcgctaactacgacctgacaacctatatccctaatcctgatagtgaaattgcccgccacgttgcgcagtttcaacccaaacgacagacaaaggagctttgcgcatga

SEQ ID NO: 370070 - DNA, 837 bp, Salmonella enterica
atgaccgtactgcatagcgtggatttttttccatcaggtaaagcgcccgtggcgattgaacctcgtctgccgcaagccgctttccctgaacatcatcatgattttcatgaaatcgtgattgtggaacacggtacgggcattcatgtattcaacgggcagccgtataccatcagcggcggtaccgtgtgttttgttcgcgatcacgaccggcatttatatgaacataccgacaacctatgcctgacgaatgtactgtggcgttcaccggacgccttccagtttctggcggggttggatcaattgctgccgcaggagcaggatggttactatccttctcactggcgggtgaatcagagtgtgttgcagcaggtgcgccagttggtcggtctgatggagcgcgccggagacggcatggatgcgcctgccgtggcgaatcgcgaaattttgtttatgcaactactggtgttgttacgccgcagtagcctgatggaaggcgcgaccaataacgacgccaaactcaaccaactgatggcatggctggaagaccattttgcggaggaggtctgctgggaggcggtagctgaacagttttcgctgtcgctacgcacgctgcatcgtcagcttaaacagcataccgggctgacgccgcaacgttaccttaatcgcctgcgtttgatcaaagcccggcatttattgcgccatagcgatcatagcgtgacagaaatcgcgtaccgctgcggttttggcgacagtaaccacttttcgactctgtttcgccgagaatttaactggtcgccgcgggatatccgtcagggacgcgatgcgataatccagtaa

SEQ ID NO: 370071 - DNA, 849 bp, Salmonella enterica
gtggcaaatcagttaatccttttgaaaaaagatttttttactgatgagcagcaggccgttacggttgccgatcgctatccacaggatgtttttgcggaacatacgcatgagttttgtgaactggtgatggtctggcggggcaatggcctacacgttcttaatgagcgcccatacagaattacccgcggcgatctgttttacattcgtgctgaagacaaacactcctatacctccgttaacgatctggtgctgcaaaatatcatttactgcccggagcgtttgaaactcaatgtaaactggcaggcgatgattcccggctttcagggagcgcagtggcatcctcactggcggctgggcagtatgggaatgaatcaggcgcggcaggtcattaaccagcttgaacatgagagtaatggacgcgatccgctggcgaatgagatggcggaattgctgtttggtcaactggtgatgacgttaaaacggcatcgctacgcgaccgacgatcttccggcaacctcccgagaaaccctgttggataaattaattaccgctttggctaatagccttgagtgtccctttgcgctggatgcgttttgccagcaggaacaatgcagcgaacgggtgctgcggcagcagtttcgcgcccaaaccgggatgacgattaatcaatatttacgccaggtccgtatttgccacgcgcagtatctgcttcagcatagcccgctgatgattagcgagatttcgatgcagtgcggttttgaagatagtaattatttttcagtggtgttcacgcgggaaaccgggatgacgccgagccaatggcgccatctcagtaatcaaagcgattaa

SEQ ID NO: 370072 - DNA, 1035 bp, Salmonella enterica
atgagtaacgcgattacgatgggtattttctggcatttgataggggcggccagtgcagcctgcttctatgccccgttcaagcaagtgaaacagtggtcatgggaaaccatgtggtcagtgggcggcatcgtctcatggcttattctgccgtgggcaattagcgctctgttactgcctgatttctgggcctattatgggcagtttaacctctccacccttttaccggtttttctgttcggcgccatgtggggcatcggcaatattaattacggtctgaccatgcgttatctcgggatgtccatgggtatcggcatcgctatcggcattacgcttatcgtcggcacgctgatgacgcctatcatcaacggtaacttcgatgtgttaatccataccgaagggggacgcatgacgctacttggcgtttttgtcgcgctgatcggcgtcgggattgtgacgcgcgccggacagttaaaagaacgcaaaatgggcattaaagcggaggagttcaatctgaagaaagggcttctgctggcagtgatgtgcggtattttctcggcggggatgtcttttgccatgaacgccgcgaaaccgatgcatgaagctgctgccgcgcttggcgttgacccgctctatgtcgcgctgccgagttacgtggtgattatgggcggcggcgcgctggttaacctcggtttctgttttatccgcctggcaaaagtacaaaatctgtcgataaaagccgacttctcgctggcaagaccgttgattatcagcaatattctgctgtccgcgcttggcggtctgatgtggtatttgcagttctttttctatgcctggggtcacgcgcgcattccagcgcaatatgactacatgagctggatgctgcacatgagcttctatgtgctgtgcggggggcttgtcggtctggtgctaaaagagtggaaaaatgctggccgccgtcccgttgccgtattaagcctcggctgcgtggtaattattatcgcggcgaatattgtcggtttaggcatggccagttaa

SEQ ID NO: 370073 - DNA, 672 bp, Salmonella enterica
atgagaaaatctcttttcttactattacctcttgttgtaacaaatgcgcatgcagtatatgtcgatgttcgtcatgaatatcttgatgatagtaaagctaactatgaccgtgcgtatatttctcatcggtttgcgaatggtgttggttttgcgatagaagctatctcaaaatcaggcggggatgacaccaataaagcgtttaatgacctggaaacacagggcaacgaatatacgataagctaccaatttaaaaccggtgatgtcgcctggcaaccgggtttcgtgctggaaacaggcaacggttactctacctataagccttacttccgcgcgacgtggacattaaatgaaagctggtgggttggtgcgcgctatcgttttgaatatgtacgccgttcttctgatatccgtgatgatgataccatcaatcgtatggatgtctgggcgggttataaatggaacaactttgactggacaatcgaaggaatttataagaaagctgataaatatgatctttacgatggcggcaaagataactatgaatataacttcagaactgcctatattattgatcaatggtcgccattcgttgaggtaggtaatgtttccgtcaatagcaacagcgatgaaagacaaacccgtttccgcgtgggtataggctacacattctaa

SEQ ID NO: 370074 - DNA, 1122 bp, Salmonella enterica
ttgctggccgtgccgttcttcgttttgtccggggtgatcatgaatagcgggggaattgccgcccggctggtcaattttgccaaactgtttactggcaaactgcccggctcgctctcttataccaacatcgtcggcaatatgatgttcggtgcaatttccggatcggcaattgccgcctcaacctccatcggcggcgtgatggtgccgatgagcgcgcgcgaaggttacgatcgcggctttgcggccgcggtgaatatcgcctccgcgccgacgggaatgttaattccgcccaccacggcttttatcctttatgcgctggcaagcgggggaacatcgattgccgctctgttcgccggcggtctggtcgcgggagtgctgtggggcgttggctgtatgctggtcacgctggtggtcgctaagcgtcgaaattatcgggttttcttcaccgtccaaaaaggcatggcgctaaaagttgccgttgaggccattcccagcctgctgctgatcgtgattatcgtcggcggcattgtgcaggggattttcaccgccattgaagcctccgcgattgccgtggtgtatacattattgttgacgatggtgttttaccgcacgctgaaaattaaggatttgccttcgattttgctccagacagtggtaatgaccggggtcatcatgttcctgctggcaacctcttcggcgatgtccttctcgatgtcgatcaccaatattcctgcggcgctgagcgatatgatcctcggtatttccgccaataaactggttatcctgttagtcattaccgtctttttgttgattatcggcgcatttatggatatcggtccggccattctgatttttaccccgattctgctgccgatcatggctaaactgggcgtcgatccggtgcattttggcattatcatgatctataacctggcgattggcaccattacgccgccagttggcagtggtttatatgtcggggcgagcgtcggtaaggtcaaagttgaggaagtgattaaaccgttgctgcctttttacggcgcgattatcggcgttctgttattaattacctacattccggaaatcacactgttcttaccccgtctactgggcatcatgtaa

SEQ ID NO: 370075 - DNA, 816 bp, Salmonella enterica
atgaagcaacctggttttatacgtctggctacgttggccttactctccacactctctttcttctcccacggcgaaaccattttgcgcctggcctacgctgaaaatagccagccggtaaaagatgcgttgcacttcctggggcagcaagttgaagagaaaacgggcggcgatatcaaagtacagtacttcccggacggacagcttggcggcgagcgcgaactggtggagttgacgcaggtcggcgtcgtcgacatcactaaagtgtcgtccgggctgatggagagtttttcgcctgagtacggcgtgttctcacttccctacctgtttgccaccgtcgaggaatactaccgcgtaatggataacccacaggtgatggagcctgtttatcagtccaccgccgcacaggggtttgtcggcgtaggctggtatgattccggcgcgcgtaatttttatatgagcaaagcgccggttaaacgcattgaggatttacgcgggaagaagatccgcgtcatgcagagtgagacggcgatccaaactctcaaactgctgggcgcttcgcccatcgccatgagccaggcggaggtctatacctcgttacaacaaggcattctcgacggcgcggaaaacaatgagttcgctctcaccatcgcccgccacggcgaagtcgcccgttatcgcctctttcagcaccatgatgctggtactgcctttcgatatttcgatgttcgccaccgcgcaaaaaatgttctccagcctggacagttttgccttgctggccgtgccgttcttcgttttgtccggggtgatcatgaatag

SEQ ID NO: 370076 - DNA, 621 bp, Salmonella enterica
atgagttatacactgccatccctgccgtacgcttatgatgcactggaaccgcacttcgataagcagacgatggagattcaccacaccaaacaccatcaaacctatgtcaacaacgctaacgcggcgctggaaaacttgccagagtttgctgacctgccggttgaagaactgattactaaactggaccaggtgccagcggacaaaaaaaccgtgctgcgtaataacgcgggcggccacgctaaccacagcttcttctggaaaggcctgaaaaaaggcaccaccctgcagggcgatctgaaagcggctatcgagcgtgacttcggttccgttgacaacttcaaagctgaattcgaaaaagcagcagcaacccgtttcggctccggctgggcgtggctggtgctgaaaggcgacaaactggctgtggtttctaccgcaaaccaggattccccgctgatgggtgaagccatttccggcgcttccggcttcccgatcctgggtctggacgtgtgggaacacgcttactacctgaaattccagaaccgccgcccggactacatcaaagagttctggaacgtggtgaactgggacgaagcagcagcgcgtttcgccgctaaaaaataa

SEQ ID NO: 370077 - DNA, 690 bp, Salmonella enterica
atgcattatccggttgacgtgtttattggcaaaattcgtgactatgacggcagccgcccgagcgctatcgccaaagtgcaggccgatggcgaacttatgctgaccgagctgggtctggcaggcgatgagcaggccgaaaagaaaatccacggcggccccgaccgcgcgctatgccattacccccgcgaacactatgctgattggattcgccagttccccgagcaggcgacgctgttttgcgccccggcgtttggcgagaatctgtcgacggacggaatgaccgaacacaacgtgtttattggcgacatctaccgctggggcgaggtgttgatccaggtcactcagccgcgctctccatgctttaaacttaatttccattttgccatcagcgacatggccctccttatgcagaacagcggaaaaaccggctggctgtatcgggtcattgcgcctggtaaggtctccagcgatgcgccgctggaactggcgtcgcgtctgagcgatgtctcggttcatgaagcgggtgttatcgcctggtctatgccgtttgatgacgaacaatatcaccggctgttgagcgccgccgggctgtcggcgagctggagccgcaccatgcaaaagcgtcgtttgagcggcaaaattgaagatagcgccagacgactgtggggggataaaactccgccaaaatga

SEQ ID NO: 370078 - DNA, 396 bp, Salmonella enterica
atgactgaagctgaaaatgcggtggcgatcgtaaaagaatttttggtggcctcgatgattcccgatgctgaacgcgccgcaacgtatatgcacccggaggtgaaaattaccttcaccggaggccgggcgatggcgggcgcggcagatatcgcgcagtttaacggcgctcgctacaagtgggtgaagaaggcgctgggcgagtttgatgcggtgcagcatgatgattacgttgtgatttattccaacggtacgttgtatggcgaatggcccgacggtcgcccgtttgccgataaccgctttatcgaccgcttcgaagtgcgcgatggcaaaattacccggatggacgtgtggaatgacagcgccgagtggattttagcgccggaaatctcccgatag

SEQ ID NO: 370079 - DNA, 204 bp, Salmonella enterica
atggacgcacatattctcgaggcttgtacggaagaagttaagcacatcttattcgaagagtatcacctcaaatctatcgaggagctttgggagcggtctctggatgaggattttttagctgagttgtatcaacagtttaagttcataacggaaaagtatggcgtgaatggtgatgaattggacagcatcctcgatacgctttaa

SEQ ID NO: 370080 - DNA, 1374 bp, Salmonella enterica
atgataggaagtttaaccgcgcgcatcttcgccatcttctggttgacgctggcgctggtgctaatgctggtactgatgttgcccaagctcgattcacgccagatgaccgagctgctggacagcgaacagcgccagggattgatgatagagcaacatgtagaagctgaacttgcgaacgatccgcccaacgacctgatgtggtggcgtcgcctgttccgcgcgatcgataagtgggcgccgcctggacagcggttattactggtgacctctgaaggacgcgtgatcggcgctgaacgcagcgaaatgcagatcattcgtaacttcattggtcaggcggataacgccgatcatccgcagaagaaaaaatatggccgcgtagagatggtggggccgttctccgttcgtgacggagaggataattaccagctttacctgattcgaccggccagcagttcgcaatccgattttattaatctgctgtttgaccgcccgctcctgttgctcattgtcacgatgctggtcagttcgccgctcttgctatggctggcatggagtctggcgaaaccggcgcgtaagttgaaaaacgcggctgatgaagtggcgcaaggcaacctgcgtcagcatccggagctggaggcgggtccgcaggagttcctcgccgctggcgccagttttaaccagatggtgacggcgctggaacggatgatgacctcgcagcagcgtttgctgtcagacatctcccatgagctgcgaacgccccttacgcgcctgcaactgggtaccgcgctgctgcgtcgtcgtggcggcgaaagcaaagagctggagcgtattgaaaccgaagcgcagcgtctggacagcatgatcaatgacctgctggtgatgtcgcgtaaccaacagaaaaatgcgctggtcagcgaaacgatgaaagccaatcagctatggggcgaagtgctggataacgccgcctttgaagccgaacagatgggcaagtcgttaacggtaaattatccgccggggccgtggccgctctatggcaacccaaacgcgctggaaagcgcgctggaaaatatagttcgtaatgcgctgcgctattcacatacgaagattgaagtcggcttctcggtggataaagacggtattacgatcacggtcgatgacgacgggccgggcgtcagccctgaagaccgcgagcagatcttccgtccgttctatcgcactgatgaggcgcgcgaccgcgagtctggcggcaccgggctggggctggcgattgtcgaaagcgccatgcagcagcaccgcggctgggtgaaggctgacgatagcccgctgggtgggttgcggcttacgctgtggctaccgctgtacaagcgaacctaa

SEQ ID NO: 370081 - DNA, 699 bp, Salmonella enterica
atgaataaaatcctgttagttgatgatgaccgagagctgacttccctgttaaaagagctcctcgaaatggaaggttttaatgtcctggtggcccacgacggcgagcaggcgcttgagcttttggatgacagcatcgatttacttttgcttgacgtcatgatgccgaagaaaaacggtatcgatacgttgaaagcgcttcgccagacacaccagacgcctgtcattatgctgaccgcgcgcggcagcgagctggatcgcgttctcggccttgagctgggcgcggacgactatttgcccaaaccgtttaacgaccgcgagctggtagcgcgcatcagggctattttgcgccgttcccactggagcgaacagcagcagagcagcgacaacggctcgccgacgctggaagtcgatgcgctaagccttaatccgggtcgccaggaagccagtttcgatggccaaacgctggagctgaccggtacggaattcaccctgctctatttgctggcgcaacacctcggccaggtggtttcccgtgaacatttaagccaggaagtgctgggtaagcgcctgacgccgttcgatcgcgccattgatatgcatatttctaacctgcgccgcaaactgccggaacgcaaagacggtcacccgtggtttaaaacattgcgtggtcgcggctatctgatggtttccgcttcatga

SEQ ID NO: 370082 - DNA, 501 bp, Salmonella enterica
atgcgcaaagttaccgctgctgttatggcctcaacgctggcattcagttttttaagccacgcagctgaagttgttacaagcgataactggcaccccggtgacggggccacgcagcgtagcgcgcaaaatcatatgtttgacggcataagtttaaccgaacatcagcgtcagcagatgcgagatcttatgcaacaggcaaggcacgaacagcctcctgttaatgttagcgaaatggagacaatgcatcggcttgtcaccgcagaaaaatttgatgaaagcgctgtgcgcgctcaggcagaaaaaatggcgcaagagcaggttgcccgccaggtcgaaatggcccgcgtgcgtaaccagatgtatcgcctgttaacgccggagcagcaagcggttttgaatgaaaagcatcagcaacgaatggagcaactgcgcgacgtggcgcaatggcaaaaaagttcatcgttgaaattattgagtagtagcaactcacgttcccagtaa

SEQ ID NO: 370083 - DNA, 903 bp, Salmonella enterica
atgaatcaaacctatggacggctggttagccgggcggctatcgcggcaacagcgatggcatcagcgttacttttgatcaaaatttttgcgtggtggtatacgggatcggtgagtattctggcggcgttggtggactcgctggtggatattgccgcgtcattgacgaatttgttggtcgtgcgttattcgctgcaacccgcagatgatgaacacacgtttgggcacggtaaagcggagtcgctggcggcgctggcgcaaagtatgtttatttccggttcggcgttgtttctgtttttgaccagtattcagaatctgattaagccgacgccaatgaacgaccccggcgtggggattggcgttaccgtcatcgctctgatatgcactattatactggtcacgtttcagcgctgggtggtacgcaagacccaaagtcaggcggtacgggcggatatgcttcattatcagtctgatgttatgatgaacggagcgattcttatcgcgctggggttatcctggtacggttggcatcgtgcggatgccctgtttgcgttaggtatcggcatctatattttgtatagcgcgttgcgtatggggtatgaggcggtgcagtcattattggatcgcgcgctgcccgatgcggaacgacaggaaattattgatatcgtgacgtcatggccgggagtcagcggcgcgcacgatctccgcacgcggcagtcagggccgactcgctttattcagattcatttggaaatggaagataatctgccgctcgttcaggcgcattttgtggctgaccaggtagagcaggcgattttacagcgttttccgggttcagatgtcattattcatcaggatccctgttcagtcgttcccagggaaggcaggaagttcgagcttgtataa

SEQ ID NO: 370084 - DNA, 963 bp, Salmonella enterica
atgattaagaaaatcggtgtgttgacaagcggcggtgatgcgccgggcatgaacgcggcaatccgcggtgttgtgcgcgcagcgttgacggaagggctggaagtcatgggcatttatgacggctatctgggcctgtatgaagatcgtatggttcagcttgaccgttacagcgtatctgacatgatcaaccgtggcggtactttcctcggttctgcccgtttcccggaattccgtgacgaaaatattcgcgctgtcgcgatcgaaaacctgaaaaaacgcggtatcgatgcgctggtagttattggcggcgacggttcttatatgggtgcaaaacgtctgactgaaatgggcttcccgtgcatcggtctgccaggcactatcgataacgacatcaaaggcaccgactacactatcggctatttcactgctctcggcactgtagtggaagcgattgaccgtctgcgtgacacctcctcttctcaccagcgtatctctatcgttgaggtgatgggccgttattgcggcgacctgacgttggcggcggctattgctggcggctgtgagtttatcgtggtgccggaagttgaatttaatcgcgaagatctggtggccgaaatcaaagccgggatcgcgaaagggaaaaaacacgctatcgtcgctattactgagcatatgtgcgatgttgacgaactggcgcactttattgaaaaagaaacgggccgtgagacgcgtgcgacggtgctcggccacattcagcgcggtggttccccggtaccttacgatcgcattctggcttcccgtatgggcgcgtatgctattgacctgctgctggaaggccatggcggtcgttgtgtcggtatccagaacgagcagcttgttcatcatgacatcatcgatgcgattgaaaacatgaagcgtccgttcaaaagcgactggatggagtgcgcgaaaaaactgtactga

SEQ ID NO: 370085 - DNA, 990 bp, Salmonella enterica
atgaaaaagtggggcgtggggttcacattattgctggcgtcaaccagcattctggcaaaggatattcagttacttaacgtatcatacgatccaacgcgtgagctgtacgagcagtacaacaaagcgtttagcgcgcactggaagcaggaaaccggcgacaacgtcgtgatccgtcaatcgcacggcggttcgggtaaacaggcgacttccgttattaacggcattgaagccgatgtcgtgacgctggcgctggcttacgatgtggacgctattgcggaacgtggtcgtatcgataaaaactggatcaagcgtctgccggataactcagcaccttacacctccaccatcgttttcctggtccgcaaaggcaatccaaaacaaattcatgactggaatgatctgattaaacccggtgtgtcggtgattacgccaaacccgaaaagctccggcggcgcacgctggaactatctggcggcatggggctacgccctgcaccacaacaataacgatcaggccaaagcgcaggactttgtcaaagccctgtttaaaaacgttgaagtgctggactccggcgcgcgcggctcaaccaatactttcgttgaacgcggtatcggtgatgtgctgattgcctgggaaaacgaagcgctactggcgacgaatgaactgggtaaagataaattcgagatagtgaccccgagtgaatctattctcgcagagccgaccgtgtccgtggtggataaagtcgttgagaagaaagggacgaatgcggtggcggaagcgtatctgaagtatctctactcgccggaagggcaggagatagcagcgaaaaacttctaccgtccgcgcgatgctgacgtggcgaaaaaatacgacgatgcgtttccgaagctgaagctgttcaccattgacgaggtgtttggcggctgggcgaaggcgcaaaaagatcacttcgctaatggcggtacgttcgaccaaattagcaaacgctaa

SEQ ID NO: 370086 - DNA, 756 bp, Salmonella enterica
atgaaaaaaacaggctactttttactggcggtgatagtgattgtcgccgcggcgggcgtcggttactggaaattttccggcaatcctgatgcattacgggaaatcgtgcttgaacaatgcctgcccgatcagttacagcatcaaaacccagcgccttgcgcggaagtcaaacctcgcgccggctatgtcgtctttaaagatcgtcacggtccgttgcaatatttattgatgcccacctaccgtatcaacggtacagaaagcccgctattgctggaacccgctacgcccaactttttctggctggcctggcaggctcgcggctatatgagtaaaaaatacgggcatgatattccggatagcgcggtctcgctggcgattaattcgcggcttggtcgttcacaggaccatttgcatatccatatttcttgcatccgtcctgacgttcgggaacaactggataacgatctcacgcgcatcagcactcgctggcttccgctgccgggtggcctgatggggcatgaatacctggcgcgccgggtaactgagagcgaactggcgcagcgtagtccgtttatgatgctggcggaagaggtgccggaagcgcgcgatcatatgggacgctatgcgctggcggtggtacgccaaagcgacgactcttttgtcctgctggcgaccgagcgtaacctgctgacgcttaatcgcgcatcggcggaagagattcaggaccatagttgcgccattttgtcttcccgctga

SEQ ID NO: 370087 - DNA, 1335 bp, Salmonella enterica
atgaaactttctattgtggaaaaaatcggcttcggcgcgggagatatggcgataaacgttgtgattatcgccatgcagctgctcctcgcctatttctataccgatatctacggcctgagcgccgctgatgttggcgtactgtttgtggttgtgcggatgattgatgccattatcgatccggccatgggggttcttaccgataaactgaacacgcgctgggggcgttatcgcccgtggctgctgtggtttgctattccttttggtttcgccgtgtatttgatgtttattacgcctgacatggcttatatggccaagctggcgtgggcctatggcacctatattcttatgaccctggtctatactgcgatcaccattccctatatttcgatgattggcgtcattaccagcgaccccgtcgaacggttaagcgccaacggctatcgttttgtgatgaccaagattgccgctttcctggtgactatcgtcgtaccgatgcttgccgtctggctggggcagggcaacaaggcgctgggttaccagttttcgatggggctgatgggggcgatgggcgccttgctgtttatcttctgttttcttaccacgcgtgaacgcagcgagccggaaattacgtcgttatcggtggggaaacagtttaaatatctgttacgcaacgatcagtggattattctcggcgttgttattctgctgctgatgtgcggttatgttattcgcggttccgttgccgcttattacgccaagtattatctgaacggcggagatagtctgatttcacccttcctgactaccggcgtcgttgcctctattttagcgatgatcgctaccacctggataaccaagttctgggacaaaattaagatgttccgctacacccagattattacctttatcctgagcgcgctgatgtatttctccgtcgggcgtgaaaatcttatcctggcgtttgcgttctattttcttattaatttcttctgcgatatgcaaatgccggtgttctggtcctctatcgccgaagcggtggattacggagaaaagaaaaccggtctgcgcgtttccgggttggcgtttggcggcatcctcttcttccagaagtttgggatggggatcgcgggcgggatactcggattcctgctgagccactttggctatcaggccgatgttgaacagaccgcacgttcgctcaccggtattgcgctgatgatgacgctcattcctgctctgttccaccttgcggttgggctgcttatgaaaaagtatctgattaacaacgaatattatcgtgatattcagctcgccctggcgcagaaacaggcataa

SEQ ID NO: 370088 - DNA, 960 bp, Salmonella enterica
atgaaggccatgaataaggtttgggttatcggcgatgcctccgttgatctggtgccggaaaaacagaacagctatctgaaatgccccggcggagcgtcggcgaacgtgggggtatgcgttgccaggctgggcggagagtgcggttttattggctgtcttggcgacgatgacgccggtcgcttcctgcgccaggtttttcaggataacggcgtggatgtcacgtttctacgcatggatccggccctgaccagcgcggtgctgatcgtcaacctgacggctgatggggagcgcagctttacctatctggtacatccgggggctgatatctacgtttcgccgcaggacctgccgccgttcaggcagtacgaatggttttacttcagttcaattggcctcaccgacagtcccgctcgcgaagcatgtctggaaggggcgagacgcatgcgagaagccggtggctacgtgttattcgacgtcaacttacgcagcaagatgtggcgcaataccgatgaaatccctgacctgatcgcccggtccgccgcactggcttctatctgcaaagtctcggcagatgagctgtgccagctcagcggggccagtcactggcaggatgcgcgttattacctgcgcgatctaggctgtgacaccacgatcatttcgctgggggccgatggcgcgctgttgattaccgccgagggggagttccattttcccgcaccacgcgtcgatgtcgtcgataccactggggcaggcgatgcttttgtcggcggcctgctgttcaccctttcccgcgcaaattgctggaaccatgccctgctggcggaggctatcagcaatgccaacgcctgcggcgccatggcggtaacggcaaagggcgcaatgaccgctttaccgtttcccgaccagctaaacacttttctttccagccattcgctggcacaagccatgaccgtgaaataa

SEQ ID NO: 370089 - DNA, 1041 bp, Salmonella enterica
atgcacgttgatcaaaacaaaatactgggatgcctggtgggcgccgccgccgcggacgcgatgggagccgcgacggaagtacgcacccagcagcaaataaaagactattttggcggctgggtgacgacctttcaaaaaccgccagcggacacgtttggccgctgcaacgaagcggggatgtgcacggatgattttattcaggcgaagtacatcatggatgcgctgctgcgccatcaacgccaggtcagcgacgaggcgatgcgcgaggcttttcagcagtggctggattacccgtactacgccaactttaccggcccgacgacgcgtgcggcaatgaaggcaatattcaatgataaccgcgcctctttacagggtgagctggaaggcgagaaacagtcggtacagattattaataagggtaacgcggaggcaacgaacggcgccgccatgaagatttggccagcggcggtgctgcacccgggtgatattgacgcggcgattgactgcgcgctgcagatttgccgttttacgcataataacgtgctggcgatgtccggcgcagcggcgatggcggcggcaaccagcgaggcgttaagagcgcagaccaatgcagacagcattattgccgccggtatttacggtgcgcaaaggggctatctgctggcgcaggagcaaggggcgatgatggtggcaggtccttccgttgcccgacgcattgaactggccgtagatatcggtaaacgtcatcgccattgggaaacggcggtggtggaacttgctgatattattggctccgggctgcacgtgagtgaagcggtgccggcggcctttggcctgttcgcgtgttgtccgaattctgccgtagatgctattatctccggcgttaatatcggcaatgatactgatactgtcgccaccatggtcggggcgatttccggcgcattccatggcgtggaggcttttcccgccgattatttaacgactttggatcgtatgaatcatttcgatttggcagaactggccaggcaaatcgcagggtag

SEQ ID NO: 370090 - DNA, 723 bp, Salmonella enterica
ttgcaggttgataaaacgagctttactccgctttataagcaactattttttatcatctgtcagcagatccaaaatggatccctgcctttaggcagccagctgccgacgcaaaaagagattgccagagcctacaacgtctcgctgattgtggttaaacaggcctggagcgaattaatcaatgcgggtattatttcctcccagcgcgggagtggttcggtggtgtgctcggtaccggaaggcgtgagctacgggcacacgtttcgcggtattacccgcgatctccaggacgccagcgtggcgattgagaaccgtattctggaaatcgcgccgcgccgcgcgcgcgacgctcaggcagacggcttgagcctgcccgcacagcatcactatctctatatttcgcgtattcgttgcctgaataaccgtccgtttaaccatgaaaagatctatctcgatcttagcttctttcccgatctgcaacttacaccgcaggcgctggagcatacgtcgctttattcgttattaaacgtcacaagcgactcggcgatagaaaaagttgaggcgattttaccttccgctgacctgtgcgaaaaattgcaaatcgccgccaataaaccgctgttatccgtcgccagacagacgtttcaggccgggaaggacagcccttttgagtattgccgctattacgtgctgtctgaatactttggtgaaattcattatcactga

SEQ ID NO: 370091 - DNA, 171 bp, Salmonella enterica
atgtcgctctggttgtcccatcctctgttcctcccgtccatcatcgttggcgttactatccttctgtgggcgacttcgctactgccggagtttatgaccgcactgctattttttgctgctgtggtggcgatgggaccagggaaagttcctgcgcgggcggggatgctgtga

SEQ ID NO: 370092 - DNA, 351 bp, Salmonella enterica
atgcaaaaaacgaatgagaagaatcatgaataccgctttggcgataatggccctaaatacttaatccgtgggccgggctgcgatatgggcgtcgtcatactacaaccagggcagtcattccctaaccatcgccataataccgcttgtgaggttttttataccctaagcggtgaagtgtgcctgtatctggaaggaacacctcatatcctgcaaactggagatgttttacagtgcgaacctggggaggcgcattatctcattaataacggcgataaaccctggaaaggcgtgtttattaaatcgccgcatctggaaaatgacagccaccccgcagatccaccggcctggtaa

SEQ ID NO: 370093 - DNA, 1593 bp, Salmonella enterica
atggctcgactctgtacccatactgaatcaggacattacctgatggctcttgacgccggtaccggtagcgtcagagcagtaatttttgatctacaaggaaagcaaatagctgtcggtcaagcggaatggcagcatctggccgtgccggatgtgcctggttcgatggagtttgatcttgccaaaaactggcaactggcttgccagtgtatccgtcaggcactacagaaagccgccatccctgcaacggctatcgctgccgtatcggcctgctcgatgcgtgaaggcattgttatttatgacagtaacggcgaaccaatttgggcctgcgctaatgttgacgcccgcgcggcgcacgaagtcagtgaattaaaagagctgcacgataacacctttgaggaggaagtttatcgttgctccgggcaaacgctggcgctcagcgctattccgcgtctgctctggcttgcccaccatcgtccggatatttatcatcgcgcgtcaaccgtcactatgatcagcgactggatggcctttatgctcagcggcgaactggcggtcgatccctccaacgcaggcacgacggggttattggatctggtgacccgcaactggaaacgtagtctgttacagatggcgggcctgcgttctgacattctctcgccggtaaaagaaaccgggacgctgctcggtcacatttcacagaaagcggctgaacagtgcgacctgcaagcgggtacgccggtcatcgttggcggcggcgatgtgcagttaggctgtctggggctgggcgtcgtacgcccggcgcaaacggccgtgctgggcggaaccttctggcaacaggtcgtcaatcttcccgcgccggtcaccgacccaaacatgaacgttcgcatcaatcctcatgtgatccccggtatggtacaaaccgagtctattagcttttttactgggttaacgatgcgttggttccgcgacgccttttgcgccgaggaaaaactaatcgctgaaaggttaggtattgatgcgtattccctgctggaagatatggccagccgggtgcctcccggcgcgtacggtgtgatgcccatcttctctgacgttatgcgttttaaacgctggtaccatgccgcgccgtcgtttatcaatctgtctatcgatcctgaaaagtgtaataaagcgaccctatttcgcgcgctggaagagaatgccgccattgtttccgcctgcaatttacagcaaattgccgcgttttccggcgtacaggccgactcgctggtttttgccggcggaggatctaaaggcaaattatggagccaaatccttgccgacgttacgggactcaccgttcacgtacctgtcgtcaaagaagctaccgcgctagggtgcgctattgccgcaggcgttggcgtgggtgtctggccatcgctggcggaaacgggagaaaagctagtgcgctgggatcgggagcataaacctaatcctgaaaatttcgctgtctaccagcaggccagagaaaaatggcaggccgtttatcaggatcaacgcgcgctggtcgatggtggcttaacgacatccctctggaaagcgccaggcctgtaa

SEQ ID NO: 370094 - DNA, 960 bp, Salmonella enterica
atgagcgataatacgttggtatctgattatggaatgtgcgaagaagagcaggtggcgcgtattgcctggttctactatcacgatggattgacgcagagtgaaatcagcgagcgtctggggctaacccggctaaaggtttctcgtctgctggagaaagggcatcagtccggtattattcgcgtacaaatcaactcccgctttgaagggtgtcttgagtatgaaaatgccttgcgcaaccacttcgcattgcagaatatccgcgtgctgccggcattacccgatgccgatattggtctgcgcttaggaatcggcgccgcccatatgttgatggagtctctgcggccacagcaactgctggccgtcggctttggcgaagccacgatgaccacattaaaacgcctcagcggatttatctcggcgcaacaaatccgactggtcacgttatccggcggcgtggggccgtatatgaccggaataggccagcttgatgccgcttgtagcgtaagtattatgcccgcgccgctgcgcgcatcatcgcaggaaattgcctgcacgctgcgcaatgaaaatagcgtgcgggatgtgatgctcacagcgcaagctgccgatgccgccatcgtggggattggggcaattaaccagaaagatcaagccagtatcttaaaatccggttatatcactcagggtgaacaactcatgattggccgcaaaggcgcagtaggcgatattctgggctatttttttgatgctcatggcgaaattattccagacatcaaaatccataacgaattaattggcctgaagttaaattcactttccacgatcccaaccgtgattggcgtcgccggcggcgaacaaaaagcagaagctattattgccgctatgcgcggtaactatatcaatgcgctggttaccgatcagaaaaccgcagggaaaataattcaacttattgaaaaataa

SEQ ID NO: 370095 - DNA, 1536 bp, Salmonella enterica
atgcaaatcagtcacaatactgcatcccctctgatttgtgtgcagaacatttataaaagttattccggcgtcgaagtactaaagggaattgactttactctgcatgcgggagaggtgcacgcattgcttggcggcaatggtgcgggtaaatcaacattaatgaagattattgccggtatagtcccgccagatggagggactatcgatattgctggtgtgcgttgcagtcatttaacgcctctgaaggcgcaccagtatggcatttacctggttccccaggagcctctgttatttccgagtttatctgtgcgggaaaatatcttgtttggcttgcagggacgtcaggcctccacggaaaaaatgcagcagctattaaaggcgatgggatgccaactcgatccggcgagcgctgcgggtacgcttgatgttgcagaccgccagatcgttgaaattatgcgcggcttgatgcgcgactcgcgaatcttaattcttgatgagcccacggcgtcgttaacgccagccgaaactgaccggttatttacgcgtctgcaagagttgctgaaaaagggtgtcggaattgtatttatttctcataagctaccagaaattagacagttagctcactgcgttagcgtgatgcgtgacggtaaaatcgcattattcggaaaaacgcatgacctttctaccgacgagattattcaagctatcaccccggcaacgcagggcgtcagtctttccgcgaatcaaaagttgtggctggaattgcctggcagccgcccgcagaacgaacgtggtgcgacggtattagcgctggagtcactgacgggcgaaggttttatgaatatcaaccttgaggtgcgggcaggcgaaatccttggtctggccgggttggtcggcgcgggacgcacagaactggctgaaacgctgtacggtattagaccggtcaatgcggggcggatgctgttcaatggcgaagaaattaacgccctgacaacccaacagcggttgcagctcggcctggtctatttgccggaagatcggcagtcatccgggctgtatcttgacgcttccctggcatggaatgtctgttcgctgacccacaaccaaaaaggattttggataaagccccagcgggataacgccacccttgaacgttaccaccgcgcgttaaatatcaaactcaataatgccgaacaggcggcgcgtactttatccggcggtaaccagcaaaaagtattgattgccaaatgcctggaagcctctccgcaattactgattgtcgatgaaccgacccgcggtgtcgatgtctccgcccgcagcgatatttatcagctgttgcgcagtatcgcgcaacaaaatgtcgcggtgctgtttatttcctccgatctggaagagatagagcagatggccgatcgcgtatatgtcatgcaccagggggaactgggggggcctgcgttatgcggcgaggaaattaacgttgataccatcatgcacgttgcgtttggcgaacatggtgcgtcggaggcaacatgttga

SEQ ID NO: 370096 - DNA, 1044 bp, Salmonella enterica
atgttgaaattcatccaaaataaccgggaagcgacggcactgctggcaatagtctgtttattcgtgtttcctggcgcgctggatagccagtatttgagcgtgcaaacgctgacaatggttttcagtagcgcgcaaattttgatgctgttggcgattggcgcgacgatggtaatgctcacccgcaatattgatgtatcggtgggctcgacgacaggcatgtgcgcggtattgctgggagtgatgttaaacgccggctatagcctgccggtcgcctgcctggccacactaatattaggaattgtcgccggattttttaatggcgtactggttgcctggttgaagatacccgccattgtcgccacgctgggaacgctgggcttgtatcgtgggatcatgctgctatggacaggggggaaatggattgaaggattacccgcaggcttaaagcaactctctgctccggtgtttctgggaatttccgcaatcggctggtttaccctggtgttagcgctgcttatggcctggctcctggcgaaaaccgcctttggccgcaatttttacgccaccggcgataacctgcagggcgcccggcaattgggtgtccgtaccgagatggtacgcatcatggcattttcacttaatggcggtatggcggcattggctggaatcgtgtttgcctcgcagattggcttcattcccaatcaaaccggcacggggctggaaatgaaagccatcgcggcctgcgtattggggggaattagcctgttaggcgggtcaggcacggtcatcggcgctattctcggcgcttattttcttacgcaaatcgatagtgtgttagtgctgctgcgcatccccgcctggtggaacgattttattgctggcctggtattgttgggcgtactggtattcgatgggcggctgcgttgcgcattacaacgcaatctgcgccgccagaaatatgcccgttttatatcaccacccactccactacagacggaagcaaaaacgcacgcacaacagaataaaaacaaagaggtggcatga

SEQ ID NO: 370097 - DNA, 999 bp, Salmonella enterica
atgaatccatggcgacgctatagctgggaaattgcgctggcagccttattgatctttgaaattctggctttcggtgtgattaatccacgtttattagatattaatgtcttactttttagcactagcgattttatttgtatcggtattgtcgctttgccgctaacaatggttattgtcagcggtggtatggatatttcatttggttctacaatcgggctatgcgcgattaccctgggtgtgctgtttcagctcggtatgccgctacctttagcgattattattaccctactactcggcgcaatatgtgggctgataaatgccggacttattatttataccggcgtaaacccgttggtgattaccctgggaaccatgtatttatttggtggtagcgcattattgttatctggtatggctggcgccacaggttatgaaggtattggtggatttcccacagcgttcactgattttgccaatatttcatttcttggtattcccatgccgcttattttttttcttgtgtgctgtctgtttttctggctgctcatgcatcgcacgcatatgggacgcaacgttttcctgattggccagagcgcccgtgtcgcgcagtacagcgcgatcccggtgaatcgcacgttgtataccgtgtatgccatgaccggatgcgcctccgctatcgccgccgtattactggtttcttactttggctccgcacgttcggatctgggcgcctctttcctgatgccggccattacggcggttgtgctgggaggcgccaatatttatggcggctccgggtcgattatggggtccgcgttggcggcgctgctggtgggatttttacagcaggggctacagatggccggagtgccgaatcaaatttccagcgcattgtccggtgcgcttctcattgttgttgtcgttggtcgttccgtcagtttgcatcgtcaccaaatccttgaatggtactcacgccgtcgcaatgcgcatcaggcatga

SEQ ID NO: 370098 - DNA, 1023 bp, Salmonella enterica
atggcaagacacagcattaaaatgatcgccttactcactgcgtttggtctgacatctgcggtaatgaccgtacaggcggcagagcggattgcttttattcccaaactggttggcgtgggcttttttaccagcggcggcaatggcgcgcaggaagcgggaaaagcgctgggcattgacgtaacttacgatggccctacagagcccagcgtctcaggccaggttcaactggtgaataactttgtcaatcaggggtatgacgccattatcgtttctgccgtttcgcctgatggcctgtgcccggcgttgaagcgggcaatgcaaagaggcgtgaaaatattaacctgggattccgataccaagccggagtgccgttcttactatatcaatcaagggacgccaaaacagctcggcagcatgctggtagagatggtcgctcatcaggtggacaaagagaaagcgaaagtcgctttcttctattccagcccaacggtgaccgaccagaaccagtgggtaaaagaagctaaagccaaaattagccaggaacatccggggtgggagatagtcactacccagtttggctataacgatgccacgaaatcgctccagacggcggaaggtatcatcaaagcgtatcccgatctggatgccatcatcgcgcctgacgctaacgctttacctgctgcggcacaggcggcggagaaccttaaacgtaataatctcgcgattgttggttttagtacgccgaatgtgatgcgcccttatgttcagcgcggcactgttaaagagtttggcctgtgggatgtcgtccaacagggaaaaatttccgtatatgtcgccaacgcgttgctgaaaaatatgccaatgaatgtcggtgactcactggatattcccggcatcggcaaagtcaccgtttcacctaatagtgagcagggatatcactatgaggcaaaaggtaacggcattgtgttattgccggagcgtgtcattttcaacaaagacaatatcgacaaatatgatttctga

SEQ ID NO: 370099 - DNA, 876 bp, Salmonella enterica
atggctgatttagatgatattaaagatggcaaagattttcacaccgataaaccacaaactaacactttgttcgcattaaaaggctgtggcgcgctggattggggaatgcagtccagactggcgaggatttttaaccccaaaaccagaaaaacggtcatgctggcctttgaccatggatatttccaggggccgacaaccggacttgagcgtattgatattaatattgcgccgctctttgaatatgctgatgtcttaatgtgtactcgcggcatattacgcagtgtggtacctccggcaatcaataaaccagtcgttttacgtgcgtccggggcgaattctattctcactgaattaagcaatgaggcggttgcggtggcgatggatgacgctgtgcggttgaatagctgtgctgctgccgcacaggtttatattggtagtgagcatgaacatcagtcgattaaaaatattattcaactgattgatgccgggttacgcgtcgggatgccaataatggcagtgaccggagtgggtaaagatatggctcgcgaccagcgttatttttcactggcaacgcgtatcgctgcggaaatgggggcgcaaattatcaaaacgtattatgtcgataaaggttttgagcgtattgcggcaggttgtccggtgccgattgtcatcgccggcggtaaaaaactgcctgaacgtgaagcattggaaatgtgctatcaggcgattgaccagggggcttctggcgtagatatggggcgtaatatattccagtcagaagatccggtagccatgattaaagcggtacatgccgtcgttcatcataacgaaacagcagagcgtgcttatgagctgtttttgagtgagaaaggttaa

SEQ ID NO: 370100 - DNA, 294 bp, Salmonella enterica
atgatgcacgttacgctggttgaaattaacgttcatgatgacaaggttgaacaatttatcgatgtttttcggcagaatcatctgggctcaattaaagagccgggtaacttgcgttttgatgttctgcaggatccgcaggtgcctacgcgattttatatttatgaagcctacgttgatgaacaggccgtcgcttttcacaagacaacgccacactataaaacttgcgtggagcagcttgaaccgttgatgaccggtccgcggacaaaaaaagtttttatgggtttgatgccttaa

SEQ ID NO: 370101 - DNA, 765 bp, Salmonella enterica
atgaacagccagtttgccggattaacgcgcgaagcatgtgtggcattgttagcgtcatatccgcttagtgtgggtattctggcagggcagtggattgcgttgcatcgctatctgcaacagttggaagcgttaaaccagccgctgttgcatttggatttgatggatggtcaattttgcccgcagtttaccgttgggccatgggcagttgggcaactgccgcaaacttttatcaaagatgttcatttgatggtagcggaccaatggacggcggcgcaagcctgcgtgaaggcgggcgcacactgcatcacgcttcaggcagaaggcgatattcatctgcatcatacgctaagctggcttggtcagcagaccgtgcccgttattggcggtgaaatgccggtgatccgggggattagtttatgcccggcaacgcctctggatgtcattatccccattctgagcgacgttgaggttattcaactactggcagtgaaccctggatacggcagtaaaatgcgctccagtgatttgcacgagcgcgtggcgcagcttctctgtctacttggtgataaacgcgaaggtaaaattatcgttattgatgggtcgttaacgcaggatcagttgccttcgctgattgcacagggcatcaatcgtgttgtttctggtagtgcgttatttcgtgatgatcggctggttgagaatacgcggagctggagggcgatgtttaaggttgccggggatactactttcttaccctccacagcataa

SEQ ID NO: 370102 - DNA, 768 bp, Salmonella enterica
atgcgacatcctttagtgatgggtaactggaaactgaacggcagccgccacatggtaaacgaactggtggctaacctgcgtaaagaactggcgggcgtagcaggctgcgacgtggcaatcgctccgccggaaatgtatatcgatctggcgaaacgcgctgctgccggcagccacatcatgctgggcgcgcagaacgttgatctgaatctgtctggcgcattcaccggtgaaacttcggctgaaatgctgaaagatatcggcgcgcagtacattattatcggccactccgagcgtcgtacttatcacaaagaatctgacgaactgatcgccaaaaaattcgccgtactgaaagaacaaggtctgacgccggtactgtgcatcggtgaaaccgaagcggaaaacgaagcgggcaaaacagaagaagtatgcgcacgccagatcgacgcggtactgaaaacgcagggcgcggcagcctttgaaggcgcggttatcgcttacgaacccgtatgggcgatcggtaccggtaaatctgcaacgcctgcgcaggcgcaggcagtgcacaaattcatccgtgaccacattgctaaagctgacgcgaaaatcgctgaacaggtcattatccagtacggcggttctgttaatgcctccaacgcagccgaactgttcgcgcagccggacatcgacggcgcgctggtaggcggcgcttctctgaaagctgacgccttcgccgtgatcgtgaaagcagcagaagctgctaaacaggcttaa

SEQ ID NO: 370103 - DNA, 597 bp, Salmonella enterica
atgaagccaggatgtactctgtttttactgttgttttctgctctcaccgccagcataacggcgcacgcgcagctctcttcatcgaccacgacagcgccctatctgctggcgggctcgccaacctttgatctttctattagccagtttcgtgagaactttaaccgccagaatcccgatctgccgctcaatgaatttcgcgccattgagaatagccgcgataaggcgaatctgacccgcgccgccagtaagattaacgaaaatctgtatgcctccacggcgttggagcgcggtacgctcaaagtgaaaagtatgcagattacctggctgcccattcaggggccggaacagaaagcggcgaaagcgaaagcgctggaatatatggccgccattattcgtactgtcgccccgttgctgacaaaagagcaaagccagaaaaaactgcaaaagatgcttatcgccggtaaaggtaaacactattacgccgagacagaaggcgcggtacgttatgttgtcgcagataacggcgaaaaggggctgaccttcgcggttgaaccgattaagctggcgttatctgaaaatctggaaggggcgaattga

SEQ ID NO: 370104 - DNA, 429 bp, Salmonella enterica
atgaccatacagcaatggttattctcatttaaagggcgtatcggacgccgtgatttctggatttggatcggcctctggtttgccgggatgctggcgctattttcgctggcggggaaaaatctgcttgatatccaaacggcggcattttgcctggtgtgcctgctgtggccgaccgccgccgtcatggtcaaacgtctgcatgaccggggacgctccggcgcgtgggcgttgctgatgattctggcgtggatgctgctggccggaaactgggcgatgctgccggggatgtggcagtgggtcgtcgggcgatttattccgacgctgatcctggtgatgatgcttatcgatctgggcgcgtttgtcggtgttcagggggaaaataagtttgggaaagcgacacaggacgtgaagtttaaagcagagctgtag

SEQ ID NO: 370105 - DNA, 747 bp, Salmonella enterica
atggccgattgggtaacaggtaaagtcactaaggtgcaaaactggactgacgcactgttcagcctgaccgttcacgcccccattaatccttttactgcaggccaatttaccaaactcggactggagatcgatggcgagcgcgttcagcgcgcgtattcctatgtcaatgcgcctgacaatccgaatttagagttttatctggtgacggtgccgcaaggaaagctcagcccgcggctggcggcgctaaaacctggcgatgaggtgcaagtggtcagcgacgcgtcgggtttctttgtactggatgaagtgcctgactgcgagacgctatggatgctggcgaccggaaccgctattggcccgtatttgtctattctgcaatatgggcaggatgtcgcgcgctttaaaaatctggtcttggtccacgccgcacgcttcgccgccgatttaagctatctgccgctaatgctggaactgcaacagcgttatgaaggcaagctgcgcatccaaacggtggtcagccgggagagcgtgccaggctcgctcaccggacgcgtgccagcgctcattgaaaacggcgagctggaaaaagccgttggattaccgatggataaagagaccagccacgtcatgctgtgcgggaacccgcagatggtgcgcgatacgcagcaactgctgaaagagacccgacagatgactaaacatctgcgccgccgaccggggcatatgacggctgaacattactggtga

SEQ ID NO: 370106 - DNA, 1011 bp, Salmonella enterica
atgagacgagaacttgccatcgaattttcccgtgtgaccgaagcggcggcgctggctggctacaaatggctgggacgcggcgataaaaataccgcggacggcgcggcggtcaacgccatgcgtatcatgctcaaccaggtcaacattgacggcaccatcgtgattggcgaaggcgaaatcgacgaagccccgatgctctatatcggcgagaaagtcggtaccggccacggcgatgcggtagatatcgccgtcgatccgattgagggcacgcgcatgacggcgatgggtcaggcgaacgcgctggcggtgctggcggtcggcgataaaggctgcttcctgaatgcgcccgatatgtatatggaaaaactgattgtcggtccgggcgccaaaggggcgatcgatctcaatctgccgctggcggataacctacgcaacatcgcggatgcgctgggtaaaccgcttggcgatctgaccgtgaccattctggcaaaaccgcgtcatgacgaggtcatcgcagagatggccaaactgggcgtacgcgtgtttgccattcctgacggcgacgtcgcggcctcaattctgacctgtatgccagatagcgaagtcgacgtgctgtacgggattggcggcgcaccagaaggcgtggtatccgcagcggtgatccgcgcgctggacggcgatatgcagggtcgtctgctggcgcgccatgatgtgaaaggcgacagcgaagaaaaccgccgcattggcgaacaggaactggcgcgctgcaaagcaatgggcattgaagcgggcaaggcgttatgcctgggcgacatggcgcgtagcgataacgttattttctccgcgaccggcatcacgaaaggcgatctgctggaaggaattagccggaaaggccatattgccacgacggaaacgctgctgatccgcggcaaatcacgcaccatccgccgcattcagtctatccactatcttgatcgtaaagatccggatgtacaggcgcatatcctctag

SEQ ID NO: 370107 - DNA, 1509 bp, Salmonella enterica
atgactgaaaaaaaatatatcgttgcgctcgaccagggtaccaccagctcccgcgcggtcgttatggatcatgacgcgaatatcgtcagcgtatcacagcgtgaatttgagcaaatttatcctaagccaggctgggtagaacacgacccgatggaaatttgggcgtcccaaagctcaacgctggtagaagtgctggctaaggccgatatcagttccgatcagattgccgctatcggtatcaccaaccaacgtgaaaccgcgatcgtctgggaacgtgaaaccggcaaaccgatatacaacgctattgtctggcagtgccgtcgtaccgccgatatttgcgaacagcttaaacgcgacggcctggaagattacatccgcgacaataccggtctggtcgtcgacccgtacttctctggcactaaagtgaaatggatccttgaccatgtggaaggttcgcgcgaacgcgcgaagcgtggcgagctgctgttcggtacggtggatacctggcttatctggaagatgacgcagggccgcgtccacgttacggattacaccaacgcctcacgaaccatgctgttcaacatccatgatttggactgggacgataagatgctggacgtgctggatatcccacgcgcgatgctgccccaggtacgtaagtcctccgaagtctacggccagaccaatattggcggtaaaggcggtacacgtattcctatcgccgggattgccggggatcagcaggccgcgctattcggccaactgtgcgtaaaggaaggaatggcaaagaatacctacggcaccggctgctttatgctgatgaacaccggcgagaaagcggtaaaatcggaaaacggcctgctgaccaccatcgcctgcggcccaagcggcgaagtcaactatgcgctggaaggcgcggtgtttatggcgggagcgtccattcaatggctgcgtgatgaaatgaagctcatcagcgacgcgttcgactccgaatatttcgccacgaaagtgaaagataccaacggtgtctacgtggttccggccttcaccggtctgggcgcgccgtactgggacccgtatgcccgcggcgccatttttggcctgacccgcggcgtgaactctaatcacattatccgcgcgacgctcgaatccatcgcttaccagacccgcgacgtactggaagcgatgcaggccgactccggtatccgcctgcacgctctgcgtgtggacggcggcgcagtggccaacaacttcctgatgcagttccagtcagatattctcggcacgcgggtggaacgcccggaagtgcgcgaagtgaccgcgctgggcgccgcctatctggctggcctggccgtcggttactggcagaacctggacgagctgcaggaaaaagccgtcattgagcgagaattccgccccggcattgaaaccaccgagcgtaactaccgttacagcggctggaagaaagcggttaaacgcgcaatggcgtgggaagagcacgacaagtaa

SEQ ID NO: 370108 - DNA, 846 bp, Salmonella enterica
atgagtcaaacatcaaccttaaaaggccagtgcattgctgaattcctcggtaccgggttgttgatttttttcggtgtgggttgtgtcgctgcgcttaaagttgccggagctacttttggacagtgggaaatcagcgtcatctggggtctgggagtagcgatggctatttacctgacggcaggtgtttctggcgcacacctgaacccggcagtgaccatcgcactctggctatttgcctgtttcgacaaacgtaaagttgttccttttattatttctcaagttgccggcgccttttgcgcagcggcgttagtttacgggctttattacaatctttttgtggacttcgaacaaacccaccatatcgtccgtggcagcgttgaaagtctcgatctcgcaggcattttctcaacttacccgaatcctcatatcaattttgtgcaggccttcgcggttgaaatggtgattaccgctattctgatggggctgattctggcgctgaccgacgacggaaacggcgtacctcgcggtccgcttgcgccactgctcattggtttactgatcgccgttatcggtgcctctatggggccgttgaccgggtttgcgatgaatccggcgcgtgactttggccccaaaatgttcgccgggcttgccggctggggtgaaattgcgtttaccggcggtagagacattccttacttcctggtgccactgtttggccccatcgtcggcgccattctgggcgcgtttgcttatcgcaaatttattggccgtcatttgccgtgcgatacctgcgtcgtggaagagaaggactccaccgcgaccacacaacaaaatgcttcgctgtaa

SEQ ID NO: 370109 - DNA, 240 bp, Salmonella enterica
atgtctttagaagtgtttgagaaactggaagcaaaagtacagcaggcgattgacaccatcaccctgttacagatggaaattgaagagctgaaagaaaagaacaacagcctgacgcaggaagtgcagtctgcacagcatcagcgtgaagaactcgagcgtgaaaataattctctgaaggaacagcagagcggctggcaggaacgtttgcaggcgctgcttggtcgtatggaagaagtctaa

SEQ ID NO: 370110 - DNA, 486 bp, Salmonella enterica
atgaaatacgatacttccgagctttgtgacatctatcaggaagatgtcaacgtcgtggaaccgctgttctctaattttggagggcggtcgtcgtttggcggacaaatcatcacggtaaaatgtttcgaggacaacgggttgctgtacgatctgctcgaacaaaatggccgtggtcgggttctgctggtcgatggcggcggttctgtccgtcgtgcattagtcgatgcggagctggcgcgtctggccacgcaaaatgaatgggaagggctggttatctatggcgcggtgcgtcaggtggacgatctggaagagctggatatcggcattcaggcgatcgccgccattccggttggcgccgcaggtgaaggcattggggaaagcgatgtgcgcgtcaatttcggcggcgtgacgttcttctccggcgatcatctctatgccgacaacaccgggattatcctttccgaagacccgcttgatatcgagtga

SEQ ID NO: 370111 - DNA, 930 bp, Salmonella enterica
atgactgaacaacaacaaattagccgcacccaggcctggctggaaagcttacgacccaaaaccttacccctcgccttcgcagcgattatcgtcggtacggccctggcatggtggcaaggctatttcgatcctctggtcgcgctgctggcccttatcaccgccgggctgctgcaaattttatccaacctcgccaacgattatggcgacgctgtcaaaggcagcgataaaccggatcgcatcgggccgctgcgggggatgcaaaaaggcgtcatcacccggcaggagatgaagcgggcgttaatcattaccgtcgtgctgatctgtatctccggactggcgctggtggcggtcgcgtgccatacgttaaccgattttatcggcttcctgattttgggcgggctgtcgattatcgccgccatcacctacaccgtgggtaatcggccctacggctatatcgggctgggtgatatctctgttctggtattctttggctggctaagtgtcatggggagctggtatctccaggcgcatacgctgattccggcgctgattctcccggccaccgcctgcggtttactggcgacggcagtgctgaatattaataacctgcgcgatattaatagcgacagagagaacggcaaaaacacccttgtagtacgactgggcgatgtcaacgcgcgtcgttatcacgcctgcctgttgctaggcgcgctgctctgtctggcgctgtttaatctgctctcgctacacagtccgtggggatggttgtttattctggccgcgcccttgctcattaaacaagcgcgctacgtaatgcgcgaaagggagcctgcggcaatgcgcccgatgcttgaacgtaccgttaaaggcgcgttgttaaccaacctgttatttgtgattgggatactcttaagtcagtgggccgtttaa

SEQ ID NO: 370112 - DNA, 1332 bp, Salmonella enterica
atgtctgaaatgaccccacgcgaaattgtcagcgaactgaacaaacacattatcggccaggataacgcaaagcgttccgtggcgattgcattgcgtaaccgctggcgtcgtatgcagcttgatgaagagctgcgccacgaagtaacgccgaaaaatattctgatgattggcccgaccggcgtcggtaaaaccgaaatcgcccgtcgtctggcaaaactcgccaacgcaccgttcattaaagtcgaagccaccaaattcaccgaagtgggctacgtcgggaaagaagtggactctatcatccgcgatctgaccgatgccgctgtgaaaatggttcgcgtacaggctatcgagaaaaaccgctatcgtgcggaagagttggcggaagaacgtattctcgacgtactgatcccacccgcaaaaaataactggggccaggccgaacagcagcaggagccttctgccgcccgccaaacgttccgcaaaaaactgcgcgaaggccagctcgacgataaagagatcgagattaacctcgccgccgcgccgatgggcgtagagattatggcgcctccgggcatggaagagatgaccagccagttgcagtctatgttccagaacctgggcggtcagaaacagaaaccgcgtaagctgaaaattaaagacgcgatgaaactgttggttgaagaagaggctgctaagctggtcaacccggaagagctgaaacaggacgctatcgacgcggttgaacagcacggcatcgtgtttatcgatgaaattgacaaaatttgtaagcgtggcgaaacctccggcccggatgtttcacgcgaaggcgtacagcgcgacttactgccgctggtagaaggctgcacggtttcgaccaaacacgggatggtcaaaacggatcatattctgtttatcgcctctggcgcgttccaggtggcgaagccgtctgatctgatcccggaactgcagggccgtctgccgattcgcgttgaacttcaggcgctgaccaccagcgatttcgaacgcattttgaccgagccaaacgcgtccgtcaccgtgcagtataaagcgctgatggcaactgaaggcgtcaatatcgagttcaccgattccggtattaaacgtattgccgaagccgcctggcaggttaacgaaaccaccgaaaacatcggcgcgcgccgtctgcataccgtactggagcgtctgatggaagaaatttcctataacgccagcgatctgcacggccaaaacatcacaattgatgcggaatatgtgagcaaacatctggatgcgctggtcgcagatgaagatctaagccgttttatcttataa

SEQ ID NO: 370113 - DNA, 531 bp, Salmonella enterica
gtgacaacaatagtaagcgtacgccgtaacggccacgtggtaatcgccggtgatggtcaggccacactgggtaacacagtaatgaaaggcaacgtgaagaaagtccgccgcctctacaacgacaaggtcattgcgggctttgcgggcggtactgcggatgcattcacgctgttcgagctgtttgaacgtaaactggaaatgcatcaggggcacctggtcaaagccgccgttgaactggcgaaagactggcgtaccgaccgcatgctacgcaaactggaagcgttgctggccgtcgcggatgaaaccgcttcgctcatcatcacgggtaacggcgatgtcgtgcaacctgaaaacgatttaattgctatcggctccggcggtccttatgcccaggctgccgctcgcgctctgttggaaaataccgagctcggcgcgcgcgaaattgctgaaaaggcgttggatattgcaggcgatatctgcatttacaccaaccatttccacaccattgaagaattgaccgccaaagcgtaa

SEQ ID NO: 370114 - DNA, 882 bp, Salmonella enterica
atgcctgccgtctcgccggcaatggtcgcgattgcggcagccgtccttgtgacctttatcggcggtctgtacttcattactcaccataagaaagaagagtccgaaacgctacaaaaccagaaagtcaccggcaatgggcttccgccaaaaccggaagagcgctggcgttacatcaaagagctggaaagtcgccagccaggcgtgcgtacgccaacggaaccgtccgccggcggtgaagtcatgaacccgaatcagctcaccagcgagcagcgtcaacttctggagcagatgcaggcggatatgcgtcagcagccaacgcaacttaacgaagtgccgtggaacgagcagacgccagaacaacgccagcaaacgctacagcgccagcgtcaggcgcagcagcagcagtgggctcaaacgcagcctgttcagcaaccacgtacgcagccgcgggtaaacgaacagtcgcaaacgcgcacggtacagtccgccccggcgcaacccgcgcgccaaagtcagccgccgaagcagacggcctcgcagcaaccttatcaggatttgctgcaaacgccggcgcataccagcgcggcagcgccaaaagccgcgcccattacgcgcgcgcctgaagcgccgaaggcgacagcagagaaaaaagatgaacgtcgctggatggtgcaatgtggttcattcaaaggcgccgagcaggcagaaagcgtccgcgctcagctggcgtttgaaggctttgactccaaaattaccaccaataacggctggaatcgcgtggttatcgggccggtgaaaggtaaagaaaatgccgacagcaccattaaccgtctgaagatggcgggccatacaaactgcattcgactcgccaccgggggttga

SEQ ID NO: 370115 - DNA, 1026 bp, Salmonella enterica
gtgaaatcgaacaagcaggttactgccgctacgatgaaggatgttgcgttgaaggcgaaagtctctacggcaaccgtatcccgcgcgttaatgaaccccgataaagtctcccagtcgacccgtagccgggttgaacaggccgcgcttgaagtgggttatttcccgcagtcgatggggcgaaatgtaaaacgcaatgaatcccgtacgattttggtgattgtcccggatatttgcgatcccttcttcagtgaaattatccgcggtatcgaagtgaccgcggcagaacaggggtatctggtgctgattggcgattgcgcccatcaaaaccagaaagaaaaaacctttcttaatctcatcatcaccaaacagatcgacggcatggtacttctcagttcccgactgccctttgacgccagcgttgaggagcagcgcaatttgcctccgatggtgatgtcgaatgagttcgcgccggagcttgaattgccgacggtacatatcgataacctgaccgccgcgttcaacgccatgaattacctgttggatttgggccacaagcggattggttgtattgcggggccggaagatatgccgctctgtcactatcgcttacaaggttacgtacaggcattaagacgcagtggcattgtggtcgatccgcattacatcgcccgtggcgactttacctttgaagccggggcaaacgcattaaagcagttgcttgagcaaccgttgccgcctaccgccgtcttttgtcatagcgacgtaatggcgctgggcgccctctcctgggccaagcgccagggtctgaaagtacctgacgatctgtcgattatcggctttgacaatatcgcgctggccgagttttgcgaccctccgttgacaaccgtggcgcagccgcgttttgacattggtcgcgaagcgatgctgctgttgctcgatcagatgcaggggcaaaatgtgagcagcggctcgcgtttaatggattgcgagctgattattcgcggttctacgcgcgctttaccctaa

SEQ ID NO: 370116 - DNA, 2199 bp, Salmonella enterica
atgtccgtcgcgcacgttgccttgcccgttccgcttccccgaacctttgattacctgctgccggaaggcggggtcgccaaagccgggtgccgcgtgcgtgtgccgttcggcaagcagcaagagcgcgtgggcattgtcgtctcggttagcgaccacagcgaattgccgctcgatgaattaaaatcggtcattgacatcctggataacgaaccaatcttttctccctccatctggcgcttactcctctgggcggcggattactaccaccaccccctcggcgacgttctgtttcacgctctgccggttttactgcgtcagggaaaaccagccagcaacgcgcccctatggtattggttcgccaccgaagaggggcaagccgtcgacatcaacagcctgaaacgctccgccaaacaacaacaggcgctggcggcgctacggcaaggaaagatctggcgctatcaggtagccgagcttgattttactgacgccacgctgcaaacgctgcggcgtaaggggctttgtgagcttgccagtgaagcgcccgcgtttaccgactggcgggagcattatgccatcgcaggagagcgcctgcggctgaataccgaacaggcgacagcagtcggcgcaattcacagcgcgtcggacggtttctccgcctggttgctggcaggcgtaaccggttccggcaagaccgaagtgtatctgagcgtgctggaaaacgtcctcgcccagggcaaacaggcgctggtgatggtgccggaaatcggcctgacgccgcaaacgatcgcccgttttcgcgaacgttttaacgcgccggtggaagtgctgcattccgggctaaacgacagcgagcgtctttcggcatggctgaaagcgaaaaacggcgaagcggcgattgtcatcggcacgcgctcctcgctgtttacgccgtttaaaaatcttggcgtgattgtcatcgacgaagagcacgacagctcttataaacagcaggaagggtggcgctaccatgcccgcgatttggcagtgtatcgcgcccatagcgagcagatcccgattattctcggctccgccaccccagccctggaaacgctatgcaacgtgcggcagaaaaaataccggatgctgcgtctgacgcggcgcgcaggcaacgcccgcccagccctgcagcatgtgctggatttaaaaggccagcgtcttcaggcgggactggcgcccgcccttatcgcccgtatgcgccaacatctccaggccgacaatcaggtaattttatttcttaaccgccggggattcgcgcccgcgctgctttgccacgactgcggctggattgcagagtgcccgcgttgcgatcactactacacgctgcaccaggcgcagcatcatttacgctgtcatcactgcgacagccagcgtccggtaccgcgtcagtgcccctcctgcggctccacacatatgttaccggttgggttagggacggaacagctggagcaggtgctggcgcccttcttccccggcgtgccgatctcacgaatcgaccgtgataccaccagtcgtaaaggcgcgctggagcagcatctggcggaagttcaccgcggcggagcacgcatcctgataggcacacaaatgctggcgaaaggccatcactttccggatgtcacactggtggcgttgctggatgtcgatggcgcgcttttttccgcagattttcgttcggcggaacgcttcgcccagctctacactcaggtttccggccgcgccgggcgcgcgggcaaacagggcgaagtggtgctccaaacgcaccatcctgagcatcccctgctgcaaacgttactgtataaaggctatgatgcgtttgcggagcaggcgctggcggaacggcaaacgctccagcttccgccgtggaccagccacgtcattattcgcgcagaggatcataacaatcagcaggcgcccgtctttctccaacagttgcgtaatctgattcaggccagcccgctatcagacgataagctgtggatcttaggtccggttccggccctcgcgccaaaacgcggcggccgctatcgctggcaaattttacttcagcatccttcacggattcgcctgcaacacatcatcagcggcacgctggcgttgatcaatacgctcccggaagcgcggaaagttaaatgggttctggacgtcgatccgattgaaggatag

SEQ ID NO: 370117 - DNA, 213 bp, Salmonella enterica
atgaaaaaaggtattcacccgaattacgtagaaattactgcaacctgttcttgcggtaatgttatcaaaacccactctaccgtgggtcacgacctgaacctggacgtgtgcggcaaatgccacccgttcttcactggtaagcagcgtgttgttgataccggtggtcgtgttgagcgcttcaacaagcgcttcagcatccctggcagcaaataa

SEQ ID NO: 370118 - DNA, 663 bp, Salmonella enterica
atgaaaaatctctttatcgcctggttaagtttattgctatatggctgcacaacctttccacaagccgtaaaacctacgacaggcggacagccctacccgacggaaatctatatcgtcagtcatggctggcacacgggaattattgcgccggcccatgatgttaataccgttctgccacagcttaaaaaacggttcgctcaggagacgcagtggtatgaaatcggctggggcgataagggcttttatcagtcacaagaaataaccaccgcgcttacgctccaggccatgttctggtcatccggcgcggttatgcacatcgtcgccttttccggtaaaccagaacgctatttcgccggtagcgagataaaatcactgctcctgcacacaaaccagcgtaacagtctgatgcgctatctgggccgcagctttgcgcgtgacgaagagggtaatctgattccgttaaaacaaggaatttacggcgatagccagttttacgccgcgaatggccgctacggcatactcaatacctgcaataaatggacagcgaaggggctggaaagcgcgggactaactataaatccttcgttaaaactcacggcaggaagcgtaatgaaagcgattacggatcacagaatgtgtctgaacaaatactgttatccctag

SEQ ID NO: 370119 - DNA, 1650 bp, Salmonella enterica
atggtcgatgtcgctccctacggcggcgttttcccattaacagcaatcattaataaagccaatcataatgtacaggacgtgaaggttaccgttttagggaaaggggaaaaaggtatcccgatcagttatgatgtcggcccgcaggctataaatacccatgacggcatacctgtatttggcttgtatccagattatgtcaataaggttaaagttgactggactgaagaaggtaaaaaacaaacttatacgtggtccatttacgccgcaccggtatcattaccctctactaccgggcaaactgccgttcttcctacggtagaaccggttaaagtcgatagctcgcttaaaaatcgcttatatctttttaaccatataacggggatgccaagagccggccacattatgcatgtcgcaggcggcgcggcgaactgggattataccggtatcaactggattagcgatacgaatggcgatgttcgtggctatatgaatattgataaattccgtaaccaggatgatataacgcgttttggttccatgatgagcttccatcaggttaacgatggcaatcttatttttggccagggtcaacgttactttaaatatgatttcttaggccgcgttatttctgataaacgactgccaaaaggatttattgatttttcgcacgccattaccgaaacgccgaaaggcacctacctgctgcgtgtcgcaaaagaaaattatccattaaatggtaaatacaccatcaatactgtgcgtgatcatattcttgaagttgaccagaacggcgataccgtcgattactgggatctgccaaaaatcctcgacccctatcgtgacgacgttattctggcgatggatcagggagcggtatgtttgagcgtcgatgccgaacattccggtcaggtcatgaccaaagagcagcttgcaaaacaacccttcggcgatatcgcgggctccggcccgggccgcaactgggcgcatgttaactccgtcagctacgatcctcgcgacgacagcattatcattagctcgcgccaccagtctgccatcatcaaaattggccgcgataaaaaagtgaaatggatactttccgatccatccggctggaaaggcgaactggcgaaaaaagtgctgaaacccgtagacagcaacggtaaaccgctaacctgcgaagctcaccactgcgacggtggatttgactggacatggacacaacataccggttggttagtgccatccaaaagcaccggaggtaaaaccgtcgtgaccgcctttgataacggcgatgcgcgcggcatggaacaaccggccatgccgtcaatgaaatattcccgcggcgtggaatatcagattgacgaaaaaaatatgacggtttcccaaatgtgggaatatggtaaagagcgcggttttgactggtacagcgccattacttccgtcacggaatatcgcccggaaaccaaaacgatgttcatgtactcggccacagcgggaatgagcggtacaaaaccgatcgtttccgttctggatgaagtcaaagacggtactcaggatgtgatgctggagctaaaagtacacagtaaccgtgccggtatgctgggttatcgggcgctgattatcgatccagagcagatgtttaaaaaataa

SEQ ID NO: 370120 - DNA, 162 bp, Salmonella enterica
atgacatctgctgatgcgaccattggcctgtttgggtctaaaacgcctgaggccaaaacgctgccgctcaaacacaggcagcataatacaggtaagactttccttgtaaataacatatttatttccccattcgatattatcgataaaatgaatatatattaa

SEQ ID NO: 370121 - DNA, 318 bp, Salmonella enterica
atggctgaatggagcggcgaatatatcagcccatacgctgagcacggtaagaagagtgagcaagtcaaaaaaattacggtttccattcctctgaaggtgttaaaaatcctcaccgatgaacgtacgcgtcgtcaggtgaacaacctgcgccacgccaccaacagcgagctgttgtgtgaagcatttctgcacgcctttaccgggcaacccttgccggatgatgccgatctgcgaaaagagcgcagcgatgaaatcccggaagcggcaaaagagatcatgcgtgagatggggattgatccggaaacgtgggaatactga

SEQ ID NO: 370122 - DNA, 1161 bp, Salmonella enterica
atgacgcgtaaacaggccactatcgcagtgcgtagcggattaaacgatgacgaacaatacggctgcgttgtgccgccaatccatctctccagtacctataactttaccggtttcaatgagccgcgcgcgcatgattattcccgccgcggtaatcccacgcgtgatgttgttcagcgcgcattagcggaactggaaggcggcgcgggcgcggtattgacgaataccggcatgtcggcgattcatctggtcaccaccgttttcctcaagccgggcgatctgctggtcgcgccgcatgattgctatggcggcagttatcgtctgtttgacagtctggcgacacgcggctgttatcgtgtgcggtttgtcgatcagggcgatgaacgcgccttacaggcggcgctggaagaaaaaccgaagctggtactggtagaaagtccaagtaatccattgttacgcgtggtggatattgcgaaaatctgtcggctggcgcgcgaggcgggcgcagtgagcgtcgttgataacacgtttttaagcccggcgctgcaaaatccgctggcgttgggtgccgatctggtgttgcattcatgcacgaaatatctcaacggtcattcggatgtcgtggccggcgtggtgattgcgaaagatccggaagtggtcactgaactggcgtggtgggcgaataatattggcgtgaccggcggggcgtttgatagctatctgctgctgcgcggtttgcgaactctggtgccgcgtatggagctggcgcagcgcaacgcgcaggcgattgtgaaatatctgcaaacccagccgttggtgaaaaaactgtatcacccgtcgctgccggaaaatcaggggcatgaaattgccgcgcgccagcaaaaaggctttggcgcaatgttgagttttgaactggatggggatgaggagacgctgcgtcgttttctgggcgggctgtcgctgtttacgctggcggaatctttagggggagtggaaagtttgatctctcacgccgccaccatgacgcatgccggtatgtcgccgcaggcgcgtgccgccgccgggatctccgaaacgctactgcgtatctccaccggtattgaagatggcgaagatttaattgccgacctggaaaatggcttccgggctgcaaacaaggggtaa

SEQ ID NO: 370123 - DNA, 2433 bp, Salmonella enterica
atgagtgtgattgcgcaggcaggggcgaaaggtcgtcaactgcataaatttggcggcagtagtctggcggatgtgaagtgttacctgcgtgtcgcaggcattatggcggagtattcgcagcctgacgatatgatggtagtgtccgccgcaggcagtaccaccaaccagttgattagctggctcaagttaagccagaccgatcgcctttctgcgcatcaggtattacagacgttacgccgctaccagtgcgatctgattagcgggctgcttcccgccgacgcggcagatgacttaaccagcgcttttatcagcgatctggaacgtcttgccgccttgctcgacggcggcgtaacggatgccgtctatgctgagattgtcggacacggcgaaatttggtcggcgagattgatgtccgccgtcctgaatcagcaggggctggatgccgcctggctggacgcgcgcgcatttttacgcgccgaacgcgccgcacagccgcaggttgatgaagggctatcttatcctttattgcaacagctactggcgcagcatccgggcaaacgtctggtcgtgaccggctttatcagccgcaatcatgacggcgaaacggtcctgttaggccggaacggttccgactattccgccacgcaaatcggcgcgctggcgggcgtttcccgcgtgaccatctggagcgatgtcgcgggcgtttatagtgccgacccgcgcaaagtgaaagatgcctgcctgctgccgttgctgcgtctggacgaagccagcgagctggcgcgtctggcggcgcctgttctgcacgcccgtacgctacagccagtgtccggcagcgatatcgatttgcagttgcgctgtagctacacgccggatcaagggtcaacccgaattgaacgagtgctggcttccgggacgggcgcgcgtatcgtgaccagtcacgatgatatctgtctgattgagtttcaggtgcccgccagccaggatttcaggctggcgcataaagagctcgaccaaattttaaaacgggcgcaggcgcgtccgctggcagtgggcgtgcatcgcgatcgccagctattgcagttctgctataccgccgaggtagcggatagcgtactgaaactcctcgacgatgtcgggctgccgggcgaattgcgcctgcggcaggggctggcgctggtggcgatggtcggtgcgggcgttactcgcaatccgctacactgccatcgcttctggcagcagcttaaaggtcagccagtggaatttacctggcagtcggaggagggcatcagtctggtggcggtgctgcgtaccggcccaactgagagcctgattcaggggctgcatcagtcggttttccgcgccgaaaaacgcattggcctgatgctgttcggtaaggggaacatcggctcccgttggctggaactgtttgcccgtgaacaaagcacgctttccgcgcgtactggctttgaatttgtgctggcgggcgtggtggatagccgccgtagcctgctgaattatgaagggctggatgccagccgcgcgctggcattctttgatgatgaagccgttgagcaggacgaagagtcgctattcctgtggatgcgtgcgcatccgtatgatgatttagtggtgctggatgtgacagcaagcgagcaactggccgatcagtatcttgatttcgccagccacggttttcatgtgattagcgccaataaactggcgggcgcaagcgccagcgataagtatcgccagattcatgacgcgtttgaaaaaaccgggcgttactggctgtataacgccaccgtgggcgcgggattgccgatcaaccacacggtgcgggatctgattgacagcggcgatacgattctctcgatcagcgggatcttctccgggacgctatcctggctgttcctgcaatttgacggcacggtgccgtttaccgatctggtggatcaggcctggcagcaggggctgaccgaacccgatccgcgcgtcgatctttccggaaaagatgtcatgcgtaagctggtgattctggcgcgcgaggcgggatactacatcgagccggatcaggtgcgtgtagaatcgttggtgccggcgcactgtgaagaagggtctatcgatcactttttcgaaaacggcgacgcgctgaatgaacagatggtgcagcgtctggaggcagcccgcgaactggggctggtgttgcgttacgtggcgcgtttcgacgccaatggcaaagcgcgcgtcggcgttgaagcggtgcgtccggaacatccgctggcggcgctgctgccgtgcgataatgtctttgctattgaaagccgctggtatcgcgataacccgctggtgatccgtgggccgggcgcgggccgcgatgtgaccgccggggcgattcagtcggatatcaaccgcctggcgcagttgctgtaa

SEQ ID NO: 370124 - DNA, 858 bp, Salmonella enterica
atggaaggttttgagttatttccaaaaattaaaggcgcgatcaaatggatggccgagcacagtgactcggtaattcattttggctggaatgttgttgccgccatcattctacttttcatcggtaagttaatagctcgcttactatcgagggggctggaaaaattacttctcaggcggcaagtggatgccactattgtccactttttctccgcgctggttcgctacatcacgatagctttcacggcagtagccgctcttggccgtgtcggtatagaaacctcctcaattattgccgttatcggcgcggcgggtttagccattggtctggcgctgcaaggggcactttccaactttgccgcaggcgtactgcttgtctccctgcgtcctttccgcgccggggaaattgtacaaattggcctggttatcggcacagtagaaaaggtccatattttctccaccactctgctcactgcggatagcaaagaagttgtcatcccgaatggtaaaattattgctgataatattatcaactattcacgacacccctatcgacgtattgatctgattattggcgtggattaccaaagccgtattgctgacgtaaaaagcgtgatacatcgtattattgaacaagatcatcgcattgataaaacccgcgatattacggtccgcctgggcgaacttgcgccctctagcctgaatttctatgttcgcgtatgggtgcccaacgctcagtactggagtacttactacgatcttctggaaaatatcaaggaagcgatggatgaaaacggcatcaatattccttacccccggatggatgtccgggttgagaatgtaaaaagcatcacgccataa

SEQ ID NO: 370125 - DNA, 999 bp, Salmonella enterica
atggaaattactttaccgtcaatgtcagataaaaaatggacctgcgccgatctcctgagtagctatcgattctgggggatcacttttttctttttggtgctctcttttatcagttcgctgggatcgtcgtatggtgtttatttttggagtaaatcactgtctattccagccgatcgtattggtgttattctcgtttgcggccaactgggatacctcctgggtatggttgccagctggtttgtctgccgtataaaaaattgttaccccttctactttgttgcgctcctgttaatcattggcgtggtctgttccttctgcataaatggcccgtctgacgtagtcaggcttatcatagcgcagtttttaattaatctgggtatggggatcgtaacgctgttagtccccatgctgcttttcagcgctatcggcagtgctcagacatttgttattttatttagcctctgcttactgttcaaatttatcatcgctggctatctgtctatatttatatactcaattccttatataggaataaccgtaattactttagcggttatcgcgcttttgctactattaccgctcaaaaaagaacttttctatattgcaccgcccaaaaggttctcatcaacccagcgacctgagtgcgcagaacccgttgtcgtcgcattattggcctttttcattccattttatattatttattggttcttcagaattcaccgggaaatacaatttgtggcgccttcgccccgactcatgaccgcatgtggcgcgggatggctgtcagccattatgccgtttggcacagccatattgtgtctgacgcttagcgacgaaatccgcgctctgctggcgaataaaaacgaagatggcggaatacgaaccggctggacactattctgggcgttactgctgccacccgtcggcgcggcgattatccaggcaaaaatgaaccgttttattaccgctaataccgcggatactgctgacagaggataa

SEQ ID NO: 370126 - DNA, 1125 bp, Salmonella enterica
atgccgcctctgttcaccattaatgcctgcaaaagcgctggttgtcgcaatcttgggctgcctgactcgccggattatgtgtggccggactatcgcctgggttatccggcattgcattgtcgagcctgcggcagttatccgccgctcttcaacgagggggaatttcgccgctgggcgtctgcttatatcgcgcaatatgccaaagagcatggtcacttttgccccgattgctatcaaaaaacatggattcgttatggacgtaatcccggcggaacgcagcgacttcagtgccagtactgtaagaaagtctggacgccaaaacagcacgcgctgaatgtcgccgaaacgccggaacagatttgcagtattccgctgctcgtaccgtttcagggagcgaatgccttccagcaattgtactttttattcagttttgacgctgttcgcggcaatattcttcacctttccagcaatttcacgttactgtctgccggaaaaagtttgcattaccactggaaaggaattgcgccgcccgagggcgagaagggcgatattattcaccgtatcgccattaaagaacggcaatttttacagcgcagccagttcgatgagattcagtatggcccggcggcgcttaaacggaacgcgcaaggaacaatacttcgcccggtcattacggcgcatggtcattttcgggtgctgaaaaaccgttttcctgatgtcacgacacacatcattgcccatgagtgttttttgcgcggcgcggtcattacggcatgggcggagcggtttcgccagcgtctctcctcgctgtggttcgttgaggaagagataaacgatgacgattgccgcgcagagtggcaactgttaggcaaaacatggcagggatggtggcaaaatcagtggcagctctgggggcaaggtcacaaccgcaaaatggtctgttcgttaaccggttcccacttagaacaaggtgtcgccgttaatctggcggctagtcgccgctttgttacctggctatggcaacagcctgaattccagcaaagcgcccactattccgccaaacgcgtcacgcaaattctgtatttgctgacggaaaaatataactcacaatggaatcacatttaa

SEQ ID NO: 370127 - DNA, 1557 bp, Salmonella enterica
atgaaagtaaaactgcttgctgccggtattttgttcacgctgccgttctgggcctgcgccaaagatgtcaccattatttacaccaacgatctacacgcccatgtggagccttataaagtaccgtggattgctgacggtaaacgcgatattggcggttgggccaatatcactacgctggtgaagcaggaaaaagccaaaaataaggcgacgtggttttttgatgccggagattactttaccggaccgtatatcagcagcctgacgaagggtaaagcgattatcgatattttgaataccatgcagtatgacgctgccactatcggtaatcatgagttcgatcatggctgggacaatacattgttgcaactgagccgagcaaaattccctatcgtgcagggcaatattttttatgaggacagcagtaaatccttctgggataagccgtacaccattgttgaaaaagatggcgtcaagattggcgtaatcggcttacacggtgtctttgcttttaatgatacggtatccgccgcgacgcgcgtgggcattgaggcacgcgatgagattaagtggctgcaacgttacattgatgaacttaaaggtaaagtcgatctgaccgtcgcgctgatccacgaaggcaccccggcccgccagtccagcatggggaataccgatgtgcgacgcgcgctggataaagatattcagaccgcaagtcaggtaaaagggctggatattttgattaccggccacgcgcatgtcggtacgccggaaccgattaaagtcggtaatacgctgattctttcaacggacagcggcggcattgatgtcggcaaattggtgctggactaccaggaaaagccgcatcagtttaccgtgaagaacttcgagctgaagaccatttttgctgatgagtggaagccagatccgcaaacgaaacaggtgatcgacggctggaacaaaaagctcgataaagtcgtgcagcaaacggtggcgcagtcgccggttgagctgacccgcgcgtatggcgaatcgtcgtcgctggggaatctggcggcggatgcgctgctttttacggcggggaaagacacccagttagcgcttactaactctggcggtatccgcaacgaaatcccggctggcgcggtgacgatgggggcggtaatcagtaccttcccgttccctaatgaactggtcacgatggatttaaccggtaaacaattgcgcagcctgatggagcatggcgctggcttaagcaacggcgtattgcaggtgtctaaagggctggagatgaagtatgacagcagcaaacctgtcggccagcgggttaccgtgctgacgctcaatggcaagccgattgatgatgcggcggtttatcacatcgctaccaacagcttccttgccgacggcggcgacggttttgcggcattcacggaaggccaggcgcggaatacctccggcggctactatgtgtcgaatgcgatagtcgattactttaaggcgggcaacaccatcacggatgagcagctcaaaggaatgcgcgttgcggatgtgaagaagtaa

SEQ ID NO: 370128 - DNA, 1239 bp, Salmonella enterica
atgataaacaacgatccgctttttgatctgcttaacaaagagcaacagcgccagcagcactcgctggaactgattgcctcggagaatttcgccagccctgccgttcttgcggcacaagggtcggtgttaaccaataaatacgccgaaggctattaccagcaccgctactacggcggctgtaagttcattgatgaggttgagatgctggcgataacccgcgcgcagcaacttttcggcgcgcgttacgttaacgtgcagcctcactccggcagccaggcgaatcaggcggtatatctggcgctgctgaaacccggcgacaaaattctgggcatgagcctgcaatgcggcggccatctcactcacggttcgccggtcaatcaatccggtaaatggtttaacgcctttcattatggcgtcgatgcgcatagcggtcttattgatatggatgaggttgagacgatcgcgaagcgtgagcgcccgcggctgattatcgccgggggatcggcctacccacgacactatgattttgcccgctttcgccgcattgccgatgccgtcggcgcgatactgctggtggatatggcgcattttgccgggctggtggcgggcggctgtttcccctcgccgctggcgtatgccgatgtgattaccaccaccacgcataaaacgttgcgcgggccgcgtggcggcatgattctggccaacgacgcccggctggcgaaaaaaatcgacagcgccatctttcccggcttgcagggcgggccgttgatgcacgttatcgcggctaaagcggtggcgcttggcgaagcgctacagcctgaatttaaacgttacgccgggcaggtaatcgaaaatgcgcaagcgatgtgtcagcaactggcgcagcgcggcctgacgctgttaacgggcggtaccgactgccatctgggcattatcgacctgcgcccgcaggggttaaccggcgcccaggtggaatactttctcgaactggcggggatcacggtcaataaaaacacgctgccaggcgatccgcagccgccgtcgattacctccgggattcgcattggcagcgcagcctgcgccacccgcggaatgaatgccgatgattttacgctgatcgcggactggatcagtgaaattatttttgccatcaagacgccgaatattacagatatttgcgccgatattcggcaaaaagtgactaaattaaccaccaactatccgttgccttaccaatga

SEQ ID NO: 370129 - DNA, 1107 bp, Salmonella enterica
atgatgaaacttgctgaaattcaggcggcgtgcggcgttctttgtgtagatctcgccgctgtcgttgacaattatcaaacgctggcgcgccatgtcgcccccgcgcaatgcggcgcagtactgaaagccaatggctatggtctgggggcggaggcgattgcgccagccctgtatgcggccaattgccggatcttttttgtcgcgcaactttctgaaggggtggcgctacgtaaaatcctgtcggctgacgcgatggtggtgttgcttaatggcgtcatgccgcaggcgatgccgctttgttgcgcgcaacagatcacgccgttgctgaattctgttgaccaggtgatggcgtggctggcactacaggaggcgcggtcgcagcggcgtccggttttgatccagcttgattccggcatgtcgcggctgggggtgacgccggagcaactggcgcggctggccgcgatttttcgccagcgtggctgggctgcgccagactatatcatcagccatctggcgaacgccgacaggccggatcatgcgttaaatgtctatcagcatacgctactccagcaggcaaaagaggcattcccaaccagccgttattcgctggcaaattcctgcggtatgtttctgcatccggcctggcgggaagatctctgccgtccgggcgttgcgctgttcggcgtcgcccagccgtggttttcaacgccgttaaaaccggcatttacgctgacgctgagcattctgcgtgtgcaagacgtgccagttgggacgccgattggctacggcagtacggttactactactcgcccgctgcgtatcgccacggtatccgccggatacgctgatgggattccacgtaatttgcgtcctccggcgggcgtgtgctggcgcggggttcggttaccggtattggggcgggtttgcatggacagctttatggtggacgccagcgccatcatgccaacgcctggcgatgttgtggagtttattggcgtgagccagacgctggaagaggttgccgccgcctgcgataccatcccttatgagattatgacccggcttggcgggcgttttcggcgcataatgcagcccgcagaagcttga

SEQ ID NO: 370130 - DNA, 1482 bp, Salmonella enterica
atgaacacagcgaatttcgagtcgatacatatcatgatcgacgcgcaagtgtggcgtaacctgccgctgcatctgcgcctgtaccacgcttttcgtcagttggtcatttccggcgcgctggtcgatggcgcaaaactgccgtccgctcgcgcgctggcgcagcagcttcgcctgtccagagatacggttgaaaatgcctattcccagcttcagcgcgacggctttatgacccgcaggcaaggggccgggagtttcgccagccgccaggggattccgcatattcaggggcagcacagcctgccgccatcgcctcgccagacgcccacacttagcgcccgctggcagacgattgccgatcgcgccgtatctttcgatgcccgccgagtgcagacgtttacgctcggccttgcggaaacgcgaaacttcccgcaaaccatttggcagaattttgcccgccagatccagcgcgagcgggcgcatacgctaatgctgcatggcgatccgcagggagagccggaactgcgccagcaaattgctcattatctcaattttgaacgcggcgcgaaggtcgacgcgcagcagattgtgattgtcagtggcgcgcgtcaggcattctggctatgcgggcaactgctggcagaggccggacagtcggtggtgatggaaaatccaggctatcccggcgcacgtcaggcattctctgccgcacagctcaaccttcttcccattgaagtcgatagagacggtattcgggtggataaactgccgcctgcgccgctggtttacgttacgccgtcgcaccagtttccctccggtcatttgctctctctggcgcggcgtcatgccctgattgactgggcgcggacgcataatgcctggattatcgaagatgactacgacagtgaatttcactacaacggcgcgcccgtcgcctgtatgcaggggttagatcgcgagcagcgcaccctgtatgtcggcaccttcagcaaaacgctctaccccggtctgcgcattggttatctggtggtgcctgcgtcgctggccgcgcattttgccgctgcgcgcaatttgcttgatggcgcaacgcccgcgttgacccaattgacgctggcgcgatttatcgcatccggccattttgccgcccatatccgcaccatgcgcagtatgtacgcggtgcggcaggcgtgcctggcgcaggccatcaatcagcatcttagtgactgggtgacgccggtcgtgacgcccggaggattacaaatgccctgctggctgcatgaaggtattgacgaacaacagacccttaacgccgcgcggcgggccgggttaaacatcgccgggatgcgccagttctggctgacgcaccccgcgcccacgggctggctgctgggattcgccgcgtttaccccctacgagattgaaaatggagtcaagcttctgcgggctgcattatgcgccgaaaacgcccgccaagccgggtcataa

SEQ ID NO: 370131 - DNA, 891 bp, Salmonella enterica
atgagcttttttcacgccaaccagcgggaagccctgaatcagagcctggcggaagtacagggtcagattaacgtttcgtttgaatttttcccgccgcgcaccagtgaaatggagcaaaccctgtggaactccatcgatcgcctgagcagtctgaaaccgaagtttgtttcggtaacgtatggcgccaactccggggagcgcgaccgcactcatagcgttattaaaggcattaaagagcgtactgggcttgaggccgcgccgcaccttacctgtattgacgccacccgcgatgaactgcgcaccatcgcccgcgactactggaataacggtatccgccacattgtcgctttgcgcggcgatttgccgccggacagcggtaagccggagatgtacgccgccgatctggttggtttgctcaaagaggtggccgatttcgatatttcagtagcagcctatccggaggtacatccggaagcgaaaagcgcgcaggccgatctgcttaatctgaagcgtaaagtggatgctggcgctaaccgcgcgataacccaatttttcttcgatgtggaaagctacctgcgttttcgcgaccgctgtgtttctgccggtatcgacgtagagattattcccggcattttaccggtgtctaactttaaacaggcgaaaaaatttgccgatatgaccaatgtccgcattccgtcctggatgtcactgatgtttgaggggctggataatgacgcagaaacccgcaagctggtgggcgctaacattgcgatggacatggtgaaaattttaagccgtgaaggagtgaaggatttccacttctacacgttgaatcgtgcggaaatgagttatgccatttgccacacactgggcgtaagaccgggtttataa

SEQ ID NO: 370132 - DNA, 2181 bp, Salmonella enterica
atgagcacgaccgacgatacccataacacgttatccactggaaaatgtcctttccatcagggggggcatgaccgaagcgcaggcgcagggactgccagccgcgactggtggccgaaccagcttcgcgtggatcttttgaatcaacattccaaccgttctaacccgctgggtgaagactttgactaccgcaaagagtttagcaagttagactactccgccctgaaaggggatctcaaggcgctgctgaccgattcacaaccgtggtggcccgccgactggggcagctatgtcggtttgtttattcgtatggcctggcatggcgctggcacctaccgttctattgatggtcgtggcggcgcgggtcgtggtcaacagcgttttgcgccgcttaactcctggccggataacgtcagcctggataaggcgcgtcgtttgttgtggccgattaagcagaaatatggccagaaaatttcctgggccgacctgtttattctggcgggtaacgtggcgctggaaaactccggcttccgtaccttcggttttggcgccgggcgtgaagatgtctgggaaccggatctggatgtgaactggggcgatgaaaaagcctggttgactcaccgacaccctgaagcgctggcaaaagcgccgctgggcgcgaccgagatgggccttatctacgttaacccggaagggccggatcacagcggcgaaccactttctgccgccgccgccattcgcgctacctttggcaatatggggatgaacgacgaagaaaccgtggcgttgatcgctggcgggcataccctcggtaaaacccacggcgcggcagcggcatcccatgtaggggccgatccggaagccgcgccgattgaagcgcagggcttaggttgggccagcagctatggtagcggcgttggcgcggatgctatcacctccgggctggaagtggtctggacgcagacgccgacccagtggagcaactatttcttcgagaacctgttcaaatatgagtgggtacaaacccgtagtccggctggcgctatccagtttgaagcggtagacgcgccggatatcatcccggacccgttcgatccgtcgaaaaaacgtaagccaaccatgctggtcaccgacctgacgctgcgttttgatccggagttcgagaagatttcccgccgtttccttaacgatccgcaggcctttaatgaagcctttgctcgtgcctggttcaaactgacgcacagagatatgggaccaaaagcgcgttacatcggaccggaagtgccgaaagaagatctgatctggcaggacccgttgccgcaaccgctctatcagccaacgcaggaagacattatcaacctgaaagcggcgatcgctgcatccgggctttctattagcgagatggtttcggttgcctgggcatccgcgtctactttccgcggcggcgataagcgtggcggcgctaacggcgcgcgtctggcattggcgcctcagcgcgactgggatgtcaacgccgttgcggctcgcgttctgccggtattagaagagatccagaaaacgacgaataaagcctcgctggccgatattattgtgctggcgggcgtggtcggtatcgagcaggcggccgctgctgcgggtgtcagcatcagcgtaccttttgcgccgggccgggtggatgcgcgtcaggatcagaccgacatcgagatgttctcgctgcttgaaccgattgccgatggattccgtaactatcgtgcgcgtctggatgtgtcgacgaccgaatcgctgttgattgataaagcgcagcagttaacgttgaccgcgccggaaatgacggtactggttggcgggatgcgtgtgctgggaaccaactttgacggcagccagaacggtgtctttaccgacagaccgggcgtgctcagcacagacttcttcgctaatctgctggatatgcgttacgagtggaaaccgaccgacgaatctaatgagctgttcgaaggccgggatcgtctgactggcgaggtgaaatacacggcgacccgcgccgatctggtgtttggttccaactccgtactgcgcgcgctggcggaagtttacgcgtgtagcgatgcgcacgagaagtttgtgaaggacttcgtcgcggcatgggtgaaagtgatgaacctggaccgtttcgatctgcaataa

SEQ ID NO: 370133 - DNA, 624 bp, Salmonella enterica
atgaaattcgcacaggcgcttatcggtattcttgctgctttttttattagccatatctctcatcattcgccacgctctgataccagaccaataaccgttcaggcgcaaactaatgctgcaatcgcccaaagtgccgggacacaaataggtaagacgctattttatgatgctgcctatgttcgtctggattatccgaatggcgatcttccgctggagcgtggagtatgtgcagatgtcgtcatccgcgcgctacgcagtcagcaggttgatttacagaaacgggtacatgaagacatgcaggcgcatttctctgcctacccgaataactggaagctgaaacgcccggacagcaatatcgaccatcgccgcgttccgaatctggaaacctggttccagcgtcaaaacaaagcgttgccggtgacagataaatatagcgattatcaaccgggagatattgtctcctggcggctggataacggccttgcgcatattggcgtggtgtccctgaacgtcacgcctgaaggggtgccgctggttgtgcataacataggcgcgggagcacaggaggaagatgtattatttaactggaaagtaacggggcattttcgttatttttcgcattaa

SEQ ID NO: 370134 - DNA, 1104 bp, Salmonella enterica
atggatcgcattattcagtcaccaggtaagtatattcagggtgcaaacgtcatcgcgcgtcttggcgattatttaaaaccaatggcgaacaactggctggttgtgggcgataaattcgtgctgggatttgccgaagagacgctgcgcaaaagcctgacggatgccggtttgtcagtagaaatcgccccgtttggcggcgaatgttcgcaaaatgagatcgacaggctgcgcgccgtcgccgaaaaaagtcagtgtggcgccgtactgggtatcggcggcggtaaaacgctggataccgccaaagcgctggcgcactttatgaatgtcccggtcgctatcgcgccgaccatcgcctctaccgacgcaccgtgcagcgcactctcggttatttataccgatgccggtgagtttgaccgttatctgctgctgccgcataacccgaatatggtcattgtcgatacgcagatagtggcgggcgcgccggcgcgtctgctggcagccggtatcggcgatgcgctggcgacctggtttgaagcgcgcgcctgctcacgcagcggcgccaccacaatggcgggcggcaagtgtacacaggccgcgctggcgctggcggagctatgctataacacgctgatcgaagaaggcgaaaaagccatgttggccgccgaacagcacgtcgtcacgccagcgctggaacgcgtcatcgaagccaacacctacctgagcggggtcggttttgaaagcggcggtctggccgcagcgcacgcgattcataacggtttaacggcgattccggatgcgcaccactattatcacggtgagaaggtcgctttcggtacgctgacgcaactggtgctggaaaacgcgccggtcgaagaaatcgaaaccgttgcggcgctgtgccattccgttggcctgccgattacgctggcgcaactggatattaaacaggatattccggcaaaaatgcgcaccgtcgcggaagcctcctgcgcagaaggtgaaactattcataacatgcctggcggcgcaacgccggatgaagtgtacgccgcgctgctggtcgccgaccagtacggtcaacgctttttgcaggaatgggaataa

SEQ ID NO: 370135 - DNA, 663 bp, Salmonella enterica
atggaactctatctggataccgctaacgtggcggaagttgaacgtctggcgcgcattttcccgattgccggcgtcaccaccaatccaagcattgtggcagccagcaaagaatctatctgggatgtgctgcccaggctgcaaaacgccatcggcgaagaaggcactttatttgcgcagaccatgagccgcgacgcgaaagggatggtggaagaagccaaacgactgaataacgccatccccggcattgtggttaaaattccggtgaccgccgaaggtcttgcagcgattaaattgctgaaaaaagaaggcatcgtgacgctgggcaccgccgtctacagcgcgtcgcagggcctgctggcggcgctggcgggcgcaaaatatgtcgctccctacgtcaaccgcgttgatgcgcagggcggcgatggcattcgtatggttcaggagctgcaaacgctactggaacatcacgctcccgacagcatggtactggcggccagctttaaaacaccgcggcaggcgctggattgcttactggcaggttgccaggcgattacccttcctttagatgtagcgcaacaaatgctcaatacgcctgcggtagagtcagcaatagagaagtttgagcaagactggaaaaacgcttttggtaatctgaacctgtag

SEQ ID NO: 370136 - DNA, 2502 bp, Salmonella enterica
atgcccctgattgtggaatttacctgtgaactgccgaatggcgtacatgcgcgcccggcaagccacgtagaaacgctgtgtaataccttcacgtcgcaaattgagtggcacaacctgcgcaccgatcgcaaaggcagcgccaaaagcgcgctggcgctgattggcaccgacacgctggctggcgaccactgtcagctggtgatttccggtgccgatgaacaggttgcctgtcagcgtctgagtcaatggctgcgcgatgaattcccactctgcgacgcgccgctggcggagattaaaaacagcgaactggagccgcttccggcgtcgttgacccagctgaatccgcagatttaccgcgcccgtagcgtgtgtagcggcagcgcgggcggcgtactgacgccactctcttccctggatctcaatgcgctcggcgaactcccgaccgccaacgacacagagacggaacaagccgcgctggacaatggcttagcgatgttgataaagcatattgagtttcgtcagctcgacagtgacggtgccgccagcgcgattctggaagcccatcgttcgctggcaggcgacgcttcactgcgtcagcatttactggacggcgttctgcgcggtttaagctgcgcgcaggcaatcgtggaaagcgcgaaccatttctgcaatgagttcgctcgcgccagcagcagctatttacaggaacgcgcgctggatgttcgtgacgtttgcttccagttactgcaacacatttacggtgagcagcgctttccggcgccgggccagttgacccggccatctatctgtatggcggaagagttgacgccaagccagttcctcgaactggataaaacctttctcaaaggtctgctgttaaaaagcggcggcaacacttcgcacacggtgattctcgcccgctcattcaacattcccaccctggttggcgtggagattgaggccttaacaccgtggcgtcagcagacggtttatattgacggcaacgcaggcgcgattgtcgttgcgcctgacgagcctgtcactcgttactatcagcaggaagcccgcgtgcaagacgccctgcgcgaacagcagcgcatctggctgacccaggaagcgcgcaccgctgacggcatccgcatggaggtcgccgccaacatcgcgcactccgtcgaggcgcaagcggcctttagtaacggcgcggaagcggttggcctgttccgcacagaaatgctgtatatggaccgcgcctgcgcgccggacgaaaacgagctgtacaatattttttgccaggcgctggagtccgcaaagggacgcagcattattgtgcgcacaatggatataggcggcgataagcccgttgattatctgaatattcctgccgaagccaacccattcctcggctatcgcgccgtccgtatttatgaagagtacgcttctctgtttaccacccagctacgctcgatcctccgcgcgtccgcccacggcaacctgaaaatcatgatcccgatgatctcctctatggaagagattctgtgggtcaaagagaagctggcggaagccaaacagcagctgcgtaatgaacatatcccgttcgatgagaagatcccactcggcattatgctggaagtgccgtcggtgatgttcatcatcgatcaatgctgtgaagagattgatttctttagtattggtagtaacgatctaacacaatacctgctggcggtagaccgtgataacgccaaagtcactcgtcactacaacagcctgaatcccgccttcctgcgcgcgttggatttcgcggtgcaggcggtacatcgtcagggcaaatggattggtctgtgcggcgaactgggggccaaaggttcggttctgccattgctggtaggtctggggctggacgagatcagcatgggcgcgccgtcgattcccgccgccaaagcgcggatggcacaactcgacagccgagcctgccgccagttgttgaatcaggcgatggcctgccgcacctcgctggaggtggagcatctgctggcgcagttccgcatgtcgcagcaggatgccccgctggttaccgcccaatgcataacgcttgatagcgactggcgcagcaaagaggaggtgattaaaggcatgaccgacaatctgctgctggcgggccgctgccgctacccgcgcaaactggaagccgatctatgggcgcgcgaggcggtattctccaccggactgggctttagctttgccattccgcacagcaaatcggaacatatcgaacagtccaccatcagcgtggcgcgcctgaacgcgccggtacgctggggagatgacgaggcgcagttcatcattatgctgacgcttaacaaacacgccgcgggcgaccagcatatgcgtattttctcgcgcctggcccgccgcatcatgcacgaagaattccgcaacacgctggttaacgccgcttccgccgacgctatcgccagcctgctgcaacatgaacttgaactgtaa

SEQ ID NO: 370137 - DNA, 1080 bp, Salmonella enterica
atgaaagagttggtacagatcctgaaaaatacccgccagcacctgatgaccggtgtttcgcatatgatcccctttgtggtggctggcggaattttgctggcagtctccgtcatgctatatggcaagggcgccgtacccgatgccgccaccgatccgaatcttaaaaaactgtttgatattggtgtcgccgggctgacgctgatggtgcctttcctcgccgcatacattggctactccattgccgaacgctccgcgctggctccttgcgcgattggtgcctgggtgggtaacagcttcggcgcgggctttttcggggcacttatcgccggacttatcggcgggatcgtggtgcattacttgaagaaaatcccggtgcataaggtgctgcgttctgtgatgcctatttttgtgattcccatcgttggcacttttatcaccgcgggcatcatgatgtgggggctgggcgaaccgatcggtgcgctgacaagcagcctgacccaatggctgcaagggatgcagcagggcagcatcgtgctgctggcggtgatcatggggctgatgctggcttttgatatgggcggcccggttaataaagtcgcttatgcgttcatgctgatttgcgtggcgcagggcgtatataccgtggtggctatcgccgcggtgagcatctgcgtaccgccgctgggactggggctggcgacgctgattggccgcaagaatttttctgttgaagagcgcgaagccggtaaagccgcgctggtcatgggctgcgtgggcgtaacggaaggggcgattcctttcgccgctgccgatccgctgcgcgtgatcccatccattatggtgggctccgcttgcggtgcggtaatggccgcgctgtttggcgcgcagtgttatgccggttggggcggtttaattgttctgccagtcgtggaaggcaagctgggttatgtcgcggcagtcgccgtgggcgcggtggtaacggcagtctgcgttaacgtgctgaaaagcctgacgcgtaagaatgtgtcgcaagttgacgaaaaagaagacgacctggatttagattttgagatgaattaa

SEQ ID NO: 370138 - DNA, 321 bp, Salmonella enterica
atgactaaaattattgcagtaaccgcgtgtccttctggtgttgcgcatacctatatggcggctgaagcgctggaaagcgcagccaaagcgaaaggttgggatgtgaaagtggagactcagggctcgattgggctggaaaatgaactgacggcagaggatgtggcgagcgccgatatggtgattttgactaaagatatcggcatcaagttcgaagagcggtttgcgggtaaaactatcgttcgcgtcaatatcagcgacgcggtaaaacgcgccgacgccattatgaacaagattgacgcccatctttcgcaaaccgcgtaa

SEQ ID NO: 370139 - DNA, 2298 bp, Salmonella enterica
atgacccatcgtattcaacgcctcaaagccgctctgtttcagaatcaccgtgaaatttctctggagcgcgcgctgctttataccgccagccatcagcagacggagggcgaaccggtcattttgcgccgcgccaaagcgacggcgtatatccttgaacatgttgaaatttcgattcgtgacgaggagctgattgccggaaaccgaaccgttaagccgcgcgcgggtattatgtcgccggaaatggacccgtattggctgcttaacgagctggatcggttcccgacgcgtccgcaggaccgttttgatatcagcgaagaggataagcgcctctatcgtgaggttctattcccgtactgggaaaaacggtcgatgaaagattttattaacgggcagatgaccgatgaggtgaaagccgccgtcagcacccagatttttagcattaaccagacggataaagggcaggggcatatcattattgattatccacgcttgctcaataacgggctgggtgaactggcggcgcagatgcgcgcgcgctgcgagcaacagccggaaaacgacttttatcaggccgctctgttgttacttgaggcatcgcaacgccacatcctgcgttatgccgtactggcggaacaccaggcggagcgctgcccggacgctcgtcgtcgtcaggaactgctcaccattgccgccaattcgcggcataacgcgcagcacaaaccacagacgttctggcaagcatgtcagctgttctggtacatgaacattattttgcagtacgagtccaacgccagttcgctgtcgctcgggcgcttcgaccagtacatgctgccgttttatcagacttcgctcactcagggcgacgatccggcgttcctgaaagagttgctcgagtcgctgtgggtgaaatgcaacgatatcgtgctgctgcgctccaccagtagcgcgcgctattttgccggtttcccgacgggttacaccgcgctgctgggcggattgacggaaagcggacgcagcgcggtaaacgtgctctcttttctctgcctggatgcctaccagagcgtgcagttgccgcagccgaatctcggcgtgcgcactaacgcgctgattgatacgccgttccttctcaagaccgccgagaccattcgcctcggtaccggcattccacagattttcaatgacgaagtggtggttcccgcgttccttaaccgtggcgtgtcgttggaggatgcgcgcgattatgcggtggtgggatgtgttgagctgtcgattccgggcagaacctacgggctgcatgacatcgccatgtttaatctgctgaaagtgatggaaatcagcttgtatgaaaatgagggcaacgacactcttacttatgaggcgttgctggcgcatattcgcgccaaaatcagtcactacattacactaatggtagaaggcagcaatatttgcgatatcggccatcgtgactgggcgccggtgccgctgctctcttcgtttatcagcgactgcctggagaaagggcgagacatcaccgacggcggcgcgcgctataacttttcgggcgtacagggcatcggtatcgccaacctgagtgattcccttcatgcgctcaatgggctggtattcgatcagcagcgcctgagttttgatgcgctgctgtcgatcctgaaaaacaacttcgccacgccagaaggggaaaagatccgcgccaggcttatcaaccgcttcgaaaaatatggcaacgacattgataatgtcgataacatcagcgccgaactgctgcggtattactgcaaagaggtggaaaaataccagaatccgcgcggcggccagtttacgccgggttcatacacggtttccgcgcatgtgccgctgggagcggtggtcggcgcgacaccggacgggcgttttgccggagaacagctggcggatggcggcctgtcgccgatgctcggacaggatatgcaagggccgacggcggtactaaaatcagtaagtaagttggataacacgctgctgtcgaacggtacgttgctgaacgtgaagtttactcctgcgactctggaaggagaggcgggactgcgcaagctggcggatttcctgcgcgcgtttacccagctcaaactgcagcacatccagtttaatgtggtgaatgccgacacattgcgcgaagcgcagctacggcctcaggatttcgctgggctggtggtgcgcgtggcgggctacagcgccttctttgtcgagctgtcgaaggagattcaggatgacattattcgccgcaccgcgcatcagttgtga

SEQ ID NO: 370140 - DNA, 879 bp, Salmonella enterica
atgacattattcgccgcaccgcgcatcagttgtgaggttgtgggggcgcgcgatgaggagaccgcgcgtatcttcaatatccagcgctattcgctgaatgacgggcaggggattcgtacggtggtcttttttaagggctgtccgcatacctgtccgtggtgcgctaatccggaatctatctcgccgcgcattgaaacggtgcgccgggaaaataaatgcctgcgttgcacgccgtgtctgcgggatgccgacgaatgtccttccggcgcgtttgagcgtattgggcgtgatattacgctggatgaactggaacgcgaagtgctgaaagacgacatcttctttcgtacttccggcggcggggtgacgctttctggcggcgaagtgctgatgcaggcgccgttcgccacgcgcttcttacagcgattgcggcgttggggcgttccttgtgctattgaaacggctggcgatacgtcggccagccgtctactgccgttggcaagggcgtgtgatgaggtattgtttgatctgaaaattatggatgcggagcgggcgcgcgaggtgatcaacatgaatctgccgcgcgtactggagaatttacggttactggttagcgagggaatcacggtgatccctcgtttgccgttgattcctggctttacgcttaacgcagagaatctgcagtgcgcgttaacattgttgagatcattaggaataaagcaggttcacctgctaccgtttcatcagtacggcgagccgaaataccggctgcttggaaaatcatggatgatgaaagatattcccgcgccgtcggtgcaagagatcgctctgtttcgggagatggcggagcaagcaggatttcaggtcaccacaggaggttaa

SEQ ID NO: 370141 - DNA, 354 bp, Salmonella enterica
atggcagtacctgtacggcatctggtggcagtgaccgcctgcgtgagcggtgtagcgcatacctatatggctgctgaacggctggaaaaactttgccagcaggagaagtggagcatcaagattgaaacccagggggcactcggtacagagaaccgcttaacggaagaggatatccgccgtgccgatgtcgtgttgctcattaccgatatcgagctggcgggcgtggagcgatttacccggagtcgctatgtccagtcggggatcagcgcttttttgcgggagccacagcgggtaatgagcgctgtgcgtaaactcctttccgcgccgcaacatacccaccttatcctggagtaa

SEQ ID NO: 370142 - DNA, 852 bp, Salmonella enterica
atgtatcacgacgtcagccaccttctctcccgtctcatcaacggcccgctgccgctgcgccagatttattttgccagcgccagcggcccagcgccggaactggcgtaccaggtggattttccgcggctggagattgtgctggagggcgagcttactgacatgagcattaccgccccgctcattccttgcgatgttctctacgttccggctggcggctggaacatcccgcaatggcaaacgcccgtcaccaccctgagcattctgtttggcaaacagcagttaggtttcagcgtagtccactgggatggtcagcagcatcaaaacctcacgaaacagcacgttgcgcgccgcggcccgcgtatcggctcgttcctgttacaaacgcttaatgagatgcagatgcagccgcaagagcagcaaacggccagattgattgtcgccagcctgctaagccattgccgcgatctgctcggcagccaaatccagaccgcctcccgcagccgcgcgctttttgaagccattcgggagtatattgatgaacgctacgccgcgccgttgacgcgcgaatcggtagcacaagcgttttatatctcgccaaattacctctcgcacctgttccagaaaacgggggccatcggctttaacgaatacctgaaccatacgcgactggaacacgccaaaacgttgctgaagggctatgacctgaaagtgaaagaggtggcgcaccgttgcggctttgtcgacagtaactatttctgccgcctgtttcgcaaaaatacggaacgctcgccgtcggagtatcgccgccagtatcacagccagctaacggaaaagcagattactccaggataa

SEQ ID NO: 370143 - DNA, 1734 bp, Salmonella enterica
atgcaatccacattactccagactaaacccgcgtttagctggaaagccctgggctgggcactgctctacttttggttcttttccaccctcctgcaggccattatttatctcaccggatacagcgggacaaacggtctgcgggattcgctactgtacagctcactgtggctgatcccggtctttctgtttccaggccgcatccgggttattgcggccgttattggcgtcgtactctgggccgcctcgctggcggcgctgagctattacgtaatctacgggcaggagttctcgcaaagcgtgctgtttgtgatgtttgaaaccaacgccaatgaagccagcgaatatttaagccaatatttcagtctgaaaattgttcttgtcgcgctggcttatacggtggcggcgattttgctgtggacacgtctgcgcccggtttatattccatcgccctggcgttatctggtgtcgtttgccctgctgtacgggctgatcctccatcccatcgcgatgaatacctttatcaagcataagtcgatggagaaaacgctggatagcctggcgtcacgaatggaacccgccgcgccgtggcaatttattactggctactatcagtaccgtttacagctcgcctcgctgaataaactgctgaatgaaaacgatgccctgccgccgctggctaacttccaggaccactccggcgatgcgccgcgcacactggtactggtgattggcgaatcgacccagcgtggccgtatgagtctgtacggttatccgcgcgaaaccacgccggaactggacgcgctgcataaaaccgaccccgggctgaccgtgtttaataatgtggtaacttcgcgaccgtacaccattgagatcctgcaacaggcgctaacgttcgcggacgaaaagaacccggactggtatctgacgaagccatcgctgatgaatatgatgaaacaggccgggtataaaaccttctggatcactaaccagcagacgatgacggcgcgtaataccatgctgaccgtgttctctaagcagactgataagcagttctatatgaaccagcagcgcactcaaagcgcacgcgaatatgacagcaacgtgctggagccgtttaaagcggtgttagccgacccggcgccgaaaaaattcattattgtgcatctgctgggaacgcacattaaatacaagttccgctatccagaaaaccagggcaagtttgatggtaaaaccgaccatgttccgccgggattaagcagcgacgaactggaatcgtataacgattacgacaacgcgaacctgtataatgactatgttgtcgccagcctgattaaggactataaagcgaccgatccgaacggtttcctgctctacttctccgatcacggtgaagaagtgtatgacacgccgccgcataagacgcagggacgaaacgaagattcgccaacccgtcatatgtatacggtgccgttcctgctgtggacctcagagaaatggcaggcagcgcatccgcgcgacttctcacaggatgtcgatcgtaagtacagcagttccgagcttatccatacctggtctgacttagcgggcctgacctatgatggctacgacccgacgcgctccatcaccaacccgcagttcaaagagaccacgcgctggattggcaacccgtataagaaaaacgcgctgattgattatgatacgttgccgtatggcgatcaggtcggtaatcaatag

SEQ ID NO: 370144 - DNA, 2652 bp, Salmonella enterica
atgaacgaacaatattccgcgttgcgtagtaatgtcagtatgctcggcaaggtgctgggagaaaccatcaaggatgcgctgggagaacacattcttgatcgcgtagaaacaatccgtaagctatccaaatcttcacgcgccggcaatgaagctaatcgccaggagctgctcaccacgctacaaaatttgtctaatgacgagctgctgccagttgcgcgcgcgtttagtcagttcctgaacctggccaatactgccgagcaataccacagcatttcgccaaaaggcgaagccgccagcaacccggaagtgattgcccgcactctgcgcaaactgaaaaaccaaccggacctcaacgacgcaaccatcaaaaaagcggtagagtcgctgtcgctggagttggtgctaaccgcccatccgacagaaattacccgccgtacgcttattcacaagatgggtgaaatcaataactgtctgaaacagcttgataataccgatatcgccgactacgaacgtcaccaggtgatgcgtcgcctgcgccagttgattgcccaatcctggcatacggatgagatccgcaagcagcgcccaagcccggtggatgaagccaaatggggcttcgccgtggttgagaacagcctgtggcagggcgtacctaactatctgcgtgaactgaacgaacagctggaagaaaatctcggctacaaattgccggtggattttgtgccggtacgttttacctcctggatgggcggcgaccgtgacggcaacccgaacgtgacggcggatatcacccgccacgtgctcttgttaagccgctggaaagccaccgatctgttcctgaaagacattcatgttctggtatcagaactgtcgatggtcgacgccacgccggagctgctggcgttagtgggcgaagaaggcgcgtctgagccgtatcgctacctgatgaaaaaattgcgcgcccgtctgatggcgacccagtcctggctggaagcgcgtctgaaaggcgagaagctgcccaaaccggctggcctgctgacgcaaaacgagcagctctgggaacctctgtacgcctgctaccagtcgttacaggcctgcggcatgggcattatcgccaacggcgagttactcgacacgctccgccgcgtgaagtgtttcggcgtaccgctggtgcgtattgatatccgtcaggagagcacccgccataccgaagcgctgggcgaaattacccgctacctcggtattggcgactacgaaagctggtcggaagccgacaagcaggccttcctgatccgcgagctgaactccaaacgtccgctgctgccgcgtaactgggagccgagcaacgatacccgcgaagtgcttgaaacctgcaaggttattgccgaagcgccaaaaggatcgatcgccgcctacgtaatttcaatggcgaaaacgccgtctgatgtgctggctgtgcatctgctgctgaaagaggcaggtatcggctttgccatgccggtcgcgccgctgtttgaaaccctcgacgacctgaacaatgccgacgacgtgatgacccagttgttgaatatcgactggtatcgcggactgattcagggtaagcagatggtcatgatcggctactccgactcggcgaaagacgccggcgtcatggccgcgtcatgggcgcagtatcaggcgcaggacgccctgatcaaaacctgtgaaaaagccggcatcgagcttaccctcttccacggccgcggcggttctattggccgtggcggcgcgccagcccacgcggcgctgctttcgcaaccgccaggcagtctgaaaggcggtctgcgcgtgaccgagcagggcgagatgatccgcttcaaatacggcctgccggaagtcaccgtcagcagcctctcgctctacaccagcgcaattctggaagcaaacctgctgccgccgccggaaccgaaagacagctggcgtcatattatggatgagctttccgtcatctcctgtgaaacctaccgcggctacgtgcgcgaaaataaagactttgtaccgtacttccgctccgcgacgccggagcaagagttgggcaaattgccgctcggctcacgtccggcgaaacgtcgtccaactggcggcgtcgaatcgctgcgcgcgattccgtggatcttcgcctggacgcaaaaccgcctgatgctgccagcctggctgggcgcgggtactgcgctgcaaaaagtggtggaagacggtaaacaaagcgaactggaagccatgtgccgcgactggccgttcttctccacgcgtcttgggatgctggaaatggtgttctcgaaagccgacctgtggctggccgactattacgatcagcgtctggtggcgaaaacgctatggccgctgggcaaagagctacgagacctgctggaagaagacattaaagtggtgctggcgattgccaacgattcgcacctgatggccgacttaccgtggattgcggagtccattcagttaagaaacgtttataccgatccattaaacgtgttgcaggccgagttgctgtatcgttcccgtctgactgaagagcagggcaaatcgcccgatcctcgcgtcgaacaggcgttgatggtcacgattgcgggcgtcgccgccggtatgcgcaacaccggctaa

SEQ ID NO: 370145 - DNA, 1152 bp, Salmonella enterica
atgaaaaacgttttaccgccatttatcgagatttaccgcgctttgattgccacaccgtcgataagcgcaaccgaagaatccctggatcaaagtaatgcgtctttaatcactttgcttgcaggctggttcagcgatcttggtttcaacgtagaggttcaaccggttccaggaacgcgaaacaaatttaatatgctcgccagcaccggacatggcgcgggcggtttgctgctgaccggccataccgacacggttccctttgatgacggacgctggacgcgcgacccgttcacgctgaccgagcatgacaataagctctatggcctgggcactgcggatatgaaaggcttcttcgcttttattctggacgcgctacgtgacgttgacgtcacaaagttgaaaaagccgctctacattctggcgaccgccgatgaagagaccagcatggcgggggcgcgttatttttccgaaaccacggcattacgtccggactgcgcgatcattggcgaaccgacgtcgttgcaaccgatacgcgcgcacaaagggcatatctctaatgtcgttcgcgtcctggggcagtccggtcattccagcgacccggcgcgtggggttaacgccattgaactgatgcacgatgcgattggccatatcatgcaactgcgtgactcgctgaaagcgcggtatcactacgaggcgtttaccgttccgtatccaacgctgaatctgggccatatccacggcggcgatgcctcaaaccgtatctgcgcctgctgcgaattgcatatggatattcgtccactgccgggcatgacgttaaacgaccttaatggactgcttaacgacgcgctggccccggtaagcgaacgctggccgggccgcctgacggtggcggaattacatccgccgattccaggttacgagtgtccaccggaccaccaactggttgaagtagtagaaaaactgttgggaacaaaaaccgacgtggtgaactactgtactgaagcgccgtttatgcagacattatgcccaacgctggtgcttggtccgggctcaattaatcaggcgcatcagccggatgaatatctcgaaacgcgttttattaagccaacccgggaattgattacccaggtagtacaccatttttgctggcattaa

SEQ ID NO: 370146 - DNA, 1005 bp, Salmonella enterica
atgttgaatacgctgattgtaggcgctagcggttatgcgggcgcagagcttgtaagctacgtaaatcgccacccacatatgaccataaccgctttgaccgtctcagcgcaaagcaatgatgcaggaaagttaatttctgatttacatccgcagttaaaagggattgtcgacctgccattgcaaccgatgtcggatgtacgtgattttagtgcagatgttgatgtggtgttcctggcgacagcgcatgaagtgagccacgatctggcgccgcaatttttacaggccggatgcgtcgtattcgatctttccggcgcgtttcgggtaaacgatcgcgccttctatgaaaagtactacggatttactcatcaatatcctgagctgctggagcaggcggtgtacggtctggcggagtggaatgccgataaactgaacacggcgaatctgattgcggttcctggttgctatccaaccgcagcgcagttgtcgctaaaaccgctgattgacggcgggcttctcgatctgacgcagtggccggtaattaatgccaccagcggggtgagcggcgcggggcgcaaggcggcaatatcgaacagtttctgtgaagtgagtttgcaaccgtatggcgtgtttacgcatcgtcatcagccggaaatcgctgcccatctgggcgcggaggtcatcttcaccccgcatctggggaatttcccgcgcgggattatggaaaccattacctgccgcctgaaagcgggagtaacccatgcgcaggtcgccgacgtgttgcaaaaagcctatggcgacaaaccgctggtgcgcctgtatgacaaaggcgttccggcgttaaagaacgtcgtcgggctgccgttctgcgatattggttttgccgtccagggcgaacatctaattgtggtggcaaccgaagacaacttgttgaaaggcgcagcggcgcaggcggtgcagtgcgctaatattcgttttggcttcgctgaaacgcagtctcttatttaa

SEQ ID NO: 370147 - DNA, 777 bp, Salmonella enterica
atgatgaatccattaattatcaagctgggtggcgtattactggatagcgaagaggctctggaacgtctttttaccgcgctggtcaactatcgtgagtcccatcagcgtccgctggtgattgttcacggcggcggttgcgtggtggatgagctgatgaaagggcttaatttgccagtgaaaaagaaagacggcctgcgcgtgacgcctgccgatcagattggcatcattaccggcgcgctggcgggaaccgctaacaaaactctgctggcctgggcgaagaaacaccatatcgcctctgttggtctgtttctgggcgatggcgacagcgtaaacgtgacccaactcgatgaagcgttaggccacgtcgggctggcgcaaccggggtcgccgaagctgattaacatgctgctggaaaacggctttctgccggtggtcagctccattggcgtaacagacgacggccaactgatgaacgtcaacgccgatcaggcggcaaccgcgctggcggcgacgctgggggccgatctgatcctgctttctgacgtgagcggtattctggacggcaaaggccagcgtatcgccgaaatgacggcgtccaaagccgagcagcttatcgaccagggcattattaccgacgggatgattgtgaaagtgaatgcggctctcgatgctgcgcgggcgctgggtcgcccggtggatatcgcttcctggcgtcatgcggagcaactgccggcgctgtttaacggtacgccgattggcacgcgtattctggcttaa

SEQ ID NO: 370148 - DNA, 1377 bp, Salmonella enterica
atggcactttggggtgggcgttttacacaggcggcagaccagcggtttaaacaattcaatgattcgttgcgcttcgattaccgtctggcggagcaggatattgtcggttctgtggcctggtccaaagcattggtcacggtaggcgtactgactgccgatgagcaacgacagttggaagaagcgctgaacgtgctgctggaagaggttcgcgtgaatccgcagcaaatcctgcaaagcgatgcggaagatatccatagctgggtggaaggtaagctcatcgacaaagtgggtcagttgggtaaaaagctgcacaccgggcgcagccgtaacgatcaggtggcgacggacctgaaactgtggtgcaaagagacggtgagggaactgcttaccgctaaccgccagctacagagcgcgctggtggaaaccgcgcaggcgaaccaggacgcggtaatgccgggatatacccatctgcaacgcgcgcagccagtgactttcgcccactggtgtctcgcgtatgtcgaaatgctggcgcgcgatgaaagccgcctgcaggacacgcttaaacgtctggacgtgagtccgctaggttgcggcgcgttggcgggaacggcctatgaaattgaccgtgaacaattggcaggctggctgggctttgcgtctgcgacccgcaacagcctggacagcgtgtccgatcgtgaccacgtactggaactgctttctgatgcggctatcggcatggtgcatctgtcacgcttcgcggaagatctgattttctttaattctggtgaagcgggttttgtagagctttctgaccgcgtgacttccggttcatcgttaatgccgcagaagaaaaacccggacgcgctggagctgattcgcggtaagtgcggtcgcgtacaaggggcgctaaccggcatgatgatgactttaaaaggtctgccgctggcgtataacaaagatatgcaggaagacaaagaagggctgttcgatgcgctcgatacctggcttgactgcctgcatatggcggcgttggtgctggacggtattcaggtgaaacgcccacgttgtcaggacgcggcgcaacaggggtatgccaacgccacggagctggcggattacctggtcgcgaaaggcgtgccgttccgcgaagcgcaccatattgtcggcgaagcggtggtagaagccattcgccagggtaagccgctggaagcgttgccgctggccgatttacagaaattcagccacgtgattggcgacgatgtgtatccgatgttgtctttgcagtcgtgtctggataaacgggcggcaaaaggcggcgtttctccgcagcaggtggcgcaggccatcgacgatgccagggcgcgcctcgcgttgtag

SEQ ID NO: 370149 - DNA, 918 bp, Salmonella enterica
atgaatattcgtgatcttgaatatctggtggcgttagccgaacatcgccatttccggcgagcggcggactcctgtcacgtcagccagccaacccttagtgggcaaatacgtaagctggaagatgagctgggcgttatgctgctggagcgtacgagccgtaaagtgctgtttacccaggcgggcttactgctggtggatcaggcgcgtaccgtactgcgtgaggtcaaggtgctcaaggagatggcaagccaacaaggcgagacgatgtccggcccgctgcatattggtttaatcccaacaattggtccctatttgctgccgcttatcattccaatgttgcaccagactttcccgaagctggaaatgtatctgcatgaggcgcaaacgcatcagctgttagcgcaactcgatagcggcaagcttgactgcgctattctggcgctggtgaaagagagcgaggcgtttattgaagtgccgctgtttgatgagcccatgatgctggctatttatgaggatcatccgtgggcgaatcgcgatcgcgtgccgatgtccgatctggcgggcgagaaattgctgatgctggaagatggccactgtctgcgcgatcaggcgatggggttctgttttgaagcgggagcggatgaagatacccatttccgggcgaccagtctggaaacgctgcgcaacatggtggcggcgggcagtggtattacactactccccgcgctggccgtaccgcaggagcgtaagcgcgacggcgtggtttatctgccatgcattaagccggagccgcgtcgtaccgtggggctggtttatcgcccgggatcgccgctgcgtagccgttatgagcaactggcagaggccatccgtggcgcaatggatggccatttcgacaaggcgttaaaacaggcggtttaa

SEQ ID NO: 370150 - DNA, 1401 bp, Salmonella enterica
atgccacattcctgggattatgatgcagtcgtcatagggtcaggccccggcggtgaaggcgctgcaatgggtctggttaagcaaggagcacgcgtcgcggtgattgagcgttatcataacgttggcggcggatgtacccactggggcaccatcccatccaaagcccttcgccacgccgtcagccgcattattgaatttaatcaaaacccgctctatagcgaccactcccgtctccttcgttcttctttcgccgacatccttaatcatgccgataacgtgattaatcaacaaacgcgtatgcgtcaggggttttatgagcgtaaccactgtgaaatattgcagggcaacgcccattttattgacgaacataccctggcgctggaatgccatgacggcacggttgaaaccctgacggcagaaaaatttgttattgcctgtggttcgcgtccttaccatcccaatgatgtggatttctcgcatccgcgcatttatgacagcgactcaatcctgagtctccaccatgaaccgcgccacgttattatttacggcgccggcgttatcggctgcgaatatgcgtccatcttccgcggtatggatgtgaaagtggatctgatcaacacccgcgatcgcctgctggcctttctcgatcaggagatgtccgactctctctcttaccatttctggaatagcggcgtggttattcgccacaatgaagagtatgagaaaatcgaaggctgcgatgatggcgtcatcatgcacctgaaatccggcaaaaaactgaaggctgactgcctgctctatgctaatggccgtaccggtaacaccgattcgctggcgctggagaatattggtttggaaacagacagccgtggacagctcaaagtcaacagtatgtaccagaccgccctgccgcacgtctatgcggtgggcgacgtgattggctatcccagtctggcctccgccgcctacgatcaggggcgtattgcagcgcaggcgctggtgaaaggcgaagcgaccgcgcatctcatcgaagatatccccaccgggatttataccattccggaaatcagttctgtcggcaaaaccgagcagcagttaacggcaatgaaagtgccttacgaagtgggccgcgcgcaatttaagcatctggcgcgagcgcaaatcgtcggcatgaacgtcggcacgctaaaaattctcttccaccgcgaaaccaaagaaattctggggattcactgctttggcgaacgcgccgccgaaattattcatatcggccaggcgatcatggagcagaaaggtggcggtaacaccatcgaatacttcgttaacaccacctttaactacccaaccatggcggaagcttatcgggttgcggcgttgaacggcttaaaccgcctgttttaa

SEQ ID NO: 370151 - DNA, 636 bp, Salmonella enterica
gtgatgggtgttagagcgcaacaaaaagaaaaaacccggcgttcgctggtggaagccgcattcagccaactgagcgctgagcggagttttgccagcctgagtttgcgtgaggtggcgcgtgaagcgggcattgcgccaacgtcgttttaccgtcattttcgcgatgtcgatgaactcggtctgacgatggtggatgaaagcggtctgatgctgcgtcagttgatgcgtcaggcgcgacagcgcatcgcgaaaggcggcagcgtcattcgcacgtcggtctccacatttatggagtttatcggcaacaaccccaacgccttccgtctgttgttgcgcgagcgttccggcacttcagcggcgtttcgtgccgccgtcgcgcgggagattcagcattttattgcggaacttgccgactatctggaactcgaaaaccatatgccgcgcgcgtttactgaagcccaggccgaagcgatggtgactattgtctttagcgcgggcgcagaggcgttggacatcggtgctgaacagcgtcggcaattagaagagcggctggtattgcaactgcgcatgattgcgaaaggggcgtattactggtatcgccgtgagcaagagaaaatagcacatcattccgaataa

SEQ ID NO: 370152 - DNA, 360 bp, Salmonella enterica
atgaaacagtcaggtcaagataaaggtacgctgttgctggcgctcatcgctggcttatcgattaacggcacattcgcggcgctgtttagcgctattgtgccgttctccgtattcccggttatctcgctggtgctgacggtatattgcctgcatcagcgctaccaaaatcgtactatgccggtaggtttgccggggttggccgccgcttgtttcattcttggcgttttactgtatagcaccgtcgtgcgtgcagaatatccggatattggctctaatttcttcccggcggtgctgtcggtgattctggtattctggattggctttaaactgcgtaaccgcaagcaggacaccgcggaatag

SEQ ID NO: 370153 - DNA, 1101 bp, Salmonella enterica
atgacccccgaacatcttccgacagaacagtatgaggcgcagctggccgaaaaagtggcgcgcttgcagagtatgatggcgccgttttctggcctggttccggaagtatttcgctcgccggtcagtcactatcgtatgcgtgcggaatttcgcctgtggcatgacggcgatgacctgtaccacattatgtttgatcagcagaccaaaagccggattcgcgttgacaccttcccggcggccagccaactgattaataccttaatgaaggcgatgattgccggcgtgcgcgataatcatgcactgcggcataagctgttccagatcgattatctcacgaccttgagcaaccaggcggtagtgtcgttgctgtaccataagaagctggacgaagagtggcgtgaagccgccactgcgttacgcgatgctttacgcgcgcaaggtctgaacgtacacctgattggccgggccactaaaactaaaatcgaattggatcaggattatattgatgagcgtctgcctgtggcaggtaaagagatgatctaccgccaggtcgaaaacagctttacgcagccaaacgccgccatgaatattcagatgttagagtgggcgctggaggtgacgaaagactcaaaaggcgatctgcttgagttgtattgcggcaacggcaatttttctttagcgctggcgcgcaattttaaccgcgtgctggcaaccgaaatcgccaaaccgtccgtcgctgccgcacagtacaatattgccgctaatcatattgataatgtgcaaattattcgcatggcggcggaagagtttacccaggcgatgaatggcgttcgtgagtttaaccgcctgcaggggatcgacctgaagcgctatcagtgcgaaaccatttttgtcgatccgccgcgcagcggtctggacagcgaaacggaaaaaatggtgcaggcttatccacgtattctgtacatttcctgcaatccggaaacgttgtgcaaaaacctggaaacgttaagccagacgcacacggtgtctcgcctggcgctattcgatcagttcccgtatacgcatcatatggaatgcggggtattactcaccgcaaggtaa

SEQ ID NO: 370154 - DNA, 1845 bp, Salmonella enterica
atgattaaaaaagctacgctgctgacggcgttctccgtcacggccttttccgcttgggcgcaggacactagcccggataccctggttgtcaccgccaaccgttttcagcagccgcgcagcgcggttctggcgcccgttaccatcgtgacgcgtcaggatattgaacgctggcaatcgacctccgtaaatgatgttctgcgccgtttgcctggcgtcgatattgcgcagagcggcggcgccggacaaaactcctccattttcattcgcggcaccaactccagccatgtactggtattgattgacggcgtgcgtctgaatttagcaggcgtgagcgggtccgccgatctcagccagttcccggtgtcgctggtacagcgcattgaatatattcgcggtccgcgctccgctatttatggttccgatgctatcggcggcgtagtgaatatcattacgacgcgcgataacccaggcacagaattaaccgctggatggggaagcaatagctaccagaattacgacatctcgacgcaacagcaacttggcgaaaacacgcgggcgacgttgatcggcgattacgaatacaccaaagggtttgacgtggtagcgaaaggcggtaccgggatgcaggcgcagcctgaccgggacggctttttgagtaaaacgctttatggcgcgttagagcataccttttctgatcgctggagcggattcgtgcgtggttatggctacgataaccgtaccgattacgacgcctattactcgccgggctcgccgctgattgatacacgcaaactttatagccaaagctgggacgccgggctgcgctttaatggcgaacgtattcagtctcagctggtttcaagctatagccacagtaaagattacaactatgatccgcactatggccggtatgatacctccgccacgctggatgagatgaaacagtacaatgttcaatggaccaacagtgtggtcgtggggcacggtaatgttggggcgggcgtagactggcagaaacagactaccacgccaggtaccggctatgtgcccgagggatatgaccagcgtaataccggggtttacctgacaggattacaacagttgggtgacttcactctggaagcggcggcgcgcagtgatgacaactcccagtttggtcgtcatggtacatggcaaaccagcgcgggatgggagtttatagaaggttatcgctttattgcctcctacggaacctcctacaaagcgcctaatttgggccagctgtatgggtattacggtaatccgaacctgaatcctgaaaagagtaaacagtgggaaggcgcatttgaagggctaaccgctggcgtcagctggcgtatttcaggttatcgtaacgatattaatgacatgatcgattatgacgatcatctgcaaaaatattacaacgaaggtaaggcgcgcattaaaggtattgaggcgacggcgaatttcgataccggaccgttaacgcatacggtcagttacgattacgttgatgcgcgtaatgcggttaccgatacgccattaccgcggcgttccaaacagatggcaaaatatcaacttgactgggacgtttacgattttgactggggggtgacatatcaataccttggttcccgctatgattcggattactccgcttacccataccggacagtaaaaatgggcggcgtcagtttatgggatcttacggttgcatatccggtcacctcacatctgacagttcgtggtaaaatagccaacctgttcgacaaagattacgagacagtttatggctaccaaactgcaggacgagaatacaccttgtctggcagctacaccttctga

SEQ ID NO: 370155 - DNA, 852 bp, Salmonella enterica
atggctaccaaactgcaggacgagaatacaccttgtctggcagctacaccttctgaaccacgtcccaccgtgctggtatttgattccggcgtcggtggattgtcggtctatgatgagattcggcggctcctgccggatctccactatatatatgctttcgataacgtggctttcccctacggggaaaagagcgaaacgtttatcgttgagcgcgttgtcgagattgtgaccgcggtacagcagcgctatcccctttcactggcggtgattgcctgtaataccgccagtacggtctcacttcccgcattacgtgaaaagtttgccttcccggtggtgggcgttgtgcctgcgattaaaccagcggcgcggctgaccgcaaatggcgtcgtcgggctactggcgacgagagccacggtcaaacgtccttatactcacgagctgattgcgcgcttcgccaatgaatgtcagatagcgatgttggggtcggcagaactggtggaactggcggaagctaaactacatggcgactcggtatcgctggaagagctgcgccgcatattacgcccatggctacgaatgccggagccgcctgacacggtcgttctggggtgtacgcatttccctctattacgggacgagcttttgcaagtcctgcctgaagggacgaggttagtggattccggcgcggcgatagcgcgtcgtacagcctggctgttggaacatgaagcgccggatgcgaaatcaaccgatgccaatattgcttattgcatggcaatgacgccaggagctgaacaattattacccgttttacagcgttatggctttgaaacgctcgaaaaactgccggtttaa

SEQ ID NO: 370156 - DNA, 1119 bp, Salmonella enterica
atgaaaaaagtagtggtgttatctgcggtagccgcagccgtaatgatggctggagccgccaacgcagcagaaatctataacaaggatggcaataaactggatttgtatggcaaggtcgacggcctgcattatttttccagtaatcatagtacggatggcgatcaatcttatatccgtatgggtattaaaggcgagactcaaattaccgatcaactaaccggttttggacagtgggagtatcaggtcaacgccaatcgtccggaagatggtgactccagcggttccccgcaaagctggacgcgtctcggttttgctggtttggcatttgccgatatggggtctgttgattatggtcgtaactatggcgtgttatacgacattggttcatggactgacgtactgcctgaatttggtaatgattcgtatgaagcttccgataattttatgaccggacgcgcgaatggcgttctgacttatcgcaataatgatttctttggtctggttgatggtctgaatattgcgttgcagtatcagggtaaaaatgacggcctgtcgaaagaaggcgatcctttaagtaataatgccagaaaaagtatcgcgtaccagaatggcgatggtttcggggcatcagcgacatatgatttgggcatgggggtgagcctgggggcagcctataccagttccaaacgcacgcttgatcagatgacgcaagataaatacgacaatggcgaccgcgctgaagcctggactggcggcgtgaagtatgatgccaataatatttacctggcggcaaactatacccgtacttatgatatgacctatatgggcgatacattgggcggctttgcacataaaaccgataactgggaaatggtagggcaatatcaatttgataatggcttacgcccgtcactggcattcctgcaatccagagccaatgatgttgatggactgggttcgttcgaccttgtgaaatatattgatgtgggttcctattactacttcaataaaaatatgtccgcgtatgttgactacaaaatcaatctgctaaaagatggcaacccatcgaatcctaatacagacaacaccgtggcgctcggcttagtctacgagttttga

SEQ ID NO: 370157 - DNA, 342 bp, Salmonella enterica
atgcatgaattagccctggcgcaaaatattatcgaattgctggaggaacaggcagtaaatcaccagttcagcaaggtaaagcaagtctggctggagattggcgttatggcctgtgttgaggtgccggcgctgcattttggcctggacgtcgccgctcgtcatacccttgccgacaatgcgcgtttccacattactatcgcaccggcgcaaggttggtgtctgtcctgtaatcaacccttcacctctcaaacatccacactctgttgtcccttttgtcattcaggcaaagtgcagatagatgacagtagcagaatgcgcattcgcgagatcgaagtcgaatag

SEQ ID NO: 370158 - DNA, 888 bp, Salmonella enterica
gtgcaaagattgaccgtctattctcacccgctacggattatctggcaggaggcgccgatcggtcgtttgttacagggcgcaacgccggtatacgcaaaaacgcttatttcacgtttgtttacgttgtgcgctcaggcgcacagcgcggcggcggctttactgttgtttcctgaaaagaagccagatatgcaggccgcacaacaagagctggcgcgagaaacgctccgtcgcgcgttgacagactggctccccctgtttagccaccgacaggcaaccgctgaagaatgggcgttgttacgtcgcggagagttatccccgctggcaagcacaatcttttttgacgatgatcctcagacctggcttgccgctggcgtaaagggctgggaagcctggtttttgcaagagcgttctgaaaccgcccgctggctggcggcagtacagaatatcattacacctacactaccgatggcatcgtccccggaccatacgttaataacccatggtcccctggatgtctcgcctctggctatcgaatatccgctgctgtcagcctgttgtcttagcggtaaaacgactgcgctacgtctgctggcccgctgcattacgctcgcccgaagtttgagcgcccttcccaccctgcgctggaatcgttttgatgatggcgaatggaaaatagcggtagtggaaaccgcgcgaggatggttagttcatcaggccagactgacgacgtcaggcaatattcttgattaccgtattatctcgcctaccacacgtcacgcccaacctgacggcgtcattgctcgcgaactggccactattccactctcattgtggtcgcaacagttacaggtaattgatccttgtgtcgccgtaaatattgttgaatga

SEQ ID NO: 370159 - DNA, 1062 bp, Salmonella enterica
gtgaattattccagaactattccagtcgttaatattgccggaccaggctcgcagccagaagaggaagactttaactttcttcctatccccgccggcattaatctcccgctgacgccggttttaccggaacaggcgctgcccgctgagctccgtgttgccagacacatcctgactacgcttattcgcgatatggataacccagtggcaacgctcccctttcccctgagctataagctgaatgccactgagcaacagaatagcggtttattggatcaactgctcggcgaaggtgaaatctccgcccgggtactattatccgatggaaaagaacagcgtattcaggagacggtttttacgggcgtctggcgtgtgcgtgaatataacgctgaccagcaacgggttgccgatgaaattatcattggcccgatcccagagagcatctggcagacgcatccgcagccgccgattacgccagaattgccgccacaaccggcgggattgatgaatggtgcctttatcgcgcatgaaatagccgagcgcgtaaaacagccggtaaaagagccgcatatcattaacttaacgctgttgccagtaaacgatgccgatcgcgagtatctggatcattttttaggcgaaggttgtagcgctattttttcacgcggatatggtaaatgccggattgtaagcacgcattttcccggcgtatggcgggtcaattatttcaatgatatgaacacattactgcaagatatgattgagatagcggacattcctgatatcgccgttgcaggcatcgatgatatcgaagatgcctacgcggggctaaaaaatacgttggaatggttgaaagaatacccggttacagaaaatgagccagtggtgcgcatggagtgcaaagtatgttggtgggtttacgaccctgcgctgggcgatgacgtatggcaaattccacccggtgtgcccttcagccagttacctgattactggtgctgtccggtttgcgaaaccagtaagtccgggtttatggtgatcgatgaaggtaatagttcgtgcaaagattga

SEQ ID NO: 370160 - DNA, 411 bp, Salmonella enterica
atgactatctcaccccaaaatcctgtttgtccactggcggataaaggctttctggttaccgatgcgcaaacgctcccgtcgttgattaatgcgcatccgactgtgctggttttgctgcaaagcgaccccaacaaacatccggaagtcgccgacagttgggtcatcatcccggagatcctcaagcaatttccggcgacgtcttataccgcggcatttgcggatagcgaacagagtgaactgatcgcccgggagtatcgcattctgaaatatccggcgctgcttttctttcgccagcaccgttttgtcggcagtctggcgggattatatagctggcaagaatactctcagcgggtggccgcattgctgaccacaccgggctatcgtcaggatattcccgttatcacgcaatag

SEQ ID NO: 370161 - DNA, 300 bp, Salmonella enterica
atgtgtatcggcgttcctgtgcaggttatttcacccggtcagtggttcgccaaatgccgcgaccgacacggcgagcttatcgacgttgatattcggcttgtggctccccccttagcaggcgcatggctgctgacatttggcggcgcagcacgacgagaaatggacgaagcggaagccgctgaggtactggcggcgctggactcactggaacaggccatgctcacgcaaagcgatccgctgaccggttttgccgatttattgtctcgcacgcctgaattaccggagcatttaaaaaaatga

SEQ ID NO: 370162 - DNA, 609 bp, Salmonella enterica
atggcagaagtaacaatcttagggcttggcaacctgctttgggcagatgaagggttcggcgtcagagcggcggaaaagctgtttgaacagtatgccgataacgagaaagttgacgttgttgatggcggtacgcaggggctggcgctgctgccctggctgcaacagaccgaaaaactgttaatcatggatgctatcgattttggtatggcgccaggttcgctggcgatgtttcgtgatgaacaggttcccgcctatctgacggcgaaaaaactcagtttacatcagaccagtttttctgaagtgctggcattgctgcaattaaccggcggccagttatcggagattgtgctgattggcgtgcagccggaatgtctggatgactatggcgggagtcttacgccgcaggtaaaggcgcaactgatgcctgcggtctatctcgcgcaggaagtgctggcgcaatggggtatcaccgcctcttcagcggccttgcccactgaaagactcaatcattacagcctgtgtatggaacgctacgaagatgaacgcccagatgcgcaaagcgcttgccgggtcggcgatattcgggtgctacagagagagaaatcataa

SEQ ID NO: 370163 - DNA, 675 bp, Salmonella enterica
atgcatctcaaagaaataaccagccaggggtactatatctatgaagctccggtccgtttatggcactggatcacggcgttatccattgtcgtcctggctgttacaggatatttcattggccgccccctgccatcgattcaaggtgaagcgacctttatgttttggatgggctggatacgactgatccattttaccacggcgtatatttttactgtcgcgctgctgtttcgtatttactgggcatgtgtcggcaatgagtacgccagggagatgtttctggttccgttctggcgccgcgcctggcgcaaaggcgttatcagcgaaatccgctggtattttttcctcgaaaaagaggcccatcgttactatggacataatccggtagcgggactggcggtaatgttctatttctggatgtccgtactgatggtgtgtagcggctttgcgctctatggcgaaggacttggaacagacagttgggcgtatcaatggtttggctggatgattcgcctgactggcaacgatagcctcgcgctgcatttctggcaccggctgggcatgtggttcattatcgccttcgtcattgcgcatgtttataccgctatccgcgaagacattatgagccgacaaagcgtgatttccgtcatgataagcggctggcgctggttcaggtga

SEQ ID NO: 370164 - DNA, 1803 bp, Salmonella enterica
atggcatatccttatcagactcagggttttacgctggacaatagcggacggcgaattgtggtcgatccggttactcgcatcgaagggcatatgcgttgcgaagtgaatatcgacagtaataatgtcattactaacgccgtgtcgaccggcaccatgtggcgcggcctggaggttatcctgaaaggtcgcgatccgcgagacgcctgggcatttgttgaacgcatttgcggcgtctgcaccggtacacacgctctgacctcaatccgtgccgtagaaaatgcgctgggaatcgcgattccggacaacgcaaactgtatccgtaatatgatgcaggctacgctacacgttcacgatcacctggtgcatttttatcatctgcacgcgctggactgggttgatgtggttgccgccctgaaagccgacccgcatcagacctccgccatcgcgcaaagcctttccgcatggccgctatcctcgccgggatatttccgcgatttgcaaaatcgactgaagcggtttatcgagtccggtcaacttggccctttccgtaatggctactggggacatccggcgatgaaacttccgccggaagccaatttgctggcggtcgcccactatcttgaagcgctcgattttcaaaaagagatcgtaaaaattcacaccgttttcggtggtaaaaacccgcatcctaactggctggtgggcggcgttccttgcgccatcaaccttgacgaaacgggcgcggtcggcgcagtgaatatggaacgcctgaaccttgtcagttccatcatccaaaaagctcgccagttctgcgaacaggtttatcttccggacgtcttgctgattgccagttattacaaagactgggcaaaaatcggcggcgggttatcgagcatgaacctgctggcttatggcgagtttccggataaccctaacgattattccgccagtaatcttctgcttccgcgtggggctatcattaacggtcgtttcgacgaaattcatcctgtcgatttaaccgcccccgatgagattcaggagtttgtcactcactcctggtatacctatggtaacggcaataacgataagggcctgcatccctgggatggtctgaccgaaccgcaactggtcatgggcgaacactataaaggcacaaaaacttttatcgaacaggtggatgagtccgctaaatattcatggattaaatcgccgcgctggaagggacatgcgatggaggtaggtccgctggcgcgttatctgattggatatcatcaaaataaaccggaatttaaagagcccgtggatcaactgctgagtgtattaaagctgcctaaagaagcgctcttttctacattaggacgtactgccgcgcgtgcgctggaatccgtatgggcaggcaatacgctgcaatatttcttcgatcgtctgatgcgtaacctcaagtccggcgatacggcgacggcaaacgtcacgctctgggaacccgatacctggcctacatcggcaaaaggcgttggtttcagcgaggcgccgcgtggcgcgctggggcactggataaaaattgaaaatcagaaaatcgacagctatcagtgtgtggtaccgacaacctggaatgccgggccacgtgacgataaaggtcaaattggcgcgtacgaagcggcgttaatggggactaaactcgccgttcccgatcaaccattggagattttacgtactctgcacagcttcgatccctgcctggcctgctccacccatgttattgataatcatggaggggagctggtcagggttcaggtacgatga

SEQ ID NO: 370165 - DNA, 1104 bp, Salmonella enterica
atgcaaacacaagatacattttatcaagttatgcgtagacacggcgtgacaaggcgtagcttcctcaagttttgcagccttaccgcaacgtctttaggcctgagcagttcgatgattcctcagatagcttatgccctggagaataaaccgcgtacgccagtgatatggctgcatggtcttgaatgtacctgctgtaccgaatctttcattcgctctgcgcacccgttggcaaaagatgccattttgtcgctcatttccctggattatgacgacaccattatggccgccgcagggcaacaagctgagcaggcgttggcggatgtgatgcgtgagtacaaaggaaattatatcgttgccgtggaaggtaacgcgccgctgaatgaagatgggatgttttgcatactggctggcgagccgttcctggagaagttaaaacgcgtcagcgcggatgctaaagcgattatcgcctggggggcctgcgcatcatggggctgcgtgcaggcagcccgtcccaacccaactaaagccacgccggttcacaaattaattaccgataaacccattattaaagtgccaggctgcccgcctatacctgaagtgatgtccgccgttatcacctatatgctggcatttgatcgcatccctccccttgatcgtcttggacgaccaaaaatgttttatggccagcgaattcatgacaaatgttaccgacgcgcgcatttcgatgccggtcagtttgtggaagcgtgggatgacgaaggcgccagaaaagggtattgcctgtacaagatgggctgtaaaggcccgaccacctataacgcctgttcaaccgttcgctggaatgatggcgtgtcttttcctatccagtcgggtcatggatgcctcggatgttcggaagatggattctgggattacggttctttttacagccgggcaacgggcattccgcaaaccggcattgaagctaccgccgataaaatcggactgggcgttgccggcgtcgcgggcgctgccgccatcgctcacgccacggtgagcgccataaaacacgcccgcaataaaaacaacacgtcatcagaaaacgctccggaagagaaaaaataa

SEQ ID NO: 370166 - DNA, 1089 bp, Salmonella enterica
atgaaaaaaagtaaagcaattttatttatcgctccggcgctgttttcatacgccatggctgcacaggcctgcacaacccttgctattcaggataaacaaggcgatatttttcatgggcgtacgctggaatatatgcaggatttaccctcatggttaacgtattacccggcgggaacacagtttgataaaaaaacgccggatggcagccaggggataagctatcaggcgaagtatccgatactggccattacttccaccattactgatggcgatagcagagacatacttgaaggcatgaatagcgcgggattgtcatttagtgaaaacatgatcatgaatgcgcagttgccgccattgcccgcgagtgaatataaacaggcaattcctgtcacctcgttgggagaatgggcgctggcccgttttgctactgtcggcgaggtaaaacaggcaataaaagagggcaaattctggtcaccggaactgcatcggtttggcgatctgaaatcgccatttcattacgcgttttacgacaagaaaggaggaagcattgtcgttgaagtggaaaatggcaaattccatgtctatgacaatcccactcgcgtgatgacaaatggtcccgcattcccctggcatctgacaaatctgaataattatacgcaattaaccaatgtggaccgctcttcaggcacattgggcgggataaaagtgatgcagcctgatagcgggattgctattgcagacttgccatcgtccgatacgtcggtttcccgttttatacgcggcgtttattacaccacatatgcgccgcaagcgacatccgcccacgacgcaatgaatacgcttgcacatattatgagccgtttcgatcgtccgaaaaatattacggttgattatatggggagtgaaggggaaggcaacgctacccgcaaaccggtctcagaatatacggtctggacaacgctgtctgacttaacgcacggtgagatgatggtgcgcggctacaatgatatcaactataaaacctggtctctttctcagtttaagaacgcgacagcgcccgtgttcgagaaaatcaacgtcaaaggataa

SEQ ID NO: 370167 - DNA, 672 bp, Salmonella enterica
atggttatacctgaggtcaggcaggagaggctctatcagaagatagccaacctcatcattaagctgatcaatgataatatttttcccccgggaacttttttaccgccagaacgcgaactggcaaaacagcttggcgtgagccgcgcctccttgcgagaagcccttattgtactggagatctccggatggatcgtgattcagtccggtaatggggttatcgtttcagataaaaaacaccttgccagcgactataccatcgaagaaattctctctactcgcgagctggttgatagccattgtgcgcgcttagccgcacaaaacgataacgttgacgtcatcaaccaaatagaggcgatttatcatcgtatggatcaagccattaacgataataacgtccacggcttttactcgctggataaagagtttcaccttgcgatctctgaggctagccgtaaccgggtgttgttcgatatgtcccgtatgttatgggaacaacggattaatatcccttatgccgggcttgatgagcagtctggagacagaaatgttttacttaatctcaacaaacaacataaagcgatagtggatgcaatgcgccagtctgatgctgacagcgcttatgagggatcgctggaacatttacgctatgtgagaaagattgtcggcggctaa

SEQ ID NO: 370168 - DNA, 1026 bp, Salmonella enterica
atgaaagtcaaagctgtgttcattaataagcctggtgaagttgaaacccgctgggtggattatccccataagaaagaaaatgaagtattaattaaggttgatgctgcaggcatttgcggatcggatatcggggcttttcgtggaacgaacccactggttacttacccaagaattattgggcatgaagtgaccggaattgttcttcaggaaggcgccggaatgccggacaatattaaagaaggtgaccgcgtaattgttgacccctatatttattgtggtcactgctacccttgctctgtcggcagaactaattgctgtgaaaatttaaacgtcattggcgtgcatgtcgatggcgcaatgcaggaggtggttactcatcccgcacatttaattcataaaataccagataatgtgccttctgaaatggcgccgctggcagaaccgctgaccatcgctctgcacgcgctgcatcgggcaaacgttaaggctggggaatatgttgccatcatcggcgcgggggccattggtcttatggcggcattaagcgcgcgtcattacaaggcaacgcctattctgatcgatattgtggaagaaaggctacgctatgcgcaaaagcttggcgttccttatgtgctgaacgccgctgacgatcaggttatcgacgctattaaaaatatcacccacggcaccatggcgcaggtcgtgatagaagcttccggcgcaaatagcgctattcgaaatacgcttgatttagcatcgtttgctggtcgtatttcgtttaccggatggccaaaacaggaaacgtcgctgccgacgaacctgatcacctataaagaactggatttacgcggttcccgcaccagtgccggtgaatttgatgaggcattacgcatgctgtcaacgctggagattaatccgcaagatgttgtcagtaaggtcgtcaatcttgatgagatccctgatgcagttaaagaacttgatcgctatccggagcgctacttaaagattaatgctgttttccattga

SEQ ID NO: 370169 - DNA, 1287 bp, Salmonella enterica
atgaaaagaaaaacaatgggatggcttatcgtttttcttctatttatagtttacatgctcaactatatggatcgttcagcattgtcgataactgcccccttgatcgaaaaggagttaggatttaacgccgcggagatggggatgatcttcagcgcgttttttatcggatacgccctgtttaattttattggtggctgggccagcgataaagttgggccaaaaacggtttttctcatcgcagcgttactatggtctgtattttgtggcttaactggtttggtcaccggattgtggacaatgcttatcgtgcgcgttcttttcggtatggctgaaggaccggtcagcgctgccggaaataaaatcatcaataactggatttcccgaaaggagtctgccacggcgatcggaatttttagcgccggttccccgctcggcggcgcggtgtccgggccgatagtgggcctgctggcgttatccttaggctggcgccccgcatttggcattattttcttatttggcctggtctgggtactactgtggtactttatcgttagcgataagccaacaatgagtaaacgcctggcgccggaagaacgcattgattttgaaaatcatgaggacgttattttatctgatgatggccgggctacgccttcactcggctattacatgaaacaaccaatggtatgggcgacaactctggcttttttcagctacaactatattctttttttcttcctgacctggttcccaagttacctgaaccattcgttacatctcgatattaaagaaattagtatcgccacggtaattccctgggtcatcggcgccattggtatggtactcggcggcgtctgttctgatgtaatttatcggattaccggtaatgctctgctctcacgtcgacttattctgggcgtatgtctggcaggcgcggcggtatgtgttgccgtttccggtaccgttagcactattggtagcgcaattacgctcatgtcagtttcactcttcctgctctatttaacaggcccaatttattgggcggttattcaggatgttgttcataaagataaggtagggagcgtcggaggagccatgcatggcctggctaatatatccggtattatcggtccgcttgtcaccggttttatcgttcaatttagcggtaaatatgactatgcgttctatctggctggtgctatcgctatcgtttcaagcctgttggtcttcgtgtttgtaaaaagtaaaggattcaaagccaatgaaagtcaaagctgtgttcattaa

SEQ ID NO: 370170 - DNA, 1491 bp, Salmonella enterica
atgaaaaaaacatatctcgttgttatcgtactgtttttcatttctacaaaagtttatacactacttcataacaacatcttcttttgtcgaaacagcccggagtgtgatttgtctcatgttctccccgactaccgggagcagatttcaggcacaccgctaaaatataccttgattaatacagctccattagcacaggtggtagtcagacactatgaattattatcgcaacactggtcgccagatgacatggtaacccctgcgcaatggcgacataacgttgatatttatatccctgaaacggcaaaagagcaccatgctttggtggttgtaaacaacggaattaattatgataaaggcgtacaaatcactggtaaacccggtgatttcccccaggaaacactggcaagcatctcccgtgatacgaataccatcgtaatatcagtgagtgatatacctaaccaatatttaacctttcaggatgataaaaaaccactgaaagaggacgagagcgtttcccgaagctgggcattatttatggaagcgccggagaaacgtgagttaatgcctttaaatattcctatggtcactgccctatcgcaagcgatgagattagcaaaaaaggagttaacgcaatggaatataaattcctttatcattacaggtatttcaaagcgtgggtggaccacctggttgtcagctatcgccgatcctgatgttgaagcaattgttcccttcgccattgatctacttgatattgatgcttcacttgagcatatttatcaatcatacggtggaaattggcccattacattctacccctactaccagcaaggcatagatgagaaaataaaatcccccacatttacccaactaaggcaaataatagatccgttaagatatctcaatactatttatcaaccccgacttgcaataccgaaatatattattaatgcaagtggcgatgattttttcgtaccagacaacactcgcttttattatagcaaacttcctggcgtaaaatcattacgtatagtgcctaatatgaaccactactcaattaaccagttcgctgaagaaagcctcgttccttttattaataggtttcaaagtaaaaaaacattaccacagttgatcggccttattcaccaccatcttcttacggtctatttctcagaagcgccggtaaaagtcgttcgctggacagctaacaatccaaatgcgcgtgattttcgttatgcctgtggcatccgctataagccgcttacaatagatattcccgccaacaataagatcagtattacgttaaatgaaccgaagacaggttgggaagctacctatatcgaagccacttttaatgatggctatgtcgccacgagtcaggtttatattacgcccgatgaaaaatacccacagacagcaccaccttccgttaacgccgcatgtcaaacgttaccggggcgtggattaggggaaaacgatagccccgattga

SEQ ID NO: 370171 - DNA, 1242 bp, Salmonella enterica
atgaatactaatgtctatgagaacaccgacagcgaaactatcaccccgctcaacaagcggcgtattttgcctgttttcctgcttgtcggcctttacgccgccagtacagcggctgtaatgtcggtactgcctttttatatccgcgagatgggcggttcgccgcttatcattggaatcatcatcgccactgaagcttttagccaattttgtgcggcgcccctgattggccacctttccgatcgcgttggccgcaagcgaatactgattgtcacgctggctattgcggcgataagtttactattactcgccaacgcgcaatgtatcctgtttatcctgctcgcccgcacgctttttggcattagcgccgggaatttgtcagccgccgcagcctatattgccgattgtacgcacgtcagaaatcggcgtcaggcaatcggtatcctcacaggctgcattggtttaggcggtattgtcggggcaggcgtttccgggtggttatcgcgtatcagtctgagcgcgccgatctacgccgcctttatacttgtccttgggtctgccctggtcgcgatttgggggttaaaagacccttccacaacatcacgtaccacagataaaatagcggcgttctctgcccgcgctattttaaagatgcctgtccttcgcgtcttaatcatcgtaatgctttgtcatttcttcgcctatggcatgtactcttcacaattacctgtttttctttctgacaccttcatctggaatgggcttccctttgggccaaaagcgttaagctatctgttaatggcggacggggttattaatattttcgttcagctatttctgttaggttgggtgagccaatatttttcggagcgaaagctaattatcctcatcttcgcccttctttgtactggatttctcactgcgggtatcgccacgaccatacctgtgcttgtttttgctatcgtttgtattagcatcgctgatgcgctagccaaacccacttatcttgccgccttgtccgtccatgtatcgcctgcccgacaaggtatcgtcatcggaacggcgcaggcattaatcgcaatcgctgattttatatcccccgtattgggcggatttgtcctgggttatgctctgtatggcgtctggatcggtatagctatctctgtcgccattattggtctggtgacggcaatgatttacctttcaaaaagttcagtgctaatagtgaaaccagaaacagaataa

SEQ ID NO: 370172 - DNA, 1509 bp, Salmonella enterica
atgacaagatacaccactacagatgtactgatctgcggcgctggcgttaccgggcttactttagccatcgaactggcgcgtcacggggtctcatttcgcctgattgagaaaagaacgacgccttttatcggctcccgcggtaaaggtattcagccgcgaacgcaagaaatcttcgaggatcttggaatactcaataaagtggtcgccgccggcgggctctatccccgactacgaacctaccgtcacgacggaagctatgtagattcagatattgcgcatcatacaaaaccgacccacgccgaaccctaccatctgccattgatggttccacagaacgtgacagaaacgattatgcgagagcaattaaaagcatggggacatcgggtggagttcggctgcgagttacgacattttgcgcaaaccccacgcacagtcaccgcgtatgttgccgggccggctggagaagaggtcatcatcgcgcattatttgataggtgcggatggcggcggaagctttgtcagaaaaaaattaggcgtcagcttccccggtcgtacgttgggaatccatgcgcttgtggctgacgcttcactttccggtctaaaccgggatgtatggcaccattttaacgatggcgatatgacgcggatgataacgatttgccctctcgccggcacgcagctctttcaaatccaggcgttgttggccccggacgactcgcagaatttctcagccgacgtgctcacggcttttcttactgaacgaatcgggcggacggatgttcgcatccattcgattccctgggtatcgaagtaccagatgaatgcgcgcatagcggaacattaccgtgtgggtaaggtatttttagccggtgatgccgctcatgtgcatccgccgacgggtgggcaaggattaaataccagcatccaggatgcctataacctggggtggaaaatggcagcctcgctgcggggcgcaggagaagagcttctcgatagctatgaacaggaacgccgcccggtagccgaatcactgctccacctttcgacccgattacttgactctcaaaaacagggtggcatcaaacgagaacgcgacgttcaacaacttgacatccagtataccgactcccccttagcccacacgttgcccgaacgtcagcatgggttacaagcgggagaaagagctccggatgctcctcttttgggcgccggcggccaatcattacgattatttcagttactacaaggtccggactggaatctgttggcctacgaaacccacggtaaggtcatcgatgcgcggcgaggactgcgtattcatcacattggcgagcaggacgagctcatcgataccctggggcacttccgggaatcctatcatctggcgccgggtcaatgcgtggtgattcgacccgatggctatgtcggcgcattctttcacggcaaacagagcaacgatattgaaaattatctctctcgttttgccatagggattaaagatgaatactaa

SEQ ID NO: 370173 - DNA, 489 bp, Salmonella enterica
atgtcagaaaataaaaatgtgcaagatacacatatttccgagcaaatgaaggcgcttcacggtgcgttgattcgcgtggtgagcgcgcttaaccggcctcgtaatgatgagaaattaattgcagaggcggggatacaactcgatcgtgcgctattttcgatccttattagtatcgaacgtttagggccgattggcgttgttgagttagccgaacgtgccggtcgtgattatacgacggtaagccgacaggtcgccaaactggagaagttgggattgataatacggcaacataatgccatcgatcgtcgtatacgcgaggccgttatctcccgtacaggaaaggcgatgacggagcgtatagacgccgctcgagagcaaatgggcaaagttgtttttaaagactggcctcaggatgaacttgatgtctttgttcggctaatgcaaaagtttgccgatgcaatggatagcgatgcttcaatgccggaataa

SEQ ID NO: 370174 - DNA, 1074 bp, Salmonella enterica
atgcttaccgaaaaatatgattttcgcattaccgatcagatgactatcccactcagacctcattggatagccaatgattcatacagggaaaagtgtaaaatgcttgtcctcaaccggagtaaaggggaaattcataaggtagactttagtaaattaacagattatatcaaagaaggtgatgtaatctgttttaacgacagtactataataaaccatatgtttatctgtaaaacaagacagaataggctaattaaaattgttttagagggatttttaccaaataatagagtaattatttccggacttttaaaggaaaggcttaacgcgaatgatgttttctatttggttgataaccctgaaatttccattaagatagagcaaaggtttagcgaggagagccagtaccgggccgtcgtggaaaatcatgaggccttaatttgctatttagccagtcatggtgagcgtcttgatgagtatgtggactccagcttgttttataaatatccagatgcttaccgttccgttttttctaaaaagtatggttctttggaaataccttctgccggcattcattttacctgggatcttatccaaaaaatcaaagataaaggtgggttaatatccttcatcactttacatgttgcatcaacagaaatgttgtccaacagaaaaatacaaacaaaatgtgtagaggaagtgactatcaacgaagaatactacgaggttccgcaagcaacagcggatatcattaatactgcgaagcaaaatggcggacgtatttttgccgtaggaactaccgttacacgatgcctggagtccgcgtattcgagggagcacaattgcctcaaagcaagttctggctggactgcgctttatatacatccaggctatcaactgaaagtggttgactgcctgctaacgaacttacatcagccaaaaacgacgcatatggtgttaactggtcagtttgctggggttgatctactcatgaaggcctatgcctcagaagatatccagtcatgtcagttcgatatgtttggtgattgcatgttaatcatacaggatgaagggtag

SEQ ID NO: 370175 - DNA, 333 bp, Salmonella enterica
atggtaagtgatactcttgaacagcggatttatgaactggtaagaagccatgatggaatttacctctttaagaaaaaagaactgacaccgtcaacagatttggattcagatctacggctggaagatgatgaagcactggcattgatggatgatttttttacgacatttaatgtagatagagggagtttctcgatcacaacatactatccgccagaaccaccgctaaagcatttgcttaatccgtttcgcaaaaacgatattcctcaggtggcggatttcactataggtatgctcattgcgtctgccagggctggtcgctggttgtatgactga

SEQ ID NO: 370176 - DNA, 282 bp, Salmonella enterica
atggccgcgtatgacatcgaaaaggacatcgggccgcgggttcagattatccaggagatacacgaattaattctggcgggtgaaatggaagtcgccaaaaggatgctgcgcacgctgattaaagtcacgttcgcttatcctgcgatttttgacgaggttcggcaggaatgccaaatcaacaatgcgcatgttgtcgccggatgtggatccgggtatcaaagcgtttatagccgttgtcagagctgcagaacatcagtcagaaaaagcagcggaccagggtaa

SEQ ID NO: 370177 - DNA, 981 bp, Salmonella enterica
atggccggtgtatcaaccgcgactgtatcacgcgtcattaaccagaccgcgtgggttgaacccgtcacgcgcgaacgtgtagagaaagccatgcgcgatctcaattatcgccggaatgccgccgctatcgcgctggcgaaacgtagcggcgatatgctcggattgttaaccggcaatctggccgatcctttttttgcccgccttgctcgcggcgtagaagatgtttctcgtaagcagcagtatcgcttgatggtatgtagcggcggccacgacgaagaaatggaaaaagcgggactggattttctggttaatcaaggctgtgaggctattgttgtacacgccagccgattaccggataaagagctgctgcgctacgcagcccactttccagcgctggttgttgttaatcgttatatcgccggtatggccaaccggtgtatctggctggaaaatcgcagcgccgccagggaagcgacccgatatctcctggcgaacgggcatcggcgcatcgcctgtgtgacatctgacttgccaattatcgatcgtcaggaacgccttgatggttaccgtcaggcgctggaagaatatggtatttctccagaccctcgctgggtgattagcgttccgtttaacgaagaaggcggcgagcgggccgcgcatcaacttattaatagcgggcttccccttacggcagcggtcacgtttaacgatgtgatggccgctggcattatgcgtattcttcatcaacgcggcgttcagcttccgcaacagctctctattgtcggctttgatgatgtggtgctggcccggtatctttatccggcgttaacaacaatgcattatccggtcgaacaaatggcgcgttgtgccgcgcaactggcgatacagttataccagggcattacgccgccgcccagcagcaatcatttcaatgccgaactggtgatccgcgattctgtcgcgccctatttttcacgatga

SEQ ID NO: 370178 - DNA, 1452 bp, Salmonella enterica
atgagtgcatcacaaaacaagaagaaaacgctgtcattgggtttagcgctaatcccagtcatctccatgttgttattgttgattatcggttacggcatcatggggctacgtatcgaaccgctccttctgtgctctgcggcggtagcggcaggcattgcatggtggcaaggatactgttgggaagacatcatcaactcagtggtggataagctggctaaagcaatgccggttatcatgatcctgatctgcgtgggcggtttgattggcacctggatgtttagtggcaccattccctacatggtgtactgggggctaaaactcataagcccggaatatattttgattgcagccttctttttaaccagcgtggtctccgtctgtaccggtacatcatggggatccgccgggacggttggcgttgcgttaatgggggttgccgccgggctggacgtgtctcttgcagcagcagctggcgccgttgtttctggcgcttatttcggcgacaaaatctcaccgttgtccgactcgactaactttgccgcgattgtcgcagacactactctgtttgagcatattcagcatttactttggacgaccctgccaagtttcctgcttgccgccgtggtttatcttatcgccggacacagtaatatgctgggcgaggtggctacgccgcagcgcgttacggacatcatccactcgctggagtcgctataccattttaatattattcttattttgccgccggtgatcgtactgtggggcgcaattcgcaaaaagcctgtcatcccattaatgttaagcgcctgcgtacttgccttgttcctcggcgtcatcatgcagggactgagcatcaaacagggactggacgctttcattgatggatttgatatcgccatgttcccacaaggcgcagaaggtgtcgtggccgatgttccgcgactgctaaaccggggcggaatgttctcgatgatgggaacgatactgttagttttctgcgctttttcatttgccggagcgctaacgttaaccggcgcgttaacgatcatcattaaccgactgctgaccattattcatagcgttggtcaactcattgccgccactatcggcaccacaattttggtcacaggagcgaccagcgacggtaaactggcattgttagttcccgccgaactgtttaaagatgcctatcgtcgtatggggctggatactaaaaacctttcacggacgatagaagatgccggtaccgttatcgaacctctcctgccgtggacctcggctggcgtctacatggcaaccacgctgggcgttagcacgcttgatcttctgccctgggctatccagtgctatgcggcgatcttcttcgcattaatttatggttttagcggagttggtattgccagaactgcctccgcttcagaaaagtcgccgcaaacgtcagtgacgaaataa

SEQ ID NO: 370179 - DNA, 1203 bp, Salmonella enterica
atggattttaaccagattatcaatcgcaacaatactggttcggtaaagtgggattttattgagcgtcactttggcgacggcgctgggaaactgctgccgatgtgggtttctgatttcgattttgcctgcccgcctgaggttcaggcggcattgcatcagcgaatcgagcacggcgtatttggctatagcgaacgtgatgaggcctattttaacgccctgcttcactggttttcgtcacgccaccagcttacgttaaaacaggaatgggtatgcagcgtggaaggcgtcgtaccagggttggcgctcttagtgcaaatgttgacgcatccaggcgacggcgtagtggtacagggaccatactatggctccttcgccaaaataatcacgcttaatggtagaaaactgctggagaatccccttagcgagtcgccggacgacggctaccagatggatttttgccaactggaaaggctgtttcgccatgagcgccctccgctgatgattttgtgtaatccacataatccaaccgggcgttgctggtcggccaacgagctggagcaactgcttttattatgtgaagcttatgatgtcactctcatctcggatgaaatatgggccgatctattgctgcccggcgaaacctttacctcggtactgcatttaggggagcgctggcataaacgggtcatctccgccactgcggccagcaaaacgtttggcttatcgtcgttgcgaatttctaattttctcattcccgatcctacgcttcgccagcgattcctgtctcgtctggacgctcatgggctggacgtctttaacgccctctccgttcaggcggcgactaccgcatggaatgaaagcagacagtggctggattcgctactggattacctggcggaaaaccgccgctggtttgttgaacaggcgacagagcaccttccctgggcaagaattgtcccggcgcagggaacctatttattatggatggattgtaaaaaactgggactggatgacgaacagctaaaatgggtaatggcggatgtcgcgggtattgctccttcaatgggcagcggctttggcccggcgggcagcggatttatccgtttaaatctgggatgtccacgtacctaccttgaaatggcaatagacggcctgaagcgaatatcggtgaagacaatcaaaggaataccaacaggcggatga

SEQ ID NO: 370180 - DNA, 2076 bp, Salmonella enterica
atgacaacaaacagggcttttgaaatcagatcaggatacagccatacgcttggcgcaaattatgacggcgaaggcgtgaatttcgctattttttccgcccatgcggaacgcgtcgagctttgtctttacgatccgagcggggagcatgaaatcgctcgtctggagttaccggaatataccgacgaaatatggcacggctatgtcccgaagttgcagcccggcgcgctgtatgggtaccgcgtttacggtccttatgacccggaaaatggtcatcgttttaaccccaacaagctgcttattgacccttatgcccgtgagctggtgggcgatattcagtggaacgatgcgcatttcgcgtatcaattacttcatgacgataaagatttgacctttgatgaccaggatagcgcgccatttacgcctaaatgccgggtgattgatccggctgaggcgaattgggaggatagacaacggccttccataccgtggtcgaacgccattatttatgaaacgcatgtaaaaggctttacccagcttaattccgcgatccctgagcctctacgcggtacgtttgagggcatgggacataaagccagcgtggattacattaaaagtctgggtattacctccgtcgagcttttacccgttcactggttcccggacgatcagcatctgctcgataaaggactgaaaaatttctggggatacaactcgctgggcttttttgcgccggcgacgcgctactatggtccaaaaggtattcagggattccgcgatatggtgcgcgctttccatgatgccggcgtcgaagtgatactggacgtggtctataaccatacggcagaagggaatgagcttggccccacgctgtcatttaaaggtatcgataacttctcttactatcgcaccatgcccgatcagcatcgctattacattaacgatacagggacaggtaataccgtcaatacctctcatccacgggtactgcaaatggtgatggattcccttcgctattgggcggagtcaatgcatgtcgacggctttcgttttgatttgggcaccattcttggtcgtgagccggaaggctttgatcagagaggcggtttttttgatgcggtaacgcaagacccggtgctggcaaaactgaaactgattggcgaaccctgggatatcggaccgggcggctatcaggttggcggctttccaccagggtggggcgaatggaatgataaataccgcgatacggtacgcgaatattggaaaggtgacaacgtcacaaatgatttcgccgcacgcctgctgggttccggcgatctctatgatttgcgcggccgtcgcccctggtcaagcgttaactttattactgcccatgacggcttcacgctgaacgatctggtgtcttataacgacaaacataatgaagccaatggcgaagataataatgacgggcataatgataaccgctcctgtaactatggcgcagaagggccaaccgacgacgagggcatcaatgcgatacgcgagcgacagaaacgtaatttcctgaccaccttgcttttctcgcacggcacgccgatgttattagcgggcgatgagtttggccgcagtcagatgggcaataataatggctactgtcaggacagtgaaatatcgtgggtccactgggataatttgccggaaaccgccaatgcgctacgggagtttacccgtcatctgattcaactgcgcgccacgcaaccgctgctgcgccgggaaagctggcgtgacggtctggagatccgctggtttaacgccggcggaggggcgcagcaatccgaacaatgggatgagggatcgaccataggcgtatgcattagtcgtcccgatcttcagccggaagcggggatctggcatgacgccttactgcttttcaatccgtttgaaggcagcgtaccgttccgtattccgatgtggggagaaggcggctgggtacttgaactgacgactgccgataacgcgcagcagggaatacggattaccgaagaaatggatttcgatctggccgggcgcagtatcgtgttattcagacgcccctga

SEQ ID NO: 370181 - DNA, 2529 bp, Salmonella enterica
atgatcccaactgcaacgtatcgtcttcagtttcgtaatggcatgaccttcgatcgcgctgcggcgctggtgccttaccttaaaaatctgggtatcagccatctttatgcctcacccatctttaccgccaccaaagcgtcaacgcatggttatgatgtcaccgatgcgaatgagattgagccttctattggcgggcgcgaaggatttgaaagactggtggccgaacttaaagcgcaaggtctgggattgatcatcgatattgtgcctaatcacatggccagctcgctggaaaacgcctggtggcgcgacgtgcttgaatatggcaaggagagccgttacgcgcgccatttcgatattgactggtcgcgccgactgacgctgccttttttaggcgacacgtttgacgccgtgctggaaaacggagaaattgcgatcaagcccgatcccgctacgggtaaacccgcgttcgcctattatgataactattatccgcttgcgccggcgacgtggcaggggcgcgaggccgaaatactggcgcttaccgataaagccgctattgctgatttgcatgagcgccagccgtggaaattaatgtcctggcgcgatgccgctcgctcgctttcatatcggcgtttctttgaggtcacagggctggtaggaatgcgggtggaagataaaaccgtcttcgacgatacacatcggctgattctggagctggtcagaacgggggcggttgacggtttacgtatcgatcatatcgacggacttgccgatccgaaagcctatcttgcgcgtttacgtcaggaagtggggccggcgtgctatatcaccgtggaaaaaattctcgctaaaggcgagcaacttcctgatgactggccggtttccggcaccacaggctatgaatttatcgcctcgctggcggaggtgctggttgacgatgagcagatagacaatctgcgccaggcttacgagaccgttaaaggcgcgccagtggatatgcgggcggaattacgggcggctaaattgctgatggtcgatcgcaatttcgagggggaatttacccggctgctcgcgcttgcgctgtcgattgccagcgagctacagatcgcacaggaagagagcatcgttcggcaggcgttacgcgagttattaattgcctttcccgtatatcgcacttacggcacggcagaagggctaccgccgaccgatatttgcctgttacaccgtattgtggaacgggtaaagacgcttgaaaatcctccgcagccagaagcgcttacatttctgagccgtcttcttactggcgatgttcccgcctccagccaggaggaggcgacacagtttcgcgttcggttccagcaactcaccggtccgctgatggcgaaatcggtagaggatacgcttttctttcgtcaaaacatgggactggcgttaaatgaagtcggcgccgagcccgtcacgcatcacttctccatcgaacgctttcaccatgagatgaaaacccgacaggcgcgacagcctgatgcgttatccggtacgtcgacccacgataccaagcgaggcgaggatgcgcgagcacgcctgtatacgcttaccgaagcgccggaacagtggagcgaatgccttgcccgctggcggcagatgaaccagacccatgtcaaatttttgaatgatggcactgcgccaaaatcggcggatacgtggatgttatatcaggcgctgaccggcgtctggcccccgatgctacaaccacaggacgaaacaggtttaaacgcgctgaaaatacgctttgaagcctttgtggagaaagcgctacgcgaagcgaagctacgtaccgattgggtggacagtaatgaggcttacgaaacggcaatgcttgattacgcccgttatttactggcgccggataatcagacatttttgcaggatttttatcgttccttgcaacccttcatccgcgcagggctggttaacagcctgacgcagaccgttatcaagttaaccgcgccgggagtacctgatatctatcagggaagcgaggcgttgaattttagtcttgtcgatcccgacaaccgccgcgaaccggatttcgccacgctggcgcagcagttagaccaactaacgccgggagttttctcgcgcgaagagagttggctgaacgggcaggtgaatcagtatgtcaccgccgccttactgcgtttgcgtcagcagaatcatgagctcttccgttttggcgactatataccgctgcgggctgttggtcagcgtgccgacaaggtcatcgcttacgccagagtcaatcatgatgatgcgctgattgttgttgcgccccgactggtgttcgccgaatgtgacggcttattgtcacaatcgcatagcggtttctggtcaggaaccgacattattatacccggacagcttaatcagcatcgttatcgcaatgtgcttacccaggagaggttaatgcctggtgaacgcctgtcgttggcctcacaccagggcggcgtactggttttaatgagcgactga

SEQ ID NO: 370182 - DNA, 1785 bp, Salmonella enterica
atgagttcaaaaattttttgcaaaagctggggggctgaatatatcgccgctgatgttgtccgctttcgtctttgggccaccggtcagcaaaaggttatgctcaggcttgcgggtaaagaccaggaaatgcaggcgagcggtgacggctggtttacgctggacgtctccggggtgacgccaggtacggagtataactttgtactcaacgatggcatggtggtccccgatccggcttcccgcgcccaaaaaactgacgtcaacggtccgtcatatgtggttgatccaggcagctacacgtggcgcaacaccgggtggaaaggtagccgttgggagcaggccgtggtgtatgagatgcatacaggcacgttcactccggaaggcaccttccgcgccgcaatagcgaagctgccttatctcgctgaactcggcgttaccgttattgaagtgatgcccgttgcgcaatttggcggcgagcgtggctggggctatgacggcgtactgctttacgcgccgcattctgcctatgggacgccggatgatttcaaggcgtttattgacgccgcgcatgggtatggtctttccgtcgtcctggatattgtgctgaaccatttcggcccggagggaaattatttaccgctattggcgccggcgtttttccacaaagagcgcatgacgccgtggggaaatggtatcgcctatgatgtcgacgccgtgcggcgctatatcatcgaggcgccgttatactggctgacagaataccatctcgacggcttacgctttgacgctatcgatcagattgaggacagtagcgccaggcatgtgctggttgaaatcgcacaacgtattcgggaagacattaccgacagacccattcatctgactaccgaagatagccgcaatattatttctctgcatccccgtgatcaggatggcaatgcgccgctgtttaccgccgaatggaatgacgattttcataatgccgtccacgtttttgcgaccggagagacccaggcctactacaacgattttgctgataccccggaaaaacacctcgcgagagcgctggccgaaggattcgcttatcagggagaaatttccccccaaaccggcgaacctcgcggcgtaaaaagtaccggacaacctccggtcgcctttgtggattttattcagaaccacgatcaggtcggtaaccgcgcccagggcgacagactgataaccctggcgggcgctgaacgaacaaaagtattgctcgccacgttgctgctttcaccgcatattccgctgctttttatgggcgaagagtatggcgaaagccgtccttttcttttttttaccgatttccatggggatttagcccgcgccgttcgtgaaggtcgcgcaaaagagtttgccgatcatgcaggggaaaatgttccggacccgaatgcgccagagacctttcaacgctcaaaacttaactggaagcaacagcacagtgaagagggtaaagcgtggctggcatttacccgcgaactactgcttttgcgccagaagcatatcgtgccgctgttgtccgctgcccgtgagagctcaggaacggtattgcaaaccgcgcccgggtttattgccgttagctggcgttttccgggaggaacgctgtcactggcgctgaatattagcgccacgacggtattgctgcccgatttaccgggtaagaccctcttcgcctggccgaatgaatccaccgggtcgctttcccaacattctcttattgtccgcttagcccagggagagtctgcatcatga

SEQ ID NO: 370183 - DNA, 786 bp, Salmonella enterica
atgaaaattttaccgctggcactctttatcattccttttctggccggatgcggcgccaataatacgccgccgcaaacgcctattcccggggaaaaaacctctgccaaattacgtaccctggaaacaggcgcggcggctattcaatccagaccacctgtcgatgccatcagtacctaccttgacgggttccatttttatagcggtgataaaaacggacagatggaagcgcaccattacgttaccgtcctgaacgaagatgtcatgcaggcggtgatttacgacggcaatacgaaaaacgcgcgcctgatgggggtggagtacattatcagcgaacgtttatttaaaacgcttcctcccgaggagaaaaaactgtggcacagccaccagtacgaggtgaaatccggtagcctggtggcgcctggcttaccgcaggtcgctgataaagcgttgatgagtaagattgttaatacttatggcaagacctggcacacctggcataccgaccgggataaaaccctgccaatgggtatccctgcgctgatgatgggctttactggcgacgggcagcttgaccccgcgctgctggccgatcgggatcgccgtctgggaattgatacccaggccattaaacgcgagcggcaggatctgcctgaacatcccgttgttaagggggctaacgcctgggagcagggggaggttatccagctacagcgtgttcagggctctggcgaacacgggcgaggcgataccgcgcacttcggtacatctgagcaatcccgacaataa

SEQ ID NO: 370184 - DNA, 330 bp, Salmonella enterica
atgaataaattctcccttgctacagcaggtattatcgtggcagcgctggtaaccagtgttagcgtgaatgcggcaacagatactactaaaacaaacgttacgcctaaaggtatgagctgccaggagtttgttgacctcaatccgcagacgatggcgccagtcgctttctgggtgctgaatgaagatgaagattttaaaggcggggactacgtagatttccaggaaactgagacgacagcagtgccgctagccgttgagctttgtaagaaaaacccgcagagtgaattaagcaaaataaaagacgaaatcaagaaagaactctcaaaataa

SEQ ID NO: 370185 - DNA, 432 bp, Salmonella enterica
atgacaatccataagaaaggtcaggcacactgggaaggcgacatcaaacggggtaaaggtactgtatcaacagaaagcggcgtgcttaatcaacaaccgtatggattcaatacccggttcgaaggcgcgcagggaaccaacccggaagagttaattggcgccgcacatgcggcctgtttctccatggcgctatcactcatgctgggagaggctggatttacgccgacatccattgacaccaccgctgacgtatcgcttgataaggtggaggcgggcttcgccattaccaaaattgcgctacaaagcaaagtcgcggtagcagatattgatgcttcaactttcgatcaaatcatccagaaagcaaaagccgggtgcccggtatcgcaggttctgaatgcggaaatcaccctcgactaccagcttaacgcctga

SEQ ID NO: 370186 - DNA, 216 bp, Salmonella enterica
atgtttacttatcactcagcaaatacctcagcagcacaaccggccttggtcaacgcgattgaacaaggattacgcgcggagttaggcgttgtcactgaagatgatattttaatggagctgaccaaatgggttgaggcttccgacaatgacatcctcagtgacatctaccagcagaccatcaactatgtggtaagcgggcagcacccgactctgtaa

SEQ ID NO: 370187 - DNA, 144 bp, Salmonella enterica
atgaaatcgaaccgtcaggctcgtcatatacttggactggattacagaatttccaaccagcgtaaggttgttactgaaggcgacaccagcagcgtggtgaataacccaaccggcagaaagcgccgcgccgacagccaaaagtaa

SEQ ID NO: 370188 - DNA, 1698 bp, Salmonella enterica
atggaaactataaccaagaaagcacgttccctttatatcccttacgctggccctgtattgctggaattccccctgttaaacaaaggtagcgcttttagcgtagaagagcgccgcaacttcaatttgtcagggctgctgccagaggtcgtcgagtcgattgaagaacaggccgaacgcgcctggctccagtatcaggggtttaaaacagaaatcgataagcatatttacctgcgtaacatccaggataccaacgaaacgctcttttatcgactggtgcaaaaccatcttgaagagatgatgccggttatctataccccgaccgtgggcgcggcctgtgagcgcttctctgagatttatcgccgggcgcgcggcgtatttatctcttatccgaaccgtcacaatatggacgacattttgcagaatgtgcctaaccacaacattaaagttattgtggtgacggatggcgagcggattctggggcttggcgatcagggcatcggcgggatggggatccctatcggtaagctgtcattatacaccgcctgcggcggcattagtccggcctatacccttcccgttgtgctggatgtcggcaccaacaatcaacagttactcaacgatccgctttacatgggctggcgtcatccgcgcattaccgacgatgagtattatgcgtttgtcgatgagtttattcaggccgttaagcagcgctggccagatatcctgctacagtttgaagatttcgcgcagaaaaacgcaatgccgctgttgacgcgctatcgtgatgagatttgctcctttaacgatgatattcagggcaccgcagccgtgaccgtcggtacgttgatcgccgccagccgcgctgccggcagtcagcttagcgagcagaaaatcgttttcctcggcgcgggttccgccggatgtgggattgctgaacaaatcatcgcgcagactcagcgtgaaggtttaagcgaagatgccgctcgacagaacgtttttatggtcgatcgcttcggcctgttgacggaccggatgcctaatttattgccgttccaggcaaaactggtgcagaaatgcgacaatctccagcactgggataccgaaaatgacgtgctgtcgctgctggatgtggtgcgtaacgtgaagccggatatcctgatcggggtttccggccagaccgggctctttactgaagagatcatccgcgagatgcataagcattgccctcgcccgatcgtcatgccgctctctaatcccacctctcgcgtggaggccacgccacaggacattatcgcctggacggaaggcaacgcgctggtggcaaccggcagtccattctcgccggtcatctggaaagataagatttatccgatcgcacaatgtaataacgcctatattttccccggcatcggtctgggggttatcgcttccggcgcatcgcgcattactgatgaaatgctgatgtcagccagtgagacgctggcgaaacattctccgctggtcaataacggcgaaggattagtgttaccagcgcttaaagacatccaggtcgtgtcgcgcgctatcgcttttgccgtaggtaaaatggcgcagcaacaaggcgtagcggtgaaaacctctgcggaagcgctgcaacaggcgattgacgataacttctggaaaccggaataccgcgactaccgtcggacttccatttaa

SEQ ID NO: 370189 - DNA, 1011 bp, Salmonella enterica
atgaaagctgctgttgtcacacaagatcatcaggttgatgttactgagaaaacgctgcgtccccttcgccacggtgaagctttgctaaaaatggagtgctgcggcgtatgccataccgatctacacgtgaaaaacggcgatttcggtgacaaaaccggcgtcattctgggacacgaaggcattggcgtcgtggcggaagtcggtcctggtgtcacctcgctgaaacccggcgatcgcgcgagtgtcgcgtggttttatgaaggatgcggacactgtgagtattgcaatacgggcaatgaaaccttatgccgcaacgtgaaaaatgccggttacacggtagatggcggcatggccgaagagtgtattgtcgtcgcggattatgcggtgaaagtaccggaaggtctggactctgcggcggcaagtagtattacctgcgcgggcgttaccacgtataaagcggtgaagatttctcatattaaacctggccagtggattgccatctacggtctgggcggtctgggtaatctggccttgcagtacgcgaaaaacgttttcaatgcgaaagtgatcgccattgatgtcaatgatggacaactgaaactggccgaggaaatgggcgcagatctgaccattaattcacgtacggaagatgcggctaaaattgtgcaggaaaaaaccggtggcgcgcacgcagcggtggttaccgcggtcgctaaggcggcgtttaattccgcagtagatgccgttcgcgccggaggtcgcgtggtggcagtcgggctgccgccagaagccatgaaccttgatatccctcgcctggtgctggatggcattcaggttgtcggttcgttggtggggacacgccaggatctgaccgaagccttccagttcgcggcggaaggaaaagtcgtgccaaaagtcgctttacgtccgcttgaagatatcaacgttatttttaaagagatggaacaagggcaaattcgtggccgtatggtcatcgatttccgtcgttaa

SEQ ID NO: 370190 - DNA, 657 bp, Salmonella enterica
atgagtaagtcgaaaatgattgtgcgcacgaaatttgtcgaccgcgcctgtcactggacggtggtgatctgcttcttcctggtagcgctgtcgggaatttcgtttttcttcccgacgctacaatggttgacgcaaactttcggcacgccgcagatgggacgtattttgcacccgttcttcggtattgccatcttcatcgcgctgatgtttatgttcgtgcgtttcgtccaccacaacatcccggataaaaaagatattccgtggctgaaaaatattgtcgaagtattgaaaggcaatgagcataaggtggcggatgtcggcaaatacaatgccggacagaagatgatgttctggtccattatgagcatgatttttgtgctgctggtgactggcgtgattatctggcgtccgtatttcgcgcagtatttccccatgcaggtggtgcgttatagcctgttaattcatgcggcggcgggcattattttaatgcacgcgatcctcatccatatgtatatggcattttgggtgaaaggctcgattaaaggcatgatcgaagggaaggtcagccgtcgctgggcgaagaaacatcatccacgctggtatcgtgaaatcgagaaggcggaagcaaaaaaagagagcgaagaaggtattcagtaa

SEQ ID NO: 370191 - DNA, 885 bp, Salmonella enterica
atgtctatggaaacgcaggacattattaaacggtccgcaacaaacgccatcacgccgcctccgcaggcgcgtgattacaaagccgaagtcgcgaaactgatcgacgtctcctcctgtgtcggctgtaaagcctgccaggtagcctgttctgaatggaacgatattcgcgataacgttggtcattgtgtcggggtgtacgataaccctgccgatctcagcgccaagtcctggacggtgatgcgctttaccgaaaccgagcagaacggcaagctggagtggctgattcgtaaagatggttgtatgcactgtgaagatccaggctgtcttaaagcctgtccatctgccggggctatcatccagtacgcgaacgggattgttgactttcaatctgaacactgtatcggctgtggttactgtatcgccgggtgtccgtttaatattccgcgcctcaacaaagaggacaaccgcgtttataaatgtacgctctgcgtcgatcgcgtcagcgtgggccaggaaccggcctgcgtcaaaacttgtccgaccggggctattcacttcggcaccaaaaaagagatgctggaactgggcgagcaacgcgtggagaagttaaaagcgcgtggctttgaacatgccggtatctacaacccgcagggcgtcggcggcacgcacgtcatgtatgtgctgcaccatgccaatcagccggagttgtaccacggcttgccgaaagatccgcagatcgatacctcaatcaatctgtggaaaggggcgctaaaaccgctggccgcagcgggctttatcgccactttcgccggtctgatttaccactacatcggtattggcccgaataaagaaacggacgacgatgaggaggatcatcatgagtaa

SEQ ID NO: 370192 - DNA, 2412 bp, Salmonella enterica
atgaccaaccactgggtggatattaaaaacgccaacgtcgtgatggtgatgggcggcaatgccgcagaagcgcatccggtgggtttccgctgggcgatggaagcgaaaaataataacgatgcgacgctgattgtcgttgatccacgctttacgcgtacggcgtcggtggcggatatctatgcgccaatacgttccggtacagacattacctttctgtccggcgttttgctgtacctgatcgaaaataacaaaatcaacgctgaatacgttaagcattacaccaacgccagcctgctggtgcgggatgattttgcctttgatgacggtcttttcagcggctatgacgcccaaaagcgtcagtacgataaatcctcctggaactaccagttcgatgaaaacggctatgccaaacgtgatgaaacgttgacgcacccacgctgtgtgtggaatctgctgaagcagcacgtttcgcgctacacgccggacgtcgtggaaaacatctgcggtacgccgaaagcggatttcctgaaggtgtgtgaggtgttggcctctaccagcgcgccggatcgcactaccaccttcctgtatgcgctgggctggacgcaacataccgtcggggcgcagaacatccgtactatggcgatgatccagttgctgctcggcaatatggggatggctggcggcggtgtgaacgccttgcgcggccactctaatattcagggtttaacggatttaggactgctctccaccagcctgccgggttacctgacgctaccgtcagaaaaacaggccgatctgcaaacttatctggcagcgaatacccccaaagcgacgctggccgatcaggtcaactactggggtaattatcctaagttcttcgtcagcctgatgaaatctttctatggcgatgcggcgcagaaagagaatgactggggctttgcctggctgcctaagtgggatcagtcctatgacgtgatcaaatatttcaacatgatggatagcgggaaagtcaccggctatttctgtcagggctttaacccggtggcgtccttcccggacaaaaacaaagtggtgcaaagcttaagcaaactgaagtatctggtcgttatcgatccgctggtgactgaaacgtcaacgttctggcagaaccacggcgaatctaatgatgtcgatccgacaacgattcagaccgaagtcttccgtctgccgtctacctgttttgcggaagaggatggatctatcgctaactccggtcgctggttacagtggcactggaaaggtcaggacgcgccgggcgaagcgcgtaacgacggcgagattctggccggtatttaccatcgtctgcgtgaaatgtatcgcgcagaaggcggtaaaggcgccgaaccactattgaagatgagctggaattacaagcagccggatgaaccgcattcggaagaagtggcgaaagagaacaacggctatgcgctggaagatctctatgacgccaacggtacactgcttgccaggaaaggccagttgttgagtagttttgcattactgcgcgatgacggtacgacatcctcctcctgctggatttataccggtagctggacggagcagggcaaccagatgtccagacgtgataacgccgacccgtcagggcttggcaatacactgggttgggcgtgggcgtggccgctaaaccgtcgcgtattgtataaccgcgcttcggcggatccgcagggtaaaccgtgggatccaaaacggatgctgatccagtggaacggcgcgaagtggacagggaacgatattccggactttaacaacgcggcgccggggagcgggaccaatccgtttatcatgcagccggaagggctgggacgtctgtttgctattgataaaatggcggaagggccgttccctgagcattacgagccgatggaaacgccgctgggcactaacccgctgcacccgaatgtggtctcgaacccggctgcgcgtctgtatgaagaagatgcgctgcgcatgggtaagaaggagcagtttccgtacgtgggcacgacttaccgcctcacagagcatttccatacctggaccaaacatgcgctacttaacgctatcgctcagccggaacagtttgtggagatcagtgagacgctggcggcagcgaaaggtattgctaacggcgactatgtgaaggtgagcagtaaacgcgggtttattcgcgcggtcgcggtggtaactcgtcgtcttcgcaccctgcatgtcaacggtcagcaggttgaaacggtggggatcccgattcactggggctttgagggtgtcgcgcgcaaaggctatatcgccaatactctgacgccaaatgtcggtgatgccaactcgcaaacgccggaatacaaagcgtttttagttaacatcgagaaggcgtaa

SEQ ID NO: 370193 - DNA, 588 bp, Salmonella enterica
atggacgtcagccgcagacaattttttaaaatctgcgcgggcggtatggcgggaacaacggtggccgcactgggttttacccctaaaatggccctggctcaggcgcgaaactataagctgttgcgcgcaaaagagatccgtaactcctgcacatactgttccgtaggttgcgggctattaatgtatagcctgggagatggggcaaaaaacgcgaaagaagcgatttaccatattgaaggcgacccggatcatccggtaagccgtggcgcgctgtgcccgaaaggggccggtttgctggactatgttcacagtgaagatcgcctacgctatccggaataccgcgcgccgggttccgacaagtggcagcgcattagctgggatgacgctttcactcgtattgctaaattaatgaaagccgaccgcgacgccaactttattgaaaagaatgagcagggcgtcacggttaaccgctggctctctaccgggatgctgtgcgcctcggcggccagcaatgaaacgggtatgctgacgcagaagtttgcgcgttctctcggtatgctggcggtagataaccaggcgcgcgtctga

SEQ ID NO: 370194 - DNA, 882 bp, Salmonella enterica
atgacatcacaaaaagcaacgctaatagggcttgttgccatcgttctgtggagcacgatggttgggttaattcgcggcgtcagcgaaggtctcggaccggtaggcggcgcagccatgatctattcattaagcggtctgctgctgatttttaccgtcggattacctgatatccgccgtttcccggggcgatacctcatcgcaggcagcgtactgtttgtcagttatgaaatatgcctggcgctttctctcggttatgccgccactcgccatcaggctatcgaagtcggcatggttaactatttatggcccagcctgaccattctgtttgccattctttttaatgggcaaaaaactaactggcttattgttcctggattgcttattgcacttactggcgtttgctgggttctggggggcgagaatggtcttaatccaggagaaattatcagcaatgtcgccaccagtccgctaagttatttactggcatttcttggggcgtttatatgggcgacgtactgcaccgtcacaaataaatatgcgcgtggttttaacggtatcacagtctttgtgttactcaccgccgtggcgctgtggttccactattttcttacgccgcaacctgccatgatatttagcctaccggtgattgctaaactttttaccgcggcattaacgttagggtttgcctacgccgcatggaatgtgggcatacttcatggcaatgtgactatcatggccgtagggtcttattttacccccgtcatgtcctctgctctggccgcgctgttactcagctcaccactgtcattctccttctggcaaggcgcagtcatggtttgcgtaggttcgctactttgttggctggcaacgcggcggcgctaa

SEQ ID NO: 370195 - DNA, 1089 bp, Salmonella enterica
atgaaacttaagttagtggcagtggcagtgacttccctgttggcagcaggcgttgtaaatgcagccgaggtatataacaaagacggcaataaactggatctgtacggtaaagttcacgctcagcattatttctctgatgataacggaagtgatggtgacaaaacttacgcgcgtctgggctttaaaggcgaaactcagatcaacgatcagttaaccggttttggccagtgggaatatgaattcaaaggcaaccgtactgaaagccagggcgctgacaaagacaaaacccgtctggcgtttgctggtctgaaattcgctgactacggttctttcgactacggtcgtaactacggcgttgcttacgacatcggcgcatggaccgacgttctgccagagttcggtggcgatacctggactcagactgacgtcttcatgactggccgtactactggtgttgccacctaccgtaacactgacttctttggcctggttgaaggtctgaactttgccgcgcagtaccagggcaaaaacgaccgtgacggcgcgtacgagtctaacggcgacggtttcggtctgtccgcaacgtatgagtacgaaggttttggcgtaggtgcggcctatgcgaagtctgaccgtactaacaaccaggtgaaagcagcgagcaacctgaatgctgcgggtaaaaacgctgaagtctgggctgctggtctgaaatatgatgcgaacaacatctacctggcgaccacctactccgaaacgctgaacatgaccacctttggtgaagattcagcgggtgatgcgtttatcgcgaataaaacccagaactttgaagcagttgctcagtatcagttcgacttcggtctgcgtccgtccatcgcttacctgaaatccaaaggtaaaaacctgggtacttacggcgaccaggatctggttgagtacatcgatgtcggtgctacctactacttcaacaaaaacatgtccaccttcgttgattacaaaatcaacctgctggacgacagcgacttcaccaaagcggctaaagtgtctaccgacaacatcgttgctgttggtctgaactaccagttctaa

SEQ ID NO: 370196 - DNA, 441 bp, Salmonella enterica
gtgcagacgttcactggtcgttgtctttgcggacagagccattttaccgttgacgtcgaaatgctggatgtctatgcctgccattgtacgctgtgtcaaaaatggtcgggtggaatagccatgtatctggaagcctgcgggcaaccacagctagcccccctttccccggaaccgccatacttttcatcctcttcgcgcggcgaacgctacttctgttccggctgcgggtgtccgctgtggtttcggcttaccgataccgatcgctattttattccctggaccttactggaactgaacgaagttgatcgccgtcggctgattctggctgcggaaatttataccgaaacccagcctgccttctggcgactgacggggcaatacgcacgcctcagcggtaaagaggttgaggaaatggactccccctgccagctagcgcattaa

SEQ ID NO: 370197 - DNA, 1488 bp, Salmonella enterica
atgtttcgtcagtggttaacgttagtcattattgtgctggtctatattcctgtcgccattgatgccacggtcttgcatgtcgccgccccgacactgagtatgacactgggggccagcggcaacgagctgctgtggatcattgatatttattctttggtcatggctggcatggtgttgccgatgggcgcgcttggcgatcgtatcggttttaaacgcctgctgatgctgggcgggacgctctttggcctggcgtcattggcggcagcgttttcgcataccgccagttggcttatcgccaccagggtattactggctattggcgcggcgatgattgtaccggcgacgctggccggaatacgcgctaccttttgtgaagagaagcatcgcaacatggcgctgggcgtctgggcagcggtaggttcgggcggagcggcgtttgggccgctcatcggcggcatattattagagcatttttactggggatcggttttcctgatcaacgtgccgattgtgctggtcgtcatgggcttaaccgcccgctatgttcctcgccaggcgggccgtcgcgatcaaccgctcaatcttggccatgcggtgatgctgattattgccattttgctgttggtctatagcgctaaaaccgcgctgaaagggaatttgtcgctgtgggccatctcgcttaccctgcttaccggcacgctgctcctgggactctttctccgcacacagcttgcgacatcgcgtccgatgattgatatgcgactatttacccatcgcattatcctgagcggcgtcgtgatggcgatgaccgcgatgatcactctggtgggttttgagctgctgatggcgcaagagctacagtttgttcacgggctatcgccttatgaggccggggtatttatgctgccggtgatggtcgccagtggattcagcgggccgattgcgggcgcgctggtctcgcgtctggggttacggctggtcgcgacgggcggcatggcgttaagcgcgctgagtttttatggcctggcgatgacggatttcagcacccaacaatggcaggcctgggggctgatggcgctgctgggatttagcgccgccagcgcattgctggcttccacgtcggcaattatggccgctgcgccggcagaaaaagcggcggcggccggcgcgatagaaacgatggcttatgaactgggcgcgggactgggcattgccattttcggtctgttgttaagccgtagcttctccgcgtctatccgtctgcctgccgggcttgaggcgcaagagattgccagagcgtcatcttcaatgggagaagccgtgcagttggcgaatagcctaccgcccacgcaggggcaggcaatactggacgccgccagacatgcctttatctggtcgcatagcgtggcgttaagcagcgccgggagtatgcttcttttgctggcggtagggatgtggttcagcctggcaaaagcccaacgccgataa

SEQ ID NO: 370198 - DNA, 579 bp, Salmonella enterica
atgagttaccttaaccgggatgaacgccgcgaagtgatcctgcaagcggcgatgcgcgtggcgctggcagacgggtttgccgccatgacggtgcgacgaattgcatcagaagccgatgtcgccgccggccaggtgcatcaccacttcagctcggcgggcgagctcaaagcgctggcctttgtccatttgatccgcaccctgcttgatgccgggcaagttccgccgcccgccacctggcgtgcacggcttcacgctatgttgggtagcgaagacggcggctttgagccttacataaaattgtggcgagaggcgcaaattctggccgaccgggatccgcacatcagagatgcttatctcctcacgatgcagatgtggcatgaggaaacggtcacaattatcgagcagggcaaacaggcaggagaatttacgtttactgctaacgccacggatatcgcctggcggcttatcgcactggtgtgcgggctggacggtatgtatgtactggggattccggaaatggccgatcccgcgtttaaattccatctggatcgtatgattacgcttgaactctttgcgtaa

SEQ ID NO: 370199 - DNA, 1389 bp, Salmonella enterica
atgacacgacaaaacgagaattataaccgttatctcttgagtgactggcgacccgaaaatccagccttctgggagaataaagggaaaggcatcgccagaagaaacttattgatttcagtaagttgtttgctccttgcattttgcgtctggatgttgtttagcgctgttgccgtcaacctcaataaaattggatttaattttaccaccgaccaactctttttattaaccgcactaccttctctttccggcgcaatattacgcgttccctactcctttatggtaccactgtttggtggccgtaaatggaccgtattaagtaccgtaatattgattattccctgcacctggctgggattcgccgtgcaaaatcctgccacccctttcggggtatttatgctcatcgctctgttgtgcggttttgcgggggcaaacttcgcgtccagtatgggcaacatcagttttttctttccaaaagccagacaaggtagcgcgttgggtattaacggcggactgggaaatcttggcgtcagtgtgatgcagttgattgcgccgctggttatttttctgccgatatttacttttttaggcgtccggggcgtgccgcaacctgatggctccctgctcgccctcactaacgcagcctggatctgggtgccgttactggctgtcgcgacgcttgccgcctggtttggtatgaacgatatcggcagttcaaaagcgtctgtcgcctcgcaattgccggtgctaaaacgtctgcacctgtggctgcttagcctgttgtacctggcgacattcgggtcattcatcggcttttccgcaggtttcgccatgctcgccaaaacgcaatttcccgacgtaaacattctgcaactggcgttctttggcccctttatcggcgcgctggcgcgatcggcaggcggcgtgatctccgataaattcggcggcgttcgcgtcacgctcattaattttatctttatggcgctgtttaccgccttgctattcctcacactgccaggctccggcgcaggcagctttagcgcgttctatcttgtttttatgggcctgtttttgacagcgggtctcggcagcggttctaccttccagatgattgcggtgatcttccgtcagatcacgctctacaacgtcaaactgcgcggcgggagcgatgagcaggcgcagcgcgaagcggtgacggataccgccgccgcgctcggttttatctccgctattggcgctgtgggcggcttctttattccaaaagcgtttggcacctctttggccttgaccggctcgccggtgggcgccatgaaaatctttttgctgttttacatcgcttgcgtcctgctgacctggctggtctacgggcgtcgtaagcctaaacaacaataa

SEQ ID NO: 370200 - DNA, 3741 bp, Salmonella enterica
atgagtaaactgttggatcgctttcgttactttaaacaaaaaggcgatacctttgccgacggccatgctcaggtgatgcataccaaccgcgactgggaagacagttatcgccagcgctggcagtttgataagatcgtgcgctcaacccacggcgtcaactgcacgggctcctgtagttggaaaatttatgtcaaaaatggtctggtgacgtgggaaacccagcaaaccgactacccgcgcacgcgtcccgatttaccgaaccatgaaccgcgcggctgcccgcgcggcgccagctactcatggtatctctatagcgccaatcgtttgaaataccctctggtgcgtaagcggctgatagaactgtggcgcgaggccctttcccggcacagcgatccggtactggcatgggaatctataatgaacgacccgcaaaaatgccaaagttacaaacaggtgcgcggacatggcggctttattcgttcgaactggaaagagctgaatcagctcattgccgctgctaacgtctggacaatcaaaacctatggtccggatcgtgtggcggggttttcacctattccggcaatgtcgatggtttcttacgccgccggaacacgttatctgtcattgcttggcggtacttgtctgagcttctatgactggtattgcgatcttccacccgcgtcgccaatgacctggggcgagcagactgacgtgccggagtccgccgactggtataactcagcctacattattgcctggggctctaacgtgccgcagacgcgtaccccggacgcccacttctttaccgaagtgcgctacaaaggcaccaagacgatcgccatcaccccggactattccgaagtcgctaaactgtgcgatcagtggctggcgccaaagcaaggtaccgacagcgcgctggcgatggccatgggtcacgttattttaaaagagtttcatctcgataatcccagcgactattttcttaactattgccgccgttataccgacatgccaatgctggttctgttggatgagcgcgcagacggcagttatgtgccggggcgtatgatgcgcgcgtcggatctggtggatggactgggagaagccaataatccggaatggaaaaccgtcgcgctcaacagtacgggcgaactggtcgcgcccaatggttctatcggttttcgctggggcgaaaagggaaaatggaacctggaaccggtggcggcgggcgtcgaaactgaactgtcgctctctttactcggtcagcatgatgacgtggcgggtgtcgccttcccctattttggcggtaacgaaaacccgcattttcgcagcgtgcggcaggaaccggtgctggtacgtcagttaccggtgaaacgcctggctctggcggacggtagcgagcggatggtcgtcagcgtttacgatctggtgctggctaattatgggctggatcgtggtctggatgacggccatagcgccaataattataacgacgtaaaagcctacacgccggcctggggcgaacagattaccggcgtgccgcgtcgacatatcgaaactattgcacgtgaatttgccgagaccgcccataaaactcacggtcgttcgatgatcatcctcggcgcgggagtgaatcactggtatcacatggatatgaattaccgtgggatgattaacatgctggtgttctgcggctgtgttggacaaaccggcggcggctgggcgcactatgtcggccaggagaagctgcggccgcaaaccggctggctgccgctggccttcgcgctggactggaatcgcccgccacgtcagatgaacagtacctcgtttttctacaaccatgccagccagtggcgctatgaaaaactgactgcgcaagagttgctgtcgccgctggccgatccggctaaattttccggacacctgatcgatttcaacgtgcgcgcggaacgtatgggctggctaccctcggcgccgcagcttaatcttaacccgctcagcgtgaaagcgagcgccgataaagccgggctgtctgcggcggattataccgtgcaggcgttgaaatcaggcgctatccgttttgcctgcgaacagcctgacagtggtcataatcacccgcgaaatttatttgtctggcgctctaacctgctcggctcctccgggaaaggtcatgagtacatgctcaaatatctgctgggcaccgacagcggtattcagggcgaagcgctgggttccagcgaaggaattaagcctgaagaggtggaatggcagtccgccgcgattgagggcaagctcgatctgttggtcacgcttgatttccgtatgtccagtacctgtctgttttccgatatcgttttgccgaccgccacctggtatgaaaaagacgatatgaatacctcggatatgcatccgtttatccaccccctttccgccgcggtcgatcctgcctgggaatccaaaagcgactgggagatctacaaaggtatcgccagcgtcttttctgaagtgtgtgtcggacatctcggacaggaaaccgatgtggtgttacacccgctccagcatgattccccggcggaactggcgcagccatttgatattctcgactggcgtaaaggcgagtgcgaacttattccgggcaaaaccgcccccaatatcgtcgtggttgaacgcgattatccggccacctatgaacgttttacctcgctgggtcccctgctggataaattaggcaacggcggtaagggtattgcctggaatacgcaagatgaagtcgatttcctcggtaagctcaattacaccaaacacgatggcccggcgaaaggacgtccgcggatcgacaccgcgctggatgcttcggaagtgattcttgccttagcgccggaaactaacggccaggtggcggtgaaagcctggcaggcgttgggcgagatgaccgggcgcgagcacacccatctggccatcaataaagaagatgagaaaattcgctttcgtgatatccaggcgcaaccgcgcaaaattatctccagcccgacctggtcagggctggaaagcgagcatgtctcttataacgccggctataccaacgtacatgaactgatcccgtggcgcacgttgtcggggcgtcaacaactctatcaggatcatgcgtggatgcgcgcttttggcgaaagcctggtggcatatcgtccgccgattgatacccgcagcgtcagcgaaatgcgagaaattccgcccaacggtttcccggaaaaagcgcttaacttcctgacgccgcaccagaaatggggaattcactccacctacagcgaaaacctgctgatgctgaccttgtcgcgcggcgggccgattgtctggatcagcgaagccgatgcccgtgaattgggtattgaagataacgactggattgaagccttcaacgctaatggcgcccttaccgctcgtgcggtggtcagccagcgcgtcccgccgggtatgaccatgatgtaccacgcccaggagcggattatgaacattccgggttcggaagtgaccgggatgcgcggcgggatccataactccgtgacccgggtctgtccaaaaccgacgcatatgatcggcggctatgcgcaactggcttacggcttcaactattacggaaccgtgggttcgaatcgcgatgaattcatcatgatcaggaagatgaaaaacattaactggctggatgatgagggccgggatcaggtacaggaggcgaaaaaatga

SEQ ID NO: 370201 - DNA, 1545 bp, Salmonella enterica
atgaaaatacgctcacaggttgggatggtactgaatcttgataaatgtattggctgtcacacctgctccgtcacctgtaaaaacgtctggaccggacgtgaagggatggaatacgcatggttcaataacgtcgaaactaaaccgggtatcggctatcccaaaaactgggaagaccagcaggagtggcaaggcggttgggttcgtgatgttaatggcaagataaggccccgtctgggcggcaaaatgggggtaattagcaaaattttcgccaacccggtgattccgcaaatcgatgattactatgaaccctttaccttcgattatcagcatttacataatgcgccggagagtaagcatcagcccactgcccgtcctcgttcactgatcgacggaaaacggatggacaaggtgatctgggggccaaactgggaagagctgctcggcggcgagtttgaaaaacgcgcccgcgaccgcaacttcgacaacatacaaaaggagatgtacggtcagttcgaaaacaccttcatgatgtacctgccgcgcctgtgcgaacactgcctcaaccccagttgtgtcgccacctgcccaagtggcgctatttataagcgtgaagaagacggcatcgtgctaatcgaccaggataaatgccggggctggcgtttgtgtatcagcggctgcccgtacaaaaaaatctactttaactggaagagcggcaagtctgagaaatgcatattttgctatccgcgtattgaatccggccagccgaccgtttgctcggaaacctgcgtcgggcgcatccgttatcttggcgttctgctctacgacgccgacaggattgaagaagcggccagtaccgaacacgagacggatttgtatgaacgtcagtgtgatgtgtttctcaatccgcacgatccggcggtcatcgaagaggcgcttaaacagggcatcccgcaaaacgtcatcgacgctgcccaacggtcgccggtgtacaaaatggcgatggactggaagctggcgcttccgctgcacccggaataccgtaccctgccgatggtctggtacgtaccgccgctgtcgcccatccagtcatacgccgacgcgggcgggttaccgcacaatggcaatattctgccggcggtggagacgctgcgtattccggtccagtacctggccaatatgctcagcgcgggcgataccggtccggtcattcgggctctaaagcggatgatggcgatgcgccactacatgcgctcgcagacggttgaaggcgtgacggatacccgcgcgattgacgaagtcggtctgagcgtacaacaggttgaagagatgtatcgctacctggcgattgccaattatgaagatcgttttgtcattcccaccagccaccgggaaatggcgcgcgatgcctttccggagcgcaacggctgcggctttacttttggcgacggttgccacgggtcggataccaaattcaacctgttcaacagtagccgtattgatgccatcaatatcaccgaagtacgtgataaagcggagggggaataa

SEQ ID NO: 370202 - DNA, 696 bp, Salmonella enterica
atgcaaatcctcaaagcgattggcctgttgatggagtatccggacgacgagttgtgggaatgtcgggatgaagcgcttgcccttatccaacacgatgcgccaatgctggccgacttcactcgcgagctgctttatgcgccgttactggataaacaagcagaatggtgtgaagtgtttgaccgcgggcgcgccacttcattgctgttattcgagcatgttcatgcggagtcccgcgatcgcggccaggcgatggtcgatttgttaagccagtatgaaaccgtgggcctgcagctcaactgccgcgaactgccggatcacctgccgctctatctggaatacttaagcgtgttgccggaagcggaagcgcgcgagggattacagaatattgcccctattctggcgctactgggcggtcgtctgaaacagcgaggagcgccgtggtatcaactgtttgacgccctgctgacgctggcgggcagtacgcttacaagtgacagtgtcaccaaacagattgttcaggaatcgcgggatgatacccgtcaggcactggatgccgtctgggaagaagaacaggtgaagtttatcgaagataacgccacgacctgtgacagttcaccgttacaccattatcaacgacgctttagccaggacgcggcgccgcagtacgtcgacgtcagcgcgggaggcccgaaatga

SEQ ID NO: 370203 - DNA, 681 bp, Salmonella enterica
atgatacagtacctgaacgtctttttttacgatatctacccctatatttgcgccacggtcttcttcctcggcagttggctgcgctatgactacggacaatatacctggcgcgcgtcgtccagccagatgctggataagcgtgggatggtgatatggtcgaatctgttccatattggcattctggggatcttttttggccatctgtttggaatgctgacgccacactggatgtatgcctggttcctgccgattgcggtaaaacagcagatggcgatgatcctcggcggcgtgtgcggcgtattaacgttgatcggcggcgcgggattactgtggcgtcgtctgaccaatcagcgtgtgcgggcgacatccactacaccagatattatcatcatgagcattttgctgattcagtgcctgcttggcctgagcactattccgttttcggcgcaatatccggatggcagcgaaatgatgaagttggtgggctgggcgcaaagtattgtcaccttccgcggcgggtcttcggaaatgctgagcggtgtggcgtttgttttccgcgttcatctggtgctgggaatgactattttcctgctcttcccgttcacccgtctggttcatgtctggagcgcgccgtttgagtatttcacccgtcgctaccagattgttcgtacccgccgctaa

SEQ ID NO: 370204 - DNA, 894 bp, Salmonella enterica
atgaaaccgcagatttaccatgttgacgccttcaccagcgaaccctttcgcggcaactctgctggcgttgtcttacatgcggatacgctaagcgacgcgcagatgcagctgattgcccgtgaacttcgtcactcggaaaccgcctttttgctaaaaagcgaagagagtgatgtgcgcatacgctactttacaccgacagtagaagtccccatctgtggtcatgccaccgtggccgcgcattatgttcgggcaacggtactggggttgggaaacaccaccgtctggcaaacctcgttagcgggccgtcatcgcgttgaaattcatgccgaacacaacgactatcgcatcacgctggaacaaggtcagccctcttttgaaccaccgttagtcggagagattcgggctgccattatcaccgcactgaacctgactgaagatgatatcgtgccgggagcgccaattcaggtggcttcaacaggacatgcaaaagtgatgatcctgctcaaaccagacgttgatattgatgccctttctccgaatctggcagccctgacggcaatcagccagcaaattggctgtaacggcttttttcctttccagattcgtccgggaaaaaacgaaaccgatgggcgaatgttttccccggcgataggaattgtggaagatccggtaacgggaaacgccaatggcccgatgggggcatggctcgtccatcatggcctgatggcgcatgacggtaaaacgctgcagattcaaggccatcaggggcgcgctttaggcaaagagggtactgttgatgttaccgtcaccattcgcgataaccagccggaaaacgtcaccatctccggccaggcggtcattctgtttcatgccgaatgggccattactttttaa

SEQ ID NO: 370205 - DNA, 846 bp, Salmonella enterica
atgacctcttttttacatgcttattttacgcgattacattgtcagccgttgggggttcctacggttgaagcgctcagaacgcttcacttagcgcacaactgcgcgattccttttgaaaatctggatgtgctactgcctcgtgaaatacagctcgatgagacggcattagaggagaaactgctttatgcccgacgcggtggatactgttttgaactgaatggtctgtttgaacgtgcgttacgcgacatcggttttaacgtccgaagcttattggggcgggtcattctgtctcatcccgccagtttaccgccgcgcacgcaccgtttgctgctggttgatgttgaggatgaacagtggatcgctgacgtggggtttggcggccaaacgctaaccgcgccgcttcgtctgcaggctgaaattgcccagcaaacgccgcatggcgaataccgcctgatgcaggagggaagcacatggattttacaattccgccaccatgagcactggcagtcgatgtactgttttgatctgggggtgcagcagcagagcgatcatgtgatgggcaatttctggtcggctcactggccgcaatcccattttcgtcatcatttgttgatgtgccgccatttgcctgatggcggcaagctgacattaacgaatttccacttcacgcgttaccaccagggacatgccgttgaacaggtcaatgtaccggatgtaccgtcgttgtatcagttacttcagcagcagtttggtctcggcgtaaatgatgtaaagcacggttttaccgaggcggagctggccgcggtaatggctgcatttgatacccatccggaggcgggaaaataa

SEQ ID NO: 370206 - DNA, 633 bp, Salmonella enterica
atgccatatacatcagtttctacctatgccagagctttatcaggaaataagctacctcatgttgctgcaggagattatgaaaataaattatcaacaaaaatcatgaaaggcatcttgtatgtgcttaccgcaggactggcctacggatttacgcgagtaattgaacattattgcaatgttacgcctaaagttgatgagttctgtgccaatgcagggaatatccataatcaccttgctgatgctgtgtgtgatgggctgtatactatagatgtcgacctttctgatggtcggaggttaacattcgaacaactctcgctgatggctggacgtgagccaatcgtcaggatatcggatggcgaacataccgttgaggttaaggggtcctttgaagagatttgtatgagactggaagagggcttttttgaagcgccagcgtactatgattatgatattgatgaaaaatataaaaccgtcagagagcgaatggcagcatataatgccttacctcaggcattaggcgccattccgtgtttagaatattatatcgctcgggccagcaacatgcaggaggcgaaagcgcaatgggcggccgacataaaagctcgctaccataactatttggacaattattaa

SEQ ID NO: 370207 - DNA, 1494 bp, Salmonella enterica
atgaaaacacagactacgcacgccgcagaacaacatgcggcgaaacgacgctggctgaacgcccatgaagaggggtatcacaaagcgatggggaatcgtcaggttcagatgattgctatcggcggcgcgattggcaccggtttatttttaggtgcaggcgcccgattgcaaatggccggaccggcactggcgctggtctatctgatatgcggcattttttcttttttcattttacgcgcgctgggcgaactggtattgcatcgcccttccagcgggagcttcgtctcctacgcccgtgaatttttgggtgaaaaagcggcctacgtcgcaggctggatgtactttattaactgggcgatgaccgggatcgtcgatatcaccgcagtggcgttatacatgcactactggggcgcatttggcgacgttccgcaatgggtgttcgcgctcggcgcgttaaccattgtcggtaccatgaacatgatcggcgtaaaatggtttgccgaaatggagttctggttcgcgctgataaaagtactcgccattgttatcttcctggtggtaggcacgatttttctcggtaccggtcaaccgcttgagggtaatgccaccggttttcacctgattacagataatggcggctttttcccgcacggcctgttgcccgcgctggtactgattcagggcgtagtgttcgcttttgcgtcgattgaactggtcggtaccgccgctggggagtgcaaagatccacagacgatggtgccaaaagccatcaatagcgtgatctggcgtattggtcttttctatgtaggatcggtcgtattgctggttttgctgctgccgtggaacgcctaccaggcggggcaaagtccgtttgtcaccttcttttctaaacttggcgtgccttatatcggcagtattatgaatatcgtggtgttaaccgccgcgctttccagcctgaactccgggctttactgtacggggagaattttacgttcaatgtcgatggggggttccgcgccgaaattcatggcgaaaatgagccgtcagcatgtgccctatgcgggtatactggcgactctggtggtttacgtggtcggcgtattcctgaattacctggtcccctcccgcgtgtttgagatcgttcttaattttgcctcgctcggcattatcgcgtcgtgggcgtttatcatggtgtgccagatgcgtttacgccaggcgataaaagaaggcaaagccgcagacgtcagttttaaactgcccggcgcgccttttacctcctggctaacgctgctgtttttactaagcgtgctggtactcatggcgtttgactacccgaatggaacttacactatcgcctcgttgccgctgatcgccattctgctggtcgccggctggtttggcgtgcgacgtcgcgtggcggagatccatcgcactgcgccagtgacggcggattcgacagagagtgtcgtattgaaagaagaagcagcgacataa

SEQ ID NO: 370208 - DNA, 222 bp, Salmonella enterica
atgaaaaagttatttatatgctcaggtttgggcatgatgttttttatgcttgcgggttgtacaaccaactatgtgatgacgacgaagaatgggcaaacgatcgtaactcagggtaagccgcagttagataaagagacggggatgaccagttataccgatcaggaaggcaaccagcgggaaattaacagcaatgatgtggcgcagttgattaaggctgactaa

SEQ ID NO: 370209 - DNA, 1062 bp, Salmonella enterica
atgcacttacgtcatcttttttcgccgcgcctgcgtggttctttattgttaggttcgctcctcgtggcatcctcatttagcacgctggcggcggaagacatgctgcgtaaagcagtaggcaaaggcgcttatgagatggcctggagtcagcaagaaaacgcgctctggctggctacatcgcaaagccgtaaactggataaaggcggcgtagtttatcgtctcgacccggtgacgctggaaatcacgcaagcgattcataacgatctcaagccgttcggcgccaccatcaatgccgcgacccaaacgctgtggtttggcaataccattaacagcgctgttaccgcgattgatgccaaaacgggtgatgtaaaaggtcgtctggtacttgatgcgcgcaaacgtactgaagaggttcgtccgttacagccccgtgagctggttgccgatgcggcgaccaacacgatctacattagcggtgttggtaaagagagtgctatttgggtagtggatggcgaaaccatcaaactgaaaacgacgatcgaaaataccggcaaaatgagtacgggtctggcgctcgacagtaaagcgcaacgcctgtacaccaccaatgcggatggcgaatttatcaccatcgataccgccagcaataaaattctcagtcgtaagaagttgctggatgacggtaaagaacacttctttattaacctgagtctcgataccgcaggtcatcgcgcgtttatcaccgactcgaaggcgactgaggttctggttgtcgatacccgtaatggcaatattcttgccaaaatcgcggcgcctgcttctttggccgtcctgtttaacccgacacgtaacgaggcgtatgtgacacatcgtcaggcaggtcaggtcagcgtgatcgatgcgaagacctataacgttgttaaaacgttcgatacgccgacgtacccgaatagcctggcgctatcggcagacggtaaaacgctctacgtcagcgtgaagcagaaatcgacacgtgaacaggaagcgacgcagccggatgatgttattcgcattgctctgtaa

SEQ ID NO: 370210 - DNA, 2151 bp, Salmonella enterica
atgtcacgttttccgttgatacgcttacatttatccggcattttcatgaaaattatttccgttagacagcgactttatcccgccctcttattgcctctgaccttctccccggtccttcaggccgccagcgcgtccaatgaacaaaccatgatagtcaccgcaacgccgcaaaccgtatccgaactggatacacctgccgccgttagcgtcattgagggagaagacatgcgtctggcgacgccgcgcgttaatttatctgagactttaaccagcgtcccgggattgcaggtgcagaaccggcagaactacgcgcaggatctgcaaatctctatccgtggatttggctcgcgttccgcctttggcgtgcgcggcattcgtctgtatgttgatggcattcccgccaccatgccggatggacaaggccagatttcgaatattgatattaacagcatacaagacgttgaagtgttacgcggccccttctcagcgctatacggcaatgcttccggcggcgtaataaatgtcaccaccgaaaccgggattgaggccagcagctactacggcagttatggaagctggcgctatgggctaaaagccacgggcgcgatgggtgacggcacacagcctggcgacgtggattacacggtatcaactacccgtttcaccacccacggctaccgcgatcacagcggcgcgcgaaaaaatctggctaatgccaaactgggcgtgcgccttgacgatgtcagtaaactttcgctgatttttaatagtgtggacattaaggcggacgatcccggcggacttaccgaatctgaatggaaagccgatccgcaacaggcgccgcgcgctgaacagtacaatacgcgtaaaaccatcaaacaaactcaggcaggattgcgttatgaacgtcagctcagcgcgcaggatgatatcagcgtgatggcctacgccggagagcgggaaaccacgcaataccagtctattcccctggtggcacagctaaaaccagcccaggctggcggcgtaattacactgcaacgccactatcagggaattgattcccgctggactcaccggggagaattaggtgtgccggtcaccttcactggcgggttaaactatgaaaacatgagcgaaaaccgcaagggttacaataacttccgtctcaacaacggcccccctgagttcgggcataaaggcgatttacggcgggatgagcgtaacctgatgtggaatgtcgatccttatctgcaaacccagtggcagcttacgcaaaaactctcgctggatgctggcgtgcgctacagttccgtgtggttcgattctaacgatcactatatcgcgcccggcaatggcgatgacagcggcgacgccagctatcaccactggctacccgccggatcgctaaaatatgcgttaactgacgcctggaatctctatcttgctgccggtcgcggatttgaaactcccactatcaatgaactttcttatcgcgctgacggccaaagcgggttcaactttgacctcaaaccgtcgaccaatgatacggtggaagtcggcagtaaaacgcggattggcaatggcttgttgaccgccgcgttatttcaaaccgataccgatgatgaaattgtcgtcgccagtagtatgggaggacgcactacctacaaaaacgcgggcaaaacgcgccgccagggcgcagagctcgcgttggaccagcgcttcgccggcgactggcgggtgaaagcatcatggacctggctggatgcgacctatcgcagtaacgtttgtcaggggcaaaactgtgatggaaaccggatgcccggcatcgcccgtaatatgggattcgcctcattaggttttatcccggatgaggggtggtacgccggaacagacgttcggtatatgggcgatatcatggccaatgatgaaaataccgccaaagcgccttcgtataccgttgttggactaaatacagggtataaatttaattacagtcagcttaccgtcgatatttttgggcgggtagataatctatttgataaagaatatatcggttcggtgatcgttaatgaatctaatggccgatattatgagccagcgccagggcgtaactatggcgtggggattaatctggcatggcaatttgaataa

SEQ ID NO: 370211 - DNA, 666 bp, Salmonella enterica
atgccgggtacggaaaaaacacaacatataagcctgaccacacaggttgaaaatcggttaaagcatcaattgtctattggcgcattaaaaccaggcgcaaggcttatcactaaaaatatcgctcaagagttaggcgtcagtattacgccagtgcgtgaggccctgttaaggctggtctcttccagtgctttggcggtggcgccagcacaggcgtttatggtgccggagatctcgctggaaagtttgctggaaattaatacgattcgtactgccctggaggagatggcggtggtcgccgctgcgggtaagattaccccggatcgcgagcagacgctgaatgcgctattagatgaatttcaacaggcgctggaaagtggcgttatggagaaaattcttttggccaaccgcgcattccgctttgagatctaccactacgcggatatgccaacgctgtatgccatgatcgagcaattatgggtacgcctggggccaagtctgcattttttatatgataattttaaacttgatgattatcaaaacggcgttaatctgtacagaaaattgcttaatgcgttagtgactggtgataaagaagccagtcgccactgcctacagaacgttttgcaacaaaacgtagcgacgattaaaaatcagtacttcatgtaa

SEQ ID NO: 370212 - DNA, 1038 bp, Salmonella enterica
atgaagcaacagaccaaccgaaatcgtcgttgggttttggcctcgcgtccccacggcgcgccgcagatggataacttccgcctcgaagaagatgacgtcgcgacgcccggtgaagggcaggtgctattgcgtaccgtttttttatcactcgacccttatatgcgtggccgcatgagcgatgaaccctcatatgcgccgcctgttgaacctggctgcgttatggttggcggtacggtcagtcgcgttgtcgcgtcaaaccatcctgattaccgaccagacgaatgggtgttgagttacaatggctggcaggattatgacatttcagatggcgaagggttagtaaagctgggtgataatccgcaacatccttcctggtcattgggtattttaggaatgccggggtttaccgcctatatggggttactggatatcggccagccgaaagagggcgaaacgctggttgtcgccgccgccaccggccccgtaggcgcaacggttgggcaaattggtaagctgaagggctgccgggtcgtgggtattgctggcggcgcggaaaaatgccgtcatgcgacagacgttttgggatttgatctgtgccttgatcatcacgctgataatttcccacaacagcttgcgcaggcctgcccgcagggtatcgatatctattatgagaatgtcggtggtaaagtctttgacgccgtcttaccgctactgaatacgtcggcgcggattccgctctgcggtctggtcagcggctacaatgcgacagcgttgccggacggtccagacagactgcctctgctgatggcgacattacttaaaaagcgtattcgtctgcaaggttttatcatcaaccaggactatggtcaccggatacatgagtttcagcaagaaatggggcgttggatcaaagaagggaaaatacattaccgggagcagattactgatgggctggaaaatgcgccagaagcgtttatggggctgctggcggggaagaactttggcaaagtcgtgatacgtttagcggacgatgcgtaa

SEQ ID NO: 370213 - DNA, 516 bp, Salmonella enterica
atgacgattcgctttgccgataaagcagactgcgccgcgattaccgaaatctataaccatgcggtattacatactgcggccatctggaacgatcggacggtcgatacggataatcgccttgcctggtatgaggcccgtcaattactgggctatccggtgctggtaagcgaagaaaatggcgtggtgactggctatgcatcatttggcgattggcgcagtttcgacggttttcgctataccgtcgagcactcggtttatgttcatccggcgcaccaggggaaaggactggggcgaaagctgctcagcagactgatcgacgaagcccgacgctgcggcaagcatgtgatggtggccggtattgagtcacagaatgccgcctcgatacgcctgcatcattcgctgggatttaccgttaccgcgcaaatgccgcaggtcggcgtaaaatttggccgttggttagatcttacgtttatgcagctccagcttgatgaacacgccgcgccggacgcctgctga

SEQ ID NO: 370214 - DNA, 450 bp, Salmonella enterica
atgaaccagtctttgacgcttatctttttgatcgccgccggcgtcgggctggtggtacaaaacagtattatggtgcgtattacgcagacatcatcgacgattctgatcgctatgctgttgaactcgctggtagggatcgttttatttgtgacgatattgtggtttaagcaaggcgctgcgggtttcggcgagctggtcgccagcgttcgctggtggacattgatccccggtctgctggggtcattttttgtatttgccagcattagcgggtatcagaacgttggcgccgcgacgactatcgcggtactggtcgccagccagttaatcggcggactggcgctggatatcgcgcgtagccacggcgtcacgttacgcgcaatggtcgggccggcgtttggcgcgctgttgctggtcattggcgcatggctgattgcgaagcgccagttttaa

SEQ ID NO: 370215 - DNA, 234 bp, Salmonella enterica
atgtcgcacctggaggaagtgagcgcccgcgtggatgccgccatcgcggagagcgtaattgcccatatgaatgaattgctgattgccttgagcgatgacgctgaattacgtcgcgaagatcgttatgtgcagcagcagcgtttacgcacggctatcgcgcatcacggcaggcaatatcaagaagatcgggacgcgcgccgcgagcagctcaccaaaggcggcacgatcctgtaa

SEQ ID NO: 370216 - DNA, 1326 bp, Salmonella enterica
gtggcaaaatctctcttgcgcagcggcaatctggatgattatcaggccgtgggcggcggcggtcaggccgtatttgaatcagcattgcaaattcgcgaaacgcttcgtctgcgtaaacagcaggcgatggttgactgtctggcgattccgcaacttaacgataatggcgatcgggttgactggtattcgccgattgaaggtcaggcgatagcgtggaaagcggctgacgaagagacacgttctcgggctttacgttatttagccagcacttttgaaagcgcggctgcactcagtcgcaaaagtctgcaatccggtaaaacagcgctccagctatttgggtcgctacttgagaaagcgacgcaatttcccggcgaaaatcatgttttcctggttaacggcaaaccggttatcaccttctggggattcgttaatctcaacgaaaatacacgcgatgatgtgctggactgcctgcgggtaaccgaggcaatccccgacatccctctggtcgagccggagccggagcccgaagaaaagccgctggtagaggcggcatttagtcaggcggatgaacctttgttaacgtctgtcattgagccgccgaaaatgccggaggaacctgttgcgccgcccgttatcgttagcgagccgaagccggccacacccatcccggttgctgaggcgaaaagagctcgccgtctaccgctgtggagcttacctgtcgctgccgtggttatcgccgccgtcgccacgccttttttctggccatcttcatccgttgacgggtcctctcctgttcgcgccgcgcctgtcgctaccgcgaaaactgacgttaccccattgcctgaactcaccgcgcatttgccgctgcatcgcgctgaggtgacgcccgcccccaaagcggcgccgctgccggaagcgcctgttatcattgccgctattcccaaagacgcgctggtgatggacagtacgcagatgaagcttggaaccacgcgctttttaaacggtagctggcgggtcagcgtggatgtcaaagatccgattaccggcaagccgccctctctgcgttatcagatccaaaataacaaaggtatcgcgcgcgtagtacatggcgataacgtggtttgtcgggcggaaattttctctggtctgcatcaaacgggcgagctgatgattaaaagtcgcggcaatgcgcgctgcaccgacggttcacgttatccgatgccggaaattacctgtaaagcaggcgtcaatgacgtcgcaacctgtaccgcccgttatggcgaccacgcggcaattccgttgacgtttaaaaagataggtgcctga

SEQ ID NO: 370217 - DNA, 2982 bp, Salmonella enterica
atgttggtcaatctgtgtgattacaaacagagcgtcacgctcattgcaaacagtggcgtccagtttcttgattttggcttaacgccgcaagagtcggcccactacggacgttttgtgcgcaaaacggcaaacggcccgctactgcgcctcgattttgatctgaccagcgggcgctacacgttgcctggacgtgctggcggccaacccgaagtcgtgaaaccggaaagcactcagacgctgcactattctctggatgtactcgacggaatctggcttcccctgccgttcctgcgttttaatccgccgcgtacctttattgacgggccggataactgggcgcgcattcaggtacgtaaactcagcgagccagatagcgccggaaacacacaccggatcaccctcgccttcgacagtcaactggcaaaaaatatgcctgcggcgttggcgccttgcgaaaacgatctgctcaatggcacacgttttgcgctcgcctggcaggatgaagaagttgccgattttcttgaccagacatggattgacggctggctgcgcgagtcgtttcttcagtatgcctcacaggtggaaaaccgttcggaacaggccatacaacaagcgctgcgtagctttgagtatcaggcgcactggttgaatttactgacgctgttaggcgaacagcttacggtgccggaagtaaagtttgtgacacatacgttaagcacgcccgcaatcccggtcgatctgattctggatgtcggcaatacgcatacctgcggcgtcttgatcgaggatcatggcgatgcgaatgacgggttacgccagacggcagagcttcaggtgcgttctttaagcgagccgcagtatctgaacgatcctttatttaccagccgggtggaattctcggaagcacgctttggcaagcaacacttttctgtcgaaagcggacgagacgacgcctttgtctggccttccattgtgcgtgtgggcgacgaggctcgcgcccttgctatgcagcgtgtgggcaccgaaggcagcagcggcatctccagcccgcgtcgctacctgtgggatgaaacccccgccttgcaggactggcgttttagccagatccacggtaaaacgcagcgcgaagcgcttgccaccgcgtttccgctgatgaatctgatgaacgatgacggacagccgttattccgcctgccgcatgaagaaaggctaccggttttttcgccgcaatacagccgtagcaccttgatgacgcatatgttgtgcgaaattctggctcaggcgctggggcaaattaacagcgtcgccacccggctgcggctcggctttcccgcctcgccgcgccagctacgcaccctgattttaacgctgccttccgccatgccgaaacaggagcgagaaattttccgccagcgaatgtttgaagcgctggcgctggtctggaaagccatgggctggcatccgcaggatgaggatttcaccacgcctaagcagcgtgaaaaaagcgtggtgccggtaccagaaatacagatggaatgggacgaagcaagttgcggccaactggtatggctttataacgaagccatttcgcattacgccgggcgtaccgaatccttttttaatgcgctcgccagaccggatcgccagcctgaacccggcgtcgtccccggacgcgcgttgcgcgtggcatcgattgatatcggcggcggcacgacggatatggcgatcgttcactatcagttagatgacggcgtgggggccaatgtaaaaattacgcctcatctcctgtttcgcgaaggttttaaagtcgccggggacgatctgctattggatatcattcagcgctgtgtactcccttccctgcaaacggcgttgcaacgggcaggcgttacggatgccgccgccctgctggcgaccttatttggcgattcgggacgaattgatactcaggccattttgcgtcagcaaacggcgctgcaattatttatgccgctgggccatgcggtactttccgcctgggagcaaagcgacattaacgatccgtttgccggtttacacgcgacatttggcgatctgctgatccgccgcccaacgagcaacgtgatgaactatatccagcaggcgatcgatcatgccttaccgtctggttcgccgacatttgatatattcaatgtgccgttgcaaatccagtttagccagcttcaggaggctctgctggccggtcagtttacgctaacaacgccgcttcatgcggtctgcgaagcgatctcccactatcactgcgatatcttgctggtgacggggagaccgacctgcttacccggcgtacaggcgctcatccggcacttacaaccggtgccggttaatcgcattgtgtggatggataagtatcaggtacatgaatggtatcccttcagtcagcaagggcgtatcggtaacccaaaatccactgccgcggtgggcgcgatgttatgcagcctggcgctggacttacgtctgccgcgtttcaattttaaagcggctgatatcggcgcgtattcgactgtacgttatctcggcgtactggataataccgttaatacccttcgcgatgaaaacatctggtatcacgaaatcgatttggataaacccggcgcaacgctggacgctcgcttgcattttccgctacgcggtaacgtgacgttgggctttcgtcaactggcgaacagtcgctggccggcaacaccactttattgcctgagcattaattccgccgaactggcgaaaaccatcgctggcgacggcgtactgaatgtgcgactgaaattacgcggcagtagcaaagatagcgccccggaatcgttcatattaagtgatgcctggctccaggacgggacgccggtcgccgccgatgcgctgacattaaaattgaatacgctggctgaccgccgccacagcggcagccactactggatagatagcgggagtgtatacctgaaatga

SEQ ID NO: 370218 - DNA, 2145 bp, Salmonella enterica
atgacaaaaccgttaaacgccacccaggctgttatcgagtgggttaacaacacgcgccgttacgcaacgcgactggatgacgaagccgacgctctgctggcgcaacttacgcttgccgcggcggatgagtcagcgctcaacgccgcctgcgcgtcacatggctgcgttggtctgtacgggtatgcgcaatccgcaaaagcgcatctgttaacgacgctatgcggtaacgagaatggcaagctggaaattatcacgccggaccgtgactatgattatttcagccacatcaatccgggtcatgcgccagcgaatatggctattcgctttacgcgcgacattttttcaaacgagagcggctggccgttgcgcctgcgcttgatcagtgaagccgaactggtgcagatctttattgcctggaccagcgcgtcccccatttgtcgccaggtcgaaaaatccattatcacatcacgcctggagaaatggcaatcgcttcgccaaccgcagcccgtccccggcgttaccgctgaagaggtagcgaccatcgcgagtttctggcgctcttgcctgccgtccgccagacaacatattgatgatgcgacatggcaacactttgcctcgctcttgcctgcgctggatctcacgacacgggcgcacgcctgggcattactgtggggagagcaaccggagatcacccagcaatggctggcgctggcgcatatgttgcaacaaaccggccatgccggggaactggcggcgccgctcagcctgctggtcgatcattttggcttaccggcggaaaacttcctgacgcaaatggcgctaaccgccaacgatacgcaaatcgatgtggtggtgcatccggttaaggaaggccgactgctcaatgcggtcagcctttcgcttgattctctggcgctgcttacccgcgaactggtgctaaccgttgaaaacaacgtactggataacgtagatttactggatattccggtcgcgccagacagtcatcctcatccgttatggcgggcgaaattaggctggatgctggcccattaccgccaacaggtacagcccgatgttctggtgatttgcaatgctctggcatctcgctcgcaaacgtccactgccgcccgtcacttactggagtgggttaacgccacgcagccgcagcatgaatcagcgttacccggcgtcgtctgggctattactccacaggatgcccgttttgccacccagcaaaatctggatgaagccgtccagcagttgatgggtaaacctggcgtgcattggggaacgttgcaggcgctggataaacacagtatgcagcgtttggtggaatggttatcgcaggcgacatcggcaccacagcgacaggcgcgcttacaggcgttacgcgaacaactgcgaggccgcgtgcgcgatctgttaccgatgtttgatgacgcgcggctaccggttgaaaccgtgatccggcgtcttcaggcccaggccgccagacatggcgacctgctggccgggctgttaccgccagtacagaatttcgaagcgttgctgcgcacccgacagtcacgagaagaacaggtctgcggtttatttaatgacgcgatcgatctctttgccgacgaaccaacgcgcgcttcagcgtcagaaggtcacgaaacaggctaccaggcgcacaaaatgtggatcaatcatctgcgccagtgggcccactgccgggataatgcgcagcgtctgggactggaaccgcagatgctcaacgccgtggcggagattttaattaccgccagctatcgcctcggtttacctcagcagttacagaaaaccatgcagcgcgaggaggtgagcggcgcgcagcttcatgccatcattggtaacttcatcgcctggctcggctacgccaatatcgaggaggcccaacgcccggccagccgcgttcagaaaggcgcagccattttcgccgcaacaccgcgttcgacaatgttgcgtctaacaaagcttgacgaacagcccgttcacgccgccagccgctatgtctatgactggcttgttgcgctgtataccctggccaatgagaacgcaggatatcggcatccgcaggacgttaccgacgtagacagagcgcaattaattgccctgatagcctga

SEQ ID NO: 370219 - DNA, 174 bp, Salmonella enterica
atgaccctctttcaaaagatattaattttttacgccgtcatggcggtgatatcatccctgatcacctggtttttgactcatgacaaaaaacgaattcgtttcctgagcgcctttttggttggcgcgacatggccaataagtttccccgtcgcattgctgttttcgcttttctga

SEQ ID NO: 370220 - DNA, 1425 bp, Salmonella enterica
atgcaatatcaattactgattaatggcgtgctggtggacggtgagggagaaaggcagtctgtttataacccggcgacaggcgaggtcatacttgagattgcggaagcgtcgcccgcgcaggttgacgccgcagtgctggccgccgatagcgcgtttgccgaatgggggcagaccacacccaaagcacgggcggaatgtctgttaaaactggcggacagcatcgagcaaaacgcccttgagttcgcccggcttgaatcgcaaaactgcggtaagcctttgcactgcgtaattaatgatgaaattccggcaatcgtggatgtctttcgcttttttgccggcgcggcccgttgtttgagtgggctggcggcgggcgaatatctggaaggacatacgtcgatgatccgccgggatccgattggcgtggttgcctctatcgcgccgtggaattatccgctcatgatggcggcctggaagctggcgccagcgctggcggcaggtaactgcgtggtgattaagccttctgaaatcacgccgctgacggcgcttaaacttgccgcgctggcgaaggatatctttccgccgggggggctcaatgtcctgttcggacgagggcagactgttggcgatgtattgaccggtcatgaaaaagtacgcatggtctctttaaccggttctatcgcgaccggggagcatattctgcgccatactgcgccagcgataaaacgtacgcatatggaactcggtggtaaagccccggtgattgtttttgatgacgccgatctggatgcggtggcgcagggcgtccggacttttggtttctataatgccggacaggattgtactgcggcgtgccgtatatacgcgcagcgcggtatctatgatgcgctggtcgaaaagctagggaacgcggtgagcagcctgaaaatgggcgcgccggaggatgagtcgacagagctggggccgttaagttcgctggcgcacctgaagcgcgtcacagcggctgtagaggaggcgaaggccctcagccatatccgtgtgattactggcggaagtcaaacggaaggtaaaggttactatttcgctccgacgttgctggcagacgcaaaacaggaagatgccatcgtgcaacgcgaggtcttcggcccggtggtcagtataaccgtctttgatgatgaagatcaggttctgaggtgggccaacgattctcgctatggtctggcatcctccgtctggactcaggacgttgggcgggcgcaccggcttagcgccagattgcagtatggctgtacctggattaatacccatttcatgttggttagcgagatgccgcatggagggcaaaaacagtcgggatacggcaaagatatgtcattgtatggtctggaagactacacacttgtccgtcacatcatggttaagcattaa

SEQ ID NO: 370221 - DNA, 1425 bp, Salmonella enterica
atgaaaaaatatcaacgtctggcggagcaaattagagaacaaatcgcctctggcgtttggcaacccggcgatcgattaccctcgctgagggagcaggtcgccagtagcggcatgagttttatgactgtcggtcatgcgtaccagttgctggaaagtcagggacggattatcgcccgtccgcaatctggttattatgtcgcgccgcatccggtttgtcggtcagtcgcgacggcagcgcacgttattcgggatgaagccgtagatatcaatacctatatttttgagatgctgcaggcgagccgtgatacctctgtggtgccctttgcctcagcgtttcccgatccgcgtctgtttcccttgccgcaattgaaccgctctctggcgcaggtcagtaaaaccgcgacggcaatgagcgtcatcgaaaacttgccgccaggtaatgcagaattgcgctatgcgatagcacgccgttacgcgcagcaggggattaccgtttctcctgacgagattgtcattaccgccggcgcgctggaagcgttgaatcttagtttacaggcggtgacggcgccgggagactgggtggtggtggagaacccctgtttctacggtgcgctacaggccctggagcgattgcgcctgaaagcgttgtcgatacctaccgatgttaaagaaggtatcgatcttatggcgctggaacaggcgttacaggaatatccggtgaaagcgtgctggttaatgaccaacagccagaatccgttagggttcacgctgagtgctgagaaaaaagcgcggctggttgcgttactcacgcaccataacgtgacgctaattgaagacgatgtttatagcgaactctactttggccgcgagaaacctctgcctgccaaagcatgggatcgcgacgataccgtgttgcattgttcgtctttttccaaatgtctggttcccggttttcgcattggctgggttgcgggaggaagccatgccagacaaattcagcgtttgcagttaatgagcacattatccaccagttcccccatgcaattggcgttagtggattatctctcgacacgtcgatatgacgcgcatctgcgacgattgcgaaggcagcttgccgaacgtaaacagcaagcctggcaaacccttttgcgccatctcccggcggaagtaaaaattcaccataacgatagcggttattttctttggctggagctacctgagcagcttgatgccggtgaacttagcgccaaagcgcttgaacaccttatcagtatcgcgccggggaaaatgttttcaacgtccggcgcctggacgcgtttctttcgttttaacaccgcatggcattggggagaacgggaagaacaggccgtaaaacagcttggcagcctgattcgcgagatgctgagcgctaaaagccttgtgtga

SEQ ID NO: 370222 - DNA, 771 bp, Salmonella enterica
atggtaaaatgcgtatcttctttcctcctgttcagcctgttgtccgttcaggcaatgtcagctgaaaaccatattgatctccaccagccaaaagactttgtcgatattactacggtcgcccccgacgtacaggtagacatgcgatacttcagttcccataactttattggtcgccccattaaaggctataacgcgcctgtttgcctgttaacacgaccagccgcgaacgcagtgaagcaggtcgccgatcgtttacgccccttcggacttaccttaaaaatatatgattgctaccgtccgcaaagcgcagtgaacgactttatcgcgtgggccaaagatccttctcaaaaccaaatgaaaaacgaattttatccgcaggtagagaaaaatcgtctgtttgaggaaggttatcttgccgccagatccggccacagtcggggaagtacgcttgatctaacgattgttccacttgacagtaaaataccaatatacgatcccggacgaccactggtgaattgtactgcgtccgcggcgcaacgctcgccagataatagtctggattttggtaccggctttgactgttttagtccgttatcccatcccgataatgtcatgcttaccgctcagcaacgcgcaaataggttgttattacaaacattgatgcgtgatgcgggttttacgccactggatactgaatggtggcacttctctcttactcatgaaccatacccgaacacttggtttgactttcccgttaagcagagaccctga

SEQ ID NO: 370223 - DNA, 399 bp, Salmonella enterica
atgaagaaatcagatggtgaaattcacgaaaagacagcatcctggggcattttgcagtcagaatggctaagaaaatgtggacggctattattgctgttactttaccgtttcgttatcggatgggctttttttcaattacttgccatgatcgtggcagggatatttttgttaggcgtcttattatttcatcccataatatttgtacagactatcgcaatcactgagaagttaaatcatgcttcgcttgatttatggcatatccttaagttatgcctatggcattacggtatcatcgcagggtttatttttatggcggagtgtacgttaagtaaaagtatacggcaggttcagcgcttgtccaaaaaatttggggcacaggatttttcttcacgcccgtga

SEQ ID NO: 370224 - DNA, 951 bp, Salmonella enterica
atgccaattactatcgggagaggatttttaaagagtgagatgttttctcaaagtgctatctctcaacgctccttctttacgttactatgggaaaggattaaagattttttttgtgacacgcaaagatccactgccgatcaatatataaaggaattatgtgatgttgcctctccgcctgacgcgcaacgtttatttgatttattttgcgcgttatatgaattatcatctccgtcatgcagaggaaatttccattttcagcactataaagatgctgagtgtcaatatacaaatctctttattaaagatggcgaagatattccgttatgcattgtgatacgtcaggatcactactattatgatataatgaatagaacagtgctctgtgttgatactcagcctgcccacctgaaaagatattctgatattactataaaagctagcacttatgtttgtgaagagctatgttgcttgttccctgagcggttactactctcgctatccggcggtataacatttcccgttgacctaaaaaatataaaagagacgcttatcgccatggcagaaaagggtaatttatgtgactggaaggaacaggaaagaaaagccgccatctcctccaggattaatctgggcattgcccaggcagatgtaccacctattgacgacgctatcaaaaacaaaatagccgcaaaggttattgagaatactaacttaaagaatgcagcgtttgaaccaaattatgcacaaagctcagttactcaaattgtttattcatgtttgtttaagaatgagatactaatgaatatgctggaagaaagttcctttcatggcctgctatgtttaaacgagcttactgaatatgtagcgctacaagttcataacagccttttttctgaagatttatcttcactcgttgaaacaacaaaaaatgaggctcatcaccagagttga

SEQ ID NO: 370225 - DNA, 231 bp, Salmonella enterica
atgcttacaaaaacgttatcagtagttttactgacctgtgcgctgttttcaggccagttactggcgaaacagcaagaccacgcgttcgtatggtttgcgacgggagggcaccagcttagacacgaagccgacagcgatgaattacgggcggcagcggaagaatccgcggaaggcttgcgcgagcaccacaactggcagaaatcgcgcaaaccagaaagctattttcgttaa

SEQ ID NO: 370226 - DNA, 1965 bp, Salmonella enterica
atgcgccagcaacctcactatctcgaattattaagtccggcccgtgacgccgcaattgctcgcgaagcgattttgcatggcgcagatgccgtctacatcggcggacccggttttggcgcacgtcataacgccagtaacagtctgcgcgatatcgccgatctggttccgtttgctcaccgttatggcgccaggatttttgtcacgctgaatactatcctgcatgatgatgagctggagcccgcgcagcggttaatcaccgatttgtacgacaccggggtggatgcgctgattgtgcaggatatgggcattctggaactggatatcccgccgattgagcttcacgccagtacacagtgtgatattcgcagcgtggaaaaagcgaagtttcttgccgatgtcggtttttcacagattgtactggcgcgcgagcttaatttgagtcagatagcggctattcatcaggctactgacgccacgattgagttcttcattcatggcgcgctgtgtgtcgcttattctgggcagtgttatatctctcatgcgcaaaccgggcgcagcgccaatcggggcgactgttcgcaagcctgtcgcttaccgtatacgttaaaagacgatcaggggcgggtggtctcttacgaaaaacatttgctatcgatgaaagataacgaccaaacggctaacctcggcgcgttgatcgatgcaggcgtacgttccttcaagattgaagggcgctataaagacatgagctatgtcaaaaacatcaccgcgcattatcgtcagatgctggacgcgattatcgagcaacgtggcgatctggcgcgtgcgtcggttggtcggaccgaacacttttttgttccctccacggagaaaactttccatcgcggcagcaccgactattttgttaacgcgcgtaaaggtgatattggcgcatttgattcaccaaaatttattggcttgccggtaggtgaggtgctgaatgtggcgaaggattatctcgacgtagaagctacggagccgttggcgaatggcgatggtctgaacgtgttgattaagcgtgaagtggtaggttttcgcgccaatacggtggagaaaaccggtcataaccgctaccgcgtttggccaaatgatatgcctgccgacctgcataaagtccgtccgcatcatccgttgaatcgtaatctggatcataactggcagcaagcgctgacaaaaacctccagtgagcgccgtgtggcggttgatatcatgctgggcggctggcaggaacagcttattctgacgctgaccagtgaagacggtgtctgcatcacgcatacgcttgacggggtatttgaggaagccaacaactctgaaaaagcgttgaataacctaaaagccggactggcgaagctgggacagacgccttactacgcgcgtgatatgcaggtgacattaccggcggcgttgttcgtgccaaatagcctgctcaatcagttccgtcgggaggcgattgatatgcttgacgcggcgcggctggcccattatcaacgaggtcgtcgtaaacccgtggcgcagcctgcgccggtctatccgcaaacgcatctcagctttctcgctaatgtctacaaccacaaagcacgggaattttatcaccgttacggcgtacaattgattgatgcggcctatgaggcgcatcaggagaagggcgaggtaccggtcatgatcaccaaacactgcctgcgttttgcgttcaacctttgtccaaagcaggcgaaaggaaatattaagagctggaaagccacgccgatgcagttggtgcatggcgatgaggtactgacgctaaaattcgactgccgcccttgcgaaatgcatgtcattggcaaaattaaaaaccacatcttaaaaatgccccagcccggcagcgttgtcgcttcagtgagccctgaagcgctgatgaaaacgctgccgaagcgcaggggcgtttaa

SEQ ID NO: 370227 - DNA, 537 bp, Salmonella enterica
atggataacctgacacactatctggcgaccacgttaagaatgttacgccatcagcgaggctggagtttatcgcgtctggcggagatctccggcgtctcaaaagccatgttggggcagatagagcgtaatgaatccagcccgacagtcgcaacgctgtggaaaattgcgacgggcctgaacgttccattctcagtgtttatttcgccgccgcaggccgaatttcctccgaccttcgatccccagcagcaagcgatggtaatcacaccgttgtttccatgggatcctgaactctgttttgactatttttccctattgctggcgcctggcgcggtcagcgaatcaacgccgcataaagccggcgttgtcgaacatgtggtggtgattcagggtcggctggacatgtgtactggtggggtatggcaaaccatagacgccggtaaaggattgcgttttgccggtgatatggcgcatacctatcgcaatagcagtgaccagacggttcattttcactcgctgatccattacccgcgtggttaa

SEQ ID NO: 370228 - DNA, 1179 bp, Salmonella enterica
atgcgtctgttatcactgccgttacctactgtattatccggtctggtcgccgttctggtcggctatgcaagttccgccgccattatctggcaggcggcgcttgccgctggcgcaacacccgcagagatcgccggctggatgaccgccctcggtatagccatgggcataagcacactaacgttaaccttgtggtatcgtgcgccggttttaaccgcctggtcaacgcctggcgccgctctgttggtaacagggcttcagggattatcgttgccagacgcggtgggcatattcattgtcgccaatgccctgattgtgctgtgcggcgtcacgggattgtttgcgcgtttgatgcggataatcccccattctcttgccgctgcaatgctggcgggaatactgctacgcttcggcctgcaggcgttcgggacgctcaacggagagtttgtcatgtgcggcggtatgctattggcgtggctactctttaaagtattcgcgccccgctatgccgttattgctgccatggtgatgggaataacggtggcgctcatccagggtaaggtggcgatgagcggtattcatttcgcgccggtgtggcccaccttcgttcccccccacttttcattcgctcaaagcctgagcgtcgcggtaccgctcttcctggtgacgatggcatcgcaaaacgcccccggcgtcgccacaatgaaggcgtctggctatcagcttcctgtctctccgttaatgatttttaccggattgctggcgctgctgctttcgccatttggcgtttattctatctgcattgccgccattacagccgccatttgtcaaagcccggacgcgcaccccgatccaacgcgtcgctggttagcggccgccgccgcaggcgttttttatttacttgccgggtggtttggcggttcgataaccgggctgatggtcgccctgccggttagctgggtgcaaatgctggctggtctggcactgttaagtacgattagcggtagcctgtatcaggcgcttactcacgaaagtgagcgtgacgcggcagttatcgcatttctcgtcaccgccagcgggctaacgctgatgggcatcggatcggcattctgggggttgatcgctggcgggataggctatgcagtattaacgagaacgcgccgcccatcgttgtctggctga

SEQ ID NO: 370229 - DNA, 669 bp, Salmonella enterica
atgcgtactcatactttatttaaagttgcagtgcttactggcttgctggcgttatccggctgtgcgtctaaagtcacacagccggataagtattctggattcttaaaaaattattcggacctgcaggaaactacctccgccacggggaaaccggtgttgcgctgggtagatccacatttcaatgactctaactatgacagtattgtttacaatccgataacatactatcccgtccccaaaccaacgacccaggtcgggcagcaagttcttgataaactgctggcttatacgaacactaaagtaaaatcagcaattgaacagcgcaaaccgctggtcacgacgccagggccgcgcagtttgattttccgcggggcgattacgggcgtggataccagcaaagaagggctgcaattctatgaggtgatccctgtagcgctgattgtggcgggcacgcaaatggcgacgggccaccggaccatggatacccacctctattttgaaggtgagctgatagatgccgcgaccaacaagccggtcgtcaaggtagtacgccagggtgaaggtaaagacctgagtaactccagtacgccaatggcgtttgagacgttgaaacaggtcgtggatgatatggcgacggatacctctatgtttgacgttaacaaaaaataa

SEQ ID NO: 370230 - DNA, 597 bp, Salmonella enterica
atgaccgttcgtgacgaaaattactttactgagaaatacggtttaacccgcacgcattcggatgtgctggcggcggcaaaggttgtcgcgccaggccgaacgctggatttgggatgtggcaatggccgtaatagtctgtatctggccgcgaacggttatgacgttaccgcgtgggataaaaatccggccagtatggctaatcttgagcgtattaaagcggcagaagggctggataatctgcaaaccgaccttgtcgatctgaatacattgacctttgacggtgagtacgactttattctctcgacggtggttatgatgtttcttgaggcgcaaaccattcccagtttaattgccaatatgcaacgctgcacaaaacccggcgggtataatttgattgttgcggcaatggatacgccggactttccctgtacggtgggattcccgtttgcttttaaagaaggcgaattacgccgctattacgaaggatgggacatgctgaaatacaacgaagatgtcggcgagcttcaccgcacggacgaaaacggcaaccgtatcaaactgcgctttgctacgatgctggcgagaaaaacggcctga

SEQ ID NO: 370231 - DNA, 1014 bp, Salmonella enterica
atgcgtaatcacaagcagagcgatcgcgtgctcaatctgcctgcgggctattttggcatcgtccttggcactatcggtatgggattcgcctggcgttatgccagccagatatggggaataagccactggcccggcgacatcatggtgatcctggcgatgattatttgggcactcttgaccctggcgttccttagccgtctggtgcgctttccccatagcgtgatggctgaagtgcgacatccggtaatgagcagttttgtcagcctgtttcccgccaccacgatgctggtcgcgatcggtttcgttccctggtatcgcccgttggccgttgcgctattcagcgtgggggtcgtcatacaactggcgtatgccgcctggcagacggcgggactttggcgcggagcgcatccggaagaagcgacaaccccggggctttatctgcccacggtagcgaataattttatcagcgctatggcctgtggagcgctcggttacaatgatgccggactggtgtttttaggcgcaggcgtcttttcgtggttaagtctggagccggttattttgcagcgactgcgtagctgcggcgaattaccggcggtgctgcgtacgtcgctgggtatccaactggcgcccgcgctggtcgcctgtagcgcctggctgagcgtcaatggcggggagggcgacacgctggcgaaaatgctattcggctacggtctgttacagcttttatttatgctgcgattaatgccctggtatttatcacaaccgtttaatgcttccttctggagtttttcgttcggcgtttccgcgctggcgaccacggggttacatcttggtcacggtagtgaatcagggcttttccatattctggccgtcccgctgtttattttcactaacgctattatcgctttattgctggttcgtacatttctattgctggtgcaggggacgttgcttattcgcactgagcgcgctgcactgttgaaaacggaggaaaaaaatgaccgttcgtga

SEQ ID NO: 370232 - DNA, 981 bp, Salmonella enterica
atgatcaaatatcgactgagtgaagaacctcgtgcttttacttatcaggtagacggtgagaagaaaagcgtcttattacgacaagttattgccgtaacggattttaacgatgttaaagccggaacctccggcggctgggttgatgccgataatgtgctgtcacaacagggggattgctggatttatgatgaaaacgcgatggcctttgcgggcacggaaattacgggtaacgcgcgtatcacgctgccgtgcacgctctacaataacgtgcgaataggcgataacgtctgggttgatcgcgctgatatcagcgatggcgcacggataagtgacaacgtcaccattcagtcctcttccgtgcgcggagagtgtgcgatttatggcgatgcccgcgtgttaaaccagtcagaaattctcgccgttcagggactaacgcatgaacatgcgcagattttacaaatttacgatcgcgccaccgtgaaccattcgcggattgtccatcaggtacagctttatggcgacgccactatcacacacgcttttattgagcaccgggcggaggtctttgatttcgcgctcatcgaaggcaacaaagacaataatgtctggatctgtgactgcgccaaagtctatggccatgcgcgggttatcgccggtacagaggaagatgcgatccctacccttcgctacagctcgcaggtagcggaacatgcgttaatcgaaggcaactgtgtgttaaaacatcatgtgctggtaggcggacatgctgaggtacgcggaggcccgattttactggacgaccgcgtgctgattgaaggccatgcctgtatacagggcgaaattctgattgagcaccaggtcgagattagcggacgggcggcggtgatagcctttgacggcaatactattcacctgcgcggcccaaaagtgatcaatggcgaggatcgtattacgcgtacccccttagtcggttccctttaa

SEQ ID NO: 370233 - DNA, 540 bp, Salmonella enterica
atggtggaaattattcctgttagcacgacgctggaactgcgagcggcagatgaaagtcatgttccggcgctgcacgaactggtactcaaaaacaaagcgtggctacaacagtcgctcgactggccgcaatatgtcacgtcgcaggaggaaacgcgtaagcatgtgcagggtaatatactgttgcaccagcgtggttacgccaaaatgtacctgattttctgccagaatgagatggcgggcgtactctcatttaatgccattgaaccggtaaacaaagccgcctatatcggttactggctggatgagtccctccagggacaagggataatgtcgcaatcattacaggcgctgatgacacattatgcccggcgcggcgatattcggcgcttcgtcattaaatgccgcgttgataatcaggccagtaacgcggtcgcacggcgcaaccattttacgctggaaggctgtatgaaacaggcagagtatcttaacggcgactatcacgacgttaatatgtatgcccgcattattgatgcggattaa

SEQ ID NO: 370234 - DNA, 1119 bp, Salmonella enterica
atgaccttttctgtgcaggaaacgcttttttctttactgcggctaaacgggatttcaggacatgaaagcagtattgcaaacgttatgcagcacgcgtttgaacagcaggccaaagacgtctggcgggatcgcttaggcaatgtcgtcgcccgttatggcagcgacaaatccgacgcgcttcgcctgatgatttttgcgcatatggatgaagtcggttttatggtacgcaagatcgaaccctccggctttttacgttttgaacgcgtgggcggcccggcgcaaattactatgcccggttcggtcgtgacgcttgccggacgttcaggcgatatcatgggctgtatcggtattaaagcatatcacttcgcgaagggtgacgagcgcacccagcctcccgcgctcgataaactctggattgatatcggcgcaaaagataaagcggatgccgaacgaatgggtattcaggtggggacgccagtaaccctttacaacccgccgcactgtctgggcaacgacctggtgtgcagtaaggcgctggatgacaggctggggtgtacggcgctactgggcgtcgccgaggccctcgcctccacaccgctcgatatcgcggtattcctggtcgcgtcggtacaggaagagttcaatattcgcggtattgttcccgttttacgacgcgtgcgccccgacctggcgattggtattgatatcaccccctcctgcgacacgcctgacctgcaggattactctgatgtgcgggtcaaccacggcgtcggcatcacctgtctgaactatcacggacgcggtacgttggcgggactgattacgccgccgcgtttgctgcggatgctggagaccaccgcgcacgaaaataatattcccgtacagcgagaagtcgcgccaggcgtcatcaccgaaaccggctacattcaggttgaactggacggtattccctgcgccagtctttctattccctgccgctatacccactcgccagccgaagtcgccagcctgcgcgacctggctgattgtatccgtttactgactgcgctggctaacatgtcgccagaacagtttcccattgagcctgaaacaggcgctacacaagaggcacgaccatga

SEQ ID NO: 370235 - DNA, 282 bp, Salmonella enterica
atgatgaaaaagatccttgtggcatgtggtaccggcatgtcgacatcaaccatgattgcacaaaaactgcaggactttcttgcggagcaaggcattgcggcaaccacggcgcaatgttgtctgaatgagatcccgttgaattgtaacggtatggatctcatcgtaacgtccatgcgtacgcacagtgactatggcatcccgacgctcaacggcgccgccctgctgacaggcatcaacgacgacgcattaaaacaagaaatcaaggcgctgttaacacaataa

SEQ ID NO: 370236 - DNA, 1314 bp, Salmonella enterica
atgtttgattacatcctgtctctcggcggcaccgtttttgtgcccatcattatgattatcatcggcttaatctttcgtattccctggctgcaggcggtgaaagccggggtgacggtcggcatcggttttgtcggcatggggctggtgatcgtcatggcgatcgacagtctcagtccgccgattaaagtgatgattgagcgttttggcctgacgctgcatgtgtttgacgtcggcgccgggcccgcatccggcgtcggctatgcgacggccatcggcgcgatgatcattcccgttatctttctgctcaacgtcggtatgctggtgactcgtctgaccaaaaccatgaacgttgatatttataactactggcactacgccattaccggaacggtcgtccagttgatgaccggcagtctgatttatggcgtactgggcgcgatttgccacgccgccttgtcgttgaaaatggccgactggacggcgaaacgagtacagaacattgtgggtctggaagggatttctattccgcaagggtatggctccagttccgtgccgttgttcgtattgctggatgcgatatacgaaaaaataccgtttatgaaaggacgcaatattgatgctcaggagatccaaaaacggtatgggatggttggcgacccggtgatcattggcgttgttctcgggctgatcttcggacttgccgcaggcgaaggctttaaagggtgcgcaaccttaatgattaccgtggcggcgattatggtgctgtttccgcgcatgattcgccttatcgttgagggattaatgcccatttccgacggcgcgcgtaagttcttccagaaacactttaaagggcgcgaagtctttatcggtctggataccgcagtgacgttaggccacccgaccaccatcgcggttggactgctgttaattcccatcatgttaattctggcgagcatactgccgggcaataaagtcctgccgctggctgatttaccggttgcgccgttttttatctgcatggccacggttattcatcgcggcgatctgattcgtactctgctcagcggcatcattgtcatgattaccgttttgctgatcgccacccagttcgcgccgtactttaccgatatggcgctcaaaggcggctttagcttcgccgctgaaaacgcgcaaattaccgcgctgtcggtgggaaatatgtttggctggtcaatatctgaattgatgtcgctgggcatgattggtgtggttattgtggtcggcattgtcgccagcatcatacttgtcttacgtaaacgtgaactaccggaataa

SEQ ID NO: 370237 - DNA, 807 bp, Salmonella enterica
atgagttggctaaaagaggtaataggaacggaaaaagccgttatcgccatgtgccatttacgggcgctgccgggcgatcccgggttcgataccaggaaaggcatgaattgggtaattgaccgcgcccatgacgatttaatggcgctacaaaatggcggcgtggatgcggtgatgttctccaacgaatttagtctgccttatttaacgaaagtcagaccggaaacgaccgccgcgatggcaagaatcatcggtcagttaatgagtgaaatccgcgtaccgtttggggtaaacgtgttgtgggaccctgtggcctcgtttgatttggcgatggcgaccgacgcaaaatttattcgcgaaattttcaccggcgcttacgccagcgattttggcgtctgggatacgaatgtcggcgaaaccattcgccatcagcatcgcatcggcgcaggccacgtgaaaacgctgtttaacatcgtgccggaagcggcggtgtatctgggaaaccgggatgtctgttcaattgcgaaatcgaccgtatttaacaataaccccgatgccctgtgcgtctcggggctgacggcgggcgctcgcacggatagcgccatactgaagcgggtaaaagagaccgtccccgacacggtcgtgctggcgaataccggggtgtgtctggaaaacgtcgaggagcagctctgcattgccgacggatgcgtaacggcaaccacgtttaaaaaagacggcgtcttcgccaactttgtcgaccaggcgcgcgtggcgaagtttatggagaaagtacgccatatccgacaataa

SEQ ID NO: 370238 - DNA, 438 bp, Salmonella enterica
atgattaatgatgttaagtgggttcaggcgcaacgccatgccagcgactggcgacacgcgctggatatcgccgttcgtccgctgattaccttcggcgcggcggccccctgctacctggacggtattattgagaacacccttaaatgggggccatattatcttatcgcgccggggattgcgttgccccatgccagaccagagcaaggcgccaaccataatcaaatcagcgtcactacgttagcaacgccggtcgctttcggcaatgcggattgcgatcccatctggctgttgctttgcgccagcgccacggatgccgaagcacatattcgcaccattcaacgcatcagccagtggctagactcgccggaaagcgtcgcgatgctgcaagatgcgccaaatgacgccgcgcttttcgcgcaattaaccgcattgcgctga

SEQ ID NO: 370239 - DNA, 633 bp, Salmonella enterica
atgatcctgcacccttcactggcctccgccgatccgctgcgctatgccgaggcgttgaccgctttacacgatgcgcccctcggctcgttgcatctggatatcgaagataccagtttcatcaacaatattaccttcggtatgaaaaccattcaggcagtcgcacaacacacccgccatccgctctcatttcacctgatggtctcatcaccgcaacgctggctaccctggcttgcagctatccgccccggctggattttcattcatgccgaaagcgtgcaaaaccccccggagattctggcggatattcgcgctatcggggcgaaagcaggactggcgcttaacccggcaacgccgctattgccttatcgttatctggcattgcaactggatgcgctgatgatcatgaccagcgaacccgacggacgcggacagcaatttatcgccgcgatgtgtgaaaaagtgagccagggcagagagcatttccctgctgcggaatgctgggcggacggcggtattacacttcgcgccgcacggctgcttgccgccgcaggcgcacagcatctggtgattggccgggcgttattcacgacggcgaactatgatgtgacgttgtcacaattcaccgcgctataa

SEQ ID NO: 370240 - DNA, 792 bp, Salmonella enterica
atgagccaacagcgccccgaccgtatcaaacagatgttgcattacctttggcaacacaggcacctctcaacacagcaagctattgagctttttggctatgcagaggcaaccgtgcgccgggattttcactatattgccagccgttatcccggtatggttcgcggccatggttgtattgacttcgacgacagtacggaagataaagaatatgttttcgacgttaagcggacgttacaaagcgaggcgaaacgcgaaatcgctgccctcgcccgcacgttcatcaaggatggagactgcttttttctcgactccggctccacctgtctggaactggcaaaatgtctggtcgacgccaaagtaaaagtcatttgcaatgacatcaaaatcgctaatgaactgggtggcttcccacacgtagagagttacattatcggcggactgattcgccccggttacttttcggtgggcgagagtctggcgctggagatgattaacgcctttgccgttgaacgcgcctttatctcctgcgatgcgctgtcgattgaaacgggcatcaccaacgctaccatgtttgaagtgggcgttaaaacgcgcattattcagcgctcacgcgaggtcatattgatggccgatcactcaaagtttgatactgtagaaccccatgcggtggcgacgctgtcctgtattactaccattcttagcgacagcgcgctcccgtctgctatcgcccgacgttatcagcaggcggggtgccgtctcatcatgccagacccctcatcaggagtgcgttaa

SEQ ID NO: 370241 - DNA, 438 bp, Salmonella enterica
atggacatcaggcaaatgaacaaaacccatctggagcactggcgcggattgcgaaaacagctctggcccggtcacccggatgacgcccatctggcagacggcgaagaaatcctgcaagccgatcatttggcatcatttgttgcgatggcagacggggtggcgattggctttgcggatgcctcaatccgccacgattatgtcaatggctgtgacagttcgcccgtggcttttcttgaaggtatttttgttctcccctcgttccgtcaacgcggcgtagcgaaacaattgattgcagcggtgcaacgatggggaacgaataaagggtgtcgggaaatggcctctgataccacgccggaaaatacaatttcccagaaagttcacctggcattaggatttgaggaaacagagcgcgtcattttctaccggaagcgttgttga

SEQ ID NO: 370242 - DNA, 1254 bp, Salmonella enterica
gtgagtaacctgaaaattaccaacgtgaaaacgattctgacggcgccgggcggcattgatttggcagtcgttaagatagaaaccaacgagccagggctgtatgggctgggatgtgcgacatttacccagcgtatcttcgcggtaaaaagcgcgatcgatgagtacatggcgccttttctggttggcaaagatccgacccgtattgaggacatctggcagtcaggcgtggtgagcggctactggcgcaatggcccgatcatgaacaatgcattgtccggcgtggacatggcactgtgggatatcaaaggtaagctagcggggatgccagtttatgatctgctgggcggcaaatgtcgtgatgggatcccactgtactgccacaccgatggtggtgatgaagttgaagtggaagataacatccgagccagaatggaagagggttaccagtacgttcgctgccagatgggaatgtatggcggtgcggggaccgatgaccttaaactgatcgccacgcagctggcacgtgcgaagaacattcagccgaaacgttcaccgcgcagcaaaacgcccggcatctactttgacccggacgcctacgccaaaagcgttccgcgtctgttcgaccacctgcgtaacaagctcggttttggcatcgaatttattcatgatgtacatgagcgcgtgaccccggtgactgccattaatctggccaaaacgcttgaacagtatcaactattttatcttgaggatccggtggcaccggaaaacatcgactggctgaaaatgctgcgccagcagtcttccactccgatatccatgggtgagctgtttgtgaatgtgaatgagtggaagccgctcatcgacaacaggctcatcgactacattcgctgccacgtgagtaccatcggcggcattacgccggcgaggaaacttgctgtctacagcgaactgaacggtgtgcgcaccgcatggcacgggccgggcgacatttctccagttggggtttgcgccaatatgcatttggatttgagttcaccgaactttggcattcaggaatacacgccaatgaacgacgcgctgcgtgatgtcttcccgggctgccctgagattgaccacggttatgcctatctgaacgataagccgggtctgggtattgacattgatgaagccaaagcggcgaaatatccgtgcgaggggggaatcccatcctggacaatggcgcgcacaccagacggtacggcctcaagaccgtaa

SEQ ID NO: 370243 - DNA, 768 bp, Salmonella enterica
atgaccgctttatttgatttaactgggaaaacggcgctggtaacgggttctgcacgaggactgggctttgcctacgcagagggtcttgccgctgcgggtgcacgggttatcctgaatgatattcgcgccacgctgttggccgaatcagtggatacgctgaccagaaaaggctacgacgcgcatggcgtggcttttgacgtcaccgatgaactggcgattgaggcagcttttagcaaacttgatgcagaagggatccatgttgatatcctgatcaataacgccggtattcagtaccgcaaaccaatggtcgagctggagctggaaaactggcagaaggtgatcgacactaacctgaccagcgcatttttagtctcccgctcggcggcaaaacggatgatcgcccgcaacagcggcggcaaaattattaatatcggctcgcttaccagccaggcggcccgcccgactgttgccccgtacacggcagcaaaaggcggcatcaaaatgctcacctgctcgatggctgctgaatgggcgcagtttaatatccagactaacgccattggacctggctacattctgaccgacatgaacaccgcgcttattgaagacaagcagttcgatagctgggtgaaaagcagcaccccttctcaacgttggggtcgtccggaagagctcatcggcaccgccatcttcttatcatccaaagcatcagattatatcaacgggcagattatttacgtcgatggtggctggctcgcagttttataa

SEQ ID NO: 370244 - DNA, 1362 bp, Salmonella enterica
atgaaggcttcaagacaacgactctttattctcacattgctgtttattgtgactgcaattaattatatggatcgcgccaatcttgccgtcgctggttcgaatatccagaatgatttcagtctgacgccaacacaactgggtttgcttttctccatgtttacctgggcctacgctgccagtcaaattcctgtcggctatgttcttgatcgcattggctcacgtattctttatggtggtgcgattattctgtggagtatttttacctttatgatggggttcgcctcacaccatttattcgcgacggcaaccgcttcatttgcaatgcttctggcctgccgcgcattaattggtgttgccgaagcgccatccttcccgtctaacacaaaaataatcgccacctggttcccggaccatgaacgtgcccgtgcgaccgcgatttattccagtgcacaatatatcggtctcgcgctgctgacgcctgccctcgcctttattgtggctaactacggttgggaaatgtcgttttatctgtccggtggcgccggtattctgtttggcatctactggcttatgtattaccgcgatccacagcacagcactgctgtgaaccaggccgaactggattatatcaaagcaggcggcggctatggctcggagaaccaatcctccgtgagtgcaaaaatcagctggcaaaatattaaattcttcctcagcaaaaaaacgatttggggtttgttcatcacccagtttgcctgctcgtctacgctctattttttcctgacctggtttattgtttacctggaaaaaggactgcatctctctatttccaaagccgggataggcgccatgctgccctatattatggcgatgcttggggtgctctgtggcggtacgctaagcgacatgctgctgaaaaaaggaaaatcccgaacgctggcacgaaaattacccgttatggctggcctgtgcgtcaccatgattattggcctggtcaatttctttgaaaaccagccagttattgcgattgtcattctgtctgttgcgttctttgccaacgccttttcaaacctgggctgggtggtctggagcgatgtaattccccgtaattttctcgggactatgggtggctttttaaatatttgcggcaacctttcggggatcgttagcccaattgttattggggttattctccagcgcacgcaaaacttccagtatgccatgtggtatatcgcaggcgtcgccggactgggcttattagcctacatattcctggtgggcaaaattgaagtgatcctgcctggaaaaaagaatgccgacactgtggataagaatgccattaacccggcaactgccaacaaataa

SEQ ID NO: 370245 - DNA, 1113 bp, Salmonella enterica
atgccgacactgtggataagaatgccattaacccggcaactgccaacaaataatgaggtcattatcaaaatggaaaaaataacctgtaacgcttgtctggcccatgcggaaaaagacgtacgctttgaatcacgtgaaatcgagcacagtgaacatgacgtcgtcgtgaaggtcgcctgcggcggcatctgtggctctgatattcactactatcagcatggccgcgcggggatgtctgtcctcaagcatccgatggtgattggccatgagtttgttggcgtgatcagcaaagtgccagcaggcagcgacctgaaagtgggccagacggttgcggtgaacccgtccagcccatgcaatcagtgcgagatgtgcctttccggccatcaaaatctgtgcggctccatgcgctttatgggcagcgcgcagttcaatccgcatgtgaatggcggtttttctgaatacgtggtggtaaaaccggagcaatgcattccttacgacaggcgcgtgcccgcaaacgtgatggccttttcggagccgctggcggtcgccattcatgcagtaaaaaaggcaggccagttgaccggcaaacgcgtactggtgattggcgcaggccccattggttgtctgatcctcgcggcggcgcgcagtgccggagcatctgaactggtagcatccgatctcagcccacgctgtctggaactggcacgccaaatgggggccacagcggtgatggatccgcgcgatgaagaacaggttgcccattatcagcagcataaaggctactttgatgtcgtgtttgaggcctccggcgcgccgattgccgtggcatccaccgtcgacttcacccgccctgccggcaccatcgttcaggtggggatgggcgccagcccggtaagctggccggtgtcaacgatgctggttaaagaactcaactgggtcggctcattccgttttatcggtgagttcatcaccgcggtacgctggctggaagatgggcgcgtcgatcctcgcccgcttatcagcgccgagttcccgccccagcaaattgaagacgcgctgattaccgccacagacaaaaatgtctctgctaaggtactcattcgtttcgattaa

SEQ ID NO: 370246 - DNA, 720 bp, Salmonella enterica
ttgagcataaaatccattcaaaaacagaatgttgtaaatgaaatttatgatcagataagtagcaaactgctggacggcagttgggcgccgggtagccgtttgccctcagaagtggaactgaccgcctcatttaacgtcagccgggtcagcgttcgcagcgcagtacagcgttttcgtgacctggggattgtggtgacgcgtcagggcagcggcagctacgtgagcgaaaacttcaccccgcagatgttgagtaacgatccccgcccaatcatgcaccttagccgcgaagagtttcacgatatgatgatttttcgtcagaccgtggagttcaaatgcgtggagctcgccgtcacacacgccaccgatgatgacattcgccagctcgaggaagcattgaacaacatgctgatccacaaaggtgattataaaaaatactcggaagcggactacgagttccatctggcgattgtcagggcatcgcacaacagcgtgttctacaacgtgatgagctcgattaaagacatctattactactatcttgaagagcttaaccgtgcgctgggtattacccttgaaagtgtggaagcccatatcaaggtctacatgtcgataaagaatcgcgatgccagcacggccgtcgaagtgctcaatgaagcgatgtcaggcaatattattgcgatcgaaaaaatcaaatctacagagacatcagggacaaaataa

SEQ ID NO: 370247 - DNA, 567 bp, Salmonella enterica
atgaaaaagagctttcttggtgttgtcctgtctctgggtttattaagtgctgctcatgcagatgtatataaatttgataatacgcataccaatgcggtatttaatatcgatcatttccagacctcaaccaatcatggcgggttttatgctattagcggcgaactgaaatatcagccggaaaagcaagatgcagagatgcgcgtgacgattcccgtgagcgccttaaataccggggtggatgcgtttgataaccatattcgcagtagcgatattctggatgcggaaaaatatccagaaatggtatttaaatcaacaaaatggcattttgaagataataaaccggtttctattgacggtttgctaacaatgaagggagtaacgaagcccgtcaccttaaccaccaccaagtttggctgttatatgagcccgatattcaaggcgcaggtttgcggtggtgattttgtcacgcaaatagatcgcacccagtggggggtagattatctggtcgatatggggatgacgaaagttgtcgatataaaaattcaggcagaagcggttaagcaataa

SEQ ID NO: 370248 - DNA, 1620 bp, Salmonella enterica
atggccgccgtgtgcggttccagcggtattgcttcactcttttctcaggcggcgtttgccgcggaatccgatattgcggatggtaaaattgtccgttttgattttgctggtctgcaatcaatggcccaggcgttagcgaaaaagccctggggcggcgcgccgggacccttgccggatacgctcgccaatctgacgccgcaggcctataacagcattcagtatgacgcggcgcattcactctggaacggtgttgccaaccggcagctcgatattcagtttttccacgtagggatgggctttcgtcgtcgcgtacgcatgttttccgttgatacgacgacgcatcttgctcgcgagattcattttcgcccggaactgtttaaatacaacgatgccggcgtcgatacgacgcaactggaagggcagagcgatctcggtttcgccggtttccgtgtctttaaagcgccggaactggcgcggcgcgatgtcgtctccttcctgggcgccagttatttccgggcggtagatgatacttatcagtatggcctgtcggctcgcgggctggcgatagatacctatactgacggtcaggaagagttccctgacttcaccgcattctggtttgacaccgcgaagccgggcgatactacgtttaccgtttacgctctgctggacagcgctagcgtgacgggcgcgtataaatttgtgattcattgcgaaaaatcgcaggtgatcatggatgtagaaaaccatctctacgcccgtaaagatataaagcaacttggcattgcgccgatgaccagtatgtttagctgtgggaataatgaacgtcgggtatgcgacaccattcacccgcaaattcacgactccgatcggctggcgatgtggcggggtaacggcgagtggatttgccgcccgctgaataatccgcagaaattgcagttcaatgcatatatggacgataacccaaaagggttcggcctgctgcaactcgatcgcgatttctcgcattatcaggatgtgatgggctggtacaacaaacgtccgagcctgtgggtggagccgcgtagtaagtgggggaaaggcgcagttagcctgatggagatcccaaccactggcgaaactctggataatgtggtctgtttctggcagccggaaaaagcgatcaaagccggggatacgctggcgtttaattatcgtttgtactggagcgcgcagccgccggtacaatctccgcttgcgcgggtcatggcgacccgtacagggatgggcggctttcccgaaggttgggcgccgggcgaacattacccggataaatgggcgcgccgttttgctattgattttgtcggcggcgatctgaaagcggccgcgccaaaaggcattgagccggtgattacgctttccagtggcgaggcgaagcagattgagatcctctacgtcgagcctttcgacggttatcgtatccagtttgactggtatccgacctcggattctacggcaccggtggatatgcgtatgttcctgcgctgccagggggaagctatcagcgaaacctggctgtatcagtatttcccgcccgcgccggataagcgccgttatgtcgacgatcgtatcatgcgttag

SEQ ID NO: 370249 - DNA, 1509 bp, Salmonella enterica
atgttgaatccctccatcccgctggtggcgacgcgtcacggtaaaatcgtgggcgtcgtacaggaagaaacccatatctggcgcggtataccttatgccgcgccgccaacaggggagctacgctggcgtgcgccgcagcctgttacgccctggcaggatgtgcgccaggcggattgtttctcctgcgccagttggcaggatattacctggtgtcgcgaactcggcggcggcgatccgggaaatttttccgaagactgtctctatctgaacgtctgggctcccgccgtgcgtcatgaaccgttgccggtcatggtctggctacacggcggcggttacaccattggcgcggggagtttgccgccctatgacggtcaagcgctggcgaagcgcggcgcaatcgtggtgacggtcaattatcggcttggccatctgggctttttcgcgcatccggcgctggaaggcgaaggggcggagtgtattcataatttcgctttactcgatcaaatcgctgcgctgcgttgggtgcaggacaatattgccgcatttggcggcgatacgcagaatgtgacgttatttggcgaatccgccggcgcccgcagcgtgctgtcgttgatggcttcgccgttggcgaaggggctttttcataaagcgattattcagagtggttatacgctgccggatacgccccgcgaggtggcgctaaaaaaaggcgttgcgctggcggaacatcttggtttagcccatgccactgccgaacagctacgcgctttaccggcagagacgttttggccgctggacgcgccttttaaaattgcgccgacgccgatttccggcgacgtcgtgctgccgcatccgatgctggaaaccttctttgcggcgaaacagcatccaataccggtgatgatcggctcgaatagcgatgaagccagcgtattggccgtttttggcgtcgatattgccggtcaaattcaaaaaatgcgccgtgagcggcgtgttggcctggggttaatccggctgctttatcctggagtgaaaggcgacgaagcgctagggcggcaggtctgtcgggatatggtatttaccacgttgggttatgtcgtcatgcaagcgcagcagcggatcggcgaaccgtgctggcgttactggtttgattatgtcgccgaggcggagcataacacctacgcgaatggcgcctgtcatggcaatgaaataccgtatgtattcgatacgttaacgcgggctgagcccacatgccattatgtgaatgagaatgacctggcctttgcctcgcaggtggcggattactgggtgaatttcgctcgtcatgccagccgcacgcgcgacgtgctgcacggcccggttcgctggcccgccagcattcgggggcgagatcgtctgttgcggattgggctgaacaaacttgccggttttaaagtggaaaaccgctttatgcgtgcgcgtctggcgctgtttaaacgagtcatgaaacatcacgttagtctggaataa

SEQ ID NO: 370250 - DNA, 1344 bp, Salmonella enterica
atggcgaacaccatcacggcagatgagattcgggaacacttttcgcaggcaatgtcggcaatgtaccagcaggaagttccgcagtacggtacgttactggaacttgtggctgacgtgaatctggcggtgctggaaaataatcccaaactgcatgagcagttggctaatgccgatgaactggcgcgattgaacgtggaacggcatggcgccattcgtgttggcaccgcagaagaactttctaccttgcgtcggatattcgccatcatggggatgtacccagtaagttattacgatctctctcaggcgggcgtgcctgtgcactccacggcatttcgtcccattgacgaggcttcgctctcgcgtaatccctttcgcatgttcacttcgctattacgcctggagctcattgaaaacgcggcattacgccagcgggcggcggaaatcttatcgcagcgggatatttttacatcgcgctgccgacaattgctggatgagtacgacgagcagggcggttttagtgctgctcaggccgaagaatttgtccgtgaaacgctggagacttttcgctggcatcgtcaggctaccgttgatgaagaaacgtaccgcagcctgcatcgtgagcatcgtttaattgccgacgtggtctgttttccgggatgtcacattaaccatctgacgccgcgtactctggatatcgaccgggtacaggccatgatgccggagtgcggcattacgcctaaaactcttatcgaaggtccgcctcgccgcgaagtgcctattctgttgcggcaaaccagtttcaaagccctggaagagcaggtgctcttcgttgatgaaaagcagggtacgcacacggcgcgcttcggcgaaattgagcaacgtggcgtcgcgctgacgccaaaaggtcgtcgattatatgacgagctgttgcacaaggcgggaacgggtaaggataacttcacgcatcaactccatttgcgggaggtctttaacgcctttccggatagcgaatttctgcttcgccagcaggggcttgcctggttccgctatcgcttaacgccttccggtgaggcgcatcgtcaggcgatccatcctggcgacgatccgcagccgcttattgagcgcggttgggtaatcgcgcagccgattacctatgaagattttcttccggtcagcgcagccggcatttttcagtcgaatttgggaaatgaaacgctggccagaagccacggcaatgccagccgcgacgcctttgaacaggcgctgggatgtgctgtacgggatgaattttcgttatatcaggaagcggaagaacgcagtaaacgccgttgcggtctgctttaa

SEQ ID NO: 370251 - DNA, 924 bp, Salmonella enterica
atggaaaaaaatggtctgtttagtcagcgcattcggttgcgccaccttcatacatttgtagccgttgcgcaacagggaactctggggcgcgcggctgaaactcttaacctgagccagccagcgctttctaaaacgctgaacgaactggaacaactcaccggaacccgtctgtttgaacgcgggcgactgggcgcgcaattaacggttcctggcgaacaatttttgactcatgcggtaaaagtattagatgcattgaataccgccgggcaggcgctgaatcgcaaagaggacgccagcgccgatgtggtgcgtgttggcgcgctccccaccgctgcgctgggtatactcccggcggctattgggcggttccatcaacagcaaaaatcgacctcgttacaggtcgcgaccatgaacaatacgatgttgcttgcgggtctgaaatcaggcgagatcgatctgggtattggccgcatgtcagacccggaattaatgggcggtttaaattacgaactgctgtttttagaatcgcttaaattagtggtacgccccggtcatcccctgttacaggagacgatcacgctcagccgggttatggaatggccggtagtcgtctcgccaaaaggcacggtaccgcgccagaatgcggaagccctgttgcaaagccaggggtgtaaaatgcctgccggatgtatcgaaacgctatccgcatcgttatcacgacaactgaccgtagattacgattacgtctggttcgtcccctctggcgcggttaaagaagatcttcgccaggcgacgctggtctcattacccgtgccgacccagagcgcgggcgagccgataggtattcttacgcgagttgatatcccgctctcaaccggggcgcaaatgctgattgcggcgatccgtaaatcgatgccgctgtga

SEQ ID NO: 370252 - DNA, 1626 bp, Salmonella enterica
atgggcaacacattctcgatgcaagcctcgcataaactgggcttcctgcatcatattcggctggttccgctgttttcctccattctcggtggcatccttcttctttttgctttgagcgccgggctggcaggctattttctgttacaggccgatcgcgatcagcgtgatgtcacggacgagattcaggtacggatgggattatccaacagcgctaaccacttacgtaccgcacgtatcaatatgatccacgctggcgcggcgagccggattgctgaaatggatgaaatgaaagccaatattgccgctgcggaaacgcggatcaagcagtctcaggacggctttaacgcttatatgtccagagcggtgaaaacacccgctgatgacgcgttagataacgagttaaacgcccgctacaccgcctatatcaacggcctgcaaccgatgctgaaatttgccaaaaatggcatgttcgaagcgatcattaatcatgaaaacgagcaggcaaaacaactggatgcagcatataaccatgtcctgttgaaagcgattgaactgcgcaccgagcgggcaagactacttagcgagcaggcttaccaacgtacccgactcggtatgatgtttatgattggcgcatttacgttggcgctggtattgacgttaatgaccttcatggtgctgcgtcgcacggtgatacaacccttgcagcagtctgcgtcacgtatcgaacgcattgcggccggcgatctgaccatggctgacgagcccacaggacgcagtgaaattggtcgcctgagtcatcatcttcagcagatgcagcatgcgttgcaacaaacggtaggggcggtgcgtcagggggcggaggaaatttatcgaggcaccagcgaaattaccgctggtaatacggatttatcttctcgtactgaacagcaggctgccgccattgaacaaaccgcggccagtatggaacagttgacggcaaccgttaagcagaatgcggataatgcgcatcacgccagcaaactggcggaagatgcttccggtaaagccagccgcggaggccagatggtttccggggtcgtacaaacgatggggaatatttccaccagctcgaaaaaaatctcggaaattaccgccgtcattaacagtatcgctttccagaccaacatcctggcgctgaacgcggcggtcgaggcggcacgcgccggggaacaaggacgcggttttgcggtggtcgccagtgaggttcgtaccctcgccagtcgcagcgcgcaggcggcaaaagagattgaaggcttgatcggcgcatcggtcagcctgattgaacaaggatctgaagaggttatcgctgcggggagcaccatgaatgagattgtggatgccgtcaaacgcgtcaccgatattatgctcgatatcgcggcagcctctgatgagcaaagtcgcggtattgttcaggtcagtcaggcgatttctgagatggacaaggttacgcaacaaaacgcgtcgctggtcgaagaggcgtccgcggcggcggcttcgcttgaagaacaggccgcccgcttgacgcaagccgttgatgcgtttcatttacaggatactggcgcgacgatgcgatcatccttcctttag

SEQ ID NO: 370253 - DNA, 1119 bp, Salmonella enterica
atgaaatcacgtgcagcagttgcttttggtcccggtcagccgttaaaaattgtcgagattgacgttgcgccgccgaaaaaaggcgaagttctggtcaaaatcactcataccggcgtttgccataccgatgcttttaccctttccggcgatgatccggaaggcgtattcccggcagtcctgggtcacgaaggcggcggcgtggtagtcgaggtcggcgagggggtcaccagcctgaaacccggcgatcatgttattccactgtatacggcggaatgcggcgagtgtaagttctgtaagtccggtaaaactaacctttgtcaggccgtacgcgccactcagggaaaagggctgatgccggatggcactacccgcttttcttataacggcgaacccgtttatcactatatgggaaccagcacgttcagcgaatataccgtttgcgcggaaatttctctggcgaaagtgaacccgcaggcgccgctggataaagtgtgtctgttgggctgcggcgtgacgactggtattggcgccgtccataacaccgctaaagtgaaagcgggcgacaccgttgccgtttttggtttaggcggtattgggctggcggttattcagggcgcggttcaggctaaagccgggcgtattttagctgtcgacacgaatccggaaaaatttacgctggcgggcgaaatgggggccacggactttattaatccgaatgattacgacaaaccgatccaggacgttattgttgagcttactgatggcggcgtagatttcagttttgaatgtatcggcaacgttaacgtgatgcgagcagcgctggaatgttgtcataaaggctggggcgaaagcattattattggcgtagcgggggcagggcaggaaatcaaaacccgtcccttccagctagtgaccggtcgcgtctggcgtggctccgcctttggcggcgtgaaagggcgcacgcagctgccagggatggtcgaagatgcgatgaacggtaaaatccgtttagatccttttattactcaccgcctgccgctggagcagattaacgatgcctttgaactgatgcatcagggtaaatccatccgtactgttatccactttggcgataactga

SEQ ID NO: 370254 - DNA, 276 bp, Salmonella enterica
atgccgcattcacctgaagataaaaaacgtatccttacccgtgttcgtcgcatacgcgggcaggtcgaagcgctggagcgggcgcttgagtctggcgaaccttgtctggcgattctgcaacagattgccgccgtgcgcggcgcgtctaatggcctgatgagtgaaatggttgaaatccatctgaaagatgagctggtcagcggggagactacgccagatcagcgcgcggttcggatggcggaaatcggccatcttcttcgcgcttatctaaaataa

SEQ ID NO: 370255 - DNA, 126 bp, Salmonella enterica
atgtttcaggccaaacccaagttgaactggagcgctcagaagccgattacctacataacaaatattggccgcaagcttatgctgtgggcggaatatacgaccgctattatccagactggctgttaa

SEQ ID NO: 370256 - DNA, 717 bp, Salmonella enterica
atgaatgatgattcaattattaaaaactcttcgatgcttttggcctatttaggtggtttgggatggggaagcgcctatttttatggctggggcgtctccgcgtactatggtttcccgtggtggtatgtaggcgtcggccctgacaacattgcccgaagtctattccatgcgattagcctgatggctatattcataatagcgtggggagtgggtattctattattttttctagtaaagcaaaaagcacgtatccacgaccttagctttttacgtctttttttggcagcggttttgttctttattccaattgttatcgagttttctctcttaacagaatcgtttttgtgggagcttttttttatcattttactggtggctttatgcttatcggtggggatgcgtttttatagtaaattgatgccggtgatttgttttacgcaactcagttgggtgcgaaggcattgtttcactatagttatgcttggttttattatatatttttttatattttctttttttgttgggatctataaaccacaattaaagaaagaatacgaaatgatattgtatgatggaggctggtactacgtcctggccagatatcatgatagttttattttgtcgaaatcctttactaaaaataacaatagatttattatttttagaccagaagatgggcactcttatgaaattactctggtaaaagtcaggctttaa

SEQ ID NO: 370257 - DNA, 1227 bp, Salmonella enterica
atgccattgagtgttggacagggttatttcacatcatctatcagttctgaaaaatttaatgcgataaaagaaagcgcacgccttccggaattaagtttatgggagaaaatcaaagcatatttctttaccacccaccatgcagaggcgctcgaatgtatctttaatctttaccaccatcaggaactgaatctaacaccggtacaggttcgcggagcctacatcaaacttcgagccttagcgtctcagggatgtaaagaacagtttattatagaatcacaggaacacgccgataagttgattattaaagatgataatggtgacaatattttatctattgaggttgaatgtcatccggaagcttttggtcttgccaaagaaatcaataaatcacatcccaagcccaaaaatatttctttgggtgatattaccagactggtattttttggcgacagcttgtctgactccttagggcgtatgtttgaaaaaacacatcatatcttaccctcctatggtcaatactttggcggaaggtttactaatggatttacctggactgagtttttatcatctccacacttcttaggtaaagagatgcttaattttgctgaagggggaagtacatcggcaagctattcctgctttaattgcatcggtgactttgtatcaaatacggatagacaagtcgcatcttacaccccttctcaccaggacctggcgatatttttattgggggctaatgactatatgacactacacaaagataatgtaataatggtcgttgagcaacaaattgatgatattgaaaaaataatttccggtggagttaataatgttctggtcatggggattcccgatttgtctttaacaccttatggcaaacattctgatgaaaaaagaaagcttaaggatgaaagcatcgctcacaatgccctgttaaaaactaatgttgaagaattaaaagaaaaatacccccagcataaaatatgctattacgagactgccgatgcatttaaggtgataatggaggcggccagtaatattggttatgatacggaaaacccttatactcaccacggctatgtacatgttcccggggctaaagaccctcagctagatatatgtccgcaatacgtcttcaacgaccttgtccatccaacccaggaagtccatcattgttttgccataatgttagaaagttttatagctcatcattattccactgaataa

SEQ ID NO: 370258 - DNA, 345 bp, Salmonella enterica
atgtatcttaaccgcttttgttatttactcctgatcttcgctgcggtcggaagcatttttacatcgcatcccgtcgcgatgtggttcctgctcgccaatgtgctaacgctggcgatctacggtatagacaaaacggcggcacgtaaaacctggcgcagagtgccggaatccactttgttggtgtttggggttgtcggtgggtggcctggggcgattgttggtcaacaactcttccgtcataaaacgcaaaagcagccattcaaaacatactttattgtcagtgtgatagtgagtattttagttacggtggcgatttatcgactctatccatttttgtcttactga

SEQ ID NO: 370259 - DNA, 762 bp, Salmonella enterica
atgttatccaaaaaatttggcttatcgatgatagtgttgggaataatgtcgtcttcagcgtttgctgatagcatcgttgaagggagaacactcaatgtcgcagtatcaccagcctctccccctatgttatttaaaagtgctgatggcaaattgcaggggatagatctggagcttttttcgtcttactgtcagtcacggcattgtaagctaaacatcaccgaatatgcctgggatggaatgcttggcgcagtggcgagtggtcaggcagatgtagcattttcgggaatttcaatcacagataaacgtaagaaagttattgatttctctgaaccttattacatcaactctttttatctggtcagtatggccaatcataaaataacgctcaataacctcaatgaattaaatcaatattctattggataccctcgaggaatggcttactccgaccttatcaaaaacgatctggagcccaaaggatactactcgttaagtaaagtaaaattgtatccaacctataatgagacgatggctgatctaaaaaatggcaatcttgatctggcttttatagaagagccggtttattttaccttcaaaaataagaaaaagatgccgatagaaagccgttatgttttcaagaatgttgatcagcttggcattgcctttaagaaaggctctcccgtgcgcgatgatttcaacttatggcttaaagagcaagggccacaaaaaatatctggcattgtcgatagctggatgaaatag

SEQ ID NO: 370260 - DNA, 633 bp, Salmonella enterica
atgctggctatcttttatttcctattggaagggattggtaatacgctgcttgtaacatttacctgttttctctcagcgtttttgtttgggcttacagtcgccgtattacggcgactatccccccttccactacagaagatactcgacgtactggtctttattcttcggggaattccaatacttattgctgtttttcttgtttattttggattgccatcgattggcatatatgtttcacctctggtggccatgaacctcagcgtcggcttaatcagtgggagctatcttgccgaggtgttcagaggggcgcttaaattagttgagccatacgaaattacggtagcgaaagtagcaggaatgcgtcaattacaggttataataaatattgaactgccacagatgttgcgattttctgtgcccggtattatcaatgagttttcttctgtattaaaagcgacgccctttgcttatactgtaggtatcgctgaaataacgaagcaggcaatgtcactgacagccatcacgctgaacgggttacagatctatactcttgacggggtattatatttcattatttataaagtttttactcttctggccggagtgtttgagaaaaaatatcgcatcagttga

SEQ ID NO: 370261 - DNA, 732 bp, Salmonella enterica
atggctttactgaaactaaaagagataagtaaggaatattcaggaaaaaaggttcttgatacggttagtctgaaaattcaatcgggagacatgaaagtagtcatggggccatcaggttgtggaaaaacgacgcttttacgctgtctgcttcgattagaagaacctgattatggcaatatttattttcacgggaaaaatatttacgacaaagaatttactattcttgagttcagaaaaaaagttggttgtgtcttccagaattacgctttgtatcgccatcttaacgtcatggataatattacccttgccctatgtaaagtgtttggcatgccgggacaactagcccgggagaaagccttacatgagctacaaaaacttgatatggcctcgcatagcgcgaaatacccttcgcaattatcgggcggccagcaacagcgcgtcgccctggcccgtacaatggtcaccgacccagaactcattatttttgatgagccgacgtctgcgcttgatccgctcatgactcgtgaagtcggaatgttgatcaagcaacttcacgacaatggcgtcactatattatgcgtcactcatgatattcgcctcgccagattactaagcgataacgtaacgtttcttaatcatggcaagattcgtgcagaaggcgcttttaccgatcttgccttacgagaaacggatccagatatccactgtttttttagcgaggcacaacgatga

SEQ ID NO: 370262 - DNA, 681 bp, Salmonella enterica
atgatcgctggctggtctctcttctttaatgacctgactgaacaactgccacttgttgtggacggtattaaagaaacctgtaaacttgcgctgattgtttccatcaccggttttttgtggggaattattattttctttctgagcctgagccatcgccccgtggtaaaagccataactcgactgtacatggatttctttatcggtacgccactcattcttattctatttgttatctattatggtttacctcaatctggcattcacctgtcctcttttaccgtggcggttacaggttttaccttgaatgtcggcgcatataatgccgcgtacatgacaacggcctataacgcattgaataagtatgaaacggaggcagcagtcgttcaggggttgaacaaacggcaggtctttttgtggattatactgcctcaggtattgctgtcttccattccagccttaacgaatcaggtgattaataaccttaaagacagcaccatcgtttttcttatccaatatactgagtttttcgcgcgaattcaggaggttgctgcaaccagctttaaattcttccatgcttacctttttgccgccatagtgtatcttattggcgttacctttctcgtcggtttgacccggtttttagagcatagactgcttcgccattacggtcagggttactga

SEQ ID NO: 370263 - DNA, 930 bp, Salmonella enterica
atggcgctaccacaactatcaatatggcagcccggcgatgggttaagaaaaataaagtataaatatcatgtttgtctcattgtcatattctccgtccttatacggttgctgtttttaactgaccgctacctttggtgtgacgaagcgtccagcgtgctgattagtcgacatagcgtagataatctgctattccataccgcttttgacgtgcatcccccgctttattatctgttactgcatgactggatcatattattgggtgatagcattgcagcggtacgctctctcagtctactctttgggatcctgacagttgtgctggttatcgcgcttacgcgatggctggcaaatgaacgtacagccttattggcgggatggttcgccgccctgatgccgatggcagttcattacagtcaagaaacgcgcatgtacgcgttaatgggaatgctaacgctcgctgccgcgttagcattgatgatgtggataaaaacacccacccataatcgctatcttatcgcgtatgctttacttatgacgttcagcttttacacccattatttcaccctatttacacttattgcccactggatcgcagtaacaatattatcctgccaaagccataaaacggcctgctaccttaaacttcctggctggtggtttgctaacctggcgattgctgtcgcttatctcccctggttgcccgtattgtttaatttactgactcatctggcgcagttgagagccggtaatgatatcggttggattccccccgtaacatggcgtgacctgcctgcgatgtattggcattttttaccggaaacaacggacagggttttccgtcgttcattctgtggctggctgtgggaggttttatcggtactgtggggcgaatatctttatgcaacggagaatatgaaagatatcagctga

SEQ ID NO: 370264 - DNA, 591 bp, Salmonella enterica
atgctggtcttcatcatttcctggtggatgccgttatttatcgatcgttatttcttcttctcatcgctgagcattcctcccctgctcgcggtattacttacccgcgcaaaaaaagcggtttgtggcttctggtttatcttattcaccttattattcggctatggttcatatcataataaccctgagcacatagacgagtttaaaccactggtaaactatattaatacccgtcaccagcctaatgatgccgtggtagtcagtaaaatgttcgattatttaagttatgtgtattataataagcgagattatcgtacgtttctttatacaccgcctaacgctcatggaacatcaggcagaccgaatgcctatggatttggttcactgttttatgcgcaagccgatcagacatatattgatactctgacaacgctttcaaaaagttaccatcgtgtctggttggtaagcggcggtaactttagtcaggattatcccttgccgtcagaatggcaaaatatcgcaaacttcagaagtggtagatttcaggtacagttatttgtaataccgactcaacaggcgcgtcaaatgcaatga

SEQ ID NO: 370265 - DNA, 663 bp, Salmonella enterica
atgaagcatacacaacaatcaggcgcaaaagtctataacccattcacgcttagcttatatgactggtgggtactcaatatctcaaacaaatatgcatggaagtgtcctactgatacgcgactacttcctttcttcctgcatcacatgggcgagactcacctggatattggcgtaggtacaggttattacctgaaacatgcacctgcgactcatgccatttcgctgatggatttaaatccggatagcctgaaaatagccgccagccgagtgggtaatacgaaaatccgcgccacactacaacacgatgttttcgacacgttcccggcggactggcacgggcgcttcgattccgtttcgatgtactatcttctgcactgcttacccggtgagatgacaacaaaagcgaaggcaattaaaaatgccggtatggcgcttaaacccggcggcacactttttggcgccacgattctgggcaaagaggttcctcacaatgcttttggtaagaaattaatggctgtttataacaagaaaggaatattcagtaataccaatgattcagccgatacgttacgcagcgtgttggacgaacatttcgctaaggtgactttggagcaacatggcgccgttgcgctattttccgccactatgccacgttcattgtaa

SEQ ID NO: 370266 - DNA, 531 bp, Salmonella enterica
atgggcaataagtattccggcctgcaaattggtattcactggttagtcttttttctggttattgtggcttacgccgcgatggaactgcgcggttttgcgccgagtagttatcggccctggtttaatatgacgcatgtttcatgtggtatcactattttgcttttaatggtggcgcgcttgattattcggctgaaatatcccacgccgcccattgttcctcgtccaaaaccgatgatgaccggaatggcgcatttaggacatctggtgatttacctgttatttatcgtgctgcctgttattggtctggtcatgatgtataaccgcggcaatccctgggtcgcatttggcattactatgccgcatgccgccgaagctaactttgaacgcgtagatatgctgaaatcctggcacgtcacgctggcgaatctgggctattttgttattggacttcatgccatcgctgctttgatgcatcactatttctggaaagacaatacgctgttacggatgatgccgcgtaagcgtaactga

SEQ ID NO: 370267 - DNA, 801 bp, Salmonella enterica
atgaatacaacgccatttccggcgctctctgcggaaacattgctggcggtgaataccgtcggacagtggctggcgcaaaatgatttttccggcgaacaaccttattcgtcggattgcgtcgtcctggcgggcaatgcggtgatccccactatcgacgcggcctgtcgcatcgccaaagcgcaaggcgttcctttactgattagcggcggtataggtcattcgacgccgtttttgtacgccgtgattgcccggcatccgcgctaccacactattcgcacaaccggacgcgctgaagccgcgatcctcgcggatatcgcgaaccagttctggcatattccggctgagaaaatttggctggaagatcggtcaactaattgcggcgaaaatgcccgtttctcttgcgcactgatccgtcaggcgaaagaaaacattaacacggctatcgttgtgcaagaccccaccatgcagcggcgcactatcgcggcattccggcgcgtgacaaacgacgacaccgatgcgccgcgctggctgagttttcctggttttgttccggtactgcgccaccttaacggcggtacacgttttgccaacgttgaagagggcatctggacggtggagcgttatctgtctctgattgccggcgagctgccacgtttgcgtgacgatgaaacagggtatggaccgcgcggtaaagattttatcattcacgttgatatcccacgcgatattgaaaacgcatggcaggtattgcaggcagatacgacgctgcgcagtgcgttagaacagagagcgttacgctaa

SEQ ID NO: 370268 - DNA, 3921 bp, Salmonella enterica
atgctgcccaagagctttatgactgaacaatctacgttgacgcttcaggtgttacagcagcggctggatgcactgatgctgcgcgacaaacagcgctttgcgcgccgcctgcatggcgtaaagaaagtaaaaaatcctgatgcgcaacaggccattttccagacgatggcgaaagaaattgaacaggctgtggcgcaagtcgccctccgtgaagcggcgcgcccctcaatcacttatccgcaaaatctgcctgttagccagaagaaacaggacattctggaagcggtccgcgatcatcaggtagtgatcgtagcaggggaaaccggttccggtaaaaccacccagttgccgaaaatttgtatggaactgggacgtggaattaaaggacttattggtcatactcagccgcgtcgcctggcggcgcgcaccgtcgctaaccgcattgccgaagagttgcaaacggagccaggcggctgcatcggctataaagttcgtttcagcgatcatgtcagtagcaacaccatggtcaaactgatgacggacggtatcctgctggcggaaatccagcaggacagactattgatgcagtatgacaccatcattattgatgaagcgcatgaacgcagcctgaatattgacttcttgctcggctatctgaaagagcttctgccgcgtcgccccgatctgaaagtgattattacctctgcgaccatcgacccggaacgcttctcgcgccactttaataacgcgccgattatcgaagtctctggccgaacgtatcccgtagaagttcgttatcgccccatcgtggaagaggctgacgacactgaacgcgatcagctacaggcaattttcgacgctgttgatgaactggggcgtgaaagtcccggcgatatcctgatttttatgagcggagagcgggaaatccgcgataccgccgatgccctgaacaagctgaacttacggcataccgaagtgttgccgctgtatgcacgcttgtcgaacagcgaacagaaccgcgttttccagtcgcacagcggacgccgtatcgtgctggcgactaacgtggcggaaacctcgctgacggtgccgggtatcaagtatgtgatcgatcctggcactgcgcgcatcagccgctacagctaccgcactaaagtgcagcgcctgccgattgaaccgatctcacaggcttccgccaatcagcgtaaagggcgttgcggacgcgtatcggaagggatttgcattcgtctgtattcggaagatgactttttgtcacgtccggaatttaccgacccggaaattctacgtaccaacctggcgtcggttattttgcagatgaccgcactggggctgggtgacatcgccgccttcccgtttgttgaagcgccggataagcgcaatattcaggatggcgtgcgtttgttggaagagctgggggcgattaccgccgacgaacagcaaacggcatataagctgacgccgctgggccgacaattatcccagttgccggtcgacccgcgcctggcgcgtatggttctggaagcgcaaaagcatggctgtgtgcgcgaagcgatgatcattacttccgcactctctattcaggatccgcgcgagcgcccagtggataagcagcaggcttccgatgagaaacaccggcgctttcatgataaggaatccgattttctggcgtttgttaacctgtggaattacctcggcgagcaacaaaaggccctgtcgtcgaatcaattccgccgtctgtgtcgcaccgactatctgaactatttacgcgtgcgtgagtggcaggatatctatacccaactgcgtcaggtggtaaaagagctggggattccggtaaacagcgaacccgcagagtaccgggaaattcacgttgcgttgttaacggggctgttgtcgcatatcgggatgaaagatgccgataaacaagagtacaccggcgcgcgtaacgcccgattctctattttccccggatccggtttattcaaaaaaccgccgaaatggacaatggtcgcagaactggtggagaccagccgtttgtgggggcgcatcgctgcccgcattgagccagaatgggtggaaccggtagcccagcacctgattaaacgttcatatagcgaaccgcactgggagcgggcgcaaggcgcggtgatggcgacggaaaaggttactgtctacggtctgccgattgtcgccgcgcgcaaggtgaattacagccagattgacccggcgttgtgtcgtgagttgtttatccgccatgcgctggtggagggggactggcaaacccgtcatgccttcttccgtgagaatctgaaattgcgtgcggaagtcgaggaacttgagcacaaatctcgccgccgcgatatcctggtggatgacgataccctgtttgagttttatgaccagcgtattagccatgacgttatttccgcccgccactttgatagttggtggaaaaaaatcagccgcgagacgccggatctgctcaactttgaaaaaagtatgctgattaaagaaggcgcggaaaaaatcagcaaactggattacccgaatttctggcaccagggcaatctcaagctgcgtttgagctatcagtttgaaccgggcgcggatgctgacggcgtgaccgtccatattccgttgccgctacttaaccaggttgacgagagcggttttgaatggcagatcccggggctgcgccgtgaattagtgattgcgctgattaaatcgttgccaaaaccggtacgtcgcaactttgttccggcgccaaactatgctgaagcgtttttgggtcgcgtaacgccgctggagctgccgctgctggacgctctggagcgtgaactgcgccggatgaccggcgtcacggtcgaccgggaagactggcattgggatcaggtgcccgggcatctgaaaatcacgtttcgcgtggtgaatgacaaaaacaagaaactgcaggaagggcgttcgctcgccgagcttaaaaatgcgctgaaaggcaaagtgcaggagacgctctcggcggtggcggatgacggcatcgagcagagcgggctgcatatctggagtttcggcgagctgccggaaagctacgaacagaaacgcggtaattataaagtgaaggcgtggccagcgttagtggatgagcgtgacagcgtcgctatcaaattgtttgataatccgctggaacaacaacaggcgatgtggtgcggtttacgccgtctgctgttgctcaatattccttcaccgattaagtatctgcatgagaaattgccgaataaagccaagctggggctgtactttaacccgtacggcaaagtactggagttgattgatgactgtatcgcctgcggggtagataagctgatagatgccaacggcgggccggtttggagcgaagcaggtttcaccgcgctgcacgaaaaggttcgcgccgagctgaatgatactgtggtggatatcgcgaagcaggttgagcggatcctgacgaccgtattcaatatcaataagcgtctgaaagggcgggtggatatgagcatggcgttggggctttccgatatcaaggcgcagatgagcggtctggtataccgtggttttgtgactggcaacggctttaaacgtctcggcgatacgctgcgttatctgcaggcaattgaaaagcggctggagaaactggctgtcgatccgcaccgcgatcgggcgcaaatgctgaaagtcgaaagcgtccagcaggcgtggcaacaatggataaataaattgcctccagcgcgtcgcgaagatgatgatgttaaagagatccgttggatgattgaagaactgcgtgtcagttatttcgcccaacagctcggtacgccttatcctatttccgataagcgtattttacaggccatggatcagattacggcctaa

SEQ ID NO: 370269 - DNA, 606 bp, Salmonella enterica
atgagcaaggtattagttcttaaatccagtattctggcagggtactctcagtctggtcagttgactgactattttattgaacaatggcgcgaaaaacacgtcgcagatgaaattactgtccgcgatctggcggccaaccctgttccggtgctggatggcgagctggtgggcgcgatgcgtccgggcgatgcgcctttaacgccacgtcagcaggacgctctggcgctgtctgatgaactcattgctgaactgaaagcccacgacgtcatcgttattgcggcgccgatgtacaatttcaatatcccgacgcagctgaaaaactactttgatctgattgcccgcgccggtatcactttccgctataccgaaaaaggcccggaaggtctggtaaccggtaaacgcgcggtggttctctccagccgcggcggtatccataaagacaccccgacggatttgattgcgccttacctgaaagtgttccttggttttatcggtatcaccgacgtgaattttgtctttgccgaaggcatcgcctacgggccggaagtggcggctaaagctcaggccgatgctaaagccgcgattgacagcgtcgtggccgcttaa

SEQ ID NO: 370270 - DNA, 450 bp, Salmonella enterica
atgacgtctgaaaaattatctgctgcttgccattgtggcagcgtcgtgtttaccgttcaacttagcgatggctttcataccgccaggcgctgcaactgttcgttttgccggatgcgcggagcggtggcagtgtctgcgccgctatcgggtattaaagtgctaaaagggcaggataagcttaccgaatatcgcttcaatacgggcaaggcggtgcattttttctgttcggtatgcgggatatatacttttcatcagcgccgatccaatcccgatcaatatggggtcaatgtggcgtgcatcgaaaatgtgtcgccttttgatttcgcctgcgttgaagtcaatgatggggtaacgcatcccagcgatggcggcagtagcggcgtggtaggatatttgcgctacgaaccggagacgttgcctcccgtcgaaacgggaggcaaaaatatttaa

SEQ ID NO: 370271 - DNA, 324 bp, Salmonella enterica
atgaaaaagtatttaatgctatgggtgctgacgctgagcttgctcacaccttctgtgtgggccttaaccctggacgaagcgcgcacgcagggccgggtcggggaaacgctgaatggctatctggtggccttaaagaatgatgccgaaacccagaaactggtgcttgatattaatcatgcccgccgcgccagttatcagcagttagcggatagcaatcatcttcccgtggacgaggtggcgaagatggcagggcaaaaactggttgagcgcgccaggccgggagaatatgtccagggaattaatggcaaatggatgcgtaaataa

SEQ ID NO: 370272 - DNA, 192 bp, Salmonella enterica
atgaaaatgagtattgccatgctgtcagcgcttgcgtcatttatcgtggtgggctgcacgccacgtattgaagtcgccgcgccggaacagccgattaccatcaacatgaatgtaaagatcgagcatgaaatacatatcaaagtcgataaagatgttgaagaactcctgaaatcacgcagcgatctattctga

SEQ ID NO: 370273 - DNA, 2637 bp, Salmonella enterica
atgaagggtaaatataaagccgcccttgcgctactgttactgctgattcttatccctctgacgctactgatgaccctcgggctgtgggttcccactctggcgggaatttggctacccgtcggtacccgtatcgctctggaacaaagtccacgcctgacacgtcatgggttagtgattcccgatcttcgctatctggtcaatgattgttcgttagcgcatattacccaggcggaactgacgcatcccagccgttggttgctgaatattaaaagccttaaactggatgccgcatgcctggcgaaactgcccgctacggaagcttctcccgccgcgccgcgtacgctggcgcagtggcagtcaatgctgcccaatacctggattaacatcgataatgtcattctcgcgccctggccggaatggcagggcaagctggcgatctccatgacgccggtcattcagcagatacgttatcagggcgaaaaagtaaaatttcaagggcagctacgcggtcaggcattgacggtgagccaactggagatcgccgcgctggccaaccagcctcccgttagcctggcgggggaatttgtgttgccgctggtaccggatggcctgccggtcagcggtcatgcggcagcgaccttgcgtctgccgcaggaaccgtcgctggtggatgcggaactggagtggcgtgataacgccggacagctcatcgtgatggcgcgaggtaatcctgacccgattctcgatctcccctgggcggtaacgcgtcagcggcttaccatcagcgatggccgctggaactggccatatcagggattccccttgagcggacgtctggcttttaatatcgataactggcaagccgggctggataatgcgcaagtcagcggacgcctgaatattctgacccagggcgatgccggtaaagcgaacgctgtactgactatcggcccgggaaaactcagcatggatagcagtgagatgcctctacagcttaccggcgaggctaaacagaaggatttaatcttttatgccgtattgcccgctatgttccgcggcagtctggccgatccgcagctcacctttgcacctggcgcattgctacgctcgcgcgggcgggtgattgatgcgttagatattgatgaaattcgttggccgctggcgggcgttaaggtgacgccgcgcggcgttgatggccgattacaggctattttacgggcgcacgaaaatgagatgggcgatttcgttcttcatcttgatggcctggccaatgattttctccctgatgctggtcgctggcggtggcgctattgggggcaaggaagctttacgccaatgcgcgcccactgggatattgccggacagggcgaatggcatgataacaccatcaggttgaccagtttgtccaccggttttgatcagttgcactatggcgcaatgactgtcacatcgccaagactggcgctgaataaacctattgtctgggttcgcgacgccacaacgccgtcgctacagggcgcgctgtctctggtggcggggaaaaccgtatttaccagtgggagcgtgctgccgccttctacccttaattttagcgttgaagggcgagagccaaccctgttccagtttaaaggcgaccttcgggcgggggcgatagggccggtacggctgaatgggcgctgggatggcgaacgccttcgtggacaggcctggtggccgaagcagtcgcttatcgttttccagccgttgcttccaccggactggaaaatgacgctgcgcgaaggctcactgtatgcgcaggtggctttttccgccgcacaggggcaggggtttgaagcaggtggacacggcgtgttaaaaggcggcagcgcctggatgccggataacaaaatcaacggcgtcgatttcattctgccatttcgcttccacaacggcgcgtggcaattggggacgcgcgggcccatctcgctgcgtatcgccgggatagttaaccaggtcacggcgaaaaatatcaccgctgatttacagggcggttatccctggagcgagtcgaatccattactgctaagcgatgtcagcgtagacgtgctgggcggtcaaatcattatgaaacagttgcgaatgccgcagcacgacccggcgcttttgcgggtgcaaaatatttcatccagcgaattgattagcgccataaatccaaagcaattcgccatgtctggtccggtcagcggcgcgctgccgctgtggctgaacaatgaaaaatggataatcaaagatggctggcttacgaatcctgggccaatgacgttgcgtatcgataaagatactgcggatgcggtggtgaaggataatgtcacggcaggctcggcgatcaactggctacgttatatggagattacgcattcgtggacgaaaattaacgttgataacctgggcgtactaacgatgcaggcggctattaccggcaaaagccgggtagatggtaaaaccgcgatcgttaacttgaactatacccatgaagaaaatgtgtttacgctgtggcgcagtttgcgttttggcgacaatttacaggcatggcttgaacaaaatacagtgttgccgcaacctccttgccggaaagacaaggactgtgaggataaataa

SEQ ID NO: 370274 - DNA, 990 bp, Salmonella enterica
atgaaactcgccgtctatagtaccaaacagtatgacaagaaatatctacagcaagtgaacgaagcgttcggttttgaactggagttttttgattttctgctaaccgagaaaacggcgaaaaccgccaatggatgtgaagcagtttgtatcttcgtgaatgacgacgggagccgaccggtactggaagagctgaaaaaacacggcgtgaaatacatcgcgctgcgttgcgccggatttaataatgtcgacctggatgccgcaaaagagctcggtttgcaggtggtgcgcgtaccggcttattctccggaagccgtcgctgaacatgcgattggcatgatgatgacattgaaccgccgtattcaccgcgcttatcaacgcacccgcgacgctaacttttcccttgagggactgaccggctttaccatgcacggaaaaaccgctggcgtcattggtaccggtaaaatcggcgtcgccgcgctgcgtatcctgaaaggctttggaatgcgtttactggcgtttgatccctatcccagcaccgccgcgcttgatctcggcgtcgagtatgtggatctgcaaacgttgtttgccgaatcggatgtcatttccctgcactgcccgctcacgccggaaaactaccatttactgaaccatgcggcattcgaccaaatgaaaaatggcgttatggtcattaataccagtcgtggcgcgctgattgattcccaggcggctatcgaagctctgaagaatcagaaaatcggctcgctggggatggatgtgtatgaaaacgaacgcgacctgttctttgaagataagtcaaacgatgttatccaggatgatgttttccgccgtctgtcggcctgccataacgtactgtttacggggcaccaggcattcctgaccgcagaagcgctgatcagcatctctgaaaccacgttacaaaacttaagccagcttgagaagggcgaagcctgcccgaacgcgctgttctaa

SEQ ID NO: 370275 - DNA, 411 bp, Salmonella enterica
atgaagaaaagcgtcacgctggtcgccctgagcatcataatgacagggtgtgtgagcagtggaaaagtgtccgtcaaacgcgagcaactggagcaccaccgctttgttctggaaagcgtaaacggtaaaacggtcaccggcccggagctcagctttggcgaggacatgacggtatccggcaaaatgtgcaatcaattcaccggcgaaggaaaactgtcggacggcgaattaaaagtgaaaaatttagcgatgacccgaatgatgtgcgccgatccacagcttaacgcgctggacggcaccctcagcaagctcttcagcaagggcgcacaggtcgatttaaccgcgaaccaattaacgctggcgacggcagaaacaacgctaatgtataaactggcggatttagcgcactaa

SEQ ID NO: 370276 - DNA, 267 bp, Salmonella enterica
atgcgcgcagcgttttgggtgggatgtgccgcgttattattgtcggcttgcagtagcgaacctgttcagcaggcaaccgcggcacatgtttcgccagggatgaaagcggcgatgtccagcgccggcgaagcgaattgcgctatgattggcggttcgctttcagcggcccggcagcttgatggttcagtaattggtatgtgcgcgctacccaacggcaaacgttgtagcgaacagtcgcttgccgccggaagctgcgggagttattaa

SEQ ID NO: 370277 - DNA, 3525 bp, Salmonella enterica
atgcaaacaattgacggtaatggcgcagtagcgtcggtggcgttccgtaccagcgaggttatcgccatttacccgattacgcccagttcaacaatggctgaacaagcggatgcctgggccggcaatgggcttaaaaatgtctggggcgatacgccgcgtgtggtagagatgcagtcggaaggcggcgcgatcgccgccgttcacggtgcgttacaaaccggttcgctttctacgtcatttacatcatcgcaggggctgctgctgatgattccaacgctgtataaactggcggggcagctcacgccgtttgtactgcacgttgccgcgcgcactgtcgccacacacgcgctttctatttttggcgaccattccgatgtgatggcggtccgccagacaggctgcgcgatgttatgcgccgccagcgttcaggaagcgcaggattttgcgctgatcgcacacagggctacgctgaaaagccgcgttccgtttattcatttttttgatggcttccgtacatcgcatgaaatcaacaaaattataccgctaacgaatgaaaccattctgaacctgatgccgcaggcggagatcgacgctcaccgcgcccgcgcgctgaatccggaacatccggtgattcgtggaacttcagcgaatccggacacctacttccagtctcgcgaagcgaccaacccgtggtacaacgccgtttatgatcatgttgaagaggcgatgaaggcatttggcgacgctacgggccgtcagtaccagccatttgaatattatggccatccccaggctgaacgcgtcatcataatgatgggctccgccctcggcacctgcgaagaggtcgtggacgagctactgatacgcggagaaaaggtcggcgttctgaaagtccgtctgttccgccccttctccgccaaacatttgttacaggcattaccggaaaccgttcgcgctatcgccgtgctggatcgcaccaaagagcctggcgcccaggccgagccgctttatctggacgtgatgaccgcactggcggaggcctttaataatggcgagcgcgaaacgttgccgcgcaccattggcggccgttatgggctatcatccaaagagttcggcccggcgtgcgtactggcggtctttaatgaactcagccgtgcgaaacccaagccacggtttacggtgggcatttatgatgacgttactaacctctcgctgccattaccggaaaataccctgcccggcagcgctaaacttgaagcgttattttacggtctgggaagcgacggcagcgtatccgccacgaaaaataatattaaaattatcggtaattctacgccgtggtatgcgcaaggttatttcgtttatgactctaaaaaagctggcgggctcacggtatcgcacctgcgcgtcagcgaaaaacccattcgttccgcttacttaattgctcaggcggattttgtcggctgccatcaattacagtttatcgataaatatcagatggcggagcgtctgaagcccggcggtatctttctgcttaatacgccgtacagcgccgacgaggtctggtcgcgtctgccgcaagaagttcaggcggtgttgaatcagaaaaaggcgcgtttttacgtggttaacgcggcgaaaatcgcccgcgaatgtggacttggcgcccgcatcaataccgtcatgcaaatggctttcttccacctgacgcatattcttccgggcgatagcgccctggttgagctgcagggcgcgattgccaaaagctatagcagcaaaggacaggatctggttgagcgtaactggcaggcattggctctggcgcaggaatcgctggcggaagtgccgttgcaggcggttaatccgcatagcgcgcatcgcccgccggtcgtctccgacgccgcgccggatttcgtgaaaaccgttaccgccgccatgttggcgggcctcggcgacgcactgcctgtttccgccctgccgccggacggaacatggccaatgggcaccacccgctgggaaaaacgcaatatcgccgaagagattcctgtctggaaagaggaactgtgtacacaatgtaatcactgcgtcgccgcctgccctcactcggcgattcgtgcaaaagtcgtttccccgcaggcgatggagaacgcgccagccagtctgcattcgctggacgtgaagtcccgcgatatgcgcggccagaaatatgtgctgcaggtcgcgccggaagactgtactggctgtaatttatgcgtagaggtctgcccggctaaagatcggcaaaatccacagatcaaggctattaacatgatgtcgcgcctggagcatgtggaagaagagaaagtgaattatgactttttcctcgacttaccggaaatcgatcgcagcaaactggaacgaattgatatccgcacatcgcagcttattacgccgctgtttgaatattccggcgcctgttccggctgcggtgaaacgccgtatattaaactgctgactcagttatatggcgacagaatgttaatcgctaacgccacggggtgttcctctatttacggcggtaacttaccctctacgccttataccaccgatgccaacggacgcggcccggcgtgggcgaattcgctatttgaagataacgcggaatttggcctcggtttccgtctgagtgtggatcagcaccgggcgcgcgtcatgcgtttactggcgcaattcgccgatcgcattccggcggaattaaacgatgcgctgcatgccgaagcaacgcctgacgttcggcgtgaacaggtcgccgcattacgccaacatctgaaatcggttgcgggcgcagaggaactgttaaaggatgctgatgcgctggtagaaaaatcaatctggctgattggcggcgatggttgggcatacgacatcggctttggcggtttagaccatgtgttaagcctgacggagaatgtcaatattctggttctggatacgcagtgttattccaatactggcggccaggcgtcgaaggcgacgccgcttggcgccgtcactaagtttggcgaacatggcaagcgtaaagcccgtaaagatcttggcgtcagcatgatgatgtatggtcatgtttatgtcgcgcaaatttcgctgggcgcgcagttaaaccagacggtgaaagccatccaggaggccgaagcctggccaggaccgtcgctgatcattgcctatagcccctgtgaggaacatggttacgatctggcgctaagccatgaccagatgcgccagttaacggcgaccggtttctggccgttataccgctttgatccccgccgtgcggatgaaggcaagccgccgctggctctggactctcggccaccgtctgatgccctggcggaaacgttgcttaatgaacagcgtttccgtcgcctgaatgcgcaacagcctgaagtagctgaacaattatggcgagatgccgcattggatttgcaaaaacgctatgactttcttgccttgctggcaggaaaagcggaaaaacccggcgcagattaa

SEQ ID NO: 370278 - DNA, 1008 bp, Salmonella enterica
atgatttttaccaaaatcattaggggattcatcagtgctgtgtatcccgccattctggcgctgattggccactggttcccaaatgaggagcgcgccagggctatcgcctatttccagatgaacctggccgtcgcttctattattaccgggccgctttccggctggcttattgaaacctacggctggcgggagatgtttatcatcgaaggcttgctctctctgggactgctctttgtctggctacctttggtttccgatcacccgcatcaggcaaagtggctggatccgaaagagcgcgcctggatcgaacaaaaattgctggccgatcgcgcgttgagtattggcggagagcaaagcagcattcgcggcgtattaaaaagcatcaacctgtggaagcttgtcggtatctatttcttcgtacaggtcggcttctatggcttcgcgctatggatgccaaatctgattaaacacctgaccggcagcggcatgaccatcgttggggtactcactgcggcgccttacgttctgtgcattatcggtcagtattacatcgccaaatggtgtgataagacgatgaatcgccgcctttacacggctattcctctgctgggtttcgcggtctgcctcgccctctccttattactgaaagataacgtctggctcgcctacggcatgatggttatttgcgggttcttcctgcaagcctatgccggtccattctggacgctgccgccattactcttcgcccccaacgttctgggcggcgtgcgcggcacgatcaacgccctgggcaacattggcggctttatcggtccgtacctcgtcgggctgttaacggtgacgttctcgcaaacagcaggaatgaccgtactggttgccgccctgcttatcgccgttggactgcttttcagcttaccttctgttaccgctcgtcctgcaggtagcagtaacacacctaacacctcgacgccgggtgcgtcacttaaacaggaaggaatcgccaaatga

SEQ ID NO: 370279 - DNA, 1716 bp, Salmonella enterica
atgagccaaaaatgtcaacatgctcgcgacctgtggtcgcagctcgacgccctgcgtcttggaatgaattacagcaaagaagatgtcaataaactgcaggtcctggtggatgattgctatggcgaaagtcatccgggcagtttccatcttaaccaactgggcgatgaagccgtgctgggtgttcatgaaagcggcgggcgcgcggtccgtcaccatgtgacggatatctgcgacggctggggtcagggccacgatgggatgaactacatcctggcatctcgcgaagccattgccaacatggtcgaaattcatgcctcagtggtgccttatgatgccggtattctgatctcaagctgcgataaatctatcccggcgcatctgattgccgccgcacgcctgaacctgccgctgctgcatattcccggcggttctatgcgtccggcaccgaatatgagtacttctgacctcggcgggatcactgctaagttgaagaaaggcgaaatcggcattcagcaagtagaagccatgcagcaatgcggttgccccaccgccggagcctgccagtttatgggaacggccagtaccatgcagtgcatgtcagaggccttggggctgaccctgccaggcagcgctttgctgccatcgaccctggcggaaattcgccgcgttgccagaaccgcaggccaccaggcgctgtatctggcggagaaaaatatcaccacccataagatcctgactcctgcggcgtttgaaaatgctatcaaagtccatgctgctattggtggcagcaccaatgcgatgatccaccttccggccatcgctcatgaacttggatgggagctgaagcccgaactgtttgatcggatcaataacgaaatcccttatctgaccaatattcagcccagcggtgaatacgttaccgaaatgatgtggttcgctggcggcgtgccaatggtgcaatggtatctgcgcgattatctggatcttgatgttcttaccgtgactggccgtacgctcggcgacaacctggaaatgctccatcaatctggcttctttacccgtaaccacggttacctcaacaattacaaagtcagtccggaggaggtgatccgtaaaccagaaaatgccaccaaaaaagggtcgattgcggtactgaaaggcaacatcgcgcctgaaggagcggtcattaaatacgcggcctgtgcgccggatatgcaccaccataccggtcctgctcgggtctttaactccgaagaagacgctcagcaggccatcatccataaccatatcgaacccggcgacgtcattttcattcgctacgaaggcgcaaaaggctctggcgcaccggaaatgctgatgaccaccgatgccatcgtgtatgacaaacgcctcgacggaaaagtcgcattgattaccgacggtcgtttctctggagcgaccagcgggccatgtgtcggacacgtctcgccagaagccgctgatggcgggccgattgccctggtggaagatggtgatttaatcgaaatggatgtgaaaggccgcaagctcaatattgtagggatcgacggggtgtttaaaacagaagaggaaatacgccgctgccttgaagagcgtcgagcaagctggaagaaacctgattattcaaaccgtcacggcgtctttaaacagttcaccgctaatgcaacatcattaatggccggagcctggcttaaataa

SEQ ID NO: 370280 - DNA, 906 bp, Salmonella enterica
atgactcagattacgaaatttcacggcgtatttccgccagttccgaccattgttaatgcgcagggagagttagataaagtcggcatggcaaccttgctggatcatcttattgcaagcaaggtcaatggcgtattactgctgggcagcgggggggaattttgccatatgaccaatgcgctgcgtctggaaaccgcagagttttgcgtccgtcatattaaccgccgtattccagtactattaggtattagcagcaccagcacgcaggaagtgattgagtatggtcagcatgccgaccgactcgaagtcgatgccgtgctggtactcaatccctactatgccagattgaccgatgagtatatttatcatcatttcaaaaccgtggctaataacataaaaagcccggtcattctctacaactttccagcattgacgggacaggaccttagcgttgatttaattacccggctggcgcaggatcaccccaatattatcggcattaaggataccgttgataatatcagccatattcgtgaaatcatcaataatgtcaggccagtgcgtccggacttcgttattttctccggctatgatgaatatatgatggatacacttatcttaggcggcaacggcgggatcccagcgacagcgaactttgcgccgcagctaacctgcgggatctaccgcgcgtggtgtgaaaaagagtatgagacaatgttcggattacagcgccggctgtccgcgctttccactatttacagcctggattcacctttcttcgggataatcaaaaaggcaattcagcttagcggagtcgatatttcaactcatgtaatgccccccgttttgccggcaaatgaagaacatatttcgaatttgaagcagatcttacagcgtgcgggactttaa

SEQ ID NO: 370281 - DNA, 756 bp, Salmonella enterica
atgaaaaagattacgacatctattccggctctcgataaaattatgcgcgtatttgcttaccttctggagtgcgatggcgcaacgtttacccagatccatcaaaattcagggattgcgaaaagcagtacctcatctttgctcaacggcatggtggagcatgggttattacgccaggaaaaagacaagtattatctggggctacgcctgtatgaattaggtaataaagcggcggaacagtatgacattaaaaaaatcgcgttaccgattcttgaagagattcgcgataacaccggcctgacctgccatcttggcgttctggagggcgatgcccccatttatcttctgaaagtcgaaagcccacaggctattgtgattcgaagctgggagggcaagcgcctctcattacatagctcagggctggggaaggtgctgattgcatggcttagcggggaagagctggaggagttgctgcctccagatcagatattaacgcgttttacggatacgacgatcacagatgtgaatatccttaagcaggagttagcaggaattcgccgtcgcggctggggttatgataacgaagaagactcccttggcgtgcgctgcattgcggtgccggtattcaatacgcaggggaaagtgatcgccgccctgagcgtatccggcgttacgttccagatccccgatgataaacgcgagtcgcttgctacgctgatgatggatgccagccgtagcctgacgcgtctgatgtgctga

SEQ ID NO: 370282 - DNA, 2448 bp, Salmonella enterica
atgaatgctccgtttacttatgcatcgcccacactcagcgttgaggcgcttaagcattctattgcctataagctgatgtttacgattggtaaagacccggtcattgccaataaacacgaatggctgaacgccacgttgttcgcggtgcgcgatcgtctggtggagcgctggctgcgttctaatcgagcccaattatcgcaggaaacccggcaggtttattacctgtcgatggagtttttgattggtcgtactctctctaacgcgctgctctcgttgggcatttatgacgacgttaaaggcgcgctggaggccatgggcttagatctcgaagagctgatcgatgaagagaatgacccagggcttggcaacggcggcttaggacggctggcggcttgcttcctggactcgctggcgacgctaggattaccgggccgcgggtacggcattcgctacgattacggcatgtttaagcagaatattgtcgacgggcggcaaaaagagtctccggattactggctggaatatggcaacccgtgggagttcaagcgccacaatacacgctataaggtgctttttggcgggcgcattcagcaggaaggtaaaaaagcgcgctggattgagacggaagagattctggccgtcgcgtatgatcagatcatccccggttacgacaccgacgccactaacacactgcggctgtggaatgcgcaggccagtagtgaaatcaacctcggtaaattcaaccagggcgactactttgcggcggtggaagataaaaaccactctgagaacgtttcacgggtgctctacccggacgattccacctattccggacgagagctacgcctgcgccaggagtattttctggtctcggcgacggtgcaggatatcctgcaccgtcattatcaactgcataaaacctatgagaatctggcggataaaatcgccattcacctcaatgatacgcatccggtgctgtcaattcctgagctgatgcgcctgctgattgatgaacataaatttagctgggacgacgcgtttgaggtgtgctgtcaggtcttctcttacaccaaccatacgttgatgagcgaggcgctggaaacctggcccgtcgatatgctggggaaaattctgccccgtcacctgcagattatcttcgagattaacgactatttccttaaaacgttgcaggagcaatatcccaacgataccagcctgcttggacgcgcgtcgattattgatgagtcgaacggccgccgggtacggatggcctggctggcggtggtggtcagccataaagtcaacggcgtttctgaactccattccaacctgatggtgcagtcgctgttcgcggattttgcgaagatttttccgacccgtttttgtaacgtcactaacggcgttacgccgcgccgctggctggcgctggcaaacccgccgctttctgacgtgctggatgagaatattggtcgtacctggcgtaccgatcttagtcagctcagcgagctgaagcagcattgtgattatccgctggtcaatcatgcggtgcgtcaggcgaagctggaaaataaaaaacggctggcggtagtgatagcgcaacaactgaatgtggtggtgaaccctaaagcgttattcgacgtgcagattaagcgtattcacgaatacaagcggcagttgatgaacgtactgcatgtcattacccgctataaccgcattaaagaaaatccggaggccgactgggtgccgcgggtgaatatttttgccggtaaggcggcttccgcctattacatggcaaaacacattattcatctgatcaacgacgtggcgaaagtgattaacaacgatccgcagattggcgacaagctgaaagtagtgtttatcccgaactacagcgtcagcctggcgcaggtgatcattcccgctgccgacctgtctgagcagatttcgctggcagggacagaagcttccggcaccagtaatatgaaatttgccctgaacggcgcgctcaccattggcacgctggatggcgcgaacgtagagatgcaggagcatgtcggcgaggagaatatctttatcttcggtaatactgcagaagaggtggaagcgttgcgcaggcagggttataagcctcgcgactattatgaaaaagatgaagagctacatcaggtactgacgcagattggtagcggcgtctttaatccggaagagccaggccgttaccgcgatctggtagattcgctgattaactttggcgatcactatcaggtgctggcggactaccgcagctacgtggactgccaggataaggtggatgagttgtatcgtcgcccggaagaatggacgacgaaagcgatgctcaacattgccaatatgggctacttctcatcggacagaaccatcaaagagtatgccgaaaatatctggcatattgatccggtgcggttgtag

SEQ ID NO: 370283 - DNA, 1434 bp, Salmonella enterica
atgcaggttttacatgtatgttcagagatgttccccctgctgaagactggggggctggcggatgtgataggcgcgttgcctgcggcacaaattgcggatggtgttgatgttcgcgttctgcttccagggtttcccgatatccgtcgggggatacccgacgcgcatgtggtgagccgccgcgatactttcgcaggtaagatatcgctgctgttcgggcattataacggcgtgggcatttatctgatcgacgcgccgcatctgtacgagcgtccaggcagtccctatcacgatacgaatttatatgcctataccgataacgtgctgcgctttgccctgttagggtgggtcggctgtgaaatggcctgcggacttgatccattctggcgccccgacgtggtgcacgcccatgactggcacgccgggctggcgcccgcctatctggcggcgcgcgggcggccggcgaaatcggtctttaccgtacacaacctggcctatcaaggcatgttttatgcaaagcatatggatgacatcgaactgccgtggtcattctttaatatgcatgggctggagttcaacggacaactctcctttttgaaggccggtttgtactatgccgaccatattacggcggtgagcccgacctatgcgcgtgaaattaccgaaccgcagtttgcttatggtatggaaggcctgctgcgtcagcgtcatctggaagggcgcttgtccggcatactgaacggcgtggatgagaagatctggaacccggaatccgatctgctgctggcgtcgcgctacacgcgcgataccctggaagagaaggcggaaaacaaacgtcagctacaaattgcgatggggttgaaggttaacgacaaagtgccgctgttcgccgtggtaagccgtctgaccaaccagaaaggtctggatctggtgctggaggcgttaccggggctgctggagcagggcgggcagttggcgctactcggcgcgggcgatccggtgcttcaggaagggttcctcgcggcggcggcggaacacccagggcaggttggcgtacagatcggctatcacgaagctttctcgcatcgcattatgggcggcgcggacgttattctggtgcccagtcgtttcgaaccgtgcggcttaacgcagttatatggcttaaagtatggcacgctgcctctggtgcggcgtaccggggggttggccgatacggtctccgacagttcgttggaaaatctggcggacggtatcgccagcggttttgtcttcgaagacagtaatgcctggtcgttgctacgcgcgattcggcgtgcttttgtgttgtggtcacggccttcgctttggcggtttgtacaacggcaggcgatggcgatggattttagctggcaagttgccgcgaaatcataccgcgagctgtactatcgcttgaaatag

SEQ ID NO: 370284 - DNA, 1296 bp, Salmonella enterica
atggtgagtttagagaagaacgatcgtgtaatgttggcgcgccagctgccattgaaatctgttgccctaatcctggccggcggccgtggcacgcgtctaaaagatttaacgaacaaacgcgccaaaccagccgtccactttggtgggaagttccgcatcatcgatttcgccttatctaattgtctgaactccgggattcgccgtatcggcgtgatcactcagtatcagtcccatacgctggtgcagcatattcagcgcggctggtcactgtttagcgaagagatgaacgaatttgtcgatctgctgccagctcaacagcgtatgaagggcgaaaactggtatcgcggcacggcagacgcggtgacccagaacctggatattattcgtcgctataaagcggaatatgtcgtcatcctggcaggcgatcatatctacaagcaggactactcgcgtatgttgatcgatcacgttgaaaagggcgcgcgttgcacggtggcctgtatgccggtgccgatcaaagaggcgacggcgttcggcgtgatggcggtcgatgaaagcgacaagattattgattttgtcgaaaaaccggcgaatccccccgcaatgcctggtgacgccagcaaatcgctggccagtatgggcatttacgtttttgacgccgattacctgtatgaattgctggcggcagacgataaagatgacgcttccagccacgatttcggtaaagacattatccccaaaatcacccgcgaaggtatggcttacgcgcatcctttcccgctctcctgcgtgcagtccgatccgcaagccgaaccgtactggcgcgatgtaggtacgctggaagcttactggaaggcgaacctggatttagcctcggtgacgccggagctggatatgtatgaccagaactggcctatccgtacgcatatggaatcgctaccgcctgcgaaattcgtgcaggaccgctccggtagccacggtatgacgctgaactcgctggtctccggcggctgcattatctccggttcggtggtggtgcaatctgtgctcttcccacgggtgagaataaattctttttgtaatattgattcggcagtgttgttacctgaggtttgggtagggcgctcctgccgtttacgtcgctgtgttattgaccgtgcctgtattatcccggaaggcatggtgattggtgaaaatgcggaagaggacgctcgtcgtttctaccgttcagaagaaggtattgtactggtcacgcgtgaaatgctgcgcaaactgcaggtcaaacaggagcgataa

SEQ ID NO: 370285 - DNA, 1977 bp, Salmonella enterica
atgacgcagcttgcgatcggcgaagcaacgccgcatggcgcaacgtatgacggtcatggcgtgaatttcacgctcttttccgcccatgcggagcgcgtagagctgtgcgtttttgattcccgagggaatgagcgtcgctatgacctgccaggacgtcgcggcgatgtctggcatggttatctggccggcgccaggccaggtttgcgctatggctatcgcgtacatggcccgtggcagccagcgcaggggcatcggtttaatccggtgaagttactgcttgatccttatgcgcgccgggtcgagggcgaactaaaagatcatccgctgttgcacggcggacacgatgaaccggactaccgcgataacgcggcggtggcgccgaaaagtgtggtaatcagcgaccattatgactgggaagatgacgccgcgccgcgcacgccgtggggaaaaacggtcatctatgaagcgcatgtcaaagggcttacctatctgcatccggaactcccccaggagatacgcggcacctataaagcgctcggtcatccggtcatggtggcgtacttcaaacagcttggcattacggcgctggaactgttgccggtggcgcagtttgccagcgagccgcgcctgcaacgtatggggctgaccaattattggggttataacccgatggcgatgttcgcgctgcatcccgcctgggccagttcgcccgagatggcgctggacgagtttcgcgatgcggtgaaagcgctgcatcgcgcggggattgaggtcattctggacatcgtattaaaccatagcgccgagctggatctggacggtccaaccttctccctgcgcggaattgataaccgtagctattattggataagggacgatggcgattatcacaactggacggggtgcggcaacacgctcaatttaagccatcccggcgtggtggaatacgcgtgcgagtgtttgcgctattgggtggaaacctgtcatgtcgatggttttcgttttgatttggcgtccgtcatggggcgcacgccgacgtttcgccaggatgcgccgctgtttgccgcgattaaagcgtgtcctgtgttatcaacggtcaagctgattgctgaaccgtgggatattggcgagggcggctatcaggtcgggaattttccgccaccgtttgccgagtggaacgatcattttcgcgatgcggcccgccgattctggttgccgcgtaacctgacgaccggggagtttgcctgtcgtttcgccgcttccagcgatgtgtttaaacgcaatggccgcgcgcccggcgcctctgtcaatctgctcacggcgcatgacggttttacgctccgggactgcgtctgtttcaatcagaaacacaatgaggcgaacggtgaggaaaatcgcgacggcaccaacagcaattacagcgacaatcatggtaaagaaggattaggcggtccgcttgatttaatggagcggcggcgcgacagcattcatgccctgctggcgacgctactgctctctcagggaacgccgatgctgctggcaggcgatgaacacggccatagccagcacggcaacaataacgcctactgtcaggataatgccttaacctggctggactggcagcaggcaaatcgtgggttaaccacgtttaccgccgcgctgattcgtttgcgtcagcagataccggctttaaccggcaatagctggtgggaagagggcgatggcaacgtgcgttggctgaataaaaacgcgcaacccttgagtgcggatgagtggcaaaacgggcctaagctgatgcaaattctgttgtcggaccgttttctgattgcgataaatgccacgcttgaggtgacagatatagttttacccgaaggggaatggcgcgccgttcccccattcgctggagaggataatccggtgataacggcggtctggcagggacctgcgcatggactgtgtgtgttccagagaggataa

SEQ ID NO: 370286 - DNA, 2187 bp, Salmonella enterica
atgtccagtcgtatcgatagagacgtgattaatgcgctaattgcaggacattttgcggaccctttttccgtactcggaatgcaccagacccaagccggactagaagtccgcgccctattacctgacgccaccgacgtatgggtgattgaacccaaaaccggacgtaaagtcggcaaactggaatgtctcgacgctcgcggttttttctgcggcgttttaccccgacgtaaaaatttctttcgctatcagctcgccgtgacctggcacggacagcagaatctcatcgacgatccttaccgttttggtccattaatacaggaaatggatgcctggctattgtcggaaggcacccacctgcgtccttatgaaacgctgggcgcgcacgccgatacgatggatggcgtcaccggcacccgtttctccgtttgggcgcctaatgctcgtcgcgtttcggttgtcgggcaattcaactattgggatgggcgtcgccacccgatgcgtctgcgcaaagagagcggtatttgggagctgtttatccccggcgcgcataatggacaactgtataaattcgagctgcttgatgcgaacggtaatctgcgcattaaagccgatccctatgcttttgaggcgcagatgcgtccggaaacggcgtcgatgatttgcggactgccggagaaagtgacgccaagcgaagaacgacaaaaagccaatcagtttgatgcgccgatctcgatttatgaggtgcatttaggttcatggcgccgccatacggataacaatttctggctgagctatcgtgagctggcggatcagcttgtgccttacgccaaatggatgggctttacgcaccttgaactcttgccggtcaacgaacatccgtttgacggcagttggggctaccagccgaccggcctctacgcgccgacccgccgctttggtacgcgggacgacttccgctatttcatcaatgcggcccatgcggcgggccttaacgtcattctcgactgggtgccgggccatttcccgtccgatgaatttagcctcgcggagtttgacggcacccacctctatgagcacagcgacccgcgcgagggctatcaccaggactggaatacgctgatctacaactatggtcgtcgtgaagtcagtaattatctggtgggtaacgccctgtactggatggagcgttttgggattgatgcgctgcgtgtcgatgcggtggcctctatgatctaccgcgactacagccgcaaagagggcgagtggataccgaacgagttcggcggtcgtgaaaacctggaagccattgagtttctgcgcaataccaaccgcattattggcgagcaggtgcccggcgcggtcagcatggcggaagagtcgacagacttctctggcgtgacgcgtccaccggaaacgggcggcctggggttctggtacaagtggaacctgggctggatgcacgacacgctggactacatgaagctggacccggtgtaccgccagtatcatcacgacaagctgacctttggtatgttgtacaaccataccgaaaactttgttctgccgctgtcgcacgatgaggtggttcacggcaagaaatccattctcgatcgtatgccgggcgatgcgtggcaaaaattcgccaacctgcgcgcctattatggctggatgtgggccttccccggcaagaaactgctgtttatggggaatgagtttgcccagggacgcgagtggaaccatgacgccagcctcgactggcacctgctggaggggggcgataactggcaccacggggttcagagtctggtgcgcgatctcaaccacacctatcgccaccataaagcgttgcatgagctggattttgatgcttacggctttgagtggctggtggtcgatgacaatgaacgctcggtactgatttttgtacgccgtgataaagccggtaacgagatcatcgtcgccagcaactttacgcccgttcctcgccacgactaccgctttggcatcaaccagccgggacgctggcgtgaaattctcaatactgattcgatgcattatcacggtagcaacaccggcaatggcggcgtggtgcacagcgatgagatcgaaagccatggccgtcagcactctcttaacctgacgttaccgccgttggcgacgatctggctgatgcgggagggggaatga

SEQ ID NO: 370287 - DNA, 1107 bp, Salmonella enterica
atgaaaaatgttggttttatcggctggcgcggaatggtcggctctgttctcatgcaacgcatggtagaggagcgcgatttcgacgctattcgccctgttttcttttctacctcccagtttggacaggcggcgcccaccttcggcgacacctccaccggcacgctacaggacgcttttgatctggatgcgctaaaagcgctcgatatcatcgtgacctgccagggcggcgattataccaacgaaatttatccaaagctgcgcgaaagcggatggcagggttactggattgacgcggcttctacgctgcgcatgaaagatgatgccattattattctcgacccggttaaccaggacgtgattaccgacggcctgaacaatggcgtgaagacctttgtgggcggtaactgtaccgttagcctgatgttgatgtcgctgggcggtctctttgcccataatctcgttgactgggtatccgtcgcgacctatcaggccgcctccggcggcggcgcgcgccatatgcgcgagctgttaacccagatgggtcagttgtatggccatgtcgccgatgaactggcgacgccgtcttccgcaattcttgatattgaacgcaaagttacggcattgacccgcagcggcgagctgccggttgataactttggcgtaccgctggcgggaagcctgatcccctggatcgacaaacagctcgataacggccagagccgcgaagagtggaaaggccaggcggaaaccaacaagattctcaatactgcctctgtgattccggttgatggtttgtgcgtgcgcgtcggcgcgctgcgctgtcacagccaggcgttcaccatcaagctgaaaaaagaggtatccattccgacggtggaagaactgctggcggcacataatccgtgggcgaaagtggtgccgaacgatcgtgatatcactatgcgcgaattaaccccggcggcggtgaccggcacgttgactacgccggttggtcgtctgcgtaagctgaacatggggccagagttcttgtcggcgtttaccgtaggcgaccagttgttatggggcgccgccgagccgctgcgtcgaatgctgcgccagttggcgtag

SEQ ID NO: 370288 - DNA, 480 bp, Salmonella enterica
atgatagcgaagccatcagtaatgcgacttatcctgccttaccgcgcaagcagaaagtccagtggcgattatcagggaatttgcgttaggaagggaatcatttccgtcgctgttttattgatcctaattatggatcagcgtagaaatttgcctgcttttatgcgcgtactgaaacatggcgaggcaaaatgtcgttgggcgattgccatgcacacctcaataaaaaaaccgggtagcgattacgccttacccggcttacggtatcgatatgtgcccgtttccaggcccggtaagcacagcgccaccgggcaacaagactcagctcagcagttggaaagcaatcatcccgacaatcgcgccgaccgtgccgaggatagtttccatcatcgtccaggtcttcagcgtctgcgcttcggtcgcgccggtaaatttaccgaacagccagaagccggcgtcgttaacatgagaaaccacaattga

SEQ ID NO: 370289 - DNA, 1341 bp, Salmonella enterica
gtgagtacattaacactggttttaaccgccgtcggttccgtcttactgctgctgtttctcgtgatgaaggcgcgtatgcacgccttcgtcgcgttaatggtcgtctcaatgggcgcggggcttttttcagggatgccgcttgataaaatcgccgcgaccatggaaaaagggatgggcggcacgctgggcttcctggcgattgtggtcgcgctgggggcgatgttcggcaagattctgcatgaaaccggcgcggtcgatcagatagccgtgaaaatgcttaaatcctttggtcataaccgcgcgcactatgcgattggcctggccgggctgatttgtgcgcttccgctgttctttgaagtggcgattgtgctgctgataagtgtggcattctctatggcgcgtcataccggcacaaacctggtgaagctggtcattccgctgtttgcgggcgtggcggcagccgcggcgtttttgttgcctgggcctgcgccgatgctgctggcttcccagatgcatgctgatttcggctggatgatcctgattgggctgtgcgccgccattcctggcatgattatcgccgggccgctgtgggggaattttatcagccgttatgttgagctgcgtattcctgacgacattaccgagccgcatctgggtgaaggtaaaatgccttctttcggcttcagcctgtcgctgattctgctgccgttggtgctggtagggctgaaaacgatcgccgcgcgttttgtgccggaaggttccaccgcttacgaatggtttgagtttatcggtcaccccttcactgcgattctggtcgcttgtctggtagcgatttacggcctggcgatgcgccaggggatgccgaaagacaaagtgatggaaatctgcggccacgcgctacaaccggcgggcattattctgctggtgattggcgcaggcggggtatttaaacaggtactggttgactccggcgtcggcccggcgctgggcgaagcgttaaccggcatgggactgccgattgccattacctgctttgtgctggcggcggcggtgcgcatcattcagggttccgcgaccgtggcgtgtttaaccgcggtcggtctggtgatgccggtcattgagcaactgaatttctccggcgcgcagatggcggcgctctctatctgtatcgccggcggttcaattgtggtttctcatgttaacgacgccggcttctggctgttcggtaaatttaccggcgcgaccgaagcgcagacgctgaagacctggacgatgatggaaactatcctcggcacggtcggcgcgattgtcgggatgattgctttccaactgctgagctga

SEQ ID NO: 370290 - DNA, 534 bp, Salmonella enterica
ttgagcacgactaatcatgatcaccacgtttacgttctgatgggcgtatcaggcagcggtaaatccgctgtcgcaagcgccgtggcgcatcagcttcatgccgcgtttctggacggcgattttctgcatccgcgctgcaatattgaaaaaatggcttccggcgagccgttgaatgatgatgaccgcaaaccgtggttacaggcgctgaacgacgccgctttcgcgatgcagcgaaccaataaaatctcgctgatcgtctgttccgcactgaaaaaacattatcgtgacctgctgcgcgagggaaacccgaacctctcctttatctacctgaaaggtgatttcgacgtcattgaaagccgtctgaaagcgcgcaaaggtcatttcttcaaaacccagatgctggtgacgcagtttgaaacgctgcaagagccgggtgccgacgaacgcgatgttctggtggtggatatcgaccagccgctggaagacgtcgtggcgagcaccattgaggtcatcaataaaggcagtacgctgtga

SEQ ID NO: 370291 - DNA, 996 bp, Salmonella enterica
atgaaaaagaaaagacccgtacttcaggatgtagccgaccgcgtgggcgtgaccaaaatgacggtcagccgttttttgcgtaatccggagcaggtctccgtcgcgctgcggggtaaaattgcggctgcgcttgatgagctcgggtacattcctaatcgcgcgcctgacattctttccaacgccaccagccgcgccattggcgttctgctgccgtctttaaccaaccaggtctttgcggaagtgttacgcggcattgaggctgtcaccgacgcgcatggttatcaaaccatgctggcgcactacggctataaaccggagatggagcaggagcgcctggaatcgatgctctcctggaatatcgacggcctgatcctcactgagcgtacccatacgccgcgcaccttaaaaatgatcgaagtcgccgggattccggtggtggaactgatggacagccagtcgccgtgtctcgatattgccgtcggttttgacaacttcgaggccgcccgtcagatgaccgccgcgattatcgcgcgtggtcatcgtcatatcgcctatctgggggcgcgcctcgacgaacgtactatcatcaagcagaagggctatgaacaggcgatgcgggactcaggcctggttccttacagtgtgatgatggagcaatcttcatcctactcttccggtatcgaactcatgcgccaggcgcgacgcgaatacccacagcttgacggtattttttgcaccaacgatgacctggcggtgggggcggccttcgaatgccagcgcctggggctaaaaatcccggacgacatggcgatcgccgggttccacggtcatgacatcggccaggtgatggaaccgcgtctggcaagcgtcctgacgccgcgcgagcgaatgggcagcattggcgcggaacgtttgttagcccgcattcgcggcgaaacggtcacgccgaaaatgttagatttaggtttcaccttgtcaccgggcggatctatttag

SEQ ID NO: 370292 - DNA, 696 bp, Salmonella enterica
atgatctacttacgcaaagcaaacgaccgcggtcatgcgaatcatggctggcttgactcctggcatactttttcttttgccgattattacgatccgaactttatggggttctcggcgctgcgtgtgattaacgacgatgtgatcgacgcaggccaggggttcggcacgcatccgcataaagacatggaaattttgacctatgtgctggaaggtgccgtagaacaccaggacagtatgggcaataaagaacaggttccggccggtgaattccagattatgagcgccgggaccggcgttcgccactccgagtacaacccgagcaaaacggatcgtctgcggctgtaccagatctggatcattccgcaagaaacaggcatcacgccgcgctacgaacagcgccgcttcgacgccgcgcagggcaagcaactggtgctttcgccagatgctcgcgatggttcgctgaaggtccaccaggatatggagctgtaccgctgggcgctgctcaaagatgagcagtcggtgcatcagattgccgctgagcgccgcgtctggatccaggtggtaaaaggtaacgtgaccattaacggtactaaagccaccaccagcgacggcctggcgatttgggatgagcaggcaatctcgattcatgccgatagcgacagtgaagtgttgttgtttgacttgccgccagtctaa

SEQ ID NO: 370293 - DNA, 1038 bp, Salmonella enterica
atgaccttacactgcgcatttattggattcggcaaaagtaccacccgttaccatctcccctatgttctgaatcgtaaagatacctggcatgtcgcgcatattttccgtcgtcacgctaaaccggaagagcaggcgccacagtattcacatattcacttcaccaacgatctggatgaggtgttgggcgatccgcaggtaaagctggtgatcgtctgtacgcatgctgacagccatttcgaatacgccaaacgcgcgctggaagcgggtaaaaatgtgctggttgagaaacctttcacgccgaagctggcggaggcaaaagtgttgttcgacctggcgcgaagcaaaggactgaccgttacgccgtatcagaatcgtcgttttgattcctgttttctcacggctaaaaaagcgatagagagcggcaaactgggcaagattgtcgaaattgaaagccatttcgattattaccgcccggtagcagaaaccaaaccgggcctgccgcaggacggcgcattctatggacttggcgtccacaccatggatcaaattatttcgctatttggccgcccggatcatgtcgcgtatgacattcgtagcctgcgtaataaagcgaatccggatgacacctttgaagcgcaactgttttatggcgatttgaaggctatcgttaaaaccagccatctggtgaaaatcgactatccgaagtttattgttcacggcaccaaaggttcgtttgtgaaatacggtatcgatcaacaagaaaccagcctgaaagcgaacattatgcccggtgaacccggtttcgccgctgacgaatccgtcggcgtgctggaatatgttaacgatgacggcgtgaccgtgaaagaagaggtgaaaccggaaacgggtgactatggtcgcgtctatgatgcgctgtaccagacgttgaccgtcggtacgcctaattacgtcaaggaatctgaagttcttaccaacctggaaatcctcgagcgtgctttcgaacaggcatcgcctgcgacgataaccctcgctaaatag

SEQ ID NO: 370294 - DNA, 489 bp, Salmonella enterica
atgagtgaaatagtgatacgccacgctgaaccgaaagattacgacgccattcgtcagatccacgcccagccggaggtgtaccacaacacgctacaggttcctcatccttccctcgaaatgtggcaggcgcggctaaccgagcaagccggggttaaacaactggttgcctgcattgacgatattgtcgttggccatctttctattcaggtcacccaacgtccccgtcgcagccacgtggccgattttggtatctgcgtggatgcccggtggcacaatcgtggcattgccagcgcgctgatccacaccatgatcgacatgtgcgacaactggctgcgcgtcgagcgtattgagttaacggtgtttgttgataacgagcccgcggtggcggtgtataagaagtacggctttgaaatcgaaggcaccggtaagaaatacggcctgcgcaacggtgagtacgttgatgcgtactttatggcgcgcgtgaaatag

SEQ ID NO: 370295 - DNA, 1215 bp, Salmonella enterica
atgaaatttgaacgccatcatagaatattgaaggaactcagtatttcgggagttgtaaaagtttcaaatctggcgaaaagtctcaaggtaacaaaggaaactattcgttcagatctcaatgaacttgccggacagggatatcttactcgctgtcatggtggtgcatttattacccttgattctcttgataacgtcgcaaaaaatgaaattgcttatgtgctggaaaaatatgaatcagcgcagaaaataaaaaaaggtctctctgccatgaaaaataatgtatgtgttattggctcgttcaatgttgatatcatcagttatctaccgagattaccctcaacgggagaatcattgctggccgataaatttattttttcacccggcggtaagggatgtaatcaggcattagcagcaagctatgccgactctgatgtgcattttattactaaagtcggctcagatcattttagtgattacgccattaattttataaactcatcaaaaatccataaaagtgttatctaccagaccaaagaaacacaaacaggtacagcaaccatcatggtgaatggagataccggagataacgtcatcgctatctaccctggcgccaacatgacaatttcccctgatgaaatcaccattcagaaagaagccattgttcattcagatattgttcttgtccaactggagacgaattacgaagcgctgcagcaaacaattcgtctcgcacaaaaaaatgacataccggtcatcatcaatccagcgccgtacaatgacatggttaacaccatcattgataacattgactatattacgccaaatgaaacggaagcaggcctgctggccaatatggcggttaatgatatcgaatcagccaaatgcgcggccaaaattattcaccagaaaggcgtcaaaaataccattattacgttaggtagcaaaggttcgcttgcttatgatggcacacaattcatctattccccggcatttccggcggttgtaaaaaatactgcgggagcgggtgacgctttcaatggcgcactcgcatctggtcttgcaaaaggaaagtcactggcatccgcattgtgctacgccagcgcatttgcctcacttgcggttgaaacgcctaatgcctctgatatgccggaaaacgactccgttcttcatcgtattcagggttcacattacaaacaaactatctctactcactaa

SEQ ID NO: 370296 - DNA, 762 bp, Salmonella enterica
atgaacaatacgcagaaaaaactaaaggtgctctttattggagaatcctggcatattcatatgattcattcaaaaggttatgacagtttcacctccagtaaatatgaagaaggcgctacatggttactggaatgcttgaggaaaggcggcgttgatattgattacatgcctgcccacacggtacaaattgcctttccagagagtattgacgaattaaaccgttacgatgtgattgttattagcgacattggtagtaataccttcctgttgcaaaacgagacattttatcagctaaaaataaaaccaaacgctctggagtccattaaagagtacgtcaaaaatggcggtggactactcatgattggtggctatctgtcgttcatgggtattgaggcaaaagccaattataagaacaccgttcttgctgaggttctgccagttattatgcttgatggcgatgaccgggtagaaaagcccgatggtatctgtgctgaggctgtctcacctgaacatcctgttgttaacgggttctcagattatccggtatttcttggatataaccaggccgtcgccagagacgatgccgatgtcgtattaacaataaataatgacccattgttagtgttcggtgaataccaacagggtaaaaccgcctgctttatgagtgactgctccccacactggggaacccagcagtttatgtcatggccgttttataccgacctgtgggtcaacacacttcaattcatcgccagaaaataa

SEQ ID NO: 370297 - DNA, 972 bp, Salmonella enterica
atgaacaagaataagtactcaacccccttactgatgcttgccaccatcttagccggtatgctttccccgatgcagtctgccgttaatgggcagttaggacattggttacaagacggtaatgcttgcgcagtaatctcgtttgccagcggtctggtcgtcatgttttttattattattgcgcgcaaagaaacacgccagcaattcgcctcaatccctactctgattaaaaagagaaaaatcccgctatggaattggtttgcaggattatgcggggcgatggtcgtattttctgaaggcgcatccgccagcgcgctgggcgttgccacctttcaaacggcattaatttccgctctgcttctttccggcctgctgtgcgaccgttttggcatcggtgtggaggagaagaaatattttacgccatggcgcattactggcgcattattcgccgttatcgccaccatttttgtcgtgtcgccacagtggcactcaacctcgtttatcctgctcgctatcctcccctttttggcagggttactcgctggctggcagcctgcgggaaatgcgaaagtcgccgaggcaacgggctccatgctggtgtccattacatggaacttcatcgtcggcttttgtgtcctgggcgcagcgctggcgatacgtatcgcattaggccatgtcaccattcagttacccgatacatggtggatgtatctcggtggtccgctgggtctgctgtccatcgggctaatggcgattctggtgagaggcttagggctattgatgctgggcgtagcgtcaacagcaggccaactgcttggctcagtgctaattgatgaattgatcccttcattaggcaatacggtctacctggtcaccatcatcggtacgctgttcgcgttagtcggtgcgattgtgaccaccatccctgaatacagagcatccaaaatggcgcaaagaatagaggtgtcagaatga

SEQ ID NO: 370298 - DNA, 1035 bp, Salmonella enterica
atgaaaggtttcctgcaaaccgtaacaggcccggtggcgcatacggatatggggctgacgctaccgcatgaacatctgtttaacgatctgtcttcggtcgtagacgagccacattatgctttttcacagcaactggtgggaaagaaagtcagtgctgacctgcagtgggggctgaaacacgacccatactgctgcgccgataacatggaccgcaaagagattgatgatgttatcttcgaaatcaataattttatgtctttaggcggcaggacgattgtcgacgccaccggatcagaatccattggacgggatgcctcagcgctgcgagaagttgccttaaaaacgggtttgaatatcgttgcgtcatccggaccttatctggagaaatttgaaagtacccggatccataaacctgttgagctgttagcctcactcattgataaagaactgaatcagggtattggcgagacggatattcgcgctggcatgatcggtgaaatcggcgtatcccccgcgtttacccaagcggagcgtaacagcctgcgggcagcgtctctggcacaatgtaacaacccccatacggcgatgaatatccatatgccggggtggctgcggctgggggatgaggtgctggatatcgtgctggaagaaatgaacgtctctccggcaaaagtctcgctggcgcattcggacccttcaggaaaagatgtcgtctatcaacgtaaaatgctcgaccgtggcgtatggcttgaatttgacatgattggtctggacatcaccttcccaaaagaaggtgtcgcgccgggcgttcaggagaccgcagatgcagtagcgaatctgattgtactgggttacgccgaccaaatcgttttaagccatgatgtttttctcaaacagatgtgggcgaaaaatggcggaaatggctgggggtttgtcccgaatgtcttcctcgcctatctggctgctcgcggagtagacaacgatactctgcgcaagctttgtattgataatccagcccgattactcacggcataa

SEQ ID NO: 370299 - DNA, 1743 bp, Salmonella enterica
atgaaaccaacgtttatgcgctgggtggcgatcgccgctctgctggccggggggacgtttagcgcggtggccaatcctcccgtcgcgccgccagtctcctatggtgttgaagaagatgtctttcatcctgtgcgggcgacgcaagggatggtggcctcggtggatgcaatggcgacgcaggttggcgtggatatcttaaagcagggcggtaatgccgtggatgccgccgtcgccgtgggctatgcgctggctgtcacgcatccgcaagccgggaatctgggcggcgggggatttatgctgctgcgcaccaaagacggtaacactacggcgattgattttcgtgaaatggcgccggctggcgcgacccgtgatatgttcctcgacgatcagggtaacgccgatgcgaaaaagtcgctgacgtcgcatctggcatccggtacgccgggtaccgtggcggggttctcgctggcgctggagaaatacggcacgatgccgctgaataaagtggtgcgtccggcgatgaagctggcggaagagggttttgtggttaacgatgcgctggccgacgacttaaaaacttacggcagcgaagtgatccccaaccatgagaacagcaaagccattttctggaaagacggcgagccgctgaaaaaaggcgataagctgatccagaagaatctggcgaaaagcctggaaatgattgccgaaaacggcccggatgcgttttataaaggggcgattgctgaccagatagccggagaaatgcagaagaacggcggtctgatgaccaaagaggatttagccaactataaagccgttgagcgtacgccaatcagcggtgactatcgcgggtatcaggtcttctccatgccgccgccatcctcgggcggtattcacatcgtacagatccttaatattcttgaaaatttcgacatgaagaagtacggctttggcagcgccgatgccatgcaaatcatggcggaagcggaaaaatacgcctacgctgaccgctcagagtatctgggcgatccggactttgtgaaagtgccgtggcaggcgctgacccacaaagcctatgcgaaaacgctggccgatcaaattgatatcaacaaggccaaaccttccagccagataaaaccgggcaagctcgccccgtatgaaagcaaccagaccacccacttctcggtggtggataaagacggcaatgctgtggcggtgacctataccctgaacaccaccttcggcacaggaattgtggcgggaaataccggtattctgctgaataatcaaatggatgatttttctgctaaacccggtgtacctaatgtttatggcctggtgggcggcgatgctaacgcggtcggtccgaagaagcgtccgctgtcgtcgatgtcgcccactatcgtggtaaaagacggcaaaacctggctggtgaccggcagccctggcgggagtcgaatcatcactaccgtactgcaaatggtagtgaacagcattgatttcggcatgaacgtcgccgaagcgaccaacgcgccgcgtttccatcatcaatggttgccggacgaactgcgggtagaaaagggcttcagtcccgatacgctgaagttgctggaacagaaagggcagaaagtcgcgctgaaagaagcgatgggcagtacccaaagtattatggttggcccggatggcgaactgtacggtgcgtctgacccgcgttcggtggatgatttaacggcgggatactga

SEQ ID NO: 370300 - DNA, 417 bp, Salmonella enterica
atgaaacgcttactacttattacggctttgttaccctttgctgtattggcccagccaattaacactatgaataatcctaatcagccaggttatcagatccccagccagcagcgtatgcagacgcagatgcaaacgcagcagattcagcagcagggtatgttgaaacaacagatgcaaacgcaggcgcgcagccagcagcaaaatctacagtcgcagttgaatgccaatacgcagcgggttcagcagggacagccgggcaacggtatgctcggtcagcaaacgctgcccaatacgcagggcggaatgctcagcggcagcggaaatccggaccagatgctaaaccattcccagccaatgttgcagcaggacagcgggacgccgcagcctgacatcccgctgaaaaccatcagcccttaa

SEQ ID NO: 370301 - DNA, 741 bp, Salmonella enterica
atgagtaactggccttatccccacattgtcgcccatcgcggcggcggtaaactggcgccggaaaacactctggcggcgattgacgtgggcgcgcgatacgggcacaccatgattgagtttgatgccaagctgtcgaaagacggcgaaattttcctgctgcatgacgataacctggagcgcaccagcaacggttggggcgtggcgggcgagttgaactggcaggatttattgcgtgtggacgctggcggttggtttagcggcgaatttaaaggcgagccgctgccgttgctctcgcaggtggcggagcgctgccgtaaacacggcatgatggcgaatattgagatcaaaccgacaacggggagcggaaggctaacaggacgcgtcgtggcgtcggccgcccgcgaactgtgggccgggatgacgccgccgctgctttcttcctttgagatagaggcgctggaagcggcgcaggcggcagcacctgaactgccgcgcgggttactgctggataaatggcgtgaagactggcgtgaactgacgacccgtctgggctgtgtttccctccatctcaaccataaattactcgatgagacgcgagtgcaagagattaaggccgcgggtctgcggattctggtgtataccgtcaatcagtcccagcgggcggcagagctgctgcgctggggcgtggattgtatctgcaccgatcgcattgatgacatcggccctcactttcagttttaa

SEQ ID NO: 370302 - DNA, 1071 bp, Salmonella enterica
atggctggtttaaaactacaggcagtaaccaaaagctgggacggcaaaacccaggtcattcaaccgttaacgctggacgtggcggatggcgaatttatcgtgatggtcgggccgtccggctgcggcaaatcaacgttgttgcggatggtggccggtctggaacgcgtgaccagcggcgatatctggattgatcgcaaacgtgtcaccgagatggagcccaaagatcgcggcatcgcgatggtatttcagaactatgctctctatccccatatgagcgtagaggagaacatggcgtgggggctgaaaattcgcggtatgagcaaagcgcatattgaagaacgcgtgcgggaggcggcgcgcattctggagctggacggcctgcttaaacgccgtccacgcgagctttccggcggtcaacggcagcgcgtggcaatggggcgcgcgatcgtccgcgaaccggcagtcttcttattcgacgaaccgctctctaacctcgacgccaagctgcgtgtgcagatgcgtctggagttacaacatctgcatcgtcgtcttcgtaccacctcgctctatgttactcacgatcaggtagaggcgatgacgctggcccagcgggtgatggtgatgaataaaggcgtcgcagaacagattggcacgccggtagaggtgtatgaaaaaccggccagtcgcttcgtggcgagctttattggcagcccggcgatgaatctgttggatggtgttatcagcgcttccggcgaccgtttcgaattgcctggcggtctggcgttgccgattggtgcgggctatcggggtcatgccggacgtaaaatgacgctgggtatccgcccggagcatattgcgttaagctcgcaggcggaaggcggcgtgccgctaacggtagatacgctggagattctgggcgcggataatctggcgcatgggcgctggggcgatcagaaactggtggtgcggttggcgcatcagcaacgcccggcggcgggcagtatgctatggctgcatctgccggaacatcagcggcatctttttgatggcgaaacaggacaacgtgtatga

SEQ ID NO: 370303 - DNA, 846 bp, Salmonella enterica
atgatagagaatcgtcgcgggctgacaatattcagccataccatgctgattctggggatcgcggtcattttgtttccgctgtatgtcgcgtttgtcgcggcgacgctggacgaccgcgcggtgtttgagacgccgatgacgctgcttcccggcacgcagttactggagaatatcaaaactatttgggtcaacggcgtcggtgttaatagcgcgccattctggctgatgatgcttaacagtttcattatggcgttcagcattacggtaggcaaaatcacggtatctatgctttccgcattcgccatcgtctggtttcgttttcccctgcgtaacctgttcttctggatgatttttatcaccctgatgttgccggttgaagtgcgtatcttcccgacggtggaagtgatcgccaacctgaaaatgctcgacagctatgccggtctgacgctaccgctgatggcgtccgctaccgccactttcctgtttcgtcagttctttatgacgcttccggatgaactggtggaggcggcccgtattgacggcgcgtcgccgatgcgctttttccgcgacatcgtgttgccgctgtcaaaaaccaacctggcggcgttattcgtcatcacctttatctacggctggaaccagtatctgtggccgctgttgattatcaccgacgtgaatcttggcactgccgtagcgggtatcaaagggatgatcgccaccggcgaaggtaccacgcaatggaaccaggtgatggccgcgatgctgctgactctgattcccccggtcgtaattgtgttagccatgcagcgcgcgtttgtgcgtggcctggtcgatagtgagaaataa

SEQ ID NO: 370304 - DNA, 888 bp, Salmonella enterica
atgtcatcatcccgtccggtgttccgctcgcgctggctgccgtatttactggttgctccgcagttggttatcaccgttattttctttatctggcctgcgggcgaagcgctgtggtattcgctgcaaagcgtcgatccgtttggtttttccagccaatttgtcgggctggagaatttcgtcgcgctttttcacgacagttattatctcgatgccttctggacgacgattaaattcagcgcgctggtcacgtttagcggcctgctggtctcgttgtttttcgccgccctggtggattacgtggtgcgcggcagccgtttttatcagacgctgatgctgctgccttatgccgtcgcgcccgccgtcgccgccgtattgtggattttcctgtttaacccggggcggggattaatcacccatttcctcggcgaattcggctatgactggaaccacgcgcaaaacagcggtcaggcgatgttcctggtggtatttgcgtcagtctggaagcagattagttacaactttttattcttctttgccgcgctgcaatccattccccgctcgctggtggaagcggcggccattgacggcgccgggccgattcgtcgtttcttccggctttctttgccgcttattgcgccggtcagtttcttcctgctggtggtcaacctggtgtacgcctttttcgacaccttcccggtgattgacgccgcgaccgccggcgggccggtacaagccaccacgacgctgatttataagatctatcgcgaagggtttaccggcctggatctctcggcgtccgccgcgcagtcggtggtgttgatgttcctcgtcatcattctgacggtggtgcagttccgctatgtggaaagtaaggtgcgttaccaatga

SEQ ID NO: 370305 - DNA, 1317 bp, Salmonella enterica
atgatatcgttacgacatacagctttaggactggcgctgagtctggcatttacgggtcagacgttggccgtcaccactattccattctggcattcaatggaaggggagttaggcaaagaagttgattcactggcgcaacgtttcaaccaggccaatccggattacaaaatcgttccggtctataaggggaactatgaacagaacctgagcgccgggatcgcggcattccgtaccggcaacgcgccggcaatattgcaggtttatgaggttgggacagcgaccatgatggcctcgaaagccattaagccggtttatgaagtgtttaaagacgccggtattaactttgacgagtcccagtttgtaccgaccgttgcaggctactacaccgatgctaaaagcgggcatctgctctcccagccctttaacagctccacgccggtactgtactacaacaaagacgcctttaagaaagccggtttagatccggaacagccgccgaaaacctggcaggagctggctgactataccgcgaaactgagagcggcaggcatgaaatgcggttacgccagcggctggcaaggctggatccaactggaaaacttcagcgcctggaacggtctccccttcgccagtaaaaacaatggttttgacggtacagatgcggtgctggagtttaataagccagagcaggtgaaacatatcgcgctgctggaagagatgaataaaaaaggcgattttagctatgttgggcgtaaggacgagtctaccgagaagttttataacggtgactgcgcgatgacaaccgcgtcctccggctcgctcgccaatatccgccagtatgccaaatttaactatggcgtgggtatgatgccgtacgacgcggatatcaagggcgcgccgcaaaacgctattatcggcggagccagcctatgggtcatgcagggtaaagataaagaaacctataccggcgtcgccaaattcctcgacttcctggcaaaaccggaaaacgctgctgaatggcatcaaaaaaccggctacctgccgattaccaccgccgcctacgagctgacccgcgagcagggttattacgataaaaaccccggtgcggatatcgccactcgccagatgttgaataagccgccgttacccttcaccaaaggcttgcgtctgggcaatatgccgcagattcgtaccatcgtggacgaagagctggaaagcgtctggaccgggaagaaaaccccacaacaggcgttggataccgcggtggatcgcgggaatcagttactgcgtcgttttgagaaagcgagcaaatcttaa

SEQ ID NO: 370306 - DNA, 369 bp, Salmonella enterica
atgaccctacaacttatctcagcggaagagataattcagtttcacgacaggcttctccgcgttacgcctggtgtaacaggcatgcctgatcctggccgcgcggaagcgctaatgtaccgggtactcaatcaaatcgaatatgaaggggtgaccgacgtgtggctgctggcggcaatgcatttgctcgctatatcccgtgggcatatcttcaatgatggtaacaaacgtaccgccttatttattacgctgctgtttttaaagcgtaacgggatctcactcgctgcgaatccggattttgtcgatatgacagtcgatgcggcggcagggcggcttacgctggagcaaattgtcgttcgcttacgcgcctga

SEQ ID NO: 370307 - DNA, 222 bp, Salmonella enterica
atgcgtacggttaactatagcgaagcgcggcaaaatctggccgaagtcctggaaagcgcggtgacggcgggccctgtcaccatcacgcgtcgtgggcataagtccgcagtgatcatcagcgccgaggagtttgagcgttatcagacggcgcgaatggatgatgagtttgctgccattatggcggttcatggcaatgagctcagggagctggcggataaatga

SEQ ID NO: 370308 - DNA, 714 bp, Salmonella enterica
atggaaaaaacgatgttaacgtttgaaaaagtcagcgcccactacggcaagattcaggcgctgcacgacgtcagtctgcacatcaaccagggggaaatcgttaccctgattggcgctaacggcgcggggaaaacgacgctgcttggcaccttgtgcggcgatccgcgcgcctccagcggacgggtggtgtttgacggtaaagacataaccgactggcagacggcgaaaatcatgcgtgaagcggtggcgatagtgccggaagggcggcgcgtcttctcgcggatgacggtagaagagaacctggcgatgggcggtttttttgccgagcgcgatcggtttcaggagcgtatcaaatgggtgtacgagctgtttccgcgcctgcatgaacgccgtatccagcgagcgggcaccatgtccggcggcgaacagcagatgctggcgattggccgcgcgctgatgagccagccgaggctattgctgctggatgaaccgtcgctggggctggcgccgatcatcatccagcagatcttcgacaccattgagcagttgcgcgagcagggtatgaccatcttccttgtcgagcaaaacgctaaccaggcgctgaagctcgccgaccgcggttatgtgctggaaaacggccacgtggtgctatccgataccggtgatgcactgctggcgaacgaagcggtgcgcagcgcctatctgggcggttag

SEQ ID NO: 370309 - DNA, 768 bp, Salmonella enterica
atgagtcagccattattagcggttaacggcctgatgatgcgctttggcggtttgctggcggtcaacaatgtatcgctggaattgcgtgagcgggaaattgtgtcgctgattggccctaacggcgcgggtaaaacgacggtgtttaactgcctgaccggtttttataagccgacaggcggtacgatcatgttgcgcgagcggcatctggaaggattgccgggccagcagatcgcccgcatgggcgtggtacgtactttccagcatgtgcgtctgttccgtgaaatgacggtgattgaaaacctgctggtggcgcagcaccagcaattgaaaacgggcctcttttccggcctgttgaaaacgcccgctttccgccgcgcgcaaagtgaagcgctggaccgcgcggcgacttggcttgagcgtattggcctgctggaacatgccaatcgccaggccagtaatctggcctacggcgaccagcgccggctggagattgcccgctgcatggtgacgcagccagaaattctgatgctcgacgaaccggcggccggccttaacccgaaagagaccaaagagctggatgagctgattgccgaactacgtaaccatcacaacaccactatcttgctgattgaacacgatatgaagctggtgatgggcatttccgatcgcatttacgtggtgaaccagggcacgccgctggcgaacggcacgccggaagagatccgcaacaacccggacgtcatccgcgcttatctgggtgaggcataa

SEQ ID NO: 370310 - DNA, 1278 bp, Salmonella enterica
atgaaaccgatgcatattgcgatggctctgttctctgcggcgatgttcttcgttctggctggcgtcttcatgggcgtacaactggagctggacggcaccaaactggtggtggataccgccgccgacatccgctggcagtggatctttatcggtacggcagtggtttttttctttcagttgctgcgtccgatgttccagaaagcggtgaagcacgtctccggaccgaagtttattctgccggcgatcgatggctctaccgttaagcaaaagctgtttctgatggcgctgttggttatcgccgtggcgtggccgtttatggtgtcgcgcggtagcgtggatatcgccactatgaccatgatttatatcatcctcggtctggggctgaacgtggtggtggggctgtccggcctgctggtattgggctacggcggcttttacgccatcggcgcttatacctttgcgctgctcaaccactattatggtttgggtttctggacctgcctgccgctggcgggactggtctccgccgctgctggtttcctgctcggcttcccggtactgcgtctgcgcggcgactatctggcgattgtgacgctcggcttcggcgaaatcgtccgtatcctgctgctcaacaacacggaaattaccggcggcccgaacggtatcagccagatccccaaaccgacgctatttggtctggagtttagccgcaacacccgagaaggcggctgggataccttcagcaatttctttggcgtgaagtacgacccatccgaccgggtcattttcctctatctggtggccctgttgctggtggtcctgtcgctgtttgtcattaaccgcctgctgcgtatgccgctgggccgggcgtgggaagcgttgcgtgaggatgagatcgcctgtcgctcattaggtttaagcccgacgcgcatcaagctgaccgcttttactatcagcgccgcgtttgccggtttcgccgggacgttgtttgccgcccgccagggctttgtcagcccggaatctttcaccttcgccgaatccgccttcgtgctggcgattgtggtgctgggcggaatgggctcgcagtttgcggtgatcctggcggcggttctgttggtggtgtcgcgcgagttgatgcgcgatttcaacgaatacagcatgttgatgctcggcggtttgatggtgttgatgatgatctggcgcccgcagggattgctgccgatgacgcgtccgcagttgaagctgaaaagtggtcaggcgaaaggagagcaggcatga

SEQ ID NO: 370311 - DNA, 927 bp, Salmonella enterica
atgtccgagcagtttctctatttcttgcagcagatgtttaacggcgtcacgctggggagcacctacgcgctgattgctatcggttatacgatggtgtacggcattatcggcatgatcaacttcgctcatggcgaggtgtatatgatcggcagctacgtctcttttatgatcatcgccgcgctaatgatgatgggaatagacaccagttggctcctggtggccgccggatttatcggcgcgattattattgccagcgcctacggctggagtatcgagcgagtcgcttaccggcccgtgcgcaactccaagcgcctgattgccctgatttccgccatcgggatgtccatcttcctgcaaaactacgtcagcctgacggaaggttcgcgcgacgtggcgttacccagcctgtttaacggccagtggattgtgggcagcagcgaaaacttttccgcgtccatcaccaccatgcaggcggttatctggatagtcacctttctggctatgctggcgctcaccattttcattcgctactcccggatgggccgcgcctgccgcgcctgcgcggaggatctaaaaatggccagcctgctcggcattaataccgaccgcgtcattgcgctaacgtttgttatcggcgcggcaatggcggcggtggcgggcgtgctactcggtcagttctatggcgtaattaacccctacatcggttttatggccgggatgaaagcgttcaccgcggcggtgctgggcggtattggcagcattccgggcgcgatgatcggcggtctgattttgggcgtcgccgaagcgctctcgtctgcatatttaagtaccgaatataaagatgtcgtatcgttcgctctgctgattctggtactgctggtgatgccgaccggtatcctggggcgtccggaggtagagaaagtatga

SEQ ID NO: 370312 - DNA, 1110 bp, Salmonella enterica
atgaaacggaaagcgaaaacaataatcgcagggattgttgcattagcagtctcgcagggggcaatggcagatgatattaaagtcgccatagtcggggcgatgtccggcccggtagcgcaatggggcgatatggaatttaacggcgcgcgccaggccattaaagacatcaacgctaaaggcggtattaaaggcgataagctggtcggcgtagagtacgatgatgcctgcgatccaaaacaggcggtggcggtggccaacaaaatcgttaacgacggtattcagtacgttattggtcacttgtgttcttcttctactcagccagcatccgatatctatgaagatgaaggtattctgatgatctctccgggggcgactaacccggagctgacccagcgcggctatcagtacattatgcgtaccgccggcctggactcctcccaggggccaacggccgcgaaatacatcctggaaacggtgaagccgcagcgcatcgctatcattcacgataaacagcaatacggcgaaggactggcgcgctccgtgcaggatggcctgaagcagggcaatgccaatattgtcttttttgatggtattaccgccggtgaaaaagatttctccgccctgattgcccgcttgcaaaaagagaatatcgactttgtgtattacggcggctactacccggaaatggggcagatgctgcgccaggcgcgggctaatggcctgaaaacgcaatttatggggccggaaggcgtaggtaacgcgtcgctgtccaatattgcgggcggtgcggcggaaggcatgttggtgacgatgccaaaacgttatgaccaggacccggcgaataaagcgattgtcgaagcgctgaaagccgacaagaaagatcccagcggtccgtacgtctggatcacctacgccaccgtccagtcactggcgaccgcaatgacgcgtagcgccagccatgctccgctggatctggtgaaagatcttaaagctaacggggctgataccgttattgggccgctgaaatgggatgaaaaaggcgatcttaagggatttgaatttggcgtcttccagtggcacgccgacggctcgtcaaccgtcgcgaagtaa

SEQ ID NO: 370313 - DNA, 384 bp, Salmonella enterica
atgaagctgactattcttcgtttagaacactttagcgctcaggatcagatcgatctgggcaaaatctggccggaatattccgcctcctcattaagcgtagatgaaacgcaccggatttatgccgcgcggtttaacgagcgtttgttgggcgccgtaagagtgacgctgagcggaacgcagggcgcgctggattccttacgcgtgcgtgaaatcacccgtcgtcgcggcgtcgggcaatacctggtagaagaagtcatccgcgataatcccaacgtctcgtcgtggtggatggcggatgtcggtgttgaagaccgcagcgtgatggccgcgtttatgcaggcgttaggttttaccgcccagcatgacggctgggagaagcgctaa

SEQ ID NO: 370314 - DNA, 1098 bp, Salmonella enterica
atgaagggtaaaacgttattggcaggatgtatcgccctgtcattaagccatatggcattcgcagaggacattaaagtcgcggttgtcggcgcgatgtccggtccggtggcgcagtatggcgaccaggaatttaccggtgcggagcaggcaattgccgatatcaatgcgaaaggcggtattaaaggcgataagctcgtcgcggtgaaatatgacgacgcctgcgacccgaaacaggcggtagctgtcgctaacaaagtggtgaacgacggcatcaggtatgttatcggacacttatgctcctcttccacacagccagcctctgatatctacgaagacgaaggcatcctgatgataaccccggcggcgaccgcgccggagctgaccgcacgcggctataagctggttttgcgcaccaccggtctggactctgaccaggggccaacggcggcaaagtatattctggagaaggtaaaaccgcagcgcatcgcgattatccacgataagcagcagtacggcgaagggctggcgcgcgcggtgcaggacggtctgaagaaaggcggcgttaacgtcgtattctttgacggcatcaccgccggcgaaaaagatttctccactctggtagcgcgtctgaaaaaagagaatatcgactttgtctactacggcggttatcacccggaaatggggcagatcctgcgccagtcccgcgccgcagggctgaaaacccagtttatggggccggaaggggtggcgaacgtgtcgctgtctaacatcgccggagagtcagcggaaggcttactggtcaccaaaccgaagaactacgaccaggtcccggcgaacaaaccgattgtggatgctatcaaagccaagaaacaagatcctagcggcgcgtttgtctggaccacctacgccgcgctgcaatcgttgcaggcgggtctgaaccagtctgacgatccggcggaaattgccaaatacctgaaaggcgccacggtcgacaccgtaatgggaccgctgtcgtgggatgagaaaggcgatctgaaaggatttgagttcggcgtgtttgactggcatgcgaatggtacggcgacagacgccaagtga

SEQ ID NO: 370315 - DNA, 855 bp, Salmonella enterica
atgaccaaagaaatgcaaaatttagctttagcccctgttggcaacctggaatcttatatccgggcggcgaacgcgtggccgatgttatcggctgacgaggagcgggcattggctgaaaggctgcattaccagggcgatctggaagcagctaaaacgctgatcctgtctcacctgcgctttgttgttcatattgctcgtaactatgcgggctatggtctgccgcaggcggatttgatccaggaaggcaacatcggcctgatgaaagccgtacgtcgttttaacccggaagtaggcgtgcgcctggtttccttcgccgtacactggattaaagcagaaattcacgaatacgtgctgcgtaactggcgtatcgttaaagtcgcaaccacgaaagcgcagcgtaagctgttctttaatctgcgtaaaaccaagcagcgtctgggctggtttaatcaggatgaggttgaaatggtggcgcgcgaactgggtgtttccagtaaagacgtgcgtgagatggagtcgcgtatggcggcgcaggacatgacgtttgacatgtcttcggacgatgagtccgacagccagccaatggcgccggtgctgtatctgcaggataaatcgtctaactttgccgacggcattgaagacgataactgggaagagcaggccgccaaccgactgaccgacgcgatgcaggggctcgacgagcgtagccaggatattatccgcgctcgctggctggacgaagacaataagtctacgttgcaggagctggccgatcgttacggcgtctccgctgagcgtgtgcgccagcttgaaaagaacgccatgaaaaagcttcgcgctgcgatcgaagcgtaa

SEQ ID NO: 370316 - DNA, 1056 bp, Salmonella enterica
atgaataggcgcgacgcgattaaccaaatcaggcagttcggcggacggctggatcgactgcgtaagtctcgcggcggaacaggcggcgggcgcaacgcgccaggacgccagaagccgacaccgaaaccgaactcacgtaaaacgaatgtctttaatgaacaggtgcgctatgcctggcacggcgcgctgcaagatctgaaaagcaaaccgctggcgacgtttctgacggtgatggtgatcgccatctccctgacgctgcccagcgtctgttacatggtctataagaacgtcaaccaggcggcgactcagtattatccgtcgccgcagatcaccgtttatctgcaaaaaacgctggatgatgacgcggcggcgcgggttgttggacagcttcaggccgagcagggcgttgagaaggtcaactacctgtcccgtgaggacgcgctgggagaattccgcaactggtcgggttttggcggcgcgctggacatgctggaagagaacccgctaccggcggtggcagtggtgatccccaagctggacttccagagtaccgcctcgcttaatacgctgcgcgaccgtatctcgcagattaacggcattgacgaagtccgcatggatgatagctggtttgcgcgcctggcggcgctcaccgggctggtgggccgcgtgtcggcgatgatcggcgtgctgatggtcgcggcggtcttcctcgttatcggcaacagcgtgcgcctgagcatttttgcccgtcgcgacaccattaacgtgcaaaagctgattggcgcgaccgatggctttatcctgcgtccgttcctctacggcggcgcgttgctcggtttttccggcgcgtttctttcactgatattgtctgaaattttggtgatgcgtttatcatcggcggtgactgaagtggcgcaggtcttcggcacgaagtttgatctcaatggcttatcgttcgatgagtgcctgttgctgctgctggtctgttccatgattggctggatcgccgcctggctggctacggtgcaacatttacgtcactttactcccgattga

SEQ ID NO: 370317 - DNA, 669 bp, Salmonella enterica
atgattcgctttgaacatgtcagcaaggcctatctcggcgggagacaagcgctgcagggagtgacattccatatgcggccaggcgagatggcgtttctgaccggccactccggcgcggggaaaagtaccctgctgaagctaatctgtgggattgagcggcccagcgccggcaaaatcttcttcagcgggcatgatattacgcgcctgaaaaaccgcgaagtgccgtttttgcgccgccagattgggatgattttccaggatcaccatctgctgatggatcgcacggtctatgacaatgtggcgataccgttaatcattgccggcgccagcggcgatgatatccgtcgtcgtgtgtcggcggcgctggataaggttggactactggacaaagcgagaaacttcccgattcaactctccggaggcgaacaacagcgcgtgggcatcgcccgcgcggtggtcaataagccagcggtattgctggcggatgaaccgaccgggaacctggacgacgcgttgtcggaagggattttacgtctgtttgaagagtttaaccgcgtaggggtgacggtactgatggcgacgcacgatattggacttatctcccgtcgttcctataggcagctcgtcctgagcgatggacatctgcatggaggcctggccaatgaatag

SEQ ID NO: 370318 - DNA, 1476 bp, Salmonella enterica
atggcaaaacagaaaaaacgtggcttcttttcctggttgggcttcggtgataaagagcagaagcaggaacagaccgaagaacagcagattgttgaggaacaacgaccggttgagccccctgttgaaacggcggcagacgtagacgcgcaaacgcccgcgcacagcaaagcagaaaccgaagcctttgcggaagaggtggtggacgttactgagaaagttcaggagagcgaaaaaccgcagccggtagagccggagcccgcggcggccattgagatggcagcgccgcagatcgcggtggaacgcgaggaattgccgctgccggaagaggtcaaagacgaggctatctcgccggaagagtggcaggccgaagcggaaaccgtagaggtcattgccgcggtagaagaagagggcgaaaacgcggcgaaattcaccgacgaagagctggaagcgcaggcgctggccgctcaggcggcggaagaggcggtgatggttgttccgccggcggaagaagacgagccggtggaagcgatcgttcaggagcaggaaaaaccgactaaagaaggtttctttgcccgcctgaaacgcagtctgctgaaaaccaaagaaaatctcggttccggatttatcagtctgttccgcggcaagaaaatcgacgatgatttgttcgaggagctggaagagcagttgctcatcgctgatgtcggggtggaaaccacgcgtaagattatcgctaatctgacggaaggcgccagccgcaaacagcttaaagatgccgaggcgctgtatggtctgttgaaagacgagatgggcgagattctggcgaaggtagacgaaccgcttaatattgaaggtaaaacgccttttgttattctgatggttggcgtgaacggcgtgggtaaaaccactactatcggtaaactggcgcgccagtttgagcagcagggtaaatcagtgatgctggcggcgggggatactttccgcgcggcggcggtcgaacagctacaggtctggggacagcgtaacaacattccggttatcgcccagcataccggcgcggactccgcctcggtgatttttgacgctatccaggccgcgaaggcgcgtaatgtggatgtgttaattgccgatacggcagggcgtctgcagaacaagtcgcacctgatggaagagctgaaaaaaatcgttcgcgtcatgaaaaagctggacgaagaagcgccacatgaagttatgctgaccattgacgccagcaccggacagaacgcggtaagccaggccaaactgttccatgaagcggtaggcttaaccggtattaccctgaccaagctggacggtacggcgaaaggcggggtgattttctcggtagctgaccagtttggcattcctatccgttacattggcgtgggcgaacgtatcgaggatttgcgtccgtttaaggcggacgattttattgaggcactttttgcccgagaggattaa

SEQ ID NO: 370319 - DNA, 597 bp, Salmonella enterica
atgaaaaaaccgactcactctggcagcggccaaatccgcattattggcgggcaatggcgtggccgtaaattaccggttccggacagcccgggtctgcgtcccaccaccgatcgcgtgcgcgaaacgttatttaactggctggctccggtaatggtagacgcccattgtctggattgctttgccggcagcggcgcgctgggtctggaagcgctatcacgttatgcggcccaggcaacgttactggaaatggatcgcgccgtatcgcagcagttgcaaaaaaatctggcgacgctgaaagccaacaatgctcgcgtcgtcaataccaatactctgaccttcctcagccagccggggacgccgcatcacgtcgtctttgtcgacccgccgtttcgtaaagggctgctggaagagacgttacaattgctggaaacccagggatggctggccgacgacgcgctaatctacgtagaaagcgaggtggaaaacggtctgccgcccgttccggcgaactgggcattgtatcgagaaaaggtggccggacaggtcgcttatcgtctgtatcagcgcgacgcgcaaggagaaaatgatgttgattaa

SEQ ID NO: 370320 - DNA, 270 bp, Salmonella enterica
atgttgattaatctgggccgcttattaatgctcttcgtgtgggcatttttgattcttaatctggtgcatcccttcccgcgcccgctcaatatcttcgtcaacgtggcgttggtgttcatggcgctgatgcacggtatgcaactggcgctgctgaaatcaacgataccgaaagagggtccgcagatgacgacgggagagaaaatccgcattttcctgttcggcgtgtttgagctgctggtctggcagaagaagtttaagaacaaaaaataa

SEQ ID NO: 370321 - DNA, 372 bp, Salmonella enterica
atgagtaagccaccgcttttcttcattataatcatcgcattaatcgtagttgccgcgtcgttccgcttcgttcagcaacggcgggaaaaagccgctaatgaggcggcgccgttacagcaaaagctggtcgtggtcagcagtaaacgggagaagccggttaacgaccgacgctctcgccagcaggaagtgagcccggcgggaaccagtatgcgctatgaggccagttttaagccgctcaatggcggtctcgaaaaaacgttccgtttacaagcgcagcagtaccacgctttgacggtgggcgatcaaggtacgctgagctataagggaacgcggttcgtcgggtttgttagccgtaccccggataacgaataa

SEQ ID NO: 370322 - DNA, 627 bp, Salmonella enterica
atgctttggtcgtttatcgctgtctgcctgtccgcatggctgtatgtggacgcctcctatcgcgggccagcctggcaacgctgggtttttaagcccgtcacgttattactattgctgttactggcctggcaagcgccgatgtttgacgccatcagttatcttgtgttggccggactgtgcgcctcgctggtcggcgatgcgttaacgctcttaccgcgtcaacgcctgctgtacgccgtcggggcatttttcttatcgcatctgctctacaccatttactttgccagccaaatgacgttgtcgttcttctggccgctgccgctggcgttactgatagtcggcgcgttgcttatcgccgttatctggacgcgactggaggagctacgctggccggtatgtacttttatcgccatgacgctggtcatggtctggctggcgggcgaactgtggttcttccgcccaacggcgccagccctttcggcctttaccggcgcgacgctgctgttcatcggcaatatcgtctggctgggtagccattaccgccgccgtttccgggcggataacgcgattgccgccgcctgctactttgcaggacacttcctgattgttcgctcgctgtacctgtaa

SEQ ID NO: 370323 - DNA, 2199 bp, Salmonella enterica
atgtcgacccctgataccgatggcaaaaaagtcccgccctttacctccttcagattagccccggcaatacagaaggccgatagctgctgctgcgaagaacattgcgcgtccagcgcgcctgtttctactgccgtggcaggcacgcgctatacctggaaaatctccggcatggactgcgccgcctgcgcccgaaaagtggagaatgcggtccgccaaattcgcggcgtcaaccaggcgcaagtgctgttcgccaccgaaaagttagtggtcgatgccgacgccgacctccgcgcgcaaattgaacgcgccgtacagaaggcgggttataccttgcgtagcgaagattcgcgcgacgccgcgcctgaatctcgtcttaaagagaacctgccgcttattacgctgatcattatgatggcgataagctgggggctggagcaatttaaccacccgttcggccaactggcctttatcgtcaccactctggtcggtctgtatcctattgcccgccaggcgctgcggctgatgaaaagcggcagttggttcgctattgaaacgctgatgagcgtcgccgccattggcgcgctgtttataggcgcgacggcggaggcagcaatggtattgctgctgttcctcatcggcgagcgcctggaaggatgggccgccagccgcgcccgtaaaggcgtcagcgcgttaatggcgcttaaaccggaaacggcgacccgtctgcgcgacggcgtacgggaagaggtcgcgattaataccctgcgaccgggcgatattatcgaagtcgccgccggggggcgtttacccgccgacggtaaactggtttccggtttcgccagctttgatgaaagcgcgctcaccggcgagtctatcccggtggagcgcgcaacgggcgacaaagtcccggcaggcgcgaccagcgttgaccgtctcgtcaccctggaggtgttatctgaacctggcgccagcgcgattgaccgtatcctgacgctgattgaagaggcggaagagcgccgtgcgcctattgagcggtttattgaccgtttcagccgcatctatacgccagtcattatggtcatcgcgctgctggtgacgcttattccgccgctgatgttcgatggcggctggcaggagtggatttataaagggctgacgctgctattaatcggttgcccgtgcgcgctggtgatctccacgcccgcggccattacctccgggctggcggcggcggcacggcgcggcgcattgattaaaggcggcgcagcgctggagcaactgggccgtatcacgcaggtcgcctttgataaaaccggtacgttgaccattggtaaaccacgggtgacggcgattcatccggcaagcggtatcagcgaggctgaactgttggcgctggcggcagccgtagaacaaggcgctacgcacccgctggcacaggctattatccgcgaagcgcagacacgcgatctggcgatcccgacggcggaatcgcagcgaacgctggccggcaccggaattgaagcgcaggttaacggcgaacgtattctgatttgcgcggcggggaaacagcctgcggcggcgtttgccgggcaaattagcgaactggaaaacgccgggcagacggtggttctggtgctgcgtaacgagaccgtacttggcgtcctcgccctccaggatacattgcgtgacgatgcgcgcgacgccatccgcgacctgcatcagttaggcgttaacggcgtgattctgaccggcgataacccacgggcggcggcagcgattgccggcgagctggatctggcgtttaaagccgggctactgccggaagacaaggtgcgggcagtcaccgcccttaaccaacaagcgccgctggcgatggtgggcgacggcattaacgatgcgcccgcgatgaaagccgccagtatcggaattgcgatgggcagcggtactgacgtcgcgctggaaacggctgacgccgcccttactcataaccgtctgcgcgggttagcgcagatgattacgctggcgcgcgctacccacgcgaatatccggcagaacatcaccattgcgctggggctgaaagccattttcctggtgacgacgctacttggttttaccgggctatggctggcaatcctggcggatacgggagccacggtattggtgaccgccaacgcgctacgtttgctgcgtaaaaactaa

SEQ ID NO: 370324 - DNA, 1644 bp, Salmonella enterica
atgaaaaatatcaaagtcatcaccggcgttatcgcgacgctgggcatatttagcgccttattgctggtgacaggaatactgttttattccgccgtcagcagcgatcggctgaatttccagaatgcgagcgcactgagttaccaacaacaggaactgggcggcagttttcagacattgatcgaaacccgcgttaccattaaccgcgtggcgatacgcatgttaaaaaatcagcgcgatcccgcctcgctggacgccatgaacacgctgttaaccaatgctggcgcgtcgctcaacgaagcggaaaaacatttcaacaactacgtgaactccgaagcgatcgcgggcaaagatccggcgttggatgcccaggccgaagccagctttaagcagatgtatgacgttttgcagcagtctatccactatcttaaagccgataattacgccgcctatggcaaccttgacgcgcaaaaagcgcaggatgacatggagcaggtatatgaccagtggctctctcaaaatgcgcaattaataaaattagccagcgatcagaatcagagcagctttacccagatgcaatggacgctggggataattctacttatcgtactcatcgtgctggcgtttatctggctggggctgcaacgcgttctactccgcccgctgcaacggattatggcgcacattcaaacgatcgccgacggcgatcttacccatgagatagaggccgaaggacgcagtgaaatgggccaactggccgccggtcttaaaacgatgcagcagtcgttaatccgtaccgtcagcgcggtgcgcgataacgcggactctatctatactggcgcaggcgaaatttccgccggcagcagcgacctctcttcccgtaccgaacaacaggcctcggcgctggaggagaccgccgccagcatggaacagttaaccgccacggtacggcaaaacaccgataacgcacgccaggcgacgggtctggcgaaaaccgcatcagaaaccgcgcgtaaaggaggacgcgtggtggataacgtagtgaacaccatgaacgatatcgccgaaagctcggaaaaaatcgtggacatcaccagcgtgattgacggtatcgccttccagactaatatcctggcgctgaacgccgcggtagaagccgcccgcgccggcgaacaggggcgaggattcgcggtcgtggccggagaggtacgcacgttggccagccgtagcgcgcaggccgccaaagagatcaaagtactgattgaaaactccgtgtcgcgcattgataccggctctacgcaggtacgcgaagcgggagaaaccatgaaagagatcgttaacgccgtgacccgcgtgaccgatattatgggcgaaatcgcctctgcctccgatgagcaaagcaaaggcattgagcaggtggcgcaggcggtatcggaaatggacagcgtgacgcagcaaaacgcctcgctggtagaggaatccgcagcagcagcggcggcgctggaagatcaggctaacgaacttcgtcaggcggtcgccgcgttccgcatccagaaacaacctcgtcgggaggcgtcgccgacgccgttaagcaaaggcttaacgccacagcccgccgcagaacaggcgaactgggaaagcttctaa

SEQ ID NO: 370325 - DNA, 336 bp, Salmonella enterica
atggctaattttcacgcaatcgttaacctgcctggcttactgacgaagatgggcgtaaaatatcgccgtttttctaccattgagacgaagatgagcgatctgttttcctcccctgaccatacgcttgacgccctggggctgcgttgccctgaaccagtaatgatggtgcgcaaaacggtgcgcaacatgcaaactggcgaaacattgctgattatcgccgacgatccggcgacgacgcgtgatattccggggttctgtacctttatggaacacgatttgctggcgcaagagacggagggtctgccgtaccgctatttattgcgtaaagcgcattaa

SEQ ID NO: 370326 - DNA, 666 bp, Salmonella enterica
atgactccgtttacacaatcacagcgcgtaaaagcgttgttctggctatcgctattccatttactggtgatcatttccagtaactatctggtgcagctccccatcactatttttggtttccacacgacctggggcgcgtttagttttccttttatttttcttgccaccgatcttaccgtgcgtatttttggcgcaccgctggcgcgccgcattatcttcgccgtcatgatccctgcgctgctggtgtcgtatgtggtgtcatcgctgttctatatgggcgcctggcaaggtttcgccgcgttggcgaactttaatctgtttgtcgcccgtatcgccgccgccagctttatggcctacgcgctgggacagatccttgatgtccatgtgtttaaccgcctgcgccaaaatcgtcgctggtggctggcgccgaccgcttcaacgctgtttggcaatatcagcgatacccttgcctttttcttcattgcgttctggcgaagccccgatgcctttatggccgaacactggatggaaattgcgctggtggattattgctttaaggtgctcatcagcattattttcttcctgccgatgtacggcgttctactgaatatgttgctgaaaaagctggcagataaatctgaaatttccccattaccggcaagttaa

SEQ ID NO: 370327 - DNA, 558 bp, Salmonella enterica
atgcgcaatttggttaaatatgccggtattggcctgctggttatggggcttgcggcctgtgataacaacgatacaaaagcgtcggcagaaagcgccgccgcagaaagccaggcctccggccagcccatcagcctgatggatggcaaactcagtttctcgctgccggcggatatgaccgatcaaagcggtaagctgggcacccaggcgaataatatgcacgtttattctgacccgacgggccagaaagcggtgattgttatcgtcggcgataataccgatgaagcgttgccggtgctggcaaaccgcctgcttgagcaacagcgtagccgcgacccgcagcttcaggtggtcaccaataagtctattgagctcaaaggccatacgttgcaacaactggacagcattatctccgcgaagggccagacggcgtattcttccatcgtgctgggcaaagtggataaccaattgctgacgattcaggtcacgctgcctgcggacaatcagcaaaaagcgcaaaccacggctgaaaacatcatcaatacgttggttattaagtaa

SEQ ID NO: 370328 - DNA, 1260 bp, Salmonella enterica
atgatagaaaagaaaacatgttgtaaaaatgcggtgatactcatgcccgaacccgtcgctgaaccggcgctaaacggattgcgcctcaatctgcgtattgtctccattgtgatgtttaactttgccagctacctgaccatcggcctgccgctcgccgtcttgcccggctatgtgcatgatgcgatgggattcagcgcgttctgggcggggcttattatcagcctgcaatacttcgccactctgttaagccgtccccatgccgggcggtatgcggatgtattagggccgaaaaaaatcgttgtctttggcttatgcggctgttttttaagcggactcggctacctgctggcggatatcgccagcgcctggccgatgatcagtttgttgctactggggctgggtcgcgtgattttggggattgggcaaagttttgccggcaccggttcgacactatggggcgtcggcgtcgtcgggtcgttgcatattggtcgggtcatctcctggaacggtatcgtcacctacggcgcaatggcgatgggcgcgccgctgggcgtgctgtgttatgcctggggcgggttacagggactggcgctaacggtgatgggcgtggcgctgttggcggtactgttagcccttccacgtccgtcggtgaaggcgaacaaaggcaagccgctgccgtttcgcgcggtgctggggcgtgtctggctgtatggtatggcgttggcgctggcctcggcagggtttggcgtcatcgcgacgtttattaccttattttatgatgctaaaggttgggatggcgccgcctttgcgcttacgttatttagcgtcgcgtttgtcggcacgcgtttgctgttccctaacggcatcaatcgtttaggcgggttgaatgtcgccatgatctgctttggcgtggagattattggtctgttactggtggggacggcagccatgccgtggatggcaaaaatcggcgttttactcacggggatggggttttcgctggtctttccggcgctgggcgtggtggccgtcaaagccgtgccgccgcagaaccagggcgcggcgctggcgacctataccgtctttatggatatgtctttgggggttaccgggccgctggcggggctggtgatgacctgggcgggcgtgccggtgatttatctggcggcggccgggctggtagcgatggcgctattgctgacctggcgcttaaaaaaacggcctccgtctgcactgccggaggccgcatcatcgtcgtaa

SEQ ID NO: 370329 - DNA, 1050 bp, Salmonella enterica
atggcaaccgctcaacccgacaaaacgggtatgcatattctgctgaaactggcctccctggttattattctcgccgggattcatgccgcggcgggtattattgtacaactcttgctggcgctctttttcgccatcgttcttaacccattagtgacctggtttattcgtcggggcgtgaagcgaccgctggcgattactatcgtggtggttgtcatgctgatcgtgcttaccgcgctggtgggtgtgcttgccgcatcgcttaatgaatttatcgctatgctgcctaaatacagcaaggagctgacgcgtaaggtcttacaccttcaggagttaatgcccttcctgaatttacatatgtcgccggaacgtatgctccgcgggatggattccgataaaatcatgctcttcaccacaacattaatgaccggcgtatcgggcgcgatggcaagcattgtgctgctggtaatgaccgtggtttttatgctgtttgaggtgcgtcacgtgccttataaattacgtttcgcgctaaacaatccacaaattcatattgccggcctgcaccgcgccctgaaaggcgtctcgcattatctggcgctgaaaacgctgctcagtctatggacgggcgcgattatctggctggggctggcgttaatggatattcagtttgcgctaatgtggggcgtactggcctttttgctcaattacgttcctaatatcggctcggtgatttccgccgttccccccatgattcaggcgctgttatttaacggtttttacgagtgcgtactggtcggcgcgctctttttgctggtccatatggtgattggcaacattatggagccacgcatgatgggccatcgtctgggaatgtccacgctggtggtatttctttcgttattggtctggggatggctattaggcccggtcgggatgctcttgtccgttcctttgaccagcgtctgcaaaatatggatggaaaccactaaaggcggcagcaaactggcgatcttactggggccaggccgaccgaaaagccgtttaccgggatga

SEQ ID NO: 370330 - DNA, 579 bp, Salmonella enterica
atgtaccagatcgttctgggaaaagtatcaacattaagcgcaggtcaattgcccgacgcgttaatcgctcaggcgccgcagggcgttcgccgggcaagctggctggccgggcgcgtgctgctttcccgtgcgctctcgccgctaccggagatggtgtatggcgaacagggtaaaccggctttttccgccggaacgccgctgtggtttaacctcagccatagcggcgacactattgctctgttgcttagcgacgaaggtgaagtcggctgcgatattgaagtgatccgcccgcgcgataactggcgttcgctggcaaatgcggtattcagcctcggcgaacatgctgaaatggaagcggaacgtccggagcaacaactggcggcattctggcgtatctggacgcgtaaagaagccatcgtaaaacaacgcggcggcagcgcctggcaaatcgtcagcgtggacagcacgttgccctctgccttgtcggtcagccagtgtcagctcgatacgctcagtctggcagtctgtacccccacaccgtttacgctgacgccgcagacgataacgaaagcgctatga

SEQ ID NO: 370331 - DNA, 438 bp, Salmonella enterica
atgcgccgacgcgccataccaaaaggtttaagtcagatgcaacgtgtcaccatcaccctcgatgacgatttactggaaacgctggacagcctgagccagcgacgcggctataacaatcgctccgaagcgatccgtgatattctgcgcggcgctctggcgcaggaggccactcaggaacacggcacacagggtttcgcggtactttcatatgtttatgaacatgagaaacgggatttagccagccgcatcgtctccacccagcatcatcatcatgatttatccgtcgccacgctgcacgtccatatcaaccacgatgactgtctggagatcgccgttctgaagggcgatatgggcgacgtacagcattttgccgatgatgttatcgcccagcgcggcgtgcgccacggccacttgcagtgtttgccgaaagaagactaa

SEQ ID NO: 370332 - DNA, 1125 bp, Salmonella enterica
atgcgcggattacgtaatatttataatctcggcgttaaagaactgcgcagtctgctgggcgacaaagcgatgctgtcgctgatcgtcttcgcctttacgatttcggtttactcctccgctaccgtcctgcccggttcgttgcatcttgcccctatcgccatcgccgatatggatcagtcacagttgtcgaaccgtattgtgaatagtttttaccgcccgtggtttctgccgccggagatgattacggcaacggaaatggatgccggactggatgccggacgctatacctttgcggtcaatattccgccgaatttccagcgtgatgtgctggccggacgtcagcctgatattcaggttaacgtcgatgcgacgcgcatgagccaggcgtttaccggcaacagttatatccagaatattattagcggcgaggtcaacagctttgtggcgcgcgcgcggggagataacgttcagccggtgtcgctggagattcggatgcgctttaacccgaatctggacccggcgtggtttggcggcgtgatggcgattatcaacaacattaccatgctggcgatagtgctgaccggatcggcgctgatccgcgagcgagaacacggcacggtagagcatctgttggtgatgccggtcacgccctttgagatcatgatggcgaaagtgtggtcgatggggctggtcgtgctggtggtttccggtttgtctttgatgctgatggtgaaaggcgtgcttggcgtgccgattgaaggatcgatcccattgtttatgttgggcgtggcgctgagcctgttcgccaccacttcaattgggatctttatgggcaccatcgcccgttcgatgccgcaactggggttattaatgattctggtactgttaccgctacaaatgctttccggcggttccacgccgcgcgaaagtatgccgcaggcggtgcaggatattatgctgaccatgccgacgacgcattttgtcagccttgcccaggctattctttatcgcggcgcaggtttgagtatcgtctggccgcagttcctgaccctgctggcgataggcggcgtgttcttcctgatagcgctgttacgcttcagaaaaacgattggcacaatggcgtaa

SEQ ID NO: 370333 - DNA, 2742 bp, Salmonella enterica
atgacgtcgctgaagctggtgcctgttcctcccgtggcgcagcttgagggggtgagccagcattacggaaaaacagccgcgctgaacaatatcacgctggacattcccgcccgtagtatggtcgggctgattggtccggacggggtgggtaagtcgagcctgctgtcgctgatttctggcgcgcgggtgattgagcaagggaacgttatcgtcctgggcggggatatgcgcgatgcgaaacatcgccgcgacgtctgtccgcgcatcgcctggatgccgcaggggctggggaaaaacctttatcacacgttatcggtttatgagaacgtcgatttttttgctcgtctctttggtcatgacaaagctgaacgtgaagcgcgtattaccgagctgctgaacagcacgggcctggcaccgtttcgtgaccgtcctgccgggaagctgtccggtgggatgaaacaaaagctggggctgtgctgtgcgctgattcatgacccggaattgctgattcttgatgagcctaccaccggcgtggacccgctctcccgcgctcagttctgggacttaatcgacagtatccgccagcgccagaccaatatgagcgtgttggtcgcaacggcctatatggaagaggcggagcgttttgactggctggtggcgatgaatgcgggcgagatactggcaaccggcagcgcgcagcaactgcgggcaaaaacccatagcgcgacgctggaacaggcgtttatcgccctgttgccagaagcgcagcgccaggcgcataagccagtggtgatcccgccgtatcacgctgagcaggaagagattgccattgaggcgaaagatctgaccatgcgcttcggtaagttcgtcgcggttgaccatgttaatttccgcattccgcgcggcgagatttttggcttcctcggttcaaacggttgcggcaaatcgaccaccatgaaaatgctgaccggtctgcttcccgccagcgaaggtcaggcctggctatttggccagccggtggacccgaacgacatcgatacccgtcgccgggtcgggtatatgtcgcaggctttttcgctctataacgaactcaccgtgcggcagaatctggaacttcatgcccgcctgtttcatattccgccagcggagatcccggcgcgcgtcgcgcagatgatcgaacgctttatgctaacggaggtggaagatacgctccctgcttcattgccgctcggtatccgccagcgtttatcgctggcggtagcggtgatccatcgcccggaaatgctgattcttgatgagccaacgtccggcgttgatccggtcgccagggatatgttctggcagcttatggtcgatctttcgcgtcaggataaggtgacgatttttatctcgacccattttatgaacgaagcggaacgttgcgaccgaatgtcattgatgcacgccggtaaagtgctcgccagcggtacgccgcaggaattggtgcaacagcggggcgcggccaatctggaagcggcgtttatttcctggctacaggaagctgcgggagcggcgcctgaaaccccaataccgccatcccagacgcccgccgcgtcaggtaaaccgtcgcggcagggattgagcttccggcgtttgttcagctacagtcgccgcgaagcgctggagctacgccgcgatccggtacgctcgacgctggcgctgctgggaacggtaattctgatgctgattatgggctatggcatcagtatggacgtggagaacctgcgttttgccgtactcgatcgcgatcaaaccgtcagcagccaggcatggtcgctcaatctggcgggatcgcgctattttatcgaacagccgccgctcgccagctatgacgagcttgaccggcggatgcgttcgggagagttggcggttgccattgagatcccgcctaattttggccgcgatattgctcgcggtacgccagcgcagattggcgtctgggtggatggcgccatgcccagccgcgccgagacggtgaaggggtacgttcaggcgatgcaccaaagctggctgcaggaggcggcaagtcgtcagccgaacccggttaaacagaccgggctgctcaacattgaaacgcgctatcgctataacccggatgtgaaaagtctgcccgctatcgttccggcggtcattccgctgctgctcatgatgatcccgtcaatgcttagcgccctgagcgtggtgcgggagaaagagctggggtcgataattaatctgtacgtaacgccgacgacgcgcagcgaatttttgctgggtaaacaactgccgtatatcgcgctgggtatgctgaacttcttgctactgtgcgcgctgtcggtctttgtgttcggcgtgccgctgaaaggcagctttctcacgcttaccctcgcggcgctactttacgtcatcatcgccaccggtctggggctgctgatctccacgtttatgaagagccaaatcgccgctatttttgggacgtcgattattaccctcattccggcaacacaattttccggcatgatcgatccggtggcttcgctggaaggaccgggaagatggatcggcgagatctacccgaccagccattttctgacgatcgcgcgcgggacgttttccaaagcgttggatctgtccgatctctggccgttatttatgccgttactgattgccgtcccggtggtgatgggtctgagcattctgctgctgaaaaaacaggaggggtaa

SEQ ID NO: 370334 - DNA, 1068 bp, Salmonella enterica
atggacaaaatgaagcgtcatctggtgtggtggggagcggggattcttgtagcggtggccgcgatagcctggtggatgctgcgccctgcgggaataccggagggatttgccgccagcaacggcagaattgaagccaccgaagtggatattgccactaagattgccgggcgtattgataccatcctcgtttcggaagggcagttcgttcgtcagggcgaggtgctggcgaaaatggatacccgcgtgctgcaggagcagcggctggaggcgattgcgcagattaaagaggccgagagcgcggttgccgccgcccgtgctttgctggagcaacgccagagtgaaatgcgcgccgcgcagtcggtcgtcaaacagcgggaagctgagctggactccgtctctaaacgtcacgtgcgttctcgttcgctgtcgcagcgtggcgcggtatctgtacaacagttagatgacgatcgcgcggcggcggaaagcgcgcgcgccgccctggagaccgccaaagcgcaggtatctgcggcaaaagcggcgattgaagcggcgcgtaccagtattatccaggcgcaaacgcgcgtggaagcggcgcaggcgaccgagcggcgtattgtcgccgacatcgacgacagcgaattaaaagcgccgcgcgatggacgcgtgcagtaccgcgttgcggagccgggcgaagtgttatcggctggcggccgggtgttgaacatggtcgatctcagcgatgtttatatgacatttttcctgccgaccgaacaggcggggttgttgaagatcggcggcgaagcgcgactggtgctggacgccgcgccggatctgcgtattccggcgacgatcagttttgtcgccagcgtggcgcagttcacgcccaaaaccgtggaaacccacgatgaacgactgaagctgatgttccgcgtcaaagcgcgtattccgccagagctactgcgacagcatctggaatatgtcaaaaccggtttgccgggaatggcctgggttcgtctggatgagcgcgtgccctggcctgacgctctaagcgtgaggctgtcgcaatga

SEQ ID NO: 370335 - DNA, 1197 bp, Salmonella enterica
gtggaaaggtttgatgccgttattataggcgctggcgcagcgggcatgttttgcgccgcgcaggcaggacaggcgggtagccgcgtgctgctcatcgataatggcaagaagccaggacgtaaaatcctcatgtccggtggtggacgctgcaactttactaatctttatgttgagcctgctgcgtatttgagccagaacccccatttttgcaaatcagcattagcccgctatacccagtgggactttatcgatctggtcggcaggtatgggatagcctggtatgagaaaacgctgggacagcttttttgcgatgattccgcccaacgcattgtcgatatgctggttgccgagtgcgacaaaggcggcgtaacgatgcgcctgcgtagcgaggtattgagcgtcgagcgtgatgagtcgggtttcatactggcgttgaacggcgagacggtgactacgcaaaagttggtgattgccagcggcggcctgtcgatgccggggcttggcgcatcaccgtttggctataaaatcgccgaacagtttggtctcaaggtgttgccgacgcgcgccgggctggtgccctttacgctacataagccgctgttagaacagctccagacgctgtctggcgtctctgtgccctgcgtgattaccgcccgcaatggcacggtatttcgggaaaacctactttttacccatcgtgggctgtccggccccgccgttttacagatttccagctactggcaaccgggcgagttagtgagcattaacttattgccggacctctcgctggaagatgttctcaatgaacagcgtaacgcgcacccgaaccagagtctgaagaacacgctggcgatgcatttgccgaaacggttggtggagtgtttacaacagttggggcagatcccggatgtatcgctcagacagttgaacgttcgtgaccagcaggcgttggttgacacgcttacggcctggcaagtgcagcctaacggcaccgaaggctatcggacagcggaagtgacgctgggcggcgtggatacaaacgaactatcatcgcggactatggaagcgcgccgcgtgccgggtctctattttatcggcgaagtgatggacgtcaccggctggttgggcggctataacttccagtgggcgtggtcgagcgcctgggcctgcgcgcaggatttggcggcaaaacgctaa

SEQ ID NO: 370336 - DNA, 1497 bp, Salmonella enterica
atgctacatttgtttgctggcctggatttacataccgggcttttattattgcttgctctggcttttgtgctgttctacgaagcgattaacggcttccatgacacagccaatgcagtcgcaaccgtgatttacacccgtgcgatgcgttcgcagctggcggttgtcatggcggcggtgtttaacttttttggcgttttgctggggggtctcagcgtggcgtatgccattgtgcatatgctaccgacggatctcctgctcaacatgggttccgcgcacggcctcgctatggtcttttccatgttgctggcggcgattatctggaacctcggtacctggtatttcgggttgccggcgtccagttcccacacgctgattggcgccattatcggcatcggtttaaccaatgcgatgatgaccggcacgtcagtggtggatgcgcttaacatcccgaaagttatcaatattttcggttcactcattatctcccctattgtcggtctggtattcgccggcggtctgattttcttgctgcgccgctactggagcggtactaagaaacgcgcccgtatccacctgacgccagccgaacgtgaaaagaaagacggcaagaaaaagccgccgttctggacgcgtatcgcgctaatcctctcagctatcggcgtggcgttttcgcatggcgcgaacgatggtcagaaaggcattggcctggtcatgctggtgctgattggcgtcgcgcctgcgggtttcgtggtcaatatgaatgcctccagctacgaaatcacccgtacgcgcgatgctatcaacaatgtcgaaacgtactttgagcagcgtcctgacctgctgaaagccgtcaccggcgttgaccaactgattccgtctccggaaccgggcgcgactgaaccgactgaattccactgccatccggctaacaccattaacgcgcttaaccgtgcgaaagggatgctggcaaacgtggaaagctacgacaagttaagcgttgaacagcgtagtcagttgcgtcgcattatgctgtgcatttccgacacgaccgacaaagtcgtgaaattgcctggcgtaagcagcgatgaccagcgcctgctgaaaaagctgaagaccgatatgttaagcaccattgagtatgcgccggtgtggatcattatggcagtggcgttggcgctgggtattggtacgatgatcggctggcgtcgcgtggcgaccactatcggcgagaaaattggtaaaaaaggcatgacgtatgcgcagggaatgtcggcgcagatgacggcggcagtctctatcggtcttgccagctacaccggtatgccagtttctaccactcacgtactctcctcttcagtggcgggaaccatggtcgttgatggcggcgggttgcagcgtaaaaccgtgaccagcattctgatggcctgggtatttacgttaccggcggcgattattctttccggcgtgctgtactggctttccctgaagattatttaa

SEQ ID NO: 370337 - DNA, 336 bp, Salmonella enterica
atgataagcaccgtctcactattctgggctttatgtgtcgtttgcattgttaatatggcgcgctatttctcatcgctacgcgcactgttagtggtacttcgtggttgcgatcctttgctctatcaatatgtcgatggcggcggcttctttaccacgcatggtcagcccaacaaacaggtgcgcctggtatggtatatctacgctcagcgctatcgcgatcatcatgatgaagaatttattcgccgttgtgaacgcgtgcgccgccagtttctgctgaccagcgcgttatgcggtttggtggtggtgagcttgattgcgctcatgatttggcactga

SEQ ID NO: 370338 - DNA, 435 bp, Salmonella enterica
atggcttataaacacattcttatcgcagttgatctctccccggaaagtaaagttctggttgaaaaagcggtctctatggcgcgcccctacaacgcgaaaatctccctcatccacgttgatgtgaactattctgacctgtacaccggtctgattgacgtcaatctgggcgatatgcagaaacgtatctccgaagaaacccaccacgcgctgaccgagctgtctaccaacgctggctaccctatcactgaaaccctgagcggtagcggcgatttgggccaggtgctggttgatgccatcaagaaatacgatatggatctggtcgtttgcggtcatcaccaggacttctggagcaaactgatgtcttctgcgcgccagctgatcaacaccgttcacgttgacatgctgattgtgccgctgcgcgacgaagaagagtaa

SEQ ID NO: 370339 - DNA, 1473 bp, Salmonella enterica
atgaatacaactgcacctacgggcttgctgcagcaacctcgtccatttttcatgatcttttttgtagaattatgggaacgatttggctattacggcgtccagggcatcctggcggtctttttcgttaaacaattgggtttttctcaggaacaggcctttattacctttggcgcttttgcggcgctggtttatggcctgatctccatcggcggctatgttggcgaccatctgttagggactaaacgcaccctggtcctgggcgcgattgtgctggcgattggctattttatgaccggcatgtcgttattaaatcccgatctgatttttatcgcactgggtacgattgccgtgggcaacgggttatttaaagccaatcccgccagcctgctctctaaatgctatcagcctaaagatccccggctggatggcgctttcaccctgttttatatgtcgattaacatcggttctttgttatcgctatcgctggcgccggtgattgccgataaatttggctatgcggtgacctataatctgtgcggcgctggtttaattgttgcgcttctggtgtacttcgcctgccgtggcatggtgaaaaatatcggttctgaaccggatcataaaccgctacgttttcgcaatttgctgctggtactactcggcaccgtcgtcatgattttcctctgcgcctggctgatgcacaacgttaagattgccaatctggtgctcatcgtcctttctatcgtcgtcactattttcttctttcgcgaagcgtttcgtctggataaaaccggccgcaataaaatgttcgtggcgtttattctgatgattgaagccgtgctgttttacattctgtatgcgcagatgcctacctcgctgaacttctttgcgattaataacgtgcatcatgaaattcttggattcgccattaacccggtgagttttcaggcgctgaacccattctgggtggtcgtcgccagtccggtactggcagcgatttacacccgactgggtagcaaaggcaaagatctgactatgccgatgaagtttacgctcggtatgttcctctgcgcgctgggttttctgaccgccgccgccgccgggatgtggtttgccgatgcgcaaggactgacgtcgccgtggtttatcgtgctggtgtatctgttccagagtctgggcgagttgctgattagcgcgctgggactggcaatggtcgccgctctggtgccgcagcatctgatgggctttattctgggaatgtggttcctgacccaggccgccgccttcctgctcggcggttatgtggcgaccttcactgccgtaccggaaaacatcaccgatccgttacagacgctgcccatttataccggcgtctttagcaaaattggtctggtaacactggcggtcaccgtggtgatggccattatggtgccgtggttaaaccggatgattaatacgccaggtaccgaacagtaa

SEQ ID NO: 370340 - DNA, 759 bp, Salmonella enterica
gtgcaaatctgcttaatggatgaaacgggcgccacagacggcgccttatctgttctggctgcccgctggggactggagcatgacgaagacaacccgatggcgctggtattgacgccgcaacatctggagctgcgcaagcgcgacgaaccgaagcttggcggcattttcgtcgattttgtcggcggggcgatggcgcaccggcgtaagttcggcggcgggcgcggcgaagcggtggcgaaggcggtcggtattaagggcgattatctgccggacgtggttgatgccacggccggactgggacgcgatgcgtttgtgctggcgtccgtcggctgccgcgtgcggatgctggagcgtaacccggtggttgccgcgttgctcgatgacggtctgacgcgcggctacgccgatgcggacattggcggctggcttcaggagcgtttgcagttgattcatgcttccagcctgacggcgttgactgatatcacgccgcgcccgcaggtggtctacctcgatccgatgtttcctcaccggcagaaaagcgcgctggtgaagaaagagatgcgggtgtttcagtcgttggtggggccggatttagacgccgacggactgctggaaccggcgcgtcagttggcgaccaaacgcgtggtggtcaaacgtcccgattatgcgccgccgctggcggatgtcgcgacgcccaacgccatcgtcaccaaagggcatcggtttgatatttatgccggaacccctctgacggagtaa

SEQ ID NO: 370341 - DNA, 2043 bp, Salmonella enterica
atgaccaatccattactaacgtctttttcactgccgcctttttctgcaattaaaccggagcatgtggtgcctgcggtcaccaaagcgttggccgattgccgggcggcggtagaaggcgttgtggcgcatggcgcgccgtatagctgggaaaacctctgccagccgttggcggaagccgacaatgttctggggcgtattttctcgccaattagccacttaaactcggtgaaaaatagtccggagctgcgtgaagcctacgaacagacgctgccgctgctgtcggaatacagcacctgggttggccagcatgaagggttgtacaacgcgtaccgcgacctgcgcgacggcgatcattacgccactctgaataccgcgcagaagaaagcggttgataacgcgctgcgtgattttgaactgtccggcatcggcctgccgaaagagaaacagcagcgttacggcgaaatcgccactcgcctgtctgagctgggcaaccagtacagcaataatgtgctcgatgccactatgggctggacgaagctcatcaccgatgaagccgagctggcgggaatgccggaaagcgctctggcggcagctaaagcccaggcggaagccaaagagcaggaaggttacctgctgactctggatatcccgagctatctgccagtgatgacctactgcgacaaccaggcgttgcgtgaagagatgtatcgcgcctattccactcgcgcctccgaccaggggccgaacgccggtaagtgggataacagcccggtgatggaagaaattcttgcgctgcgccatgaactggcgcaactgctgggcttcgaaaattatgcccatgagtcactggccaccaagatggcggaaaatccgcagcaggtgctcgatttcttaaccgatctggcgaaacgcgcccgtccgcagggggaaaaagagctggcccagctgcgcgccttcgccaaagccgaatttggcgttgaggaactgcaaccgtgggatatcgcgtactacagtgaaaagcaaaaacagcacctgtacagcatcagcgatgagcagctacgtccgtacttcccggaaaacaaagccgtgaatggcctgtttgaagtggtgaaacgtatttacggcatcactgccaaagagcgtactgacgttgatgtctggcacccggaagtgcgtttctttgaactgtatgacgaaaataacgagctgcgcggcagcttctaccttgacctgtacgcgcgcgaacacaaacgcggcggggcgtggatggacgactgtgtcggccagatgcgtaaggcggacggcacattgcaaaagccggtcgcttatctgacctgtaatttcaaccgtccggtgaacggtaaacccgctctgtttacccatgacgaagtgatcaccctgttccacgagtttggtcatggcctgcatcatatgctgacccgcattgagaccgccggggtctccggtatcagcggcgtgccgtgggacgcggtcgaactgccaagccagtttatggaaaactggtgctgggagccggaagcgctggcgtttatctccggccactatgagaccggcgaaccgctgccgaaggaactgctggataaaatgctggcggcgaaaaactatcaggcggcgctgtttattctgcgtcaactggagttcggtctgtttgatttccgtctgcatgcggaatttaacccgcagcaaggagcgaaaattcttgagacgctctttgaaattaaaaaacaggtcgccgtggtgccgtcaccgacatggggccgcttcccacatgcattcagccatatctttgctggcggctatgcggcaggctactacagctatctgtgggccgacgtactggcggcggacgcttattcccgctttgaggaggaaggcattttcaaccgtgagaccggtcagtcgttccttgataacatcctgactcgtggtggttctgaagagccgatggaactctttaaacgcttccgtggccgtgaaccacagctggacgcgatgctggagcattacgggattaaaggctga

SEQ ID NO: 370342 - DNA, 1272 bp, Salmonella enterica
atgaaactacacattactgtactggcgtcatctctggcgctggcgatgccggcactggcgaaagatattcccctgtcccaggcggagtcgatagcgaaaagcgtgacgcccgactcggcgagcgtcgcctttaatgaccttgaggctcaatggctgacacagttgcgtaaggcattacaaggcgataccgccgcgttgactcgcgacgccatggctcagatgcgacagaattccatccaggcggataatgcctggttacaggctagcggttatgattttcatactactgagaatcaacagatgggaattaccctactttccgccttcaatacattgccggaagcagtattgaaagacaatctggcgacggtgacggcgattaatcacgatgccgatgttaatacccgtcaccaggcgctggcggatgcggaaagcgtggagtatctctatttcctgagcgacgcaatggggccgcggctggggcgggcatttctcgccgcttatgataaaggtgagttgggcaaagcggcggcgttgattaaagcctcggaagtcagcaccggcgcggcgaaaaaatattttcattacccgcgtcctttccaggtgccgggtaatactatccatctgacgccggatgatgtggtggtaaaagatggtcatccttataccgcgggtggcggtgctttccccagcggacacacgaataccggttatacggatgcgctgttgatggcggaaatgatcccggaacgctttgatgcgctggtgattcgtggcgcgcgttatggctattctcgcctggtccttggcgtacactatccgctggatgtgatgggcgcgcggatggtcgcgcagcgtaatgtcgcgcattatcttaacgatccgtattaccgtacgttattcaacgaagctcgcgctcaactgcgtgaggcgctggtgaaagagtgcggtacgacgattgtcgaatgcgcggcatcgaccggaaaagacgatccgtaccgcgatccggccatgcataccttctaccgcttcaccatgacttataacctgccgcaacagaaaggcgagcatcagccgttgaaaataccaaaaggcgccgatgttctgctacagacagcgctgccgaacctgtcgtcagcgcagtgtcaggcgttaatggaagagacggcgttaccggcaggatatccgttgtcgggcgagaccgaggatcaacagttctggcagcgtctggatctgtccgctgcttacgagatggcgagaaaaacgcgctga

SEQ ID NO: 370343 - DNA, 843 bp, Salmonella enterica
atgctcagttatcgtcacagctttcacgctggcaaccacgccgacgtccttaaacataccgttcagagcctgatcatcgagtcgctaaaagagaaagaaaaaccgtttctctatctggacacgcacgcgggcgcggggcgttatcaattgggcagcgaacatgctgaacgtaccggagagtatctggaaggcatcgcccgtatctggcagcaggacgatctgcccgccgaactggaaccgtatattagcgtcgtaaaacatttcaaccgcagcgggcagttacgctactatccgggctccccgttaatcgcccgccagttgctgcgtgagcaggacagtctgcaactcacggaattgcatcccagcgacttcccactgttgcgcgcggagtttcaaaaagacaaccgcgcccgcgtggaacgcgctgacggctatcagcaactgaaagccaaattaccgccggtttcccgccgcggtctgatcctcattgacccgccttatgaaatgaaaaccgactaccaggcggtagtcagcggcatcagcgagggttataaacgtttcgccaccgggacatacgcgctatggtatccggtggtgctccgccagcaaattaagcgcatggttcatgatctggaggccaccggcatccgtaaaatcctgcaaattgagctggcgatccgcccggacagcgatcagcgcgggatgacggcgtccggtatgatcgtggttaacccgccgtggaaactggagcagcagatgaacaacgtgctaccgtggctgcacagcaggttggcgccaaacggtcacggacacacttcggtaagctggatcgtgccggagtaa

SEQ ID NO: 370344 - DNA, 1353 bp, Salmonella enterica
atgaccaaacactatgattacatcgctatcggcggcggcagcggcggtatcgcctcgattaaccgcgccgctatgtacggccagaaatgcgcgctcatcgaagccaaagagctgggcggtacctgtgttaacgtgggctgcgtgccgaagaaagtgatgtggcatgccgcgcagattcgtgaagcgattcatctgtatggcccggactacggttttgacaccacgattaatcagttcgactggagcaagctgattgccagccgtaccgcgtatattgaccgcatccatacttcatacgacaacgtgctgggcaaaaataacgtggatgtgattaaaggctttgcccgctttgtcgatgccaaaaccattgaagtgaacggcgaaaccatcaccgccgaccatattttgatcgctaccggcggccgtccgagccatccgagcattccaggcgtggaatacggcattgattccgacggtttctttgcgctgtctgccttgccggagcgcgtcgcggtggtaggcgcaggttatatcgctgttgaactggctggcgttatcaacgcgctaggggcgaaaacgcatctgtttgtccgtaaacatgcgccgctgcgcagttttgacccgatgattagcgaaacgctggttgaggtgatgaacgccgaaggcccgcaactgcatactcacgccgtgccgaaagcggtggtaaaaaacgccgacggcagtctgactctggaactggaagatggccgcagtgaaaccgttgattgcctgatctgggccattggtcgcgaaccgtcgaccgacaatattaatctggcggcagcgggcgtgaaaaccaatgaaaaaggttacatcattgtcgataaattccagaataccaacgttgaaggcatttacgccgttggcgataacaccggcgcagtggagttaacgccagtcgccgtcgccgccggtcgccgtctctccgaacgcctgtttaacaacaagccggacgagcatctggactacagcaacatcccgaccgtggtctttagccatccgcctatcggcaccgtcgggttaagcgagccgcaggcgcgcgagcagtacggcgacgagcaggtaaaagtctataaatcatcgtttaccgctatgtataccgcggtgacgacgcaccgccagccgtgccgtatgaagctggtctgcgtcgggccggaagaaaaaattgtgggtatccacggtatcggcttcggcatggatgaaatgttgcagggcttcgcagtggcgctgaagatgggcgctaccaagaaagacttcgataataccgtcgctattcacccgaccgcatcggaagagtttgtgaccatgcgttaa

SEQ ID NO: 370345 - DNA, 1044 bp, Salmonella enterica
atgaaaatcagagttttcatggccaccgtgttgctgctcatcagccactgtgtatttagcacaacgtcactaccgcatattgttattctcgcgacaggcggtaccatcgccgggacggcagccaataatacgcaaaccgccggatataaatccggtgaacttggcgtgcaaacattaataaatgccgtgccggaaatgaataatatcgctcgcgttgacggcgagcaggtggcgaatattggtagcgaaaatatgaccagcgatatcatcctgaaactttcacagaaggtgaatgcgttattggcgcgggacgatgttgacggtgtggttattactcatggcactgacacgctcgatgaaaccgcctactttcttaatttgaccgtgaaaagcgacaaaccggtggtgtttaccgctgcaatgcggcccgcgtcggcaatcagcgccgatggcgcaatgaacctgctggaagcggtcacggtggctgctgacccgaatgcgaagggacgcggtgtaatggtcgttttaaacgatcgtattggttcggcgcgctttgtaacgaaaaccaatgccacgactctggatacctttaaagcgccggaagagggctatctgggggtcatcgttaatggtaagccacagttcgaaacgcgggtggaaaaaattcataccctgcgatctgtttttgacgtacgtaatatcaaaaaattacccaatgtggtgattatttacggctatcaggacgacccggaatatatgtatgatgcggcgatcgcccatcacgcggacggtattatttatgccggaaccggcgcaggttcggtctcggtacgcagcgacgcggggattaaaaaagcggagaaagccgggattatcgtggtgcgcgcttcccgcaccggaaacggcgtcgtaccgttggataaagggcagccagggctggtgtctgactcgctcaacccggcgaaggcgcgagtcttgctgatgacggcattaactcagacgcgtaatccggaactgatccagagttatttcagtacgtattaa

SEQ ID NO: 370346 - DNA, 1320 bp, Salmonella enterica
atgttttggacggaattatgttttatccttgtggccctgatgataggcgccaggatcggcggcgtatttttagggatggtcggcgggttaggcgtcggcgtgatggtttttatttttggcctgacgccttctacgccaccgattgatgttattctgattattctttctgttgtcctggcggccgcttctttacaggcctccggcgggctggatttactggtcaaactggcggaaaaaattctgcgtcgccaccctcgttacattacgttattagcgccgtttatctgttatatcttcacttttatgtcaggaacggggcatgtcgtttatagcttgttaccggttatttctgaagtcgcacgggattcaggtattcgaccggaacgtcctttatctatttccgttatcgcatcgcagcaggcgatcaccgccagtcctatatctgccgccatggcggcgatgattggtttaatggcgccgttgggcgtctctatttcaaccattatgatgatttgcgtgcccgccacgttaatcggcgtagcgatgggggcaatagcgacctttaataaaggaaaagagttaaaagacgatccggaatatcaacgtcggcttgctgaagggttaattaaacctgcgcagaaagaaagtaaaaatacggtagtcacttcgcgcgccaaattgtcggtggcgttatttctgaccagcgcgatcgttatcgttctgttaggactgattccggcgctgcggcccatggtggaaacagcgaaagggctacaaccgctttcgatgtccgccgctatccagattacgatgctctcttttgcctgcctgattgtgttgttatgtcggccgcaggtcgatcagattatcagcggtacggtatttcgggcgggcgcgctggcgattgtctgcgccttcggcctggcctggatgagtgagacgttcgtgaatggtcatatcgcgttgattaaggcagaagtgcaaactctattgcaacagcatacctggcttatcgccattatgatgttttttgtgtccgctatggtcagcagccaggcggcaacgacgttaattctgttgccgctggggctggcgttaggggtgcccgcttatgcgttaatcggctcctggcctgccgttaacggctatttctttattccggtggcggggcagtgtctggcggcgctggcgtttgacgacaccggtacgacgcgtatcggcaaatatgtgcttaaccatagttttatgcgtccgggattagttaacgtgattgtctcggtcattgtcgggctgttaataggaaaaatggttctggcctga

SEQ ID NO: 370347 - DNA, 846 bp, Salmonella enterica
atgagcatcagcgtattgggtattggcgacaacgttgtcgataaatacctgcattccggaatcatgtaccccggcggtaatgcattaaattttgctgtctatgcgaaattagcagacatccccagcgcgtttatgggggcgtttggcaatgacgacgccgcgcagcacgtacaggatgtattacaccagctacagatagacatctctcacagccgccattataccggcgaaaatgggtatgcctgtatccgtctctcgcatggtgatcgacaatttgtcgccagcaacaaaaacggcgtattgcgggaacatccttttagtctgtctgacgacgatcttcgctatatatcacaatttaccttagtccattccagtattaacggccacctggaatcggaactggagaaaattaaacaacaaaccgtcttactctcttttgatttttccgggcgcggtacagacgactattttaaaaaggtatgcccgtgggtagattatggatttatctcctgtagcgggttatcgccagatgaaatcaaaataaaactcaataaactttatcgttatggctgtcggcatattattgccacctgcgggcatgaaaaagtttattatttttccggcgcggattatctggagtggcaacctgcttatatcgaacctgtcgatacgctgggcgcaggcgacgccttcttaaccggttttttgctttccattttgcaatcgggtatggcggaacccgataaagaaagcgtgctacgcgccatgcggcagggcgggaaatcggcggcgcaggtgttatctcattacggcgcatttggttttggtaaaccgtttgcacaatag

SEQ ID NO: 370348 - DNA, 978 bp, Salmonella enterica
atgatgggtatgaaagagacagttagcaatattgtgaccagccaggcagagaaaggaggcattaaacacgtctattatgtggcgtgcggcggttcttatgcggcgttctatccggcgaaagcatttttagaaaaagaagcgaaagcgttgactgtcggtctgtataacagcggagaatttattaacaacccgccggtagcgctgggagaaaatgccgttgtggttgtcgcctcccacaaaggtaatacgccagagacaattaaagcggctgaaatcgcccgtcagcacggcgcgccggtcattggtttaacctgggtaatggattcaccgttggtggcgcattgcgactatgtggaaacgtacacgtttggcgacggtaaagatattgccggagagaaaacgatgaaaggcctgctgagtgcggtcgaactgctccagcagacggaagggtatgcgcactacgacgattttcaggatggcgtcagcaaaatcaaccgtatcgtctggcgcgcttgcgagcaggtagcggagcgtgcgcaggcgttcgcgcaggaatataaagacgataaagtcatttacaccgtcgccagtggcgcgggctatggcgcagcctacctacagagcatctgtatctttatggaaatgcaatggatacattccgcctgtattcatagcggtgagtttttccacgggccgtttgaaattaccgatgcgaatacgcctttcttattccagttttccgagggcaatacgcgggcggtggatgaacgcgcgttaaacttcctgaaaaaatatggccgccggattgaagttgtcgatgcgaaagaactggggctatcgaccattaaaaccacggttattgattactttaaccactctctctttaataacgtttatcccgtttacaatcgggcgttagctgaggcgcgtcagcatccgttaacgacgcgccgctatatgtggaaagtggaatattaa

SEQ ID NO: 370349 - DNA, 720 bp, Salmonella enterica
atgatcgagcaacccgacagtaaaagcgccaaaccgctttataagcagcttgaagccgccttaaaagaggccattgcgcgtggagagtataaaccaggccagcagatcccgacggaaaatgaactgagcgcgcgctggcaggtgagcagggtcacggtccgtaaggcgttggatgcgctgacgcgtgaaaatttgctgacccgtgtctccggcaaaggcacctttgtctctggtgagaaatttcagcgtagcatgaccggcatcatgagtttcagcgagttatgccagtcccagggacgtcgcccggggtcacgcaccatcaaatccgtttttgaatcggtagacgatgagacaaaagcgttactgaatatgaacgatggcgaaaaagcggtcgtcattgaacgtatccgctatgccgacgatgtggcggtatcgctggaaaccgtacatcttcccccacgttttgcgtttttgctggacgaagatcttaataatcactctttgtatgaatgcttacgcgagaaataccatttatggtttacccactcccgtaagatgatcgaactggtttatgccagctttgaagtcgcccattatcttggcgtcaacgagggttatccgctgatcctgataaaaagtgaaatgattgataacaaaggagaactctcctgcgtttcgcaacagttgattgtcggcgataaaatacggtttaccgtatga

SEQ ID NO: 370350 - DNA, 1650 bp, Salmonella enterica
atgctcaaccagaaattaaaccccacgccttctgaagatctgactattgatgtcgatctgctttatgaaacagacccgtgcgagttaaagctggatgaaatgatcgaggcggaaccggagccggagatgatcgaggggcttcccgcctctgacgccctgacccctgccgatcggtatctcgaactgttcgagcatgtacagtcaacaaaactgtttccagacagtaaaacgttcccggactgcgcgccgaagatggacccgcttgatatcctgatccgctaccgtaaggtcagacgccaccgtgattttgatttacgccgcttcgtcgagaaccatttctggctaccggaaaccttatccagcgagtatgtctctaaccccgaaaactcgctcaaagaacatattgaccagctttggccgatactgacgcgcgaaccgcaggatcatattccgtggtcttcgctgctggcgctgccgcaatcctatatcgtgccgggaggccgctttagcgaaacctattattgggactcttattttaccatgctgggtctggcggaaagcgggcgcgaagacttacttaaatgtatggcggataatttcgcctggatgattgaaaactatggccatattcccaacggcaaccggacctattatctgagccgctcgcagccgccggttttcgccctgatggttgaactgttcgaagaagatggcgtacgcggcgcgcggcgttatctcgaccatctcaaaatggaatacgccttctggatggacggcgccgaatcgctggcgctcaaccaggcttatcgccacgttgtgcggatgccggacggctccctgctgaaccgctactgggacgatcgcgacacgccgcgcgacgagtcctggctggaagatgtcgaaaccgcaaaacactccggtcgtccgcccaatgaagtctaccgggatttgcgcgccggggcggcgtccggctgggactattcttcacgctggctacgcgatgcgggccggcttgccagcatacgtacgacccagtttatccctatcgatttgaacgcttttctgtataaactggagagcgctatcgccaatatttcagcgctgaaaggcgaacgtgacaccgaggcgctatttcgccagaaagccagcgatcgacgcgccgccgtgaaccattatttgtgggatgatgaaaacggctgttatcgggactatgactggcgacgcgaagaaatggcgctcttttccgccgccagtatcgtgccgctgtatgtcggtatggcgaaccatgagcaggccgaccgcctggcaaatgtggtacgtagccgtctgttaacgcccggcgggattatggcgaccgaatacgaaaccggcgaacagtgggataaaccgaacggctgggcaccgctgcaatggatggcgatccagggcttcaaacggtatggcgacgatatgctgggcgatgaaatcgcccataactggttaaaaacagtgaaccatttttatcaggagcaccacaaactgatcgagaaataccatatttccggcggtacgccccgcgaaggcggcgggggcgagtatccgctacaggatgggttcggctggaccaatggcgtggtgcgccgcctgattggcctttacggagagccttaa

SEQ ID NO: 370351 - DNA, 1590 bp, Salmonella enterica
atgacgaatagcgcttcgcaggcgacacacgcgccttttgaacatagcctggggattatccgccaggcatcaatagaaatcctgctgctgctgggtattcataccaccgagggaaaagagccccggtggttcatggaacaacttgagcaggcgcgtcttaacctgggcggttggggcgcggtggcgaaaaaattgcggataaatgacgcgcagttgagccagtttatgctgcaactgcgtcaccttcagcagcatgttccccagtatgacagcgggcaagaggtgagcgaaaatcaactccttgccgcgttgcgttttgtcacctcgctggaacatctacgtcagcagcagccgctactgacgtatcaaactgagctggaagaacccgaccaggaggcgcatcttgaggcgcagcgtcagcttcgggcgatagaactgacgttaaaagcgcttattgcgcgcgcatggccggatcgggcgtccctgaatcactacctcaagcaacatttcggcccggaccgtttgcgccagtggttaaaacagggagaagatcaacatgcgctggagggcatgttgttcagcgaactggcgcttatggtggttgataaaaaattgtttgcccgtcattacgtcagaatttttaatgacgcctcagcgttaacgctgttcgccgagtcgcgcaccactctgcgtatgtttctggatgattgtcgcctcgcgcgaaacgaggttatcgccaggcagccgcttacctcagcgcagcttatgctgctaaacgttcagtatcagcaaatcgttcggcccatccagcgcgcctatgccgaaaaacgtacccgcgtgaatcccgcttcgtttctgctggcggatgaacgtgaattgcgccagttctgggaaaccgcgcggcttaaagatcggcaggccgggggagataagcatgagattagcgagagcatagaaccaccgcgtaagcggcctccgcgtacgcctgaagagcgtgagcaacttatttccggcgctttgtggggcgcggttggcgtcatgacgctggcgatactggcgggcgcgttctggctatttagttcgtcgtcgccaggctccgataacgggcaagctcccgcaatggcgcaggatgaaccgccgcgcgaggcgccttccgcgcgggaaacgctcaatcatatggggattacctgggatgcgtttaccatgcgggcggcgatagagcgcaatgatacgcgggtgacggcgctgttcctccagggcggaatgaactggcagctcgcgtggacggagcaggcgtttgcggcaggacataccgaggtgctgcaactgttgttgcgttatcccgcgctgatggatgaggtcaaaccctgccgacgatttatcacaacgttaagtcatgacatgtcgagcggcgcgccgctgaccgcgatgcataaaacctatttgcaaacgttttgtaccgttccggctgttgtgacgcgccagaagcacgatacggagcaggcccgactgcgcgctcaggcccggcccagcgcagacaataaaaaatggctgaaaattcagtcagccatttatgatgcgattcactga

SEQ ID NO: 370352 - DNA, 357 bp, Salmonella enterica
atgccgcacatttcatctcgctttagctccgcctgcatcgcgtttattaaacagtggcagggtctgtcgctggaaaagtatcgcgatcggcagggtaactgggtgattggttacgggcatatgttgacgccggatgagacgctgacgttcattacgcccgaccaggcggaggcattcttgctggatgacctcaatagctgcgatatactgctacagaattgtttgccggaacttaacgatcggtttcaacgcgaaacgcttattgcgctgatgttcagcatcggacatcagcgttttttatcattaatcaatacgggtgatatttcacagccagaaataagcggactgcgaatttaa

SEQ ID NO: 370353 - DNA, 603 bp, Salmonella enterica
atgcaggtaatcatgtttgacaggcagtcaatatttattcatggaatgaaaatcagtttgcagcagcacattccaggaataagtatccagagtgtcggtcaggcagaagaactctggcaaaaaatagaaagcgcgccggatgcgctggtcatgctggatagcggcctggatgctgaattttgccgcgaggtgttacaaagaaccgtgcagcaatttccggaggtgaagattattatcacggcgatggatggcagtcaaaagtggctgcatgaagtcatgcaatttaacgttcaggccgtggtgccacgcgattctgatgccgaaacctttgtccttgcgctcaatgctgtcgctcgcgggatgatgtttttaccgggggattggttaaattcaacggagctggagtcccgtgatataaaagcgttaagcgcccgccagcgggaaattttgcagatgcttgccgcaggagaatcaaataaacaaattgggcgggcgttaaatattagtaccgggacggttaaagcgcatctggagtcgctttaccggcggctggatgtaaaaaatcgtacccaggccgccatgatgttaaatgaatcgaattaa

SEQ ID NO: 370354 - DNA, 900 bp, Salmonella enterica
atggataaaatatatgcaatgaaattgtttgtacgcgtggcggaacgggaaagtttttcccgcgcagcagaggatatcggccttcccaaaggcagcgtctcacggcaaatacaagcgttagaacatcaactgggcatccgcctgctccaccgcaccacccggcgggtacaacttactcaggacggaatggtttactacgaacgggcaaaagatctgttgagtaacctggatgaactggagggtcttttccagcctgatcccgccagtatcagtggcaaaatacgggtagatataccgccatgtctcgcaaacagcctcatcatgccgcgcctgcccacttttttgcatcagtatcccggcattgcgctggaactttgtagtagcgatcgacaggtcgatttactacgggaagatttcgactgcgtggtgcgcacagagccgctacatgcgccagggatactgacgcgcccgcttggcaaactgagaagagtgaactgcgccagcccacaatacctggcgcgctttgggtatccagaaaaccttgacgatctcgcctcacatgcggtggtgcattattcattgaccccgggagtttcttcaccgggttttgcctttgaaactccccacggtatgcagtgggtaaaaaccggcggaatgctaacggtaaacagtacggagacttggcatacagcctgtctggcaggattaggaatcattcagacgccgcgcattgctgtacgggaggcgttacgcgccggaacgctcattgaaattttaccgcaatatcgcgccgctccactgccgatgacgctgcattatccccatcgccgtaatctttcccgccgggtacacctgtttatggtatggctgacggaaagcattaaagaggccgcagagtag

SEQ ID NO: 370355 - DNA, 1029 bp, Salmonella enterica
atgacgcaggaaaatgacgtaaaacgccctattcaggaactggagcacgacccgatacaaaaaatagaaacgcagccgcatgacgccccggaaaaaaacgaaaaggcaaatcaggcgttgcattccgtcaccaccctgatgcaaaaaattcagcgtcaaccaatggtggcccacctcattcgcgcgaccgaacgttttaacgatcgactgggtaatcagtttggcgcggctatcacctacttttcgtttctgtcgatgatcccgataatgatggtgtcctttgccgcggcaggttttatcctcgcctcgcaccctaatctactggaagatattttcagcaagatattgatgaatgtgagcgatcctacgctggcgtccacgcttaaaaatacgattaatacggcggttcaacagcgtaccacggtagggctggtcggactgggtatcgcgctctattccggcgttaactggatgggcaacctgcgggaagcgattcgcgcccagtcacgggacgtctgggagcgcaagccgcaggatcaggagaaaatctggctcaaatatctgcgcgattttatctcgctgattggattattaatcgctttaatcattacgctgtccattacttccatcgccggttccgcccagcagatgatcatctccgccttgtatctcgacagcatcgaatggttaaaaccggcctggcatttgatcggtctggccatctctatttttgccaactatctactttttttctggattttctggcgactgcctcgccatcgtccccgtaaaaaagcgttgattcgcgggacatttatcgccgctatcggttttgaggtgattaaaatcattatgacctatacgctgccgtcactggtgaaatcgccttccggcgcggcgtttggctccgtactcggtctgatggccttcttctacttttttgcccgcctgacgttattctgcgcggcctggatagccaccgccgaatacaaggacgacccgcgaatgccgggtaaaacgcaacgctag

SEQ ID NO: 370356 - DNA, 1323 bp, Salmonella enterica
atgcaagcaaccgccacaacactcgaccatgaacaggaacatgttccggtaaactcacgcaataaagtcgttattgcctcgcttatcggcaccgcgattgagttcttcgacttctatatttacgccaccgcagcggtgatcgtgttcccccttatcttcttcccccagggcgatcccactgcggcaacgctacaatcgctcgccaccttcgctatcgcgtttgtggcgcgtccgattggctctgcgctattcggccacttcggcgaccgggtaggccgcaaagtcacgctggtggcttcgctgctgacgatggggatctccacggtcattatcggtctgttaccgggctacgcgacgataggtattttcgcgccgctgctgctggcgctggcgcgtttcggtcagggactggggctgggcggcgaatggggcggcgcggcgttattagcgacggagaatgcgccgccgcgcaaacgcgcgctatatggctccttcccgcagttgggcgcgccgatcggcttcttttttgccaatggcaccttcctgttgctctcctggctgctgaccgacgagcagtttatgagctggggctggcgcgtgccgtttatcttctcggcggtgctggtgattatcggcctgtatgtgcgcgtgtcgctgcatgaaacgccggtgtttgcgaaagtcgccgcagcgaaaaagcaggtaaaaataccgctgggcacgttgctgacgaagcatgtccgcgtaaccattctcggcacgtttatcatgctggcgacctacacgctgttctatatcatgaccgtctattccatgacttacagcactgccgccgcgccggtggggcttggcttgccgcgcaatgaaatactgtggatgctgatgatggcggtgattggtttcggcgtgatggtgcccgtcgccggcctgctggcggacgcatttggccgtcggaaaagcatggtcatcattaccacgctcatcattctcttcgcgttgttcgcctttaccccgctgctgggttcaggcaatccagcgctggtattcgtgttcctgttgttaggcctgagcctgatggggctgaccttcggcccaatgggagcgctgctgccggagctatttccgacggaagtgcgctataccggcgcatcgttttcctacaatgtctcatcgattctgggcgcttccgtcgcgccgtatattgccgcatggctgcaaagccactacgggctggcggcggtaggggtttacctggcgtcaatggcggcgctgacgctgattgcactgctgttaacccatgagacgcgtcatcaggcgttgtaa

SEQ ID NO: 370357 - DNA, 2061 bp, Salmonella enterica
atgactaaagcaggcaaaataaccgccgccattacagggactttcttgttgttgatcgccatagtgattttgttgatcgcaacatttgactggaaccgcctcaaaccgaccatcaaccagaaagtctctaccgaattgaaccggcctttcgctattcgcggcgatttaggcgtggtgtgggaacgccaaaaacaggagaccggctggcgaagctgggtaccgtggccgcatgttcacgcggaagacgtcattctcggcaatccgccggatattccggaagttacgatggtgcatctgccacgcgttgaggcgacgcttgccccgctggcgctcctgaccaaaaccgtctggctgccgtggatcaaactggtgaaacccgacgcgcgtcttattcgtctgtccgagaaaaccaataactggacctttaacctcacgcaagacaagaatacggaccccaatgctaaaccttccgcctggtccttccggctggataatattctcttcgaccaggggcgaatcgcgatcgatgataaggtcagtaaagcggatatcactattctggtcgatccgttaggcaaaccgttgccgttcagcgaagtgacgggaacgaaaggcaaagcagacaaatccaccgtgggcgactatgtcttcggcctgaaggcgcaggggcgttataacggggaaccgttgaccggtacgggaaaaataggcggtatgctggcgctacgcagcgaaagtacgccttttcctgtgcaggccgatttccgctctggtaatacgcgggtggcttttagcggcgtggtgaacgaaccgatgaaaatgggcggcgtcgatctgcggcttaaattctctggcgattcactgggcgatttatatgatttaaccggcgtgctgctgccggatacgccgccgtttgagaccgatgggcgattggtggcgaaaattgacgccgaaaagtcatcagtatttgattatcgcggttttaacgggcgcattggcgacagtgatatccacggctccctcacttataccaccggtaaaccgcgccctaaactggaaggcgatgtcgaatcgcgccagttacgcctggccgatcttgggccgctgattggcgtggattccgggaaagacgctgagcagtcgaaacggtctgaacagcgcaaaggcgagaagaatgttcagccggcggataaagtgttgccttacgatcgctttgaaaccgacaaatgggacgttatggacgccgatgtccggtttaaaggccgacgtattgaacatggcggcagtctaccgattagcgatctttcgacccatatcatcctgaaaaacgccgacttacgtctacagccgctgaagtttggtctggcaggcggcagtattgtctccaacatccatttggaaggggataaaaagccaatgcaggggcgggcggatatacaggcgcgtcggctgaagcttaaagaactgatgccggatgtggagctgatgcagaaaacgctgggcgagctgaacggcgatgcggatattcgcgggacgggcaactcggtcgccgcgctgcttggcaacagtaacggcaatctcaaattattgatgaatgatggattgattagccgcaacctgatggaaatcgtggggctgaacgtcggcaactatattgtcgggcagatttttggcgatgacgaagtgcgggttaactgcgcggcggcgaatctcaatattgcgaacggcgtggcgcgaccgcaaatttttgcttttgatacagaaaatgcgttgattaacgtgaccggtacggcgagcttcgcctctgaacagctcgatttaaccattgatccggaaagtaaggggattcgtattattacgctacgatcgccgctgtacgtgcgtgggacatttaaaaatccgcaggcgggcgtcaagcccggcccgctgattgcgcgcggcgcggttgcggcagcgctggcgacgttggtaacgcccgccgccgcgctattggcgctcatttcgccctctgaaggcgaagccaatcagtgccggacgattttaacgcagatgaagcagtaa

SEQ ID NO: 370358 - DNA, 768 bp, Salmonella enterica
atgataaagcaggttatccagcagctacgcgttcctgatgcaggtatagagaatttgcaggaacggcgctattggctgcaatgcgagcgtgcctatacttaccagccgatataccagacggatggccgtctgatggcggttgaacttctcactgtcgtcacccatcctgataacccttccagacgtattgccccggatcgttatttcgcggagttagcggttcgacaccgcattgacgtagtgaaagaacaacttcatcagcttgaacaaaaagcggattttttcactcgccatcacttattggcatcagtcaatgttgacggccctacgctgattgccatgcgacgacagccggacattctggcagcgatggagcgtttaccctggctgcgtttcgaattggtggaacatattcgtttgccgaaagactcctctttcgcctcgatgtgtgagttcggcccgctgtggctggatgattttggtactggtatggccaatttttcagcgctgagcgaagtgcgttatgactacattaaagtggcgcgcgagctgttcgtcatgctgcgtcagtccgcggagggacgcaacctgttcactctgctgctgcaactgatgaaccgctactgccgcggcgttattgtcgagggcgtggagacgctggaagagtggcgtgatgtgcagcgttcgcccgcctttgccgcccagggctattttctttctcgacccgtgccgctgatatcgctcgaagaggtgattctgaccctgtaa

SEQ ID NO: 370359 - DNA, 930 bp, Salmonella enterica
atgtctaaaaagattgccgtgattggcgaatgcatgattgaactgtcgcagaaaggcgctgatgttcagcgcggcttcggcggcgacacgctgaatacctccgtttatattgcccgtcaggtcgattctgccgctctggccgttcactatgtgacggcgctgggtaccgacagtttcagccaacagatgctggaggcgtggcagcatgaaaatgtggatacctcgctaacgcagcggatggaaaatcgcctaccaggcctctattacatcgaaaccgatgacactggcgagcgtaccttctactactggcgtaacgaagcggcagcgaaattctggctggagagcgagcagtcagcggctatctgcaaggcgctggcgaccttcgattatctctacctgagcggcattagcctcgcgattttaagcccgaccagccgtgataagctgctgtctttattgcgtgaatgccgggccaacggcgggaaagtcatttttgataataactatcgcccgcgtttatggacaagtcgcgaagaaacgcagcaggtctatcaaaagatgctggaatgtactgatatcgctttcctgacactggacgatgaagacgcgctatggggtcagcaaccggtggaagaggtcattgcccgcacccatgcggcaggcgtgcaggaagtggtggtaaaacgcggggcggactcttgcctggtctcaattcagggcgaggcgctcattgacgttccggcagtaaaactgccgaaagagaaagtgatagacaccactgccgcaggcgactccttcagcgccggttatctggccgttcgtttgacgggcggcagcgcgacggatgccgcgaagcgcggacacctgacggccagcacggtaattcagtaccgtggggccattattccgcacgacgcgatgccgcagtaa

SEQ ID NO: 370360 - DNA, 1488 bp, Salmonella enterica
atgcagggcacaaaaattcgactcttagcgggcagtctgttgatgttggcctctgccggctatgtgcaggcagatgcgctccagcccgatccggcatggcaacaggggacgctggctaatgggttacagtggcaagtgttggctacgcctcagcgccccagcgatcgtattgaagttcgtctccaggttaataccggttcgctcaccgaaagtacgcaacagagcgggttcagccatgcgattccccgtatcgcgctgacgcaaagcggtggtctggatgccgcacaggcacgttctttatggcagcaagggtttgatccgaaacgtcccatgccgcccgttattgtttcttatgattccacgctctataacctcagtttacccaataaccgtaacgatctgctgaaagaagcgctgacctatctggctaacgtctccggtaaattaaccattacgccagagacggtgaatcatgcgttaagcagcgaagatatggttgcgacgtggccagcagatactaaagagggctggtggcgttatcggctgaaagggtcggcgttattggggcacgatcccgcggaaccgttaaagcagccggtagacgcagccaaaattcaggctttctatgaaaaatggtacaccccggatgccatgacgctgattgttgtcggcaacattgatgcgcgctccgtcgccgagcagatcaacaaaacgttcggtacgctgaaaggtaaacgcgaaacgcccgccccggtgccgacgctttcgccgctgcgggcggaatcagtgagcattatgaccgatgcggtgcgccaggatcgtctctccattatgtgggatacgccgtggcaaccgattcgcgaatcggcggcgctgttgcgctactggcaggcggatctggcgcgcgaagcgctgttctggcatatccagcaagagcttactaaaaataacgcgaaagatattggtctggggtttgactgccgggttctgttcctgcgcgcgcagtgcgccatcaacattgaatcacctaatgataagctcaataccaatttgagcctggtggcgaatgaactggcgaaagtacgcgataaaggtttgtcggaagaggagtttactgcgctggtggcgcagaaaaatctcgaattgcaaaagctgttcgcgacctacgcgcgtaccgatactgacattttgactggacagcgtatgcgctcgctgcagaatcaagtggtggatatcgcgccggagcagtatcagaagctgcgtcagaatttcctcaacagcctgaccgttgatatgctcaatcagaatttacgtcagcagctatcgcaggagatggcattaattttgctgcaaccgcaaggcgagccggaatttaatatgaaggcgttaaaggcgacgtgggatgaaatcatggtcccgacaactgccgccgctgttgaagcagatgaggcgcatccggaagtgacggagacaccggcggcacagtaa

SEQ ID NO: 370361 - DNA, 1287 bp, Salmonella enterica
atgaaaacctctctgttcaaaagtctttattttcaggtcctgacagcaatcgccattggtattctccttggccattactatcctgaactgggcgcacaaatgaaaccgcttggcgacgcgttcgttaagctcattaagatgatcatcgctcctgtcattttctgtacagtcgtgacgggcatcgcaggcatggaaagcatgaaagcggtggggcgtaccggcgcggtcgcgctgctttactttgaaattgtcagtacgattgcgctgattatcggtcttatcatcgtcaacgttgtgcaacctggcgccgggatgaacgtcgatccggcaacgctggatgcgcaggcggtggccgtttatgccgcacaagccaaggagcagggcattattgccttcctgatggatgtcataccgggcagcgtgatcggcgcgtttgccagcggcaacattctgcaggtcttactgtttgcggtgttgtttggttttgcgctgcaccgtttgggcagcaaaggccagctcattttcaatgtgattgagagtttttcgcaggtcattttcggcatcatcaatatgatcatgcgcctggcgccgattggcgcattcggcgcgatggccttcaccatcggtaaatacggcgtcggttctctggtgcaactggggcagctcattatctgcttctatatcacctgtattctcttcgtggtggtggtgctggggacgattgcacgggtaacgggctttagcatttttaaatttattcgctatatccgggaagaattactcattgtgctcggcacctcctcttccgagtcagcgttgccgcgtatgctcgataagatggaaaaactggggtgccgtaaatcggtggtggggctggtgatcccgacggggtattcgttcaaccttgatggcacctctatttacctgacgatggcggcggtgtttatcgcccaggcgaccaacagccatatggatatcttccaccagataacgctgctggtcgtgctgctgctctcgtcaaaaggcgccgcgggcgtgaccggaagcggctttattgtgctggcggccactatctccgccgtgggccatttaccggttgcgggactggcgttaatccttggtatcgaccgctttatgtccgaagcgcgcgcgctgactaacctggtgggtaacggcgtggcgacggtggtggttgccaaatgggtgaaagagttagatcaccaaaagctggacgatgtgcttaataatcgtgcgccggatggcaaaacgcacgaaatttcctcctaa

SEQ ID NO: 370362 - DNA, 2007 bp, Salmonella enterica
ttgcgcgtcagccgctcgttaacaattaaacagatggcaatggttgcggccgttgtcatggtgtttgtttttgtcttttgcaccgttttgttgttccatctggtacagcagaaccgctacaacacggctacgcaactggaaagcatcgcgcgatctgttcgggaacctctttcttccgcgattttaaaagcggatctccccggcgcggaaaccattctggaaagtattaaacctgcgggcgtggtgagtcgcgccgatgtggtattgccgaatcagttccaggcgttgcgtaagcgcttcattcctgaacgccccgtcccggttatggtgacgcgtctcttcgaactgccggtacaaatttctttgccggtttattcgctggagcgtcccgccaatccgcaaccgctggcctaccttgtattgcaggcggattcgtaccgtatgtacaagttcgtcatgagcgcgctctctacgttagtgaccatttacttacttttatcgctgatcctgacggtggccatcgcctggtgcgtaaaccgcctgattgtgcatccgctgcgcaaaatcgcccgcgagctgaacgacattccgcagcaggagctgatcggacatcagctggcgttgccgcgtctgcatcaggatgatgaaattggaatgctggtgcgcagctataacctcaaccagcagcttatgcagcgtcaacgcgaggagcaaacggacaacgcgatgcgttttccggtttccgagctgcccaataaagcctttttaatggcattgctggaacaggttatcgcccgccaacagaccaccgcgcttatcatcgtgacgtgcgaaacgttgcgtgacacggcaggcgtgctgcaagaaacgcagcgggagattctattactgacgctggttgagaagctgaagtcggtgctggcgccgcgcatggtgcttacgcaggtcagcgggtatgacttcgccattatcgcccacggcgttaaagagccgtggcacgccatcacattaggtcagcaaatactcactatcattaatgaacgactgcccatccagggtattcaactgcgcccaagctgcagtattggcattgcgatgtattatggcgatctgaccgccgaagcgctctatggtcgcgccgtttccgccgcgtttaccgcgcgccgaaaaggtaaaaatcagatccagttctttgacccggcgcagatggaggccgctcaacagcgccttaccgaagagagcgatatccttaccgcgctggataaccatcagtttgccatttggttgcagccgcaggtcgagatgcgcagcggcaacgtattaagcgccgaagccttgttacgtatgcaacagccggacggtagctgggaattgccggaggggctgattgagcgcattgaatcctgcggcctgatggtcacggtgggccattgggtgctggaagagtcctgccgccagcttgccgcctggcaggagcgcggcgtgacattgccgctctccgtcaatctttccgcgttacagctcatgcaccctggcatggtgtcggatctgctggaattgttaaatcgctatcgtattcaaccgggtacgctgattcttgaggtcactgaaagccgccgtatcgacgatccgcacgctgccgtcgctatcttacgtccgttacgtaatgctggcgtgcgtatcgcactggatgattttggcatgggttacgcggggctgcgccagttacagcatatgaagtcgctaccggtcgatatccttaaaattgataaaatgtttgtcgatgggttaccggatgatcacagtatggtgacggcgattattctgatggcccgcagtcttaatttacaattgattgccgagggcgtggagaacgaggcgcaacgcgcgtggctggaacaggcgggagtcaacgtcgcgcaaggcttcctgtttgctcggcccgttcccgcggatatctttgaagaacggtatctgtcgcacgaaaattctgattacaaaagttaa

SEQ ID NO: 370363 - DNA, 3543 bp, Salmonella enterica
atgcgtaagttcacgttaagtctcatgcacgcttttttgccggctggcggtcgaaacgccttacctggcaaaaggggcgtttctcgggcattgttgggtttatcgcttggtatggcgctaacaccgcttgccggcgcagcgacctccgcgcagcaacagttgctggagcaggttcggctgggcgaggccacgcaccgtgaggacttagtccgtcagtcgctctatcgcctggagctgatcgaccccaatgatccacaggttatcgccgcccgtttccgctatctgttgcgccagggggatagcgacggggcacagaagctacttgaccggctggcgcaactggcgccggagtcgacggcgtatcaatcttcccgcaccgcgatgctgctctccacgccacaaggacgtcagtctttgcaggaggcgcgtttactggcgacgaccggccatactgaacaagcgatcgccagctacgacaagttgtttaaaggttatccgccggagggcgaactggcggtcgaatactggacgaccgtggcgaaattgcccgcccgccgtcacgaagcgattaaccagctacagaaaatcaatgccgtcagtccgggtaataacgctctgcaaaatgcgctggcgcaactgttgttcgccagcgggcggcgcgatgagggatttgcggtgctaaaacagatggcgaaatccagtacgggacgcagcgcggcctccgccatctggtaccagcagataaaagatctcccggtgagcgacgccagcgtaaaagcgttgcaagactatctgacgcagtttagcgaaggcgatagcgtgtctgccgcccgcgcccagcttagcgagcagcaaaaacagttagccgatccggcgttccgcgcgcgctcgcagggcatcgcggcggttaatgccggagaaggcggtaaggccattgcgcaattgcagcaggcggtgagcgcccggcaggacgacagcgaggcggtcggcgcgctggggcaggcatactcacagcgtggcgatcgcgcccgcgccgtcgcgcagtttgaaaaagcgctggcgatggcgccgcacagcagcagccgcgataagtgggagagcctgctgaaggtcaatcgctactggctgttaattcagcagggcgacgcggccttaaaagcgaataatctggcccaggcggagcgtttctatcagcaggcgcgagcggtggataacaccgacagctacgcggtactggggctgggggatgtggcgatggcgcgcaaagataatgccgccgccgaacgttattatcagcagacgctgcgtatggatagcggtaataccaatgctgtacgcgggctggcgaatctttatcgccagcagtcgccgcaaaaagccgccgcgtttatcgcttctctttccgccagccagcggcgcagtatcgacgatatcgaacgcagtctggaaaatgaccgtctggcgcagcaggcggaaacgctggaaagcgagggcaaatgggcgcaggccgcagaactgcaccgtcgccggctggcattagatccggggagcgtgtgggtgacgtaccgactgtcacgcgatctgtggcaggccgggcagcacgcccaggccgatgcgcaaatgcgctctctggcgcagcagaagccaaacgatccggaacaggtctatgcttatgggctttatctttccggcagcgatcgggaccgggcggcgctggcgcatctcaataccctaccgaccagccagtggaacagcaatattcaggaactggcgggccgattgcaaagtaaccaggtgctggaaagcgctaaccgcttgcgcgatagcggcaaagaacgcgaagcggaagcgttgttacgtcagcagccgccctctacgcgcattgcgttaacgttggcggactgggcgcagcagcgtggcgataatgcggcggcccgcgccgcttatgacgccgttctggcgcgggaaccgggtaatgtcgatgccatgctggggcgggtggaaatcgacatcgcacagggcgataacgctgcggcgcgcgctcagctggcggcgctgcctgcgtcgcaaatcacctctattaacatgcagcgccgcgtcgcgctggcgcagctccagcttggcgatatcacggcggcggcgcggaccttcaaccgcattacgccgcaggcaaaagcacagccgccatcaatggaaagcgcgatggtattgcgtgacgccgccgcttttcaggcgcaaacgggcgagccgcagcgggcgttggaaacctataaagaggcaatggtcgccgcggcgattacgccggttcgtcccctggataacgatacctttacccgcctgacgcgcaatgatgaaaaagatgactggctaaaacgcggcgtgcgtagcgatgcggcggagttgtaccgtcagcaggatctcaatgtcacgttggcgcacgattattgggggtcgagcgggactggcggctactccgatctgaaggcgcataccacgatgcttcaggtggatgcgccctggtcggacggacgggcgttctttcgtactgatatggtgaatatggatgttggccgcttctctacggatacggatggaaaatacgataataactggggtacctgtacgctggagaaatgcagcggacatcgtagccaggccgatacgggcgcgagcgtggcggtcggctggcagaatgagacctggcgctgggatatcggcacgacgccgatgggctttaatgtcgttgatgtggtcggcggcgtcagctatagcgacgatatcgggccgttgggttataccctgaacgcgcatcgtcgcccgatctccagctcgctgctggcgtttggcgggcaaaaggacgccagcagcaataccggcaccaaatggggcggcgtgcgggccaacggcggcggcgtcagtctcagctatgataaaggcgaagcaaacggtgtctgggcgtcgctcagcggcgaccagttgagcggtaaaaatgtggaagataactggcgcgtgcgctggatgaccggttattactataaggtgattaacgagaataaccgccgcgttaccgtcgggctgaataacatgatctggcattacgacaaagatttgagcggttattcactgggtcagggcggttattatagcccgcaggaatacctgtcgtttgcggtgccggtgatgtggcggcagcgtacggaaaactggtcgtgggagctgggcggctcggtatcctggtcgcactcccgcaaccgtaccatgccgcgttatccgctgatgaatttgatcccggcggattatcaggaggatgcgcgtgaccagaccaacggcggcggcagcagccagggatttggctataccgcgcgggcgctcattgaacgccgggtcactgccaactggtttgtgggtacggctgtcgatattcagcaggcgaaagattatacccccagtcatctgctgctgtatgtccgttattccgcggcgggctggcagggggatatggatttaccgccgcagcctctggtgccttacgctgactggtaa

SEQ ID NO: 370364 - DNA, 1110 bp, Salmonella enterica
atgatgactatgctgcgcggatggataacgatgatcgtcatgctgacggcaataaatgcgcaggcggcctgtagctggcctgcgtgggaacagttcaagaaagattacattagccagcagggacgcgttatcgatccgggcgatgcgcgaaaaattaccacctccgaagggcaaagctacgccatgttctttgccctggcggcgaacgatcgaccggcgttcgcgcaactgtttaactggacgcaaaacaatctggcgcagggatcgctgcgtgaacatctgcccgcctggctgtggggacaaaaagatcccgacacctggtcggtgctggacagcaactccgcgtccgacggcgatatctggatggcatggtcgctgctggaggccggtcgcctgtggaaagagacgcgttataccgaggtgggcacggcgttgctaaaacgcatcgcccgcgaagaggtcgtgaatgtgccggggctgggctcaatgctgctacctggcaaaatcggctttgccgaggcgaatagctggcgttttaacccaagctatctgccgccgcagttggcgcaatactttagccgttttggcgcgccgtggtcgacgctacgggaaaccaatttgcggcttttgctggaaaccgcgccgaaaggtttctcgccggactgggtgcgttatgaaagcaagcaaggctggcagttgaaagcggaaaagacgctgatcagtagctacgatgcgattcgcgtctatttatggacgggaatgatgcatgatggcgatccgcaaaaagcgcgtttactggcgcgatttaaaccgatggcgacgttaacgatgaaaaacggcgttccaccggagaaagtggatgtcgtcagcgggaatgcgcaggggacggggccggtcgggttttccgccgctttactgcctttcctgcaaaatcgcgacgcccaggccgtgcagcgacagcgggtcgcagaccattttcctggcagcgatgcctattacaactatgtgctgactctctttggacaaggctgggatcagcaccgttttcgcttcaccgtcaaaggtgaattattacctgactggggccaggaatgcgtaagttcacgttaa

SEQ ID NO: 370365 - DNA, 2151 bp, Salmonella enterica
gtggcacagaccgcgccttcgcgcgaggtcaagctgacctttgcgcaaatcgcgccgccgccgggtagtatggcgctgcgtggcgttaaccctaacggcggcattgaatttggtatgcgcagcgatgaagtggcgtcgaaagcggtgctgaatctggaatatacgccctcgccgtcgctcctgccggttcagtcgcagctcaaggtttatctcaatgatgaactgatgggcgtactgccggtgacaaaagagcagttggggaaaaagacgctggcgcaggtacctatcaatccgctatttatcaccgattttaaccgggtgcggctggagtttgtcggccactatcgcgacgtgtgtgaaaatccggccagcagtactctgtggttagacatcgggcgaaatagcgccctggatctgacctataacatgctggcggtgaataacgatctgtcccacttcccggtgccgtttttcgatccgcgggataaccgtccggtgacgttgccgatagtgtttgctgacatgccggatctggcgcagcagcaggcggcttctattgtcgcgtcctggtttggctcgcgggcgggctggcgcggtcagcgcttcccggtgttgtataatcacctgccggatcgcaatgcgatcgtgttcgccaccaacgatcgacgccccgatttcctgcgcgatcatcctgcggttaacgcgccggttatcgagatgatgagccatccggataatccgtatgtgaagttgctggtcgtgtttggccgtgatgataaagacctgttgcaagcggcaaaaggtatcgcgcaagggaatattctcttccgtggttccagcgtggtggtcaacgatgtaaaaccgctgctggcgcgcaaaccgtatgatgcgccgaactgggtgcgtaccgatcgcccggtcacttttggcgagctgaaaacctatgaagagcagctccagtcgagtgggctggagccggcgcccatcaatgtttctttgaatctgccgccggacctctatttgctgcgtagcaacggtattgatatggatctcaactaccgttatacctcgccgccgaccaaagacagttcacgactggacatcagtctgaataaccagttcctgcaagcctttagccttaacagcacgcaggaaactaatcgactcctgttgcgcttgccggtacttcagggactgctggatggtaaaacagatgtgtctattccggcgctcaaactgggggcgatgaaccaactacgttttgacttccgctacatgaatccgatgccgggcgggtcggtggacaactgtattaccttccagcctgtaccgaatcatgtggtgataggggatgactccactatcgatttttcgaaatattaccactttatcgcgatgccggatttacgcgcgttcgccaatgcgggtttcccgttcagccggatggccgacttgtctgacacgctggcggtgatgccgaagaccccaaccgaagcgcaaatggaaacgctgctgaatacggtcggtgccattggcgggcagaccggtttcccggcaattaatctgaccatcaccgatgatagcgctcagatagccgacaaagacgccgatctgctgattattggcgctattccgggcaagctaaaagatgataagcgtatcgatctgttggtgcaggcgacacaaagctgggtaaaaaccccgatgcggcagaccgctttcccgtcgattatgccggatgaggccgatcgcgcggcggatgcgcagtccaccgtcaccgccagcggcccgatggcggcggtggtgggcttccagtcgccgtttaatgatcagcgcagcgtgattgctctgctggctgatagcccgcgcggttaccagctactgaacgacgctgtgaacgacagcggtaaacgcgccgcgatgtttggttccgtggcggtgatccgcgagtccggcgttcacagtctgcgcgttggcgatatctattacgtcggacatctgccgtggtttgagcggctgtggtatgcgctggcgaatcacccggtgctgctggcggtactggcggccctcagtgtggtattactggcgtgggtattgtggcgtctgctacgtattctcagtcgccgtcgtctcgaccctgaccatgagtaa

SEQ ID NO: 370366 - DNA, 2625 bp, Salmonella enterica
atgagcgccctttcccggtggctgcttatcccgccggttagcgcgcgtttgagcgagcgctatcagggttaccgccgccacggcgcgtcgccgtttagcgcagcgctcggctgcctgtggatgattctggcgtggatagtttttccgcttgagcatccgcgctggcagcgtattcgcgacgagcataaagcactttatccgcatattaacgccgcccgcccgcgcccgctggacccggcccgttacctcattcagaccctctggctggtgatgatctcgtcgactaaagaacgtcatgaaccgcgctggcggtcatttgcgcgcctgaaggacgttcgtggacgttaccatcaatggatggataccttaccggaacgggtgcgccaaaagacaacgcacctggaaaaggaaaaagagctgggacatcttagcaacggtgcccggcgttttattctgggcgttatcgtgaccttttcactgatactggcgctgatctgtattacgcagccatttaacccgctatcgcaatttatctttctgctgttgctgtggggcgttgcgctgttggtacgacgtatgccgggacgcttttccgcgctgatgctcatcgtgctgtcgctaacggtctcctgtcgttatatctggtggcgctatacctcgacgctaaattgggacgacccggtcagtctggtgtgcgggctgattctgctgtttgcggaaacctacgcctggattgtgctggtgctggggtacttccaggtggtgtggccgttaaatcgtcaaccggtgccgttgccgaaagaaatgtcgcagtggccgacggtggatatttttgtaccgacctataacgaagaccttaatgtggtcaaaaataccatttacgcttcgcttggcattgactggccgaaggacaagctgaatatctggatccttgatgacggcgggcgtgaatcatttcgtcattttgcccgacatgttggcgtgcattacattgcccgcgccacgcatgaacacgccaaagccggcaacatcaacaatgcgctaaaacacgcgaaaggcgagtttgtggcgatcttcgattgcgaccatgtgccgacacgctcgtttctgcaaatgacaatgggctggttcctgaaagaaaaacagctggcgatgatgcagacgccgcatcatttcttctccccggacccgtttgagcgcaacctgggacgttttcgtaaaacgcctaacgaaggcacgctgttttacggactggtacaggacggtaacgatatgtgggacgccactttcttttgcggatcgtgcgcggtgattcgccgtaagccgctggatgagattggcggtatcgccgttgagacggtgacggaagatgcgcatacttcgctccggctgcaccggcgaggttatacctcagcgtatatgcgcattccgcaggcggcggggctggcgacggaaagcctgtcggcgcatatcgggcagcgtattcgttgggcgcggggcatggtgcaaattttccgcctcgataaccctctgtttggtaaaggcttaaaactggcgcagcggctgtgctacctcaacgcgatgttccatttcttgtccggcattccgcgcctgatctttctgaccgcgccgctggcttttctgctgctgcacgcctatatcatttatgcgcctgcgttgatgattgcgctatttgtgataccgcacatggtccacgccagcctgactaactcgaagattcagggcaagtatcgtcactctttctggagtgaaatctatgaaacggtactggcatggtatatcgcaccgccgactctggtcgcgttgatcaatccgcacaaagggaaatttaacgtcacggcgaaaggcgggctggtggaagagaagtacgtcgactgggtaatctcgcgtccgtatatcttccttgtcttgcttaacctgctcggcgtggcggcgggcgtatggcgatactattacgggccggaaaatgaaacgctgaccgtcatcgttagcctggtgtgggtcttctataacctggtcattctcggcggcgcggttgcggtttcggtagagagtaaacaggtcagacgcgcgcatcgggtcgagattgccatgccgggggccatcgcccgcgaagatggacatttgttctcctgtaccgtacatgacttctccgacggcgggttaggcatcaagatcaacggtcaggcgcaggtgctggaagggcagaaagtgaatctgttgcttaaacgcgggcagcaggaatatgtctttccaacgcaggtggtgcgcgtaacgggcaatgaggtcgggctgcaactgatgccgctcaccaccaaacaacatattgattttgtgcagtgtaccttcgctcgcgccgatacgtgggcgctttggcaagatagcttcccggaagataaaccgctggaaagcttgctggatattctgaagctgggcttccgcggatatcgccacctcgcggaattcgcgccgccttcagtaaaagtaattttccgatcgttgacggcgttaattgcctggattgtatcgtttattccgcgtcgcccggagcggcaagcggcgatacagccgtcggatcgggttatggctcaggctcaacaatga

SEQ ID NO: 370367 - DNA, 753 bp, Salmonella enterica
atggcgattctgggactgcagggcgtgcgcggcggggtgggaaccacatctctcaccgcagcactcgcctgggcgttacaaatcttaggggaaaatgtcctggtgattgacgccagccccgataacctgctgcgcatgtcgtttaacgtcgacttcgtccatcagggcggttgggcgcgatcgttgctggacggccaggactggcgcgatgccggattacgttatacctcacagcttgatctactgccgtttggacagctcaccgcgcaagagcgggaaaatccgcagtcctggcaggagacgctgggagagatcggatcggctatccaggcgctgaaagcgagcgggcgttatagctggattttactggacttgccctacggcgcgtcaccgctgacacggcagctggtgagcctctgcgaccatacgctggcggtagcccgggttgacgctaactgccatattcgccttcatcagcaggcgttgcctgccggagcgcatattctgatcaatgacttacgcattggcagtcagttacaggacgatctgtaccaggtctggctgcaaagccagcgccggttgctgcccattgtgatccatcgcgatgaggcgatggcggagtgcatggcgtcgaaacagccgttaggcgaatatcgcagcgattcgttagctgccgaagaggtgttaacgctggcgaactggtgcctgctgcatgatgcgggcgacaaaacgtccgccgggagcctgcgatga

SEQ ID NO: 370368 - DNA, 204 bp, Salmonella enterica
atgtataacaatgaacctggcgctcagtccgatccaacgttgggctacacttttcaaaatgattttctggcattaagccaggcgttttcactacccgaaatagattataccgatatttcccaacgcgaacagttggcggcggcgattaaaagatggccgctcctggctgaatttgcgcaaccacattcattaaggaagccatga

SEQ ID NO: 370369 - DNA, 1560 bp, Salmonella enterica
gtggaccccgtattttctctcggcatctcatcattatgggatgaactgcgccatatgccaaccggcggcgtctggtgggttaacgccgatcgccagcaagatgccatcagcctggtgaatcaaacgattgcgtcacaaacggagaatgcaaatgtcgccgtcatcggcatggaaggcgatcctggcaaagtaatcaaattagatgaatctcacggtccggagaaaatccgcttatttaccatgccggattcagaaaaagggctatactctttgccccacgatttgctttgttctgttaacccgacgcattactttttcattcttatttgtgcaaataacacgtggcggaatataacgtcagaaagcctgcataaatggctggaaaaaatgaataaatggactcgttttcatcactgttcattgttggttattaacccttgtaataatagcgataaacagtcctcgttgttgatgggcgagtatcgctcacttttcggcctcgccagtttacgttttcagggcgaccaacatttgttcgatattgccttctggtgtaacgaaaaaggcgtcagcgcccgacagcagttattgctgtgtcagcaggacgaacgctggacgctatcccatcaggaggagacggcaattcagccgcgtagcgacgaaaaacgcattcttagccacgtcgccgtccttgaaggcgcgccgccgctctcggaacactggacgcttttcgacaataacgaagcgctattcaacgacgcgcgcacggcgcaggccgcgacaattattttttcgcttacacagaacaaccaaatcgagccgcttgctcgtcgcattcatactttgcggcgccagcggggaagcgcgctgaaaattgtcgtgcgcgaaaatatcgccagtttgcgcgccaccgatgagcgcctgctgctgggctgcggcgcgaatatgatcattccctggaacgccccgctttcacgctgcctgacgcttattgaaagcgtgcagggacagcagttcagccgttacgtaccggaagacatcaccacgctactgtcaatgacgcagccgttgaaactgcgcggttttcagccgtgggatatcttctgcgatgccatccatacgatgatgagcaacaccctgctccccgccgacgggaaaggcgttctggtcgcgctgcgcccggtgccgggcattcgggttgagcaggcgttaacattatgtcggccaaaccgaaccggcgatattatgaccatcggcggcaaccgtctggtgctgtttttatcattctgccgggtcaacgatctggataccgcgttaaaccatattttccctttgccgacgggcgatattttctctaatcgtatggtctggttcgaagataaacaaatcagcgccgagctggtgcagatgcgcttattgtcgccggaactgtggggaacgccgctaccgctggcaaaacgcgccgacccggtaataaatgccgaacacgatggccgcatctggcgtcgtattcctgaacccctgcgattgctcgacgacaccgcggagcgtgcatcatga

SEQ ID NO: 370370 - DNA, 192 bp, Salmonella enterica
atgatgaccatcagcgatatcgtgcaaattattcttttttgcgcgctgattttctttccgctggggtatctggcgcgtcattcgctacgccgtatcagtgatacgacccggctgctatttgccaaacctcgttatgtaaaaccagccggaactctgcgccgcgctacgaaagtcaaggcagacaaaaaatga

SEQ ID NO: 370371 - DNA, 1680 bp, Salmonella enterica
atgactcagcatactcaaactccatcaatgccttctccgctctggcagtactggcgcggtctttccggctggaacttctattttctggtcaagtttggcctgctgtgggcaggctatctgaattttcatcctttactgaatctggtattcatggcgtttctgctcatgccaataccaaagtatcgccttcaccggttgcgccactggattgccattcccgtcggcttcgcgctgttctggcacgatacctggctgcccggcccgcaaagcattatgagccaggggacgcaggtggcggaattcagctccggttatctgctcgatctgatcgcccgttttattaactggcaaatgatcggcgccatcttcgtactgctggttgcctggctttttttatcacagtggattcgggtcacggtgtttgtggtcgccatcatggtatggctgaatgtcctgacattaaccggcccggtttttacgctgtggccggcaggccagccaaccgatacggtgacgacaactggcggtaacgcggccgctaccgtcgcgacagcgggcgataagccggtcatcggcgatatgcctgcgcaaaccgcgccgccgacgaccgcgaatctgaacgcctggttgaacaccttctatgccgcggaagaaaagcggaaaacgacgttcccggcgcaacttccgcctgatgcgcagccgttcgacctattggtcatcaatatttgttcgctctcctggtcggatgtcgaagcggcaggcctgatgtcacatccgctatggtcgcactttgacattttgtttaaacactttaattccggtacgtcttacagcggcccggcggccattcgtctgctacgcgccagctgtggtcaaccttcgcatacccgactttatcaaccagccaataacgaatgttatctgtttgataatctggcgaaactgggctttactcagcatctgatgatggatcataacggtgaatttggcggcttcctgaaagaagttcgcgaaaacggcggtatgcagagcgaactgatgaaccagtccggcctgccaaccgccctgctgtcattcgacggctcgccggtatatgacgatctggcggtcctgaaccgctggttgacaggagaagaacgtgaagccaattcccgctccgcgactttctttaacctgctgccgctgcacgatggcaaccacttccccggcgtcagcaaaacggcggattataaaatccgcgcgcagaaactgttcgatgaactggacgccttcttcaccgaactggagaaatccgggcgtaaggtgatggtggtcgtcgtaccggagcacggcggcgcgctgaagggcgacagaatgcagatctcaggcctgcgcgatattcccagcccctccatcaccaacgtcccggcgggcgtgaaattttttggcatgaaagccccgcatgagggcgcgccgattgatattaaccagccgagcagctacctggcgatttccgaactggtcgtacgcgccgtggacggtaagctctttaccgaagacagtgtgaactggaacaagctgaccagcaatctgccgcaaaccgcgccggtttcagaaaacgctaatgcggtggtgattcagtatcagggtaagccctacgttcgtctgaatggcggcgactgggtgccttacccgcagtaa

SEQ ID NO: 370372 - DNA, 1299 bp, Salmonella enterica
atgcaggacgacacattaccattaaataacagtaacgctacgaccacaccgctttcaacgagattaccgtttacaaaatatgattttggctgggtgctcttgtgtatcggtatggcgatcggcgcaggtaccgtcttaatgccagtgcaaatcggtctcaaggggatctgggtatttattaccgcttttatcatcgcctatcccgctacctatattgtgcaggatatttatctaaaaacgttatctgaaagcgaaacctgtgacgattatacggatattatcagtcactatcttggcaaaaactggggcatttttctcggtgtaatctattttcttatgattatccacggggtgtttatttattccctgtcggtggtgtttgatagcgcctcctatatcaaaaccttcggccttactgaggtcgatctttcgcagtctattatctataaagtcgcgattttcgccgtgctggtggcgattgcctccggcggggaaaagttattatttaaaatttccggcccgatggtggtggtaaaagtcgggatcattctgatattcggtttcgctatgatcccacactggaatcttgataatatttccgcctttcccgccgcatcggttttctttcgcgacgtactgctcactatcccattttgcttcttttctgcggtcttcattcaggtgctaaacccaatgaacatcgcctatcgtaagcgcgagcctgaccgtgtgctggccacccggatggcgattcgcacgcatcgcattagctatattacgctgattgccattattctctttttctcgttctcgtttaccttttcgattagccatgaagaggcggtatcagcgttcgagcagaatatttccgcccttgcgctggcagctcaggtaatccctggccatatcatccacattacctctaccatcctcaatatttttgccgtacttaccgcgttctttggtatttatttaggttttcacgaagcgcttaaaggtattgtactgaatgtattgagtcgtattatggatgtcaaaaacgtcaacccactgttactgacatctggtatctgtgtctttatcgtggttactctggttatctgggtttcgtttcgcgtctcagtattggtctttttccagttaggcagtccgctttatggcattgtcgcgtgtattattccttttttcctgatttataaagtagcgcaactggaaaaattacgcggcctgaaaacctggcttattctgttatatggaatattgttgtgcctgtcgccgttattaaaattgattgaataa

SEQ ID NO: 370373 - DNA, 1014 bp, Salmonella enterica
atgagtacgcatgaggccaccttgcaacagccgctgttgcgggctatcgacctgaaaaaacactatccggtgaagaaggggatcttttctccggaacggctggtaaaagcgctggatggcgtgtcgtttaatctcgaacgcggtaaaacgctggcggtagtgggggagtccggttgtggaaaatccacactgggccgcctgctgacgatgattgaaacgccaaccggcggcgagctttattaccaggggcaggatctgctcaaacacgatccgcacgcgcagaaactgcggcggcagaaaattcagattgtgtttcagaacccctacggttccctgaacccacgcaagaaagtggggcaaattctggaagagccgttgctgatcaataccagcctgagtaaagcgcagcgtcgtgaaaaagcgctggcgatgatggcgaaggtggggctgaaaaccgagcactacgaccgctatccgcatatgttctccggcggccagcgtcagcgtatcgctatcgcccgcggtctgatgcttgatccggacgtagtgattgccgacgaaccggtctccgcgctcgacgtgtcggtgcgcgcccaggtgctgaacctgatgatggatttgcaacaggatatggggctgtcttatgtctttatctcgcacgacctgtcggtggtggaacacatcgccgatgaagtgatggtcatgtacttaggccgctgcgtggagaaagggaccaaagagcagatttttaacaatccacgtcatccctatacccaggcgttgctctccgccacgccgcggctgaatccggacgatcgccgtgagcggattaagctgaccggcgagttgccgagtccgctgaacccgccgccgggctgcgccttcaacgcccgctgcagccgtcgcttcggaccctgtacgcagttacagccgcagcttaaagagtacgacggccagttggtggcctgctttgccgtcgatcaggatgaaaacccgcagaaaccgttgagttaa

SEQ ID NO: 370374 - DNA, 984 bp, Salmonella enterica
atggcgttattaaatgtagatcaattatcggtgcacttcggcgacgaagggacaccgttcaaagccgtcgaccgcattagctacagcgtgaagcagggtgaggtggtcgggattgtcggcgagtctggttccggcaaatccgtcagctcgctggcgattatggggcttatcgattacccaggccgcgtgatggcggaaaacctgctctttaacggacaggatctgaagcgcatttccgagaaggaacgtcgcaacctggtgggtgctgaagtggcgatgattttccaggacccgatgaccagcctcaatccttgctataccgttggctttcagattatggaagccatcaaggtacatcagggcgggaacaagaaaacccgtcgtcagcgagcgattgacctgttgaaccaggtgggtattcccgatccggcttctcgtctggatgtctatccgcaccagctttctggcggcatgagtcagcgcgtgatgattgcgatggccatagcctgtcgaccaaagctgttaattgctgatgaaccgaccacggcgctggatgtgaccattcaggcgcaaatcattgagctgctgctggagttgcagcaaaaagagaacatggcgctggtgctgattacccatgacctggcgctggtggcggaagcggcgcacaaaattatcgtcatgtacgccgggcaggtcgtcgaaaccggcgctgcgcaggatattttccgcgcgccgcgtcatccgtatacccaggcattgctacgtgcgttaccagagtttgcgcaagataaagcgcgtctggcgtcgctgccgggcgtggtgccggggaaatatgaccgaccgacgggttgtctgcttaaccctcgctgcccctacgccacggacagatgtcgtgcggaagaacctgctctcaaccaactggacgatggacgtcagtcaaaatgtcattacccactcgatgatgccgggaggcccacactatga

SEQ ID NO: 370375 - DNA, 903 bp, Salmonella enterica
atgtcacaggttactgaaaataatgttaatgccgcaccggcgcccatgacgccattgcgggagttctggcactatttcaaacgcaacaaaggcgcggtcgtcgggctggcgtatgttctcatcgtgatcctgattgcggtgtttgccaactttattgcgccgtacaacccggcagagcagttccgtgatgcgctgctggcaccgccggtctggcaggaaggcggcagttgggcgcatattctgggaacggatgatgttggtcgcgatgtcctctcgcgcctgatgtatggcgcgcgtttgtcactgctggtcggctgtctggtggtcgtcctgtcgctggtaatggggatcattctcggcctggtcgcgggctacttcggcggtctggtcgataacatcatcatgcgcgtggtcgatattatgctggccctgccgagcctgctgctggcgctggtgctggtggcgatcttcggcccctccatcggcaacgctgcgctggcgttgacgtttgtggcgctgccgcactatgtccgcttaacccgcgcggcggttctggtagaggtgaaccgcgattatgtgactgcctcccgcgtggcgggcgcaggcgcgatgcgtcagatgttcgtcaatattttcccgaactgccttgcgccgctgatcgttcaggcgtcactgggcttctctaacgccattctcgatatggctgccctcggcttcctggggatgggcgcacagccgcctacgccggaatggggcaccatgctctctgacgttctgcagttcgcgcaaagcgcctggtgggtcgtgaccttcccggggctggcgattctgctgacggtactggcatttaacctgatgggtgacgggctgcgtgacgcgctcgatcccaaactgaagcagtaa

SEQ ID NO: 370376 - DNA, 1020 bp, Salmonella enterica
atgttgcagttcattctccgacgtttgggactcgttatcccgacgtttatcggtattacccttctcacctttgcctttgtccacatgatccccggcgatccggtgatgatcatggcgggtgagcgaggtatttcccctgagcgtcatgctcaactgctggctgaactcggtcttgataaaccgatgtggcagcagtacctccattatatctggggggtgatgcatggcgatttaggcatctcgctgaaaagccgaatccccgtgtgggacgagttcgtgcctcgctttaaagcgacgctggagcttggcgtctgcgccatgatttttgccgtcgccgtggggattccggtgggcgtgctggccgcagtgaagcgcggttctatcttcgatcacactgccgttggcctggcgctgaccggttactctatgcctatcttctggtggggcatgatgctgatcatgctggtttccgtccactggaacctgacgccggtttccgggcgcgtgagcgatatggtgttccttgatgataccaatccgttgacgggctttatgctgatcgacaccgctatctggggcgaagagggtaactttattgatgcgctggcgcatatgatcctgcctgcgatggtgctcggcacaatcccgctggccgtcattgtgcgtatgacccgttcgtcgatgctggaagtgctgggggaggattacatccgtaccgcacgcgccaaagggttgaccaggatgcgcgtcattatcgtccatgctctgcgtaacgctatgctgccagtcgtcaccgtgatcggcctgcaggtcgggacgctgttggcgggcgcgattctgacagaaactatcttctcgtggcccggtctggggcgctggctgatcgatgcgctgcaacgccgcgattatccggtagtgcagggcggcgtgttactggtagcgacgatgattattctcgtcaacctgctggtagacctgctgtacggcgtggtgaacccgcgtattcggcataagaagtaa

SEQ ID NO: 370377 - DNA, 1608 bp, Salmonella enterica
atgagtatttccttgaagaagtcagggatgctgaagcttggtttgagcctggtggccatgaccgttgcagcaagcgtgcaggccaaaaccctggtttattgttcagaaggctcgccggaaggctttaacccacagctctttacgtctggcaccacctatgatgccagctccgtacctatctataaccgtctggttgaattcaaaaccggcaccacggaagtgatcccgggtcttgctgagaagtgggatatcagcgaagacggtaaaacctatacgttccacctacgtaaaggggtgaaatggcaatccagcaaggatttcaaacccacgcgcgagctgaacgccgatgatgtcgtgttctcttttgaccggcagaaaaacgagcagaacccgtaccataaagtgtctggcggcagctatgaatactttgaaggcatggggctgccggatctgattagcgaagtgaagaaggtcgacgatcacacggtgcagtttgtgctgacgcgtccggaagcgccgttccttgccgatttagccatggacttcgcctctattctttccaaagaatatgctgacaacatgctgaaagccggtacgccggaaaaagtggatctgaacccggtcggcactggcccgttccaactggtgcaatatcagaaagactcccgcattctctacaaagcctttgacggctactggggcacgaagccgcagattgaccgtctggtcttctccatcacgcctgacgcctctgtgcgttacgccaaactgcagaagaacgaatgtcaggtgatgccgtatccgaacccggcggatattgcgcgcatgaaagaagataaaaacatcaacctgatggagcaggccggtctgaacgtgggttatctctcctataacgtgcagaaaaaaccgctggatgatgtcaaagttcgccaggcgttgacctatgccgtgaataaagaggccatcatcaaagccgtttatcagggcgcgggcgttgcggcgaaaaacctgatcccgccgacgatgtggggctacaacgacgatattaaagactacggctacgatccggaaaaagcgaaggtgctgctgaaagaagccggtctggaaaaaggcttcaccatcgatctatgggcgatgccggtacagcgtccctataacccgaatgcgcgtcgtatggcggaaatgatccaggcggactgggcgaagattggcgttcaggccaaaattgtcacctatgaatggggcgaatacctcaagcgcgctaaagatggcgagcaccagacggtgatgatgggctggaccggcgataatggcgatccggataacttcttcgccactctgttcagctgcgatgccgcccagcaaggctccaactattcaaaatggtgctacaagccgtttgaagacctgattcagcctgcgcgtgcgaccgatgaccacaacaagcgtattgagctctataaacaggcccaggttgtgatgcatgaccaggcgccagcgctgatcatcgctcactccacggtttatgagccagtgcgtaaagaagttaaaggctatgtggttgatccattaggcaaacatcacttcgaaaacgtctctgtcgaataa

SEQ ID NO: 370378 - DNA, 1326 bp, Salmonella enterica
atgccgcagcctggccttactacgccggataacgatgcattaccctggcaaaccaccttacttttggcgcttcagcatgtgctggtcgttgccgccacccccattacctccgtctttctgatcgccaaagcgctccactttaccgatacggtgaccgcctcggtacttagcgcgacctttctgatgtgcggtctgggcgctattttgcaaagcctgggtgtgaaaggggtgggcgcgcgtttgccgtttattatggtaccggggggcgcgccgattgcgattttcgttgcgatcgctttacagaccaatatccagaccgcgattggcgccgtaattctgacctcgctgttctactttatcgcgttgccgattttccgccgctgcctgcaccattttcccccctttatcattggcatcatgctgctaatggtgtcgattaaccttattcgcctgtacggcgggttgatcattggccagccagggagcgccgacttcgctcatccaaccagtatcattttatcgctggggactatcctgataacgctgattttcgcgctggcgtttagcggtattttacgccagctggcggtgatgttcggccttttagcgggaacgctgctgggaatggcgctgggcagcaccgattttagcggtgttagtcacgggccgctgtttagtttcccacagcttttgccgttcggctggccgatttttgatctctccgcctcgctgccgttactgatttacgcggtcatctctatggctgaagcaaccgggcaaacgattgcgaccgcggaaatagtcaattccacgcaaaatgtgcagcaggcgattccacgcaccattcgtggtgatgcggtaatgtcgctgctgggggggatttttggcacctccttaattatcacctccggcgaaaatattggggtggtacgcaccactaatgtgaaatcacgtttcgtgactgcggctgccggaggattgttaatcctgattgccatattcgcaccgttggtacgtctggcgacctgtctgccaggttcggtggtgtgcggtacggcggtgattgtcttcagcattatcggggttatcggtattgatatgattgcgcgtgagccactgcatacgccgggtaaaacctacgcgctggcgatggggctggccatgggaatgctacctatactggtacccggcctgtatcagaatttcccggcgggcgtacagatggtctttggcaacggcatggcagcggggacgttgacggcgattctggtgaactcgttgtttaactggagcgaaaagcgcacgcaggccagggtcaaaagttag

SEQ ID NO: 370379 - DNA, 1125 bp, Salmonella enterica
gtggcacacttaactcaggactcgacttttacccttggacgccgtccggcgggccttatctacgctgataaggcgaagagctttggcggctatacgctttttgcgccgcaaaccgccgaagggcgggtttacctggtggacgagcagggcgaagtcgcgcatcagtggcagcttccggttcgcgccgggcgtgatgcggtgctgctgccgaacggtaatctgggttataacggcagccaccgcacttcagcgaacctctatccggcgtgggatctctggcacggcggcgacttctacgaagtgacgccggataacgaaatcgtctggcactatgaagacatcttccatcaccatgatgctcagtggctggaaaacggtaacctgctgtataccgccgcgtcgccgttacctgccgatatcgccgcccgtgttaccggcggcgacccgcgccgcgatgcgtcggacggcatcattcagagcgacgtcgtcaaagaggtcaatcgcgacggtgaagtggtctgggaatggcgtgcctgggagcatttgaatccggaagatttcccgattcatgatattttcgaccgccgccactggccgatgattaacggcctgtccgtcacccgtgatggcctggtactgatgagcctgcgtaccacttccggcgtcattgccgtggataaagagagcgggaaggttatctggcatgcagggccggaagtcgtagcgcagcagcacacgccggttgagatggagaacgggtcgattctggttttcgataacggcaacctgcgtcccggcgtcacctcgccgcattccacggtgctggagttcgatccgcagaccaaagcgattacctggcagtatcgcgatatcttcccgccggcgtttttctcgccgtatatggggagcgcgcagcggctagcgaacggcaacacctttatctgtgaatcggcgtttggccgcctgtttgaagtcaccccggaaggcgaaacggtatgggaatatatcattccgttctttaatgaatatccggagcacctcagtaaaggcattattcctggaaaacagaacagcgccttccgtgcgcatcgctatgccgctgatgctattagttggttgaaataa

SEQ ID NO: 370380 - DNA, 1008 bp, Salmonella enterica
atggctgttcaaaataaaaaacgcgcaaagttgattgatgttgcccgccatgcaggcgtatcgccagggacggtatccaatgcattgcacaacacccgctttgtcgagccgcagacgcgacggcgtattgaagaggccattgttgcgctcaactacacgccgaatattcgcgcccgccagttgcgaaccggcaaaaccaataccattgccttgctctcttcggtgccgctggcgattgcctccggcgcgtcacgactgggatttatgatggaggtggcgttaacgtccgcgatgatggcgctggaaaaacagcatgcgctgattctggtgccgccgggggcaaatccactggatgccgtcagctttgacgcggcgatcctgattgagccggcggagaacgacccgcagctccaggcgctggcgcaagcgggcattccctgcgtcaccattggccgcacgccggggaccgacacgcctgtgccgtgggtggagctgcactcggcggcaacagcacagcttctgctaacgcatctggaggcctccggcgccagcaaatgtgcgttatttgtcggtaacacacggcgaacatcagttctggagagcgaagcggcttaccagcgctggtgcgcgggacgccaggcccccgtcgtctactctctcaatgaaagcgagggtgaaaatgccggctaccaggccgcgcagcagctattacaggcacatcccgacgttgacggcgtgctggtgctgatcgacacctttgccagcggcgcggtacgcgcttttcaggaacaagacatcgccatacctgaacaaatgcgggtggtcacccgctatgatggtatccgcgcgcgcgaatcgctgccgccgctgacggcagtgaatatgcatcttgatgaggtggcgcgacaggcaatcacgctcctgtttgccgttctgtcgggtgagaaggtcagctacagcgacgggatcatgcctgaactggtggtgcgagcgtcaacctgccggtga

SEQ ID NO: 370381 - DNA, 1692 bp, Salmonella enterica
atgagatacattaaatcgatgacgcaacagaaacttagtttcttgcttgcgctctatatcggtctgtttatgaattgcgccgtgttttaccgccgtttcggcagttatgcgcaagaatttaccatttggaaaggcctctccgcagttgtcgaactgggcgccacggtgctggtcactttcttcttacttcgtcttctttcactgtttggccgacgcgtctggcgtgtgctggccacgctggtggtgctgttttccgctggcgccagttattacatgaccttcctgaacgtggtgattggctacggcattattgcgtctgttatgaccaccgatatcgatctctcgaaagaggtggtggggctgcactttgtattgtggctgattgccgtgagcgtgcttccgctcatctttatctggagtaaccactgtcgctacacgttgttgcgccagctacgtacgccggggcagcgttttcgcagcgccgctgtagtggtactcgcaggcgtaatggtgtgggcgcctatccgcctgctggatatacagcaaaaaaaggttgaacgggcgacaggcatcgacttacccagctatggcggcgtggtggcgaactcctatctgccttcaaactggttatctgcgttagggctgtatgcctgggcgcaggtagatgaatcgtcggacaataattcgttaataaacccggccaggaaatttacctatgttgcgccgaaagatggggatgacacctacgtcgttttcattatcggtgagacgacccgttgggatcacatggggattttcggctacgagcgtaataccacgccgaagctggcgcaggaaaaaaatctggcggcattccgcggctattcctgcgataccgcgacgaagctttctttacgctgtatgtttgtacgggaaggtggggcggataataacccgcagcgtacgttaaaagagcagaatgtttttgccgtactcaaacagctcggattcagttccgatctgtacgccatgcagagcgagatgtggttttatagcaataccatggcggataatatctcctaccgcgagcagattggcgccgagccgcgtaaccgtggtaaaacggttgatgacatgctgttgattgatgagatgcagaactcgcttgcccagaacccggagggtaaacatctgattatcctgcatactaagggatcgcattttaactatacgcaacgttatccgcgcagctacgctcagtggaagcccgaatgtattggggtcgatagcggctgcacgaaagcgcagatgatcaactcttacgataactccgtgacctatgttgatcactttattaccagtgtgttcgatcagctacgtgataaaaaagcgattgtgttctacgccgctgaccacggcgagtcgattaacgaacgtgaacatttgcacggtacgccgcgcaatatggcgccgccggaacaattccgtgttccgatgctggtatggatgtcggataaatatcttgccagtccgcaacatgcgcagatgttcgctcacctgaaacagcaggcggagatcaaagtgccgcgtcgtcatgtggaactgtacgatacgataatgggctgcctggggtatacatcgccgaatggcggcattaaccagaacaacaactggtgccatattcccgatgcgcagaaagtcgccgcgaagtag

SEQ ID NO: 370382 - DNA, 528 bp, Salmonella enterica
atgaaaaaccttcatgctttgatgccagcgtgtttactgcttaccgcttccgcgatggcggcaccgtctaatatcggttctgctggtgatatccactttaccattactattaaggcggctacctgtgaactggaaaacgacagtatcgacgtcaatatggagaccgtggtgcttcagcgcccggtaaaagtgggtaaagagctgaaccagaaaaactttagcatcggcttaaaagattgcgcgtatgccacaaaggccagcgttacgatggacggttctccggacccgactgacccctcgctttttgccctggatagcggcggcgcgacgggcgtggcgttaaaaattaaaacatctggtggggagcaacaatacccctccagtaccgactctacgcctgtcgaacacactgtctggtttgatggtacgaacaagctgaactatatcgccagctatgtgcctgttaagccggatgccaccgttggcacagcgaatgcgacggtgaattttagcgtcacatacgaataa

SEQ ID NO: 370383 - DNA, 1080 bp, Salmonella enterica
atgttgaaaaagttgataatgtttacgggcctgttgggcgggtcggtgctgttttcggggcaggcgctggcagcggcagattttggaccatgtactcctgaaggtggaacacatatcttcagtgccaccataaataaaacagtttcagatacgtcaaagaacacaacgggtgcgaccttcgtagatttcgatagctggaatttaggtggaacctatgcgatgtcctgtgaatgccctgatgatacctctcttataaatgacaccttatttaaggctgtggttcctctggcctttgttacgaatatagagagtcgctcctattaccagatcaataataatattgccattgcgagcgatgtactgatttcggggggacgaggagaatacgttaacacaccgtttgagaatgtaggtaacctgacaaacaaccgctctcagtgttcgcaaaatgcaagtagtaaagatgcaatatggacatccggtggcaaaggtcacttatcgctctatattctccatccgtttgtgggtgaaagtattatacctagcaccaaaataatggacctttttgtgacaaagaaacccagtgtatatggcagtatacctgcgtcgtctgtatatatcagtggttcaattacggtacctcagggctgtgaactctccagcggcagcacgctggaaattccgtttggggaatttaaggccactgattttaaagatcgcaaaggacaagttgcaaagaacgccacgaaattcaccaaagagctgcagtttaaatgcaccaatatctcggatggcataaagatcttcctgcgtattgagggaatgccaaacgctaatgattcgaatgccatcgacatgggcaacccggatatcggtgccgtcattgagggcgctaacggtaaaattttggtgccaaatgacgccagtgttaatcaggagctgagcgtatcgggtcttgttgacgacacgcaccgtaccgcctcaacgaccatttcggcttaccccatcagtaccaccggcaaattgccggccgccggggatttcgagggaattgccaccatgcgtattgatgtggagtaa

SEQ ID NO: 370384 - DNA, 2529 bp, Salmonella enterica
atgacatggacgcatcttcctctgggcaataagacctcgcgtttcacgcagtctgcgcttgcgctgatgatagcgggtacgctccccgcgtatgcgggaacatttaacccgcgctttctggaggatgtgccgggtattgatcagcacgttgacctttcaatgtatgaatccaataaagctgaacacctgccaggtaaataccgcgtctcggtggtggtcaacgaaaaaaaaatggagtctcgcaccctggagtttaaggcagcgacagaggcgcagcgcgcaaaaatgggtgaatccctggtgccgtgcttaagccgcgtgcagcttgaagatatgggcgtgcgtattgatagcttcccggctctgaaaatggccccgcctgaagcctgtgttgcttttgacgacattattccccaggccgccagccatttcgactttgcagaccagaccctgatcatgagcttcccgcaggctgcgatgacgcagacagcgcgcggtacggtgccagaatcgcagtgggacgaaggggtgaatgccctgctggtggattataacttttccggcagcaacgccagctatgacgcacacgacagtgaaaccagctacaacagcgacagctactatctgaatctgcgcagcggtatgaacctgggggcatggcggttacgtaactatagcacctggacgcgaaacgacggtaacaacacatgggataacattggcacatctctaagccgtgccattgtgccgttgaaatcacagctgacgttgggggatacctccaccgccggtgatatttttgacagcgttcagatgcgcggtgtgcagttaacttccgacgaagagatgctgcctgacagccagcgcgggtttgcgcccgtcatccggggtattgccaaaagtaacgccgaagttaccgttgagcagaacaactacgttatttaccgtacgtttgttcagccgggtgcgtttgaaattaacgacctgtatccaacctcaaacagcggcgacctgacggtcaccattaaagaatcggacggcagtgagcagaagttcgttcagccgttctcctcggtggcgctcctccagcgtgaaggccatctcaaatacagcctttccgccggggaataccgtgccgggaactataacagcgccgagccaaaattcgggcagcttgatgccatgtacggcctgccgtatggctttaccgtttacggtggtgcgatcttctctgacaactattactcgctggcgggaggattaggtaaaaacttcggctatatcggcgcgatctccatcgatgtaacccaggcaaaaagcaagctggcaaatgaggagaattcggaaggtcagtcttatcgtttcctctattccaagagctttaacagcggtaccgatttccgtctgctgggttacaagtattcgaccagcggctattacaccttccaggaagcgacggatgtgcgcagcgatgcggacagctcttatagccagtaccacaaacgtagtcagattcagggcaacgtgacgcagcaactgggcgcctggggctcggtctattttaacgtcacgcagcaggattactggaacgatgaaggtaaacagcgttcgctgaatgccggttataacggccgtattggccgcgtgaactacagcgttgcttacacctggacgaaaagcccggagtgggatgagagcgatcgtttactgtcattctccatgtcgattcctctgggacgcgtgtggagtaactaccacctcacgaccgatcagcatggccgaaccaaccagcagttaggggtgagcggcaccgcgctggaagaccgcaatctgaactatagcgtacaggaaggctacggcagcaacggcgtgggtaacagcggcagcgtgaacctggattaccagggcggcgtgggtagcgccagcctgggttacaactacaaccgtgacggccagcaggtgaactacggtttgcgcggcggtgtgatagcccatagcgaaggtatcactctttctcaaccgctgggtgagtccatggccattatctccgcgccgggcgcgcgcggcgcgcacgtgatcaacaacggtggtgtggaagtggactggatgggtaatgcggtcgtgccttaccttactccgtaccgtgaaacggaagtctcactgcgaagcgacagcctgaacaaccaggttgacctggataccgcctccgtcaacgtagtgccgacacgcggcgcgattgttcgtgcccgcttcgatacccgagtgggctatcgcgtgctgatgaatctgacgcaggccaatggcaaagcggtgccgtttggtgctaccgccacgctgctggataccacaaaagagtccagcagcattgtgggtgaagacggtcagctttatatcagcgggatgccggagaaaggtgcccttcaggtgaactggggtaaagaccaggcacagcaatgccgcgtggcgtttacgctgccggaacaacaggataataccggcgtggtgatggcgaatgccgtctgccggtaa

SEQ ID NO: 370385 - DNA, 699 bp, Salmonella enterica
atgaaccgctcacgtttgatatcttgcacagcactggtgctggcgttgattgctcaaaacagttttgccggaggcgtggcattaagcagcacgcgtgttatttatgacggtagtagaaaggaagcttctcttacggtaaataataaaagcaccacggatgaatttctcattcagtcatggattgatgatgctaacggtaataaaaagacgccctttatcatcactccaccgttatttaaattaagcccgactaaaaataacgttttacgtattgttaatacgacgaacacgttaccgcaggatcgcgagtccgtttattggattaacgtaaaagctattcctgccaaaagtgaagacgcggaagctaaaaacgtactgcagatcgccgtacgtacccgcttaaaactgttctatcgcccggcgggcctgaaaggcaatagcatggacggctggaacaaactgcagttcaccagcgcaggggctaaccagatcaaagtggaaaacccatctgcctttaacctgacgtttaataaattttatgccaacggccgtgatattgaaaaaacgggaatggttccggcaaaaggctcattgaatattgaactgccagccggcaccggcaaggtaagcgaagttaaatacaacattattaatgactttggcacggctggcgacatgttgacacagcgcgttaactaa

SEQ ID NO: 370386 - DNA, 525 bp, Salmonella enterica
atgaaaaaggttgtttttgctctgtctgctctcgctgtagtttccacttctgctttcgctgctgaatctggtgacggcaccattaaattcaccggtgaaatcgttgacgcgccatgcgtcgtttctactgactctcagaaccaggaagttgtgctgggtcaggttaagaaaaatatcttcaaagccattggcgacaagtcttcttctaagcctttccagatcaaactggaagactgtgacatcacctctaataccaaagttaacgtaagcttcaatggcgttggtgatacagacgatgcgacactggtttctgttaacactgaagcaggtgcggcaactggcgtgggcatcggtatctacgacaacgctaacaagcttgttgaaatgaacaccggtaaatccaccactacgttggctgctggtcagaccgtgctgtactacaccgctaactacgttgcaacaaaagatactgtaaccactggttacggtaacgcagaagtggacttcaacctgtcctacgaataa

SEQ ID NO: 370387 - DNA, 129 bp, Salmonella enterica
atgggttatgtgtttcccctcgaaattcctcgaaatttcctcgaatttctgtattccggtctttttggttatatcacatccaaatccagtttaacatttcttttacaacaaaatcagagcatcacgtaa

SEQ ID NO: 370388 - DNA, 282 bp, Salmonella enterica
gtggtcgtttttttgacttttactgattcaaaaggaatatcggaatatatacttgacccttggctggatgcgcgcattttcaaaaaggaagagtcatatgaaatttataaaaacaatagcagtgaatatatcaatgaaaatcattgcttcgaagcatacgataaatacactgctataatgaatagcgcagaatatatagacgccataacaaagacaataaatcttttatatagagttaatcttgatgaaattcaattaacaaatccatttaagtttatataa

SEQ ID NO: 370389 - DNA, 723 bp, Salmonella enterica
gtgacaaaaataactttatttccccataactttagaatccaaaaacaggaaaccacaccactaaaagaaaaatcaaccgagaaaaattctttagcaaaaagtattctcgcagtaaaaaatcacttcatcaaattaaattcaaaattatcggaacgttttatttcgcataagaacactgaatcttctgcaacacactttcaccgaggaagcgcatctgagggccgggcagtgttgacaaataaagtcgttaaaaactttatgcttcaaacgctccatgatatagatattagaggtagcgcgagtaaagaccccgcatacgccagccagacccgtgaagctatactatcggcagtttacagcaagtataaagatcagtattgtaacttgctcatcagcaaaggaatcgacatagcgccttttcttaaggaaattggcgaggctgcgcaaaatgcaggtctgcccggagcaaccaagaatgacgtttttacgccaagcggcgcaggagccaatccttttataactccgttgattacatcagcatacagtaagtatccacatatgtttaccagtcaacatcagaaggcatcctttaacatctatgcggagaagatcattatgacagaagttgtaccgctgtttaatgagtgtgctatgccgactccacagcaattccaacaaatactagaaaacattgctaataaatatatccaaaacactccctga

SEQ ID NO: 370390 - DNA, 228 bp, Salmonella enterica
gtgaaggatgaagcggctgaaaaagcagcgcagcttcgtcaggcggaagaaaccaaaagcaggctcctgcaaatggcatctgaaaaaatcgcgccgcttcaggatgcggttgatcttggactcgcaacagatgatgagaaagcgcagctcgacgaatggaaaaaatacagggtgctggtaaaccgggtggataccttaaatcctgactggccggagaaaccatcttag

SEQ ID NO: 370391 - DNA, 717 bp, Salmonella enterica
atggaagacacgcctgacgggaagataagccagttcctggtggcggcggatcgcattgcttatattaacccggcaaacggaaacgagacgcccggattcgtcatgcagggcgaccagataatcatgaatgaggcgttcctgaaatacctgagcgcgccgaccattaccagtggcgggaatcctccggcattttccctgacgccggatggaaagctgactgcgaaaaatgcggatatcagcggccatatcaacgctgtatctggctcgtttacgggagaaatcaatgccacctccggtaagttttctggcgtgatagaagcaagagagtttgtcggtgatatctgcggctcaaaagtcatgcagggcgtgagcatcagggcgacgaacgacgaacgcagcacctcaacacggtataccgacagcgccacctatcagatagggaaaaccatcacggtgatggctaactgtgagcgtaacggtggcaccggtgccatcaccgtcacgataaatattaacggccaggtgaaaacggcggaggttatgccgtataccgcagggattccggccatgtatcagaccgtcgtcttttcggtctacaccacttcacctgtcgtggatatcagcgtctctctgagggtccgtgggcagtacaccacgtctgcttccgtctggccgctggtgatggtttcccggtcggggagcaacttcacaaactga

SEQ ID NO: 370392 - DNA, 2361 bp, Salmonella enterica
gtgctgattaataacacgccggtggtggacgcggacggtaacagtaatattcacggcgtgaccgtggtatatcaggtgggggagacaccacaggcaccgctggaaggttttgaggcttccggcgcggaaacggtgctgggtgtggaagtgaaacacgataatcccgttacccgtactgttgtctcagagaatgtcgaccggctacgcttcacctttggtgtacagatgctgcaggagaccatggacaagggggaccgtaacccgtcctccgtgaatctgctgatacagtttcagcgtagcgggatctggaacacagaatttgatatcactattaacggcaagatcacaacacaatatctggcatcggtagtggctgataatttaccgccgcgcccgttcagtgtccgcatggtcagggtgacaccggacagcaccaccgacaggcttcagaacaaaacgctgtggtcgtcgtatacggaaatcatcgatatccggcagggttatcctggcacagcggttgccggtctgctggtggatgcggaacagttcggcagccagcaggtcacgcgtaactaccacctgcgcggacgtatttttcaggtcccctcaaactatgacccggatacccgcacatataccggcctgtgggacggggcgtttaaaccggcgtacacgaataacccggcgtggtgcacgatggataaactgacccacccccgttacgggctgggcaggcgtatcgggggggcggatgtggataaatgggcgctgtacgccatcgcgcagtactgcgatcaaccggtgccggacggatttggcggcacggaaccccgcatgacgcttaatgcgtatattaccacccagcgtaaggcgtatgacgttctggcggatttctgctcggtgatgcgttgtatgccggtatggaatggccgcaaaatgaccttcatccaggaccgcccctccgataaagcatggacctacaccaacggtaacgtggtgggcgggcgctttaaatacagcttcagtgccctgaaagaccgccataacgcgatagaagtgagatacaccgatccgctgaatggctggcaaacctccacggagctggtggaagaccatgcctcacaggcccgttatggacgcaatctgctgaaaatggacgcgttcggctgtacctcacgtggacaggcgcaccggacggggttgtgggtgatgatgacggagctgctggaaacgcagaccgtggatttttctgtcggtgcggaaggtctgcgtcatacaccgggcgatattattgaggtctgcgacaacgattacgccggggcgtcggtcggtgggcgtatcactgacctggatatttccacccgcacgctgacgcttgaccgggaaataacactaccggaaagcggcgccaccacgctgaatattgtcgggcctgacggtaagccgttcagtacggagattcagtcgcagcccgcaccggatcgggtggtaacgaaagtcctgccggaaaccgtgcagccatacagtatctgggggctgaaactgccctccctgaagcgccgccttttccgttgcgtgcgtattaaggagaatgacgacggcacatacgccatcactgccttgcagcacgttccggaaaaagagtccatcgtggacaacggggcgcactttgacccgttaccggggaccaccaacagcattattccgcccgctgtgcagcatctgacagtcagcacggataacgacagtaccctgtatcaggccaaagcgaagtggggcacgccgcgggtggtaaaagatgtgcgttttgtggtgaggctgaccacaggcagtgggaacgagggcgatccggttcgtctggtgacaacggcgacgaccagcgaaacggagtacgccttccacgaactgccactgggtgactacacgctgacagtcagggcaataaacggttacgggcagcagggtgaaccggcgtccgtggcattcagtattcaggcaccggaagcgccatccacgattgagatgacgccgggttattttcagataacggtgacgccgcaccagactgtctacgatgccagtgtgcagtatgagttctggtactccgccacgcaactggcgactgccgccgatattcagtcaaaagcacagtatctgggcgtcgggtcattctggataaaggatggactgaaaccactgcatgatgcctggttttacgtgcgcagtgtaaatctggctggaaaatcagtatttgcggaagcatccggacgtccgggggatgacgcgaaagggtatctggatttttttaagggactgattacggagacgtatcttggtacggagttgctgaaaaaaaattga

SEQ ID NO: 370393 - DNA, 282 bp, Salmonella enterica
atgattaacgatgacattctggcacatgcccgacagtgtgcgcctgcggaatcgtgcggttatgtggtcagaacagcacagggagagcggtattttccgtgtgaaaatctgtctgctgaacccacgatgtattttcgtatatccccggaggattacctgaatgcccggaaccgcggcgacatcgtggcgctggtacacagccatcctgacggtaagccctgtctcagcagtgcggatcgtaccctccagatacaaagcggaacggtctgcagagcgtgctga

SEQ ID NO: 370394 - DNA, 696 bp, Salmonella enterica
atgcaggatataccacaggaaaccttgagcgagaccaccaaagcggagcagtccgcgaaggtggatttgtgggaatttgatttaaccgcgattggcggtgagcgctttttcttctgtaacgaaccgaacgaaaaaggcgagccgttaacctggcaggggaggcagtacgaaccgtacccgatacaggtacaggattttgagatgaacgggaaaggcgcatctccccgcccgaacctcgttgttgccaatctctttggtctggtcacggggatggcggaggatttgcaaagtctcgtcggcgcgtcagtggtaaggcatcaggtttacagcaagtttcttgatgcggtgaatttcagtaacggcaatccgggcgctgacccggagcaggaggcggtagcgcgctataacgtggagcagttgtcagaactggattcatcaactgctaccattattctggcatcaccggcagaaaccgacggttctgtggtgccggggcgtaccatgctggcggactcctgtccgtgggattaccgggatgaaaactgcggatacgacggcccgcccgtggccgatgagttcgataagcccacctcagacccgaaaaaggataaatgcagccactgcatgaaaggctgtgaaatgcgtaacaatctggtgaatgccggatttttcgcttccatcaacaaactgtcttaa

SEQ ID NO: 370395 - DNA, 534 bp, Salmonella enterica
atgaaatacacaatattgtcgctggtagctggtgcgctcatcagttgttcagcaatggcagagaataccctgactgtaaagatgaacgatgccctgtccagcggaacaggagaaaacataggtgaaatcacagtttcagagacaccttacggtctgcttttcactcctcacctaaatggtcttacgccaggaattcacggcttccatgtccacacaaacccaagttgtatgccgggaatgaaagacggtaaagaggttccggcgctcatggccggaggacatcttgaccccgaaaaaaccgggaaacatcttggcccatataatgacaaagggcatttgggggatctgcctggactggttgtcaatgcagatggtacagccacgtatccgttactggcaccacgccttaaatcactgtcagaactgaaaggtcactcattgatgatccataaaggcggtgacaattactccgataaacctgctccactgggtggtggcggtgcacgttttgcctgtggtgtcattgagaaataa

SEQ ID NO: 370396 - DNA, 168 bp, Salmonella enterica
atgctcataagacgcattaacggcaatattttcaaccgggttaagctgaatacctgccccataagcaaaggcggttttattgtcagaatttccccagttatccttaatatgtccgtttgctgcaccaatcatcacgtaagcattcagatagtcgttaaaacggtatga

SEQ ID NO: 370397 - DNA, 366 bp, Salmonella enterica
ttgttcgacactgaacgccattttcaccgtatacaggaaaagagcacgactgtggatcaggaaattaaaagcctcgaattaaacatcacacagctttcggccatcactggtgcacaccgacagaccatcgccagcaggctgaagggcgtaaaaacctcaggtgggaacggtagtaacctgaaaatctaccggctggtggatattctgaccgccatgatgacgatgccggctgttaccggggagaatgaccccaataagatgaaaccctcagatcgacgggcatggtttcagtcggaaatgacgcgtattgagctggaaaaggagatgagaactctgatcccggccagcgaggtgctgagcgtttaa

SEQ ID NO: 370398 - DNA, 501 bp, Salmonella enterica
atgatgttcaactggaaaacgatgtttgttggcctgttgcttgtctcgctaattgttgccggtcggctggcaaatcactaccgaaataacgccatcacctacaaagagcagcgcgataccgttactcataggctgacgctggcgaacgcgacaattaccgacatgactaagcgccagcgtgacgttgccgccctcgatgaaaaatacacgaaggaattagccgatgcgaaagctgagaatgatgctttgcgcgatgatgttgccgctggccgccgtcgcctgtacgtcaacgcaacatgccccgcagtgccgacaggtaaatccacctccaccgcccgcatggataatgcagccagccccagactggcagactccgctcaacgggattatttcgccctcaaagagcgagtgaagacgatgcaaaagcaactggaaggggcgcaggcgtacattcgcacccaatgccacggtaatgcaggaaaaactagtaaccaatggtga

SEQ ID NO: 370399 - DNA, 453 bp, Salmonella enterica
atgatgagaatcagtgaaaaaggcattaccctaatcaaagagtttgaaggttgtagcctgacagcttatccggacccgggaacggggggagatccctggacgattggttatggctggacccactctgttgacggtaagccagttaagcccggaatgatgattgacgaggctactgccgagcgcttgcttaacactggtttagtcggttatgaaaatgatgtgtccagactggttaaggtcaagttgacgcaaggccagtttgatgcgctggtgtcgttcgcgtacaacctcggcgcccggacattatcctcatcaactctgctgcggaagctaaacgctggtgattacgctggcgccgctgatgagttcctgcgctggaataaggctggtggcaaagtactgaacgggcttacccgtcggcgtgaggcggagcgtgctctgttcctgtcatga

SEQ ID NO: 370400 - DNA, 336 bp, Salmonella enterica
atgaaaatgaatgacaagactcctgaattctgggctgcggttttgaccggactcaaaaatgcgtggccccagatacttggggcgttaatggccggactcattgcctacggccgactgatatacgacggcgccacccgtaaaaataaatggcttgagggcgtcctgtgtggcgctctttccttatgtgtcaccagtgcgcttgatgtggtaggcctgccggtttccatttcgcctttcgttggcggaattattggctttgtcggtgtggacaagctgcgcgaaatcgcaattagcgcactcaaaaaacgtgcaggggttaatgatgagaatcagtga

SEQ ID NO: 370401 - DNA, 474 bp, Salmonella enterica
atggatcctgatatcgaaattgatgatgatacctatgatgaatgccgtgaggtgctatcacgcatacttgaagatgcatacactcaaagcgggacattccgcagactgatgaattatgcctacgatcaggaattgcgtgatgtagaacaacgctggttgctgggagccggagaaaactttggtactaccgtaactgatgaggacctggagagttcagaaggcagaaaagtgattgccctcaacctggatgatacagacgatgattcaataccagagtactatgaaagtaatgatggcccacaacaatttgatacaacacgctcatttattcacgaagttgtacacgcgttgactcaccttcaggacaaagaagacagtaatccaagaggcccggtagtcgagtataccaatatcattttaaaagagatgggtcacacatcaccaccaagaatcgcctacgaatttagtaattga

SEQ ID NO: 370402 - DNA, 138 bp, Salmonella enterica
atgtccgaatcgatttctggtactgggttagcaggtggcatcctgacaggagccagtgtctatggactgctgacctgtattagctcagacctgaactggttactgtgttgtagcatcgtgggattttgcattttttga

SEQ ID NO: 370403 - DNA, 450 bp, Salmonella enterica
atgaaaaacaccgctctgggtaagttcatttttatcgtcggcaccgcgttactgctcggtggctgtagtggcatggtcatgcctccctatgccacccacggtacatcggtcggaatcattgcgccagcgggaggctatagcgagtggcacacggatagccgcaaccacaccacaggagacagtcacagccagtcacagggaaactgcacccaaagtgaagatagccagctcagcgaaaatagtctcacacggacacaccaaagcaactgtaacacccgtagtcaaacccacagcagtagcaccagcaaaacccgctccagcagcgtcggtttcagcgtcggggggcctgttggtgctagcatagggttgatcaagcagatggagtcgatgaaccgtgcgccagccaacgatatgagtagtaatgagatgttcaagaatttcggtttctag

SEQ ID NO: 370404 - DNA, 525 bp, Salmonella enterica
atgttttatcgtgatttatttcaagtttttggtcccgacccgttgtataaggaagaagaaggaattgccatccttcgtgagcaatatgggatcgaagctccagaacaaatttttaagcaaatttattgtgggttatctaataattctgaatttcaaaccttgtatgggcatctaaatcttaaatcactgaagtgggatttggtcagattgaaaacagcagagtttacaaagtttggcagaaatgccacatatcctgattacatgctcgagatttcagaagactttaatgcctgcggcagcaagttttgcattgatgcccgtgaagaggttgcaaaccattggcttaaattcggtacatgggctgaaccaccgatgtttattgagcgttcgcttattattcctggagagagcggcttacaccttatggagggtcatacaagattaggtactttattgggggctattaagtacaaatttgtgcagttagctgatactcatgaactttatatagcctcgcagaaatag

SEQ ID NO: 370405 - DNA, 690 bp, Salmonella enterica
atgaatacacaatatctggaatatgtgcgacagcagctcatcgtggcgactgcagatctgagtggcgccacgaaaggtcagttgcaggcatggctggagaacgcccagctctatacgaaaaactatccccgaaaaaaacagcgtatcagggatgaagtgaccggaaaaatgataacgctgaataatccaccgattgctggtaagcaatcactggcgaaaggaagcgcaattccgcttgtgcagcccgtagaatactccacttcctcatggcgccgtgcgcttttgtcactcgaagaacataataaggcctggctattgtggaattacagtgaaaacacctgctgggaatatcaggtcactgtaactcgatgggcttgggaaaaattcagccagcagttggaagggaagcgagttgcgaagaagactttagcacggttgcgccagctcatctggcttgctgcgcaggatgtgaaggcggaactggccagacgtgagacgtatgagtaccaaacgttggcggaactgatgggcgtggcaaaatctacctggacagagacgtacatgtctcattggttagtaatgcgtaacagctttaaacggcttgatagtgatgcgcttatctccgtaacacgatcgcgttcacaacaaaaggcgacaaatttggatataagtcttgcaaaaccgaactga

SEQ ID NO: 370406 - DNA, 228 bp, Salmonella enterica
atgaaaatgacatggtttcagcatccggtgtgtaccaccgaagaggcggatgagctggtggcgggataccggcgccgtggcgtgaaggttgagcgttacggtgaggcggaggtgctggaacttgagagcaataatactccgcaacgttggacggttgaggagctgaaagaaatcaggatcgctgcactggcggatctgcgtgcgctaaaaaagctggaggcggcatga

SEQ ID NO: 370407 - DNA, 600 bp, Salmonella enterica
atggcgcatttacaactggtcaagcaaacctcatcagggcttctgctcccggcgacgccggagagtggggatttcctgcgctcagtaaaaatcggtgagtggatacacgccgattttaaacgtgtccgcaactacgcctttcataaacgattttttaaactccttcagcttggtttcgactactggatgccaacgggcggcacggtcacatcgcgggaacagaaacttatctccgggttcgttaattttctttgcgactccgcaggccaggaatataccccggcccttaacgaggcggcggaacagtacctccataacgtagctaccctgcgaaccggggacgtcgcccttcttaagtctttcgatgccttccgggaatgggtaaccgttcaggccgggttttataccgagcatttttatccggatggcagtcgcgggcgccgggcgaaatccatagcattcgccagtatggacgaaaccgagtttcaacaggtctataaagctgtgctgaacgtcctgtggaactggattctgtttcgtaaattttcctctctggaagaagttgaaaatgtggccgcgcatctgctggagttcgcatga

SEQ ID NO: 370408 - DNA, 306 bp, Salmonella enterica
atgatgataattaatagtctcctatatattcatgttgagaatgaagatgctttaaaaatgctcaagttcgttatctatggagacaccgtgaaaaatttaaataaaacattcacttgtaaatatgctgttattcgccgtgatgacatgacagtaattgctgaaatggatttttttcctgactgcaacaggtcattgatgtatcgggatggccgctatgtccggtttctgccgttgttgcaaaatgacatcatggggagcgataccctgattaatgagctgactatcagggccggttatcatgaataa

SEQ ID NO: 370409 - DNA, 1980 bp, Salmonella enterica
atgagacttaagttgatcgttaaaagttttgcgctggcggggctactctcttccactgcgctgacacctttatttgcacaggaagccccaaaaggtgccactgcttcaaccaagcaagctaacgatgcgctttataaccaacttcctttctctgataacaccgatttcacgaatgcccataaaggctttatcgctggtttacctgaagaggtgattaagggagagcaagggaatgtcatctggaatccacagcagtacgctttcataaaagaaggggaaaaatctcctgacactgttaaccctagtctgtggcgtcagtcccagctaatcaatatcagtggcttgtttgaagtcacagacggcgtctaccagattcgtaaccttgatttatccaacatgacgattatcgaaggtaaagaggggattacggttgtcgatccgctggtttctgcggaaacagccaaagccggtatggatttgtatttcaaaaaccgtggcaataagcctgttgtcgccatcatttatactcatagccatgttgaccactatggcggtgtgcgtggcgttgtcgatgaagcggacgtgaaatccggcaaggtgaaagtgtatgcgcctgctggctttatggaggcagcagtagccgagaatattatggccggcaacgtgatgagccgccgtgccagctatatgtatggcaacctcctgaaaccagatgcctccggccaggttggcgccggactggggacgaccacctctgcggggacggtgacactgattgcgcccactaatatcatcgataaagacggccagaaagaagtgattgatggcctgacttacgactttatgctggcccctggttcggaagccccttcggaaatgctgtggttcatcgaagagaagaaactcatcgaagccgcagaggacgtcactcacaccctgcataacacttactcgctacgtggcgcaaaaattcgtgagccgttgccgtggtcgaaatatatcaacgaagctatagtgcgttggggtgacaaagctgaaattattatggcccagcaccactggccgacctggggtaacgagaatgttgttggtctgctgaaaagccagcgagacctgtatcgttatatcaatgaccagactctgcgcatggccaatgaaggtctgactcgcgacgaaatagcggccaactttaaactaccggatagcctggcaaaaacctgggccaaccgcggctattacggctccatcagccatgacgtaaaagcaacgtatgtgctgtatctcggttggttcgatggcaatccggcaacccttgatgagctgccacccgaagaagcggccaagaaatttgttgaatacatgggcggtgccgatgcgattcttcagaaagctaaagcagactttgaccaggggaactaccgttgggttgctcaggtggtgagtaaggtcgtgtttgccgatccaaataaccagaatgcacgtaaccttgaagccgatgcgctggagcaattggggtatcaggctgaatctggtccatggcgtaacttctacctgaccggtgcgcaggagctgcgtaacggtgtggttaaaggtccgacgccaaatacagcaagtccggataccgttcgggcgatgacccctgaaatgttcttcgactttctggctgtacatatcaacggtgaaaaagcgggtaatgcccgggcggtatttaatattgaccttggcagcgacggcggaaagtacaagcttgagctggaaaatggcgtgctgaaccacacggctaatgctgaagcgaaagatgctgatgccacgattactctgaaccgtgacacgctgaataaaattatcctgaaggaagaaactctgaagcaggctcaagataaaggagaagtcaacgttaccggtaatgctgcgaaactggatgagatgctgggctatatggacaagtttgagttctggttcaatatagttacaccataa

SEQ ID NO: 370410 - DNA, 1080 bp, Salmonella enterica
gtgagtcgaaaaaagtacgatgctaaccttccgaggaacctcacctaccgtaaggccagtaaatcttttttctggcgtaacccgctaactgacaaggaatttccgctcggtcagatcgcccgcagggacgctatcacacaggccatagaggcaaacaacttcatagcgcaaaaccacacaccagtggcgcttattgaaaagctaaaaggaactgactcattcactgtgtccgcatggattgatcgctatgaggttttattacagcgccggagtctgtcggttaatacctacaagattcgcggtaatcaattagcgaccgtacgcgaaaaaatgggggaaataatactggcagaagtaacaaccaggcacattgccaagtttcttgagtcgtggataaccgagggaaaaaacactatggcgggagcaatgagatcagttctatctgacatgttcagagaggctattgtcgaagggcatattgtgaaaaacccggtggaagcaacccggataccagagattaaggtggccagggaacgcctgcaactggaaacgtataacgccacacgagcggcagcagagcatatgcctgcatggttccctctcgcgatggatttagcgctcgttactggtcaacgtagggaggatatcgtaaatatgaaatttagtgatgtttttgacaaccgcttatacgtaactcagattaaaaccggaatgaaaatagccattcccctctccctgacacttcgggcgacggggttacgtctgggaacggtaatcgatcgctgccgactggtaagccgcactgatttcatgatcagtgccggaatcaggaaaaatagcccaaccgggaatattcatccggatggattgacaaagacatttgtaaaagcaagaaaagcctccggtgttaacttcagcaataatccaccgacatttcacgagatccgaagtctggccgggcggctgtacaaaaacgagcacggcgaggtgttcgcccaaaaactcctgggccacacatcagcgaacaccacgaaactctatctcgatgagcgtgatgataaagcttatatgatgctctaa

SEQ ID NO: 370411 - DNA, 354 bp, Salmonella enterica
atgaaaaaaatactccttccggcgcttctgctggccacttcgggcgtagcgttggcggcgccgcaggtgattaccgtaagtcgttttgaagtaggaaaagacaagtgggcgtttaatcgggaagaggtcatgttgacctgtcggcctggccaggcgctctatgtgatcaaccccagtacgctggtgcagtatcccttgaatgccattgccgaacagcaagtagcggagggtaaaacgcgtgctcagcctattgccgtcattcgaatcgataacccggcgaagcccggtgagaaaatgagtctggcgccgtttatcgaacgtgcgcaaaagctttgtgatccatccaatagctga

SEQ ID NO: 370412 - DNA, 876 bp, Salmonella enterica
atgatgctgacattcgtctggataactctccgatttattcattttgctagtttgatgctggtctacggctgcgcgctttacggcgcctggctggcacccgcatcaattcgtcgtttaatgacgcgtcgatttttacatctgcaacgacatgccgccgcctggagcgttatcagcgcggcttttatgctggcgattcagggcggactgatgggcggcggctggcccgatgttttttccgtctcggtgtggggcgcggtactgcaaacccgctttggcgcggtctggatatggcaaattatcctcgcgctggtcacgctggcggtggtagtcattgcgccggtaaaaatgcaacgacggcttcttattctcaccgttgctcagtttatcctgctggcaggcgttggacatgcgacgatgcgcgacggtgtagtgggaacattacagcagattaaccatgctctgcatttactctgtgccgcagcctggtttggtgggctgttgccagtggtttattgtatgcgcatggctcagggacgctggcgtcaacatgctattagcgccatgatgcgtttttctcgttatggtcacttttttgtggcgggcgtattgctcacaggcattggcaacacgctatttatcacgggatttaccgctatctggcagaccacctatggacagttgcttttgttaaaatgtgcgctggtcgtgcttatggtagcaattgcgctgacgaatcggtatgttctcgtaccacgtatgcgacaggaaaatccccggactgacctatggtttgtcaggatgacgcaaattgaatggggagttggaggcatagttctggcgatcgtcagcctgtttgcaaccctcgaacctttttga

SEQ ID NO: 370413 - DNA, 375 bp, Salmonella enterica
atggcttcttctgcaccatcgcgacgtttagctttactgctgctggcatcgacatttgcgacgccagcggcctgggcacatgcgcacctgacgcatcagtatccagcggcgaatgctgccgttacggcctcgccacaggcgctgaccctgaacttttctgaagggattgagccagggttcagcggcgcaaccattactggccctcagcaagagctcatcaaaacgcgcccggcaaagcgaaatgaacaggataaaacgcagttgattatcccgcttgagcagccgttaaaatctggcgcttacacggtagactggcacgttgtgtcggtggatggacataaaacaaaagggaaatacaccttcagcgtgaaataa

SEQ ID NO: 370414 - DNA, 231 bp, Salmonella enterica
atgaaaacgaatctggctcagcttgaacaagcggaaatggataaagtcaatgtggacctggcggcagccggggtggcatttaaagagcgctacaatatgccagttgtcgcggaggcggtcgaacgtgagcagccagagcacctacgcgcctggtttcgcgagcggctgattgcccatcgtctggcttccgtatcactatcccgactcccttacgaacccaaagttaaataa

SEQ ID NO: 370415 - DNA, 657 bp, Salmonella enterica
atgtcctcctggaaaattgctgctgcgcagtatgcgcccctgaacgcctcgccggcggagcatgtcgcccatcatctggaatatattgagcttgcggctcgtcaacagtgcgaactgctggtctttccgtcactgtcgctattaggctgcgacgaaaggaataaatcgttgcccgccccgcctgacgaggcgcttttacagccgctcactcatgcggccgatacccaccatatgactatcattgtgggtatgcctgttgagcataactgccgcttcgtaaaaggcatcgctatttttgccccatggctaacgtcgccgctcatgtttcacaaaagtcatggcgcctgtattgccaggcagcgaagcgctatcaacgtggtggatgagcagccagaaggtggtgatatagatccctcatttacgttattcacaaccagtcaatgtcttaacgaacctgaactccatgcttctacctcacgcttacaacgtttttcgcataaatatgcgctggccgtactgatggccaatgcctgtggaagtagcgcgctgtgggatgaaagcgggcaacttattgttcgtgccgattgcggttcgctattactgacgggcctgcgcacaacggagggttggcaaggcgatatcattccattacgctaa

SEQ ID NO: 370416 - DNA, 699 bp, Salmonella enterica
atgttgcggattatagacacggaaacctgcgggctgcagggcgggatcgtagagatagcctctgttgatgtcattgatggcaacattgtcaatcccatgagtcacctgatacgccccgatcgccctattacgccgcaggcgatggcgatacaccgtattaccgaagccatggtcgccgataagccgtggattgaagatgtcataccgctttattacggtagtgagtggtatgtcgctcacaatgccagtttcgacagacgcgtattacctgaattgccgggtgagtggatctgtaccatgaagttgtcgcgacgcctgtggccgggaataaaatacagcaatatgtcgctctataaatcgcgcaaactaagcgtacaaacgccaccggggctgcatcatcaccgggcgctttatgattgctatatcaccgccgccttgctgattgatattatgcgaaccaccggctggaccgcggaagaaatggtcaatatcacgggccgtcctgcgctgttaaccactttcccgttcggtaaataccgcggtaaggcggtatctgaagtcgcaaaacgcgatccgggctatttacgctggctttttaataaccttgataatatgagcccggaacttcgcctgacgcttaaacactacctggaagatgttcaggctggcgagcaacgcagcaatggaacaccacaataa

SEQ ID NO: 370417 - DNA, 2052 bp, Salmonella enterica
atgttgccaaaagccaatcgaattccctatgccatgaccgtacatggcgatacgcgcattgataattattactggctgcgagatgacactcgctcgcagccggaagtccttgattacctgcatcaggaaaatgagtatggccggaaggtcatgtcctctcagcaggcgttacaggaccgcattctaaaagaaattatcgatcgcatcccgcccagagaagtttccgctccgtatgtgaaaaatggctatcgctaccgttatatctatgaacccggctgcgaatatgccatctatcaacgacaatcggcgttaagcgaagagtgggatgtgtgggaaaccttgctcgatgcgaaccagcgggccgcgcacagcgaattttatacgctcggcgggcttgccattacgccggataataccatcatggcgctggcagaagattatttatcccgtcgtcagtatgggttgcgttttcgtaacctcgaaagcggtaactggtatccggaactgctggataacgttgcgcctgagtttgtctgggccaatgattccctgaccctttactatgtgcgtaagcataagaagacgctgctgccctatcaggtttggcggcacacgattggcactccgtcatcgcaagatgaactggtatatgaagaaaaagacgataccttttatgtcagcctgcataaaaccacttcgcagcattatgtggtgattcatcttgccagcgccaccactagcgaagtgctattacttgacgcggaactggccgatgccgagccgttttcattcttaccgcgtcgcaaagaccatgaatatagtctcgatcactatcaacataagttttacctgcgttctaaccggaacggtaaaaactttgggttgtaccgtacccgcgtgcgcaatgaaaacgcctgggaagagctgatccctccgcgcgagcatattatgctggaagggtttaccctgtttaccgactggttagtggtcgaagagcgtcaacgggggcttaccagcctgcggcaaattaaccgtaaaacccgtgaagtgataggcatcgcctttgacgatccggcttacgtgacgtggcttgcctataatcccgaacctgagacctcccggctgcgttacggctattcttcaatgacgacgccagataccttgtttgaactggatatggataccggagaacgacgggtacttaaacagacggaagtgcctgggtttgattctggctgttatcagagcgaacacctgtggatcaccgcgcgcgacggcgtcgaagtgccggtatcgctggtttatcatcagaagtattttcgtaaagggcaaaatccgcttctggtttacggctacggatcttacggttccagtattgacgccgacttcagcagcagccgactgagcttgctggatcgtggctttgtttacgcaatcgtacacgttcgcggcggcggtgagctggggcagcagtggtatgaagatggcaaattcctcaaaaagcggaatacttttaatgactatcttgatgcctgcgatgccttattaaaactgggttacggttcgccgtcgctgtgttacgggatgggcgggagcgcgggcggaatgctaatgggcgtcgctatcaacgaacgccccgagcttttccacggcgttattgcccaggtaccctttgttgatgtattaaccacgatgctggatgagtcgatcccactaacgacaggagagtttgaagagtgggggaacccgcaggatattgagtattatgactatatgaaaagctatagtccttatgacaatgtcaaagcgcaggactatccgcacctgctggtgacgacaggattgcacgattcccaggtgcaatactgggaaccggcgaagtgggtggcaaaattacgcgagctaaaaacggaccaacgtctgctgctgctatgtacggatatggactccgggcacggtggtaagtcggggcggtttaaatcctacgaaggcgtcgcgctggagttcgcctttttaatcggcctggcgcagggaaccttacatagcgcatag

SEQ ID NO: 370418 - DNA, 660 bp, Salmonella enterica
atggctaactggttgaaccaattacaatcacttcttgggcaaaaaggcgcttccgcatcgtcttccggtgaacaggggttaaataaactgctggttcccggcgcgctgggcggtctggctggactgttggtcgccaataagtcttcgcgcaaattattaactaaatacggtactggcgctttgctggtgggcggcggcgcggtggcgggttccgtattgtggaataagtacaaagataaagtacgcgctgcgcatcagggggagccgcaattcggcagccaaagtacgccgctggatgttcgcactgagcgactgatcctggcgctggtttttgctgcaaaaagcgatgggcatattgatgccaaagaacgcgcggcgattgagcaccaactgcgagaatcaggtgtggaagagcaagggcgtgtgtttatcgagaaagctattgagcagccgcttgatccacaacgtctggcacagggcgttcgtaatgaagaagaagccctggaaatctacttcctgagctgcgccgccattgatattgaccactttatggaacgtagctatctgaatgcgttaggagacgcactaaaaattcctcaggaggttcgggacggtatcgagcaggacttgcagcagcaaaaacaggcgctaccaggctga

SEQ ID NO: 370419 - DNA, 354 bp, Salmonella enterica
atgaataaaagaggagcgttgttgagcctgctgctgttatccgccagcgtatcggcatttgcggcatccaccgagagtaaatcggttaagtttccgcagtgtgaagggctggatgccgccgggattgcggcaagcgtgaagcgcgactaccagcaaaatcgtatcgtgcggtgggccgacgaccaaaaaaaggtcgggcaggctgacccggtcgcgtgggttaatgtgcaggacgttgtaggtcaaaatgataaatggacagttccgctaactgttcgcggtaaaagtgccgatattcattatcaggtcatcgttgattgcaaagccggcaaggcggaatataagccccgctag

SEQ ID NO: 370420 - DNA, 291 bp, Salmonella enterica
atggcggttgaagttaaatacgtagtcattcgcgagggtgaggagaagatgtcatttaccagtaaaaaggaagccgacgcctgggacaaaatgctcgatactgccgatcttcttgatacctggcttgagcagtcgccagtcgtgctggaagatgggcagcgcgaagcgttgtcgctgtggctggcggaacataaagaggtgttaagcactatcctcaaaaccggtaagttgccttctccgcaggcggttgaaaaggacgccgcgagtaaaacgaaaaagcaagccgcctga

SEQ ID NO: 370421 - DNA, 1179 bp, Salmonella enterica
atgacgctattaggcactgcgctgcgtccggcagcaacgcgggtgatgttattaggggcaggtgaattgggaaaagaagtggcgattgaatgccaacgcctggggatcgaggttatcgccgtcgatcgctatcctgatgctcccgccatgcatgtggctcaccgttcacacgtcattaatatgctggacggcgaggcgctacgtcatgtgattacagaggaaaaaccgcattatatcgtgccggaaatagaagcgatcgccaccgatacgctgcgtgagctggaggacgaagggctgaatgtcgtgccttgcgcccgtgcaacgcagctcacgatgaaccgcgaagggatccgtcgcctggccgcagaagaattaggtctgccgacatcgacgtatcgctttgccgacagtgaggccagttttcatgatgcggtagccgcagtgggttttccttgcatcgtcaaaccggtcatgagctcttccggcaaaggccagagctttatccgctcggccgaacagctcgcgcaggcatgggagtatgctcaacagggcggacgcgctggcgcgggtcgcgtgattgtggaaggcgtggttaaatttgattttgaaattacgctgctcaccgttagcgccgtcgatggcgtgcatttctgcgcgccagtcggtcatcgtcagcaagatggcgactatcgcgaatcctggcagccacagcagatgagcgaactggcgctgaagcgggcgcaagagattgcgcgtcatgtggtactggcgttaggcgggcatggcctgttcggcgttgaactcttcgtctgtggcgatgaagtcattttcagcgaagtctcccctcgcccgcacgataccggaatggtgacgttgatttctcaggatctttctgagtttgcgctgcatgtgcgcgcctttctgggaatgcccataggcgctattcgccagtatggtcccgctgcctcggccgtgattctgccgcagcttaccagtcaaaatgtgacgtttgataatgtacacacggcggtaggggccggagtgcaggtacggctgtttggtaagcctgagatcgacggcagccgtcgtcttggtgtagcgttagcgacaggtgaaaacgttgaagaagcggtgataagagcgaaaaaggccgccagccgcgtgacggtaaaaggctaa

SEQ ID NO: 370422 - DNA, 642 bp, Salmonella enterica
atgaaaaactggaaaacaagtgcagaagcaatcctgaccaccggcccggttgtcccggtcattgtagtcaataaactggagcacgcggtgccgatggctaaagcgctggtggccgggggcgttcgcgttctggaagtgactttacgtacggcctgcgcgatggatgctattcgcgctatcgctaaagacgtgccggaagcgattgtcggcgccggaaccgttctcaatccgcagcagttggcggaggtgacggaagcgggcgcgcagtttgcgattagcccgggactgactgagccactgctgaaagccgcgacggcaggcactatcccattgattcccggtattagcaccgtttctgaactgatgttgggcatggactatggtctgaaagagttcaaattcttcccggcggaagcgaatggcggcactaaagcgttgcaggcgattgccggtccgttctctcaggtacgtttctgcccaaccggcggcatctctccggcaaactatcgtgactatctggcgctgaaaagcgtgttgtgcatcggcggttcctggctggtgccggccgacgcgctggaagcgggtgattacgatcgcatcaccaaactggcgcgcgaagcggtagaaggcgcgaaacagtaa

SEQ ID NO: 370423 - DNA, 1812 bp, Salmonella enterica
atgaatcctaatttgttacgcgtaacacagcgtattgtcgaacgctcgcagcagacccgagaagcctatcttgcccgcattgagcaggcgaaaaccgccacggtccaccgatctcaactggcctgcggcaacctggcgcatggcttcgccgcctgtcagccagaggacaaagcctcgctgaaaagtatgttgcgcaataatatcgccattattacctcctacaatgacatgctctctgcgcatcaaccgtatgaacattatccgcagattattcgtcaggccctgcattccgtgaatgcggtaggtcaggtcgcaggcggcgtaccggcaatgtgcgatggcgttacgcaagggcaggatggcatggagttgtcattactcagccgcgaagtgatagcgatgtcggcagcagtaggcctctctcacaatatgtttgacggcgcgttattcctcggcgtatgcgacaaaatcgttccggggctggcgatggccgcgctctcttttggtcatttacccgcgatttttgttccgtcaggcccgatggcgagcggcctgccgaataaagaaaaagtccgtattcgtcagctatatgcggaaggaaaagtagacagaatggcgctgctggagtcggaagccgcctcttaccatgcgccgggcacctgtacattttacggcaccgccaacaccaaccagatggtggtggagtttatgggaatgcagttgccgggttcttcgtttgtgcatccggatgcgccgctgcgcgaggcattgactgccgctgccgcacgtcaggtaacacgtcttaccggcaacggcaatacgtggatgccgctcggtaaaatgatcgacgaaaaagtcgtggtgaacggcattgtcgcgctgctggctaccggcggctccaccaaccacaccatgcatctggttgcaatggcgcgcgcggcgggcattctgatcaactgggatgacttctcggatttgtcggaagtggttccgttgatggcgcgtctgtacccgaacggtccggcggacattaaccacttccaggcggcgggcggcgtaccggtattgatgcgtgagctgctcaatgccggattgctgcacgaagacgttaacactgtcgcaggcttcggcctgaaacgctatacgctggagccctggctcaacaacggcgagctggactggcgtgaaggcgcggaaaggtcactggataacgatgtcattgcctcttttgataagccgttctctcctcacggcggcactaaggtgctaagcggtaatctggggcgcgcagtaatgaagacgtctgcggtaccggttgaaaaccagatcattgaagcgcctgccatggtatttgaaagtcagcatgatgtgctgcctgcgtttgacgcgggtctgcttgatcgggattgtgtcgttgtcgtgcgtcatcagggaccaaaagcgaatggaatgccagaattacataaactcatgccgccacttggtgtattattggaccgccgtttcaaaatcgcgttagttactgatggacgactttcaggcgcttcgggtaaagtgccttcagctatccacgtaacgccggaagcctacgatggcggcttactggcaaaagtgcgcgatggcgacatcattcgcgtgaatgggcagacaggtgagttaactctgctggtcgacgaggcggaacttgccgctcgtcagcctcatattccggacctgagcgcgtcgcgcgtcggaacggggcgtgagttgtttggcgcgctgcgcgaaaagctgtcgggtgcggagcagggcgcaacctgtatcactttttaa

SEQ ID NO: 370424 - DNA, 1476 bp, Salmonella enterica
atggcggtaacgcaaacagcccaggcatgtgacctggtcattttcggcgcgaaaggcgacctggcgcgccggaaactgctgccttccctgtatcagcttgagaaagccggccagatccatccggatacccgtatcattggggtggggcgcgcggactgggataaagaagcttatacccacgtcgtgcgtgaggcgctggaaaccttcatgaaggaaaaaattgatgaaggcttgtgggatacgctgagcggccgtctggatttttgtaatcttgacgttaacgatacgcctgcgtttagtcgcctgggcgatatgctggatcaaaaaaaccgcaccaccattaactattttgcgatgccgcccagcacctttggcgctatttgcaaagggttaggagaggctaaactcaacgccaaaccggcgcgcgtcgtgatggaaaaaccgttgggtacttcgctggcgacctcgcgtgagattaacgatcgggtcggcgaatactttgaagagtgccaggtgtatcgtatcgaccactatctgggcaaagaaacggttctcaacctgctggcgctgcgttttgccaactcgttattcgttaataactgggataaccgcactatcgatcacgttgagattaccgtagcggaagaggtggggattgaagggcgctggggatattttgaccaggccggtcagatgcgcgatatgatccagaaccacttgctgcaaattctctgcatgattgccatgtcaccgccgtctgacctgagcgccgacagtattcgcgatgaaaaagtcaaagtgttgaaatcgttgcgccgtattgatcgctccaacgtgcgtgaaaaaacggttcgtggtcaatacaccgcgggctttgcgcagggtcaaaaggtgccgggctatctggaagaagagggcgcgaataaaagcagcaacaccgaaactttcgtcgcgatccgcgtcgacatcgataactggcgttgggcgggcgtgccattctatctgcgcaccggcaagcgtctgccaaccaagtgctctgaagtcgtggtttatttcaagacgcctgaactgaatctctttaaagagtcctggcaagacctgccgcagaacaaattgacgattcgcctgcagccggatgaaggcgtagatattcaggtgcttaacaaagtaccggggctggatcataagcataatctgcagatcacgaagcttgatctgagctactccgagacctttaatcagacgcacctggcggatgcatatgagcgcctgctgctggaaacgatgcgtggcattcaggcgctgtttgtccgccgtgacgaagtggaagaagcctggaagtgggtggactccattaccgaagcatgggcgatggacaacgacgcgccgaagccgtatcaggcgggcacctggggaccggtagcgtccgtggcgatgattacccgtgacggtcgttcgtggaatgagtttgagtaa

SEQ ID NO: 370425 - DNA, 870 bp, Salmonella enterica
atgaatatgctggaaaaagtccagtctcaactggaacatttaagcaaatctgaacgaaaagtcgccgatgttattctggccgccccaggcagatcgattcacttaagcattgccatgctggcccaggaagctaacgttagcgagccaacggtgaaccgtttctgtcgcagcatgaatacccgcggctttcctgattttaaactgcatctggcgcaaagtctggcaaatggcaccccctatgttaatcgcaatgtggatgaagatgacagcgtcgaggcctatacaggaaaaatcttcgagtccgctatggccagtctcgaccatgttcgccagtcgctggataaatcggccgtcaaccgcgcggtcgatttactgacccaggcaaaaaaaatcgccttttttggtcttggttcctccgccgcggtcgcgcatgacgccatgaataagttttttcgcttcaatgtgccggtgatttactccgacgatatcgtgctgcaacggatgagctgtatgaattgtagcgatgatgacgtcgtcgtgctcatttcgcatactggcagaaccaagagcctggtggaactggcgcagttggcgcgggaaaacgatgcgatggtgatcgccctgacctccgctggaacgccgctggcgcgcgaagccacgctggccattaccctcgacgtaccggaagatacagacatttatatgcccatggtctctcgacttgctcagctgaccgtgatagatgtgctggcaacgggatttactttgcgtcgcggggcaaaattcagagataacttgaagcgtgtcaaggaagcgctcaaggaatcgcgttttgataaagaattactcatcaagagtgatgaccgctaa

SEQ ID NO: 370426 - DNA, 1443 bp, Salmonella enterica
atgtccagaaggcttcgcagaaccaaaatcgttaccacgttaggcccggcaactgaccgcgataacaaccttgagaaggttatcgccgcgggcgcaaacgtagtacgtatgaacttctctcacggctcgccggaagatcataaaatgcgtgctgataaagtccgtgagattgccgccaaactggggcgtcatgtggctattttaggcgacctgcaagggccaaaaattcgcgtttccacttttaaagaaggcaaagtgttcctcaacatcggggacaaatttctgttagacgctaacctgggtaaaggcgaaggcgacaaagaaaaagtcggcattgattacaaagggttgccggcagacgtcgttcctggcgatatcctgctgcttgacgatggtcgagtgcagttgaaagtgcttgaagtccagggcatgaaagtctttaccgaggtcaccgtcggcggcccgctgtctaacaataaaggcattaacaagctcggcggcgggctttctgctgaagcgctgaccgaaaaagacaaagccgatattcaaaccgctgcgctgataggcgttgactatctggccgtctccttcccgcgctgcggcgaagatctgaactacgcacgccgcctggcacgcgacgccggctgcgacgcgaaaattgtggctaaagtcgaacgcgccgaagcggtatgcgaccaaaacgccatggacgatatcattctggcctctgacgttgtgatggtcgcacgtggcgacctgggcgttgaaatcggcgatccggagctggttggtatccagaaggcgctgattcgccgtgcgcgtcagctaaaccgtgcagtcatcaccgcaacgcagatgatggagtcgatgatcaccaacccgatgccgacccgcgcggaagtgatggacgtggcgaacgccgtcctggatggcacggatgcagttatgctgtctgccgaaaccgcagccggtcagtatccttctgaaaccgttgccgcaatggcgcgcgtctgcctgggcgcagaaaaaatccccagcatcaatgtgtctaaacaccgtctcgacgtgcagttcgacaacgttgaagaagctattgccatgtctgcgatgtatgcggcaaaccatctgaaaggcgttaccgcgatcatcaccatgacggaatccggtcgtaccgcgctaatgacttcccgtatcagctccggcctgccgattttcgccatgtcgcgccatgaacgcacgctgaacctgaccgcgctctaccgcggagtaacgccggtgcattttgacagcgcggctgatggcgttgtcgcggcacatgaagctgttaatctgctgcgcgataaagggtatctggtttccggcgacctggttatcgtgacccagggcgatgtcatgagcaccgtcggttcaaccaataccacgcgtatcttgaccgtggagtaa

SEQ ID NO: 370427 - DNA, 972 bp, Salmonella enterica
atggaaaccaaaaaaaataatagtgagtatatccctgaattcgaaaaatcctttcgctatccgcagtattggggcgcctggttgggcgcggcggcaatggcggggattgcattaacaccggcatcattccgtgaccctttgctggcgacgctggggcgctttgccggacggctggggaagagttctcgtcgccgggcgctaattaatctgtctttgtgctttccgcagcgtagcgaagctgagcgcgaagcgattgtcgatgagatgttcgccaccgcgccacaggcaatggcgatgatggctgagttggcgatgcgcggtccgaaaaaaattcaacagcgtgttgactgggaaggtctggaaatcattgaggagatgcgtcgtaacgacgaaaaagtcatttttctcgtaccgcatggctggggcgtcgacattccagctatgctgatggcctctcaggggcaaaaaatggcggcgatgtttcataatcagggtaatccggtttttgactatatctggaacaccgtgcgtcggcgttttggcggacgtttgcatgcgcgcaatgacgggattaaaccctttattcagtctgttcgtcagggctactggggttactacctgccggaccaggatcatggcccggagcatagtgaattcgttgatttctttgcgacatacaaagcgacgctgcccgcgattggtcggctgatgaaagtgtgccgcgcacgcgtgataccgcttttcccggtgtataatggtaaaacgcatcgcctgactatccagattcgcccgccaatggacgatctgctcacggctgacgaccacactatcgccagacggatgaacgaagaggtcgaaatttttgtcggcccgcatccggaacagtacacctggatcctgaagctgctcaaaacccgcaagccaggcgagattcagccgtataagcgtaaagatctttatcccatcaaataa

SEQ ID NO: 370428 - DNA, 1320 bp, Salmonella enterica
gtgcaacagatagcccgctctgtcgccctggcatttaataatctgccccgaccccaccgcgttatgctggggtcacttaccgttctgacactggccgtcgccgtatggcggccctatgtttaccacccagaatccgcaccaatcgttaaaactattgaactggagaaaagcgagattcgttccctcttaccggaggccagcgaacccatcgatcaggccgcgcaggaagatgaagctattcctcaggatgagctggacgataaaaccgcaggcgaagtcggcgtccatgaatacgtcgtctccacaggcgatacgttaagcagcattctgaatcagtacggcatcgatatgagcgatattagccgacttgccgcttctgataaggagctgcgcaatctgaaaattggccaacagctttcctggacactgactgccgatggcgatttacagcgtctgacatgggaagtctcccgccgtgaaacgcgtacctacgatcgcactgccaacggttttaaaatgagcagtgaaatgcagcagggggactgggttaacagtctgctgaaaggcacggtaggggggagctttgtcgccagcgcgaaagaggcaggtttaaccagcagcgaaatcagcgcagtgataaaagccatgcagtggcagatggattttcgcaagctgaaaaagggcgatgaattttcggttctgatgtcgcgcgagatgctggatggcaagcgtgaacagagtcagttgttgggcgtgcggatgcgttccgatggtaaagattactacgccattcgcgccgctgacggtaaattctatgaccgtaacggtgttggcctggcgaaaggctttttacgcttcccgaccgccaaacagttccgcatctcctccaatttcaatccgcgccgtctgaacccggttactggacgcgttgcgccgcatcgtggcgttgactttgcgatgccgcagggtacgccggtgctgtcggtgggggatggcgaggtcgtggtcgctaaacgtagcggcgctgccggttactacattgcgattcgtcatggacgcacctacaccacacgttatatgcacttgcgtaagctgctggtgaaaccggggcaaaaagtgaaacgtggcgatcgtattgcgctttctggtaacaccgggcgctccacagggccgcatctgcattatgaggtatggatcaaccagcaagccgttaaccctctaacagcaaaattgccgcgcacggaaggtctgacggggtcagatcgtcgtgaatacctggcacaggtgaaagaggttctgccacaactgcgcttcgattaa

SEQ ID NO: 370429 - DNA, 1002 bp, Salmonella enterica
gtgatagaatgttataatatcacatttcacacattcattacgatgattagtcgcattatgttacagaaaaatacgcttcttttcgcagcattatccgccgcgctttgggggagtgcaacccaggctgccgacgccgccgttgtcgcttcgcttaaaccgcttgggtttatcgcttccgccattgctgatggcgttacggatacacaagtattacttccggatggggcttccgagcatgattattcattgcgtccatcagacgtaaaacgcttacagggcgcggacttagtcgtctgggttggcccggaaatggaagcctttatggagaagtcggtcaggaatattcctgataataagcaggttaccattgcgcaacttgccgatgtaaaaccgttactcatgaagggcgcggatgatgatgaggatgaacatgcgcatacgggcgccgatgaggaaaaaggtgacgtacatcaccatcacggcgaatataacatgcatctttggctctccccagagatagcgcgggctacagcggttgcaatccatgaaaaattagtggaacttatgccgcaaagtcgagccaaactcgacgccaacctgaaggattttgaggcacaattagccgcaaccgataaacaggtcggtaacgagctcgcgccgctcaaggggaaagggtatttcgtttttcatgacgcctacggttactacgaaaaacactacggactcaccccgctcggtcactttaccgtgaaccctgagatacaacctggcgcgcagcgtttacatgaaataagaacacagttggttgagcaaaaagcaacctgcgtttttgctgagccacaattcaggccagcggtcgtggaagccgtggcgagagggacatccgttcgaatgggaacactggaccccctcgggacgaacattaaactgggtaaaacaagctattcagcgtttttaagccaattagccaaccagtatgcgagctgcctgaaaggagattaa

SEQ ID NO: 370430 - DNA, 756 bp, Salmonella enterica
atgacaagtttagtttcactggaaaacgtctcggtctcatttggtcaacgccgcgtcctctctgacgtgtcgcttgaattgagccccggaaaaattttaacgcttctcggccctaacggcgcggggaagtcaacgcttgtacgcgtggttttaggactggtagcccctgatgaaggggtgatcaagcgcaacgggcaactccgtatcggctatgtcccgcaaaagctctatctcgataccacgcttccgctgacggtaaaccgatttttacgtttacgtcccggcacacaaaaaacggatattctcccggcgcttaaacgcgttcaggccggacatttgattgacgcgcccatgcaaaaactctctggcggtgagacacagcgtgtactgctggcgcgtgctctgcttaacaggcctcagttgctggtacttgatgagccgacgcaaggcgtggatgtcaacggccaggtcgcgttatacgaccttatcgatcagctgcgccgtgaactcgattgcgccgtgctgatggtgtcgcatgatctacatctggtcatggcaaagacggatgaagtgttatgcctgaaccatcatatttgctgttccggcgcgccggaagtggtgtctatgcatccggaatttatctctatgtttggcccgcgaggcgcggagcaattagggatttatcgccatcatcataatcatcgccacgatttacagggccgtattgtactgcgccggggaaatggtcactcatga

SEQ ID NO: 370431 - DNA, 786 bp, Salmonella enterica
atgattgaattattactgcccggctggctggccgggatgatgctggcctgcgccgctggtccattgggctcatttgtggtctggcgtcggatgtcctattttggcgatacgctggctcacgcgtcgcttctgggcgtggcgtttggcctgttgctggacgttaaccccttttatgcggtaatcgccgttacgctgctgctggccgccggtctggtatggctggagaaacgccctcacctcgcgattgataccttactgggcattatggcgcacagcgccttatctttaggactggtcgtggtcagcctgatgtccaacgtccgcgttgatttaatggcttatctgtttggcgatttgctggccgtcacgccggaagatcttatctcgatcgctattggggtcgttattgtgctggccattctcttctggcagtggcgcaacttgctgtcaatgactatcagtccggatcttgcctttgtcgatggcgtgaagttacagcgcgtgaagctgctattgatgctggtaacggcgttaactattggcgtggcgatgaagtttgtcggagcgctgatcattacgtcgctgctgattatccccgccgcaaccgcgcgtcgctttgcccgtacgccggagcagatggcgggcgtcgccgttggtgtaggtatgatagcggttacaggtggactgaccttctcagccttttatgataccccggcagggccatccgtagtgctgtgtgccgcgctgctgtttatcttcagtatgatgaaaaagcaggcaagctaa

SEQ ID NO: 370432 - DNA, 1011 bp, Salmonella enterica
atgatagaagcagatcgcctgatttcagcaggcgccacgatcgcagaagacgtcgccgatcgcgccattcgcccgaagttattggcggaatatgtcggccaaccgcaggtgcgctcccagatggagatctttattcaggcggcaaaacggcgtggcgacgcattagatcacttgctgattttcggcccgccagggttaggtaagacgactctggcgaatatcgttgccaatgaaatgggcgtcaatctccgaaccacgtccggcccggtgctggaaaaagcaggcgatctggcggctatgctcaccaatcttgaaccgcatgatgtgctgtttattgatgagattcaccggctttcaccggtggtggaagaggtactctatccggcgatggaagattaccagttggatattatgattggcgaagggcctgccgcacgttcaattaagatcgatctgccgccgtttacgctcattggcgcgacgacgcgcgccgggtcgttaacgtccccgctacgtgaccgttttggtattgtgcagcgcctggagttttaccaggtgcctgatctgcagcacatcgtcgggcgcagcgcaaggcacatggggcttgagatgagcgatgacggcgcgctggaagtggcgcgtcgggcgcgcggtacgccgcgtatagccaaccgtctgctcagacgtgtgcgtgatttcgccgaggtgaagcatgacggggctatttcagcggaaattgccgcgcaggcgctggatatgctgaacgtcgatgcggaagggtttgattatatggatcgcaagctactgctggcggttattgataaattcttcggtggtccggtgggactggataacctggcggcggcgattggcgaagagcgtgaaaccattgaggatgtgctggagccgtatctgattcagcaaggctttttgcagcgcacgccgcgtgggcgtatggcaacggtgcgcgcctggaaccatttcgggatcacgccgccagagatgccttag

SEQ ID NO: 370433 - DNA, 612 bp, Salmonella enterica
gtgataggcagactcagaggcattattctcgaaaaacaacccccgatcgtgctgctggagacagggggagtaggctatgaagtacatatgcctatgacctgcttttacgagctgccggaggccgggcaggaggcaatcgtcttcacccacttcgtggtgcgtgaagatgcgcagttgctgtacggatttaacaataagcaagagcgcacgctatttaaagagctaattaaaacgaatggcgtcgggcctaagctggcgctggcgatcctctccggcatgtcggcgcaacagttcgtcaatgcggttgagcgcgaagagctgggtgcgctggtgaagctgccgggtatcggcaagaaaaccgccgaaaggctgattgtcgaaatgaaagaccgctttaaagggctacatggcgatctctttacgccagcggtcgatctggtattgacgtcgccggccagcccaacctcggaagatgcagaacaagaagcagttgctgcgctggtggcgctgggttataaaccgcaagaagccagtcggatggtaagcaagatcgcccgtccggatgcaagcagtgaaacactgattcgcgacgcgttacgcgccgcgttatga

SEQ ID NO: 370434 - DNA, 693 bp, Salmonella enterica
gtggttgatgataaaccaatgagaataggttgggtattttatttttcttatatttttgttgctattatctttcatctgtttattagtttttgttattgtttgagtattgatatggcagaggctaatactgttgtttttttattaaagccagggacgatttcattattatttttgcttctccctgccaggcggttcaggaccagactgttggcaacattgagttcagttttcattaccttagtatttaaccagtggcatttggttgccgggaataaagaactggttttgtgcctgcaggcagcgtgctttatggctttcctggctatgacatcggtaaaaaaatccgggtggatgattagcgcatcattatttttggtttgtgcggccggaacgattcgccagtgctggctggaacagctgtttaacgctgccgatatatatattgttgatgatgggcggagcagtggcgccagcggccactgcttccagtatattgcagcaaaaggccgtgggttagcagcaaaacgacaggcactttttagtagcgaagagtatgtgaatatttattatagttattcagaagggatgccagccgtgaatttcgatggcatgaaaaatgagtttgtacaatatttattgtgtcatggcgaattaaaatctgttgcgcgcgacgataaaacaacatgcgattaa

SEQ ID NO: 370435 - DNA, 600 bp, Salmonella enterica
atgaaaaaacattattctgtccaatatgaaaccggggataccgtctttacctgtataggtgccgcgcttttcggccagatatccaccgcttcacagtgctggagcaaccatgttgggattattattggtcataatggtgatgactatctggtggcggaaagtcgcgtccccctctcaaccgtcaccacgctgtcactgtttatacaacgttcagccggacaacgttacgccgttcgccgtctgcgcggcggcctgacggtcgagcagaaactcgccatcatggagcaggttcccgcccggctgaataagttttatcacacggggtttaaatacgagtcatcgcgccagttctgctcgaaatttgtgtttgatatctataaagaagcattgtgtattccggtaggcgatattgagacattcgaagaattacttcacagcaatcctgatgcgaaactcaccttctggaaattctggtttttaggttcaatcccgtgggatcgtaagacggtgacgcccgccagcctgtggcatcatcccaatttagaattaattagcgcctgtggaattgaaacccctcaacgcgaggctgagggagaatga

SEQ ID NO: 370436 - DNA, 522 bp, Salmonella enterica
gtgtcgattattctcggtattgaccccggctcgcgcattaccggttatggcgttatccgccaggtaggcagacaactgacctatctgggcagcggatgtattcgcaccaaagtcgatgatttgccgtctcgtttgaagctcatatacgcaggcgtgacggaaatcatcacgcagttccagccggactattttgctatcgaacaggtgtttatggcgaagaacgccgattcagccctcaagctgggacaggcgcgcggcgtcgcgattgtcgccgcggtcaatcaggaactgcccgtgtttgaatacgcggcgcgtcaggtgaagcaaaccgtcgtcggtattggtagcgcggaaaaaagccaggtacagcatatggtgcgcacgttgctcaaactgcccgctaacccgcaggcagacgccgcagatgcgctggctatcgccattacgcattgccatgttagccagaacgcgatgcaaatgagcgagagccgactcaatctggcgcggggaaggttgcgctaa

SEQ ID NO: 370437 - DNA, 741 bp, Salmonella enterica
atggcaggtcatagtaaatgggccaacaccagacatcgtaaagctgcgcaggatgccaagcgcggtaaaatcttcactaaaattattcgtgaactggtaacggcagctaaattgggcggcggcgatccggatgccaacccgcgtctgcgcgcggccgtagataaagcgctggccaacaacatgacccgcgacactctgaaccgtgccatcgctcgcggtgtgggtggtgatgaagactcgaacatggaaaccatcatctatgaaggttatggtcctggcggcacggccattatgattgagtgtctgagtgacaaccgtaaccgtaccgtagcggaagtgcgtcatgctttcagcaagtgcggcggtaatctgggtaccgatggctcagtggcgtacctgttcagtaagaaaggggtcatctcctttgagaaaggcgatgaagacaccatcatggaagccgctctggaagctggcgcggaagatgttgtgacctatgatgatggcgcgattgatgtttacactgcctgggaagagatgggcaaagtgcgtgacgcgctggaagcggcgggtctgaaagcggacagcgccgaagtgtccatgatcccgtcaaccaaagcggatatggatgcggaaaccgcgccgaaactgctacgtctgatcgatatgctggaagactgtgacgatgtccaggaagtctaccataacggtgagatctctgatgaggtggcggcgaccctgtaa

SEQ ID NO: 370438 - DNA, 453 bp, Salmonella enterica
gtgaaggataaagtgtacaagcgccccgtttcggtcctggtggttattttcgcgcaggatacgaaacgggtgctaatgttgcagcgacgcgacgacccggatttttggcagtcagtgactggcagcatagaagaaggggagaccgcgttgcaggccgccgtgcgtgaagtcaaagaggaggtcacgattgatgttgcggcagagcaactgaccttaatcgactgccaacgtacggtggagtttgaaattttttcacatttacgtcatcgctatgcgccgggcgttatgcacaatacagaattctggttctgccttgcgttaccgcatgagcggcaggtgatattcactgaacatctgacgtaccagtggcttgatgcgcctgacgcggcggcgcttaccaagtcctggagtaaccggcaagcgattgaagagtttgtcattaacgtcgcctga

SEQ ID NO: 370439 - DNA, 1773 bp, Salmonella enterica
atgcgtacagaatattgcggacagctacgtctgtcccacgtggggcagcaggtgactctgtgtggttgggtcaaccgtcgtcgtgatcttggcagcctgatctttatcgatatgcgcgaccgcgaaggtattgtgcaggtgttcttcgatccggatcgtgcggacgcgttaaagctggcctctgaactgcgtaatgagttctgcattcaagttacgggcaccgtgcgtgcgcgtgacgcgaaaaacgtcaatgcggatatggcgaccggcgaaattgaagtgctggcgtcctctctcactatcatcaaccgcgcagactcactgccgcttgacgctaaccacgttaataccgaagaggcgcgtctcaagtaccgctatctggatttgcgtcgtccggaaatggcgcagcgcctgaaaactcgcgccaaaattaccagcctggtgcgtcgttttatggacgatcacggtttccttgatattgaaacgccgatgctgaccaaagccacgccggaaggcgcgcgcgactatctggtgccttcgcgcgtgcacaaaggtaaattctacgcgctgccgcagtcgccgcagctgttcaaacagctcctgatgatgtccggtttcgaccgttactatcagatagtcaaatgcttccgtgatgaagacttacgtgctgaccgtcagccggagtttactcagatcgacgtcgagacctccttcatgaccgcgccacaggtgcgcgaagtgatggaagcgctggtgcgccatttatggctggaagtgaaaggcgtggatctgggggatttcccggtcatgacgtttgccgaagcggaacgtcgttacggttccgacaaaccagacctgcgtaacccgatggaactggtagatgtcgctgacctgctgaaatcggtagagttcgcggtcttcgcgggcccggctaacgatccgaaaggccgcgtggcagcgctgcgtgtgcctggcggggcgcagcttagccgtaagcagatcgacgattacggtaactttgttaagatctacggcgcgaaaggcctggcgtatatcaaagttaacgagcgcgcgaaaggtctggacgggattaacagtccggtggccaagttcctgaccgccgacatcgtcgacgctatccttgaacgtaccggcgcgcaggacggcgacatgatcttcttcggcgcagataacaaaaaagtggttgccgatgcgctgggcgcgctgcgtctgaaactgggcaaagacctgagcctgaccgacgaagacaaatgggcgccgctgtgggtgattgacttcccgatgtttgaagacgacggcgaaggcggtctgaccgcgatgcaccatccgttcaccgccccgcgtgacatgacggcgtctgaactgaaaactgcgccggaagaagccgtcgctaacgcttacgatatggtgattaacggctatgaagtgggcggcggttcggtgcgtattcacaacggtgaaatgcagcaaaccgtatttggtattctcggtatcaatgagcaggagcagcgcgagaagttcggcttcctgttggatgcgttgaaatacggtacgccgccgcatgcgggcctggcgtttggtctggaccgtctgaccatgctgttgaccggcaccgacaatattcgtgatgttatcgccttcccgaaaacgaccgccgccgcgtgtctgatgaccgaagcgccgagtttcgccaaccaggcagcgttgacggagttggggattcaggttgtgaagaaagccgagaataactga

SEQ ID NO: 370440 - DNA, 567 bp, Salmonella enterica
atgctgaaactcaacgcgaccacaaccgccctggtggttattgatttacaggaaggaattcttccgtttgccggcggcccgtatacggcaaatgaggtggtcgcccgcgccgcgcggctggcggaaaagtgtcgtgccaacggctcgcccgtggttatggtacgcgtcggatggtctgatgattatgccgaagcgttaaaacaacccgtggatgccgcaacgcctgcgcacgcgttgccggaaaactggtggacctggcctacggcattgggtaaaaaggacagcgatctggaagtgactaaacgccagtggggcgcgttttacggcaccgatctggaattacagcttcgccgccggggtatcgacaccatcatattgtgcgggatctcaaccaatatcggcgtcgaatccacagcgcgtaacgcctgggagttgggatttaaccttattattgccgaagatgcctgtagcgccgccagcagtgagcagcatcagagcagtatgacgcatattttcccgcgcattggccgggtacgcagcgtagaggatattttaaacgccttatga

SEQ ID NO: 370441 - DNA, 819 bp, Salmonella enterica
atgatctacattggcttgccgcaatggtcgcacccgaaatgggcgcggctcggcatcaccagtctggaagagtatgcccgccactttaactgcgtggagggcaacaccacgctttacgcgctgccgaaagcggaaattgtcgatcgctggtatgcgcaaactacggacgatttccgtttttgctttaaatttcccgcgaccatttctcaccaggccgcgctgcgccattgcgacgatctggtacaggcgttttttacccgcctggcgccgctggaaacgcgtattggccaatactggctgcagttgcccgccgcctttggaccgcgcgatctccccgccttatggcagtttcttgatgcgctccccgccacgtttacctatggcgtagaagttcgtcatccgtgtttttttgacaaaggtgaggatgaacagcggctcaatcgcgggttacacgcgcgcggcgtaaaccgcgtgatcctggatagtcgtccggtacatgccgcccatccccacagcgaggccgtccgcgacgcgcagcgaaaaaaacccaaagttccggtacatgctgtcgtgacggctagccatccgatggtgcgttttatcggtagcgataatatggcgcaaaaccgtgagtttttcgccgcctggttgcagaaactcccgcagtggcggcagaccaccacgccttttctgtttttacatactccggatatcgcgcaggcgccggaactggtgaatacactttggcatgatttacgcagcgtcttaccggaaatcggcactgctccgtccattccacagcaatcttctcttttctga

SEQ ID NO: 370442 - DNA, 396 bp, Salmonella enterica
atggtaagcgcgctgtatgccgttttgggtgcgttattattaatgaagttctcttttaatgtcgttcgcttgcgaatgcagtaccgtgtcgcctatggcgacggcggttttagcgaattacaaagcgccatccgtattcatggcaacgcggtggaatatattcctgtcgcgctggtgctgctgctgtttatggaaatgaacggcgccgaaacgtggatggtgcatatctgcggcatcattttaatcgccggtcggctgatgcattattacggttttcaccaccgcctgttccgctggcggcgggcggggatgagcgctacctggtgcgcattgttgctgatggtgctggcaaacctgtggtatatgccctgggagttggttttctccctgtattag

SEQ ID NO: 370443 - DNA, 744 bp, Salmonella enterica
atgtctcaccgcgacacgcttttttctgcgcctatcgcccgtctcggcgactggacttttgatgaacgagtagccgaagttttccccgacatgattcagcgttcggtaccaggctactccaacatcatctccatgatcggcatgttagctgaacgctttgtgcagccgaacacgcaggtctacgatctgggctgctcgctgggcgccgcgacgctgtctgttcggcgtaatatccgccatgagcattgtcgcattatcgccgtcgataactccccggccatgattgaacgctgccgccgccatattgatgcgtataaagcgcctacgccggttgaagtcgttgaaggcgatatccgcgatatcactattgaaaacgcctcgatggtggtgctgaattttaccctgcaattccttgaacctgccgaacgccaggcattgctggataagatttacctggggttgaatcccggcggcgcgctggtactgtcggaaaaatttagctttgaagacgcgaaagtgggtgagctgttattcaacatgcaccacgattttaaacgcgcgaatgggtacagcgaactggagatcagccagaagcgcagtatgctggaaaacgtgatgctcaccgactcggtggaaacacataaagcgcgcctgcgtaaggcgggtttcgaacatagtgaactgtggttccagtgctttaacttcgggtcgcttgtcgcgttaaaagccggagttgccgcatga

SEQ ID NO: 370444 - DNA, 972 bp, Salmonella enterica
atgatcgagtttggtaacttttatcagctcattgctaaaaatcatctctcccactggctggaaacattgcccgcgcagattgccgcctggcaacgcgagcagcagcatggcttgtttaaacagtggtcgaacgcggtagaatttttaccggaaatgacgccctggcggctggatttactgcacagcgtcacggctgaaagcgaaacgccgctcagcgaaggtcagctaaagcgtattgatacattgctgcgtaatctgatgccgtggcgtaaaggcccgttctcgctttatggcgtagatattgataccgaatggcgctccgactggaagtgggatcgcgtactgccgcatctgtcagatttaaccggccggacgatccttgatgtcggctgcggcagcggctatcacctgtggcggatgattggcgcgggcgcacatctggcggtcggcatcgatcctacacagcttttcctctgccagtttgaggcggtgcgtaaactgttgggtaacgatcagcgcgcgcatctgctgccgttgggcattgaacaactcccggcgctgaaagcatttgataccgtcttctcgatgggggtgctttatcaccgtcgctcgccgctggagcatctgtggcagttaaaagatcagttggtcaacgagggtgaactggtactggaaacgctggtcgtcgacggcgacgaaaataccgtactggtgccgggtgaccgctacgcgcagatgcgtaacgtctattttattccttccgcgccggcattaaaaaaatggctggaaaaatgcggctttattgatgtgcgtatcgctgacgtttgcgtcaccaccaccgaagagcagcgccgtaccgaatggatggttaccgagtcgctggccgattttcttgacccgaacgatcgcagcaagacggtggaaggctaccccgccccgcagcgcgcggtgctgattgcgcgtaaaccgtga

SEQ ID NO: 370445 - DNA, 747 bp, Salmonella enterica
atggcgttacttgagatctgttgttacagcatggaatgcgcgctcaccgcgcagcgaaacggcgcggatcgtatcgaactgtgcgccgcgccgaaagaaggcgggcttacgccttcgctgggcgtcttacgcagcgtgcgcgagcatattacgattcccgtacatccgattattcgtcctcgcggcggggatttttactacactgacggcgaatttgccgccatgctggaagatattcgcctcgtcagagagttgggttttcccgggctggtgactggcgtgttgaccgttgatggggatgtcgatatgtcgcgaatggaaaaaataatggcggcggccggaccgctggcggtgacattccaccgcgccttcgatatgtgtgctaatcccttcaatgcgctaaagaatctggctgacgcaggcgtagcaagagtactgacttccggacaaaaagccgatgcggcgcaaggtttatcaataattatggaacttattgcccagggggatgctccaaccattatggctggtgcgggggttcgtgcaaataacctgcagaatttcctcgatgccggagtacgggaagtacacagttccgccggagtcttactgccttcgccgatgcgctatcgcaatcaggggttatcgatgtctgccgatatacaggcggacgagtattctcgctatagggtagagggtgcggcggtcgctgaaatgaaaggaatcattgttcgccatcaggccaaatga

SEQ ID NO: 370446 - DNA, 570 bp, Salmonella enterica
atggcgaactggcaacacattgatgaactgcatgatatttccgcagatttaccgcgattcactctggcgttcagagaactttccactcgccttggtctgcagattagcgcccttgaggccgatcacatttcattgcgctgtcaccagaatacgacggcggagcgttggcgtcgcggttttgaacaatgcggtgagctactgtcggaaaatatcatcaacggcaggccgatttgtctgtttaaactgcatgaaccggtatgtgtggaacactggcggttttctgttatcgaattaccgtggccgggagaaaaacgctatccacacgaggggtgggagcatattgaaatcgtgctgcccggcgagccggagaccttgaacgcgagggcgctggcgttgttgtcggatgaggggcttagtcagccggggatagtggttaaaaccagttcgccacagggcgagcatgaacgtttgccaaaccctacgctggccgtgaccgatggccgcatcacggtaaaatttcatccatggtcgattgaagcgattgtcgccagcgaacaggcggcccattaa

SEQ ID NO: 370447 - DNA, 1734 bp, Salmonella enterica
gtgaatattcaggctcttctctcagaaaaagttagtcaggccatgattgctgcaggcgcgcctgcagattgcgagccccaggttcgtcagtcagccaaagttcagttcggcgactatcaggccaacggcatgatggcagttgcgaaaaaactgggtatggccccccgacaacttgcagagcaggtgctgactcatctggatctcagcggcatcgccagcaaggttgaaatcgccggccctggctttatcaatattttcctcgaaccggcttttctcgctgaacaggtgcaacaggcgctgacctccgatcgtctgggcgtttctcagccgactcgtcagacgattgtcgtcgactactccgcgcccaacgtcgcgaaagagatgcacgtcggtcatctacgctccacgattatcggcgatgcggcagtgcgcacgctggagtttctgggccatcatgttattcgcgctaaccacgtcggcgactggggcacccagttcggtatgcttatcgcctggctggaaaaacagcagcaggaaaacgcgggcgacatggcgctggcggatctcgaaggattctaccgcgatgcgaaaaagcattatgacgaagatgaagcgtttgccgagcgcgcgcgtaactacgtcgtcaaattgcagagcggtgatacctatttccgtgagatgtggcgtaagctggttgatatcacgatgacgcaaaaccagatcacctatgatcgtctgaacgtcactctgacgcgtgacgatgtgatgggcgaaagtctgtataatccgatgctgccgggcatcgtcgccgatctgaaagccaaaggcctggcggttgaaagcgaaggcgcaacggtggttttccttgatgagtttaaaaacaaggaaggcgacccgatgggcgtcattattcagaagaaagatggcggttatctgtataccactaccgatatcgcctgcgccaaataccgttacgaaacgctgcacgccgaccgcgtgctctactacattgactcccgtcagcaccagcacctgatgcaggcctggaccattgtgcgtaaagccggttatgtgccggattccgttccgctggaacaccacatgttcggcatgatgttgggtaaagacggtaaaccgtttaaaactcgcgcgggcggtacggtgaaactggcggacctgctggatgaggcgctggagcgcgcgcgtcgtctggtggcggagaagaacccggatatgtcggctgacgagctggaaaaactggctaacgccgtcggtattggcgcggtgaaatacgccgatctgtcaaaaaaccgcaccactgactatatcttcgactgggataatatgttggctttcgaaggcaataccgctccttatatgcagtatgcctatacgcgtgtgctgtctgttttccgtaaagcggacatcgacgagcaggcgctggcgagcgcgccggttatcattagcgaagatcgcgaagcgcaactcgctgcccgtctgctgcagtttgaagaaaccctgacggtggtcgcgcgtgaaggtacgccgcacgtcatgtgcgcgtatctgtatgacgtcgccgggctgttctccggcttctacgagcactgccctattctcagcgccgagaatgacgcggttcgcaatagccgcctaaaactggcgcaactgacggcgaagacgctgaaactgggtctggatacgttgggtatcgaaaccgtagaacgcatgtaa

SEQ ID NO: 370448 - DNA, 1872 bp, Salmonella enterica
atgacttttaaagactttgatgcggaagagaaactcttcctgagacgtgtgattgtggcgtttggtgtagtggttgtctgctttggtatcctgatcttcaacctctataacttgcaaatccgtcagcaccactactacaccacccgttcgaatgagaacgatatcaagatgctacccgtcgcgcccacgcgcggcatcatttacgatcgcaacggcattccgctggtgcgtaacgtaacctggtatgatatcgcggttacgccctataaaattgccgatatggatgcgctgctaaaacagctcacccctattgttgatctctcccccgatgatatcgccgactttcgccgcgcgctaaaatccagtagccgctatcgtccggtggtgctcaaaaacgcgctaacggatgttgaaatcgcacgctttgcggtcaatcagtttcatttcaacggcgtcacgatcaatagctatcaggatcggcagtatccttacggcgcggagctggcgcatgttctcggttacgtgtcaaagataaacgataacgaccttaaagcgctggataaaaaagggctggcagagaattacgcggcggaccataacatcggtaaacaggggattgagcgttactacgaaaacgatcttcatggcaaaaccggttatcaggaggtcgaggtggataatcacgggcgtattgtccgcctgctgaaagacgttcctcccatcgcgggtaagaacattcacctgacgctggatctccatttacaagagtacattgaaagtttgctggccgggcagcgtgctgccgtactggttgaagatccgcacgatggttcagtgctggcgatggtatctatgcccagctacgacccgaacccctttgtaaaaggcattagctatcaggattacggcaaactgctgcacgataaaaatctgccgctgatcaaccgcgtgacgcaagggctttatcctccggcgtcaacggttaaaccctatatggcaatgtccgcgctgttatgcgggattattacgccgcaaaccaccttctttggcgcgccaacctggacgcttcccggcacgcagcggcattaccgggactggaaaaaaaccggacacggtatgctggatgtcactaaagcgattgaggaatctgcggatacctttttctatcaggtcgcttatatgatgggtattgaccgtatcgacacgatgttgtctcagttcggctatggcaaaccgacgggcatcgaccttaatgaagagtatgacgggctgcttcccagccgcgcatggaaacagcgggtccataaaaaagcctggtatcagggcgataccatttctgtcggcatcggccagggttactggattgccacccccatccagatggtaaaagcgatggtggcgctcatcaacaacggtaaggtgattgcccctcacctgttactcaatgaagagagcggcaaaacggtggttccgtatcgcccttcaggaacaccggcacagatagccgatccggcgtcgccatactggggactggtgcgtcaggcgatgtatggcatggcgaatgcacccaacggaacgggctataagttctttcacacagcgccctacggcattgcggccaaaagcggcacgtcgcaggtgtttagcctgaaagaaaatcagacctacaacgcgaaaatgatccccattcgcctgcgcgatcatgtgttttataccgcttttgcaccgtataaaaaccctaaggtcgctattgccttgattctggaaaacggcggaagcgacggcgttaccgccgcgcccatcatgcgaaaaatccttgaccacctgtttgatccacaggctgataccacacagtcgggtcaggcgccatag

SEQ ID NO: 370449 - DNA, 1140 bp, Salmonella enterica
atgatggtttatccagtcaaacacagtccgctattgcgtcagcctgagcattttatcgccagagatgaactaaaagccctggtgcaaaaggtgacgcataacctggtcaatattaaagatgagacaggcgaatttttattgcgactggacgatggacgcgtgatcgatactaaaggctgggccggatgggagtggacgcacggcgtgggcctgtacggaatgtatcactattaccaacagaccggcgaccagacgatgcgtaagatcattgatgactggtttgccgatcgttttgcggaaggcgcgacgacgaaaaacgttaatacgatggcgccatttttaacgctggcgtatcgctatgaagagacgcgtaatccagcgtatttaccgtggctggaaacgtgggccgaatgggcgatgaatgaaatgccccgtaccgatcacggcggaatgcagcacatcacgctggcggaggaaaatcatcagcagatgtgggacgacacgctaatgatgacggtgctgccgctggcgaaaatcggtaaactgttgaaccggccggaatatgtggaagaggcaacctatcagttcctgctgcacgtgcagaatttgatggataaagagacggggctgtggttccacggctggagctatgacggtcatcataacttcgctaacgctcgctgggcgcgcggcaacagttggctgaccattgtgatcccggattttcttgaactgctggacttgccggaaaataatgccgtgcgccgttacctggtccaggtactgaatgcgcagatcgccgcgctggcgaaatgtcaggatgaaagtggtttgtggcatacgctgcttgacgatccgcactcttatcttgaggcgtcggcgacggcgggttttgcctacggtattcttaaagcggtgcgcaaacgctatgtcgggcggcactatgcgcaggtggcggaaaaagccattcgggggatagtgaaacatatctcgccggaaggcgaactgctgcaaacgtcatttggcactggcatgggccacgatctcgatttttaccgtcatattccgttgacctctatgccttacgggcaggcgatggcaatgctgtgtttgacggaatatctgcgtaactatttctga

SEQ ID NO: 370450 - DNA, 393 bp, Salmonella enterica
atgcgtaaatggctggcgttgttgctctttcccctgacggttcaggccgcaggcgaaggcgcgtggcaggatagcggtatgggtgtaaccttaaattaccggggtgtttccgcatcgtcttcgccattgtcggcgcgccagccggtttccggtgtgatgacgctggtcgcctggcgttatgaactgaatggcccgactcccgcgggcttacgggtacgtttatgttcccagtcccgttgcgtagaacttgatggtcagagtggcacgacccacggttttgctcatgttcccgcagtcgagccgctccgctttgtctgggaagtccccggcggcggccgacttatcccggcgttaaaagtgcggagcaatcaggtgattgtgaactaccgctaa

SEQ ID NO: 370451 - DNA, 2079 bp, Salmonella enterica
atggctaatctggtcgcgatgctgcgcctacccagcaacctgaaatcgacgcaatggcaaattcttgccgggccgatcctcattctgctgattttgtcgatgatggtgctgccgctgcctgcttttatcctcgacttattgtttacctttaatattgcgctatcgatcatggtgctgctggtggcgatgtttacccagcgtactctggattttgccgcgtttccgaccatcctgctgtttaccacgctactgcgtctggcgcttaacgtagcctcaacgcgcattattttgatggaagggcataccggcgcggcggcggcgggaaaggtagtggaggcgttcggtcatttcctggtcggcggtaacttcgcgatcgggattgtggtttttatcatcctcgtcattatcaacttcatggtcatcaccaaaggcgccggacgtattgccgaagtcggcgcgcgctttgtgctggatggtatgcccggtaagcaaatggcgattgacgccgatcttaatgccggtctgattggtgaagacgaggccaaaaaacggcgttcggaagtcactcaggaagccgacttctacggctcgatggacggggcaagtaaatttgtacgcggcgacgccatcgccggtattctcatcatggtcattaacgtggtcggcgggctgctggtcggcgtattgcagcacggaatgagcataggcagcgcggcggaaagctacaccctgctgaccattggcgacggcctggtcgcccagatcccggcgctggttatctccacggcggcgggcgtcattgtgacccgcgttagtaccgatcaggatgttggcgagcagatggttggccaactgttcagtaatccaagggtgatgctgctggcggcggcggtgctggggctgcttggcatggtgcctggaatgcctaacatggtatttttactctttaccgccgctttgctcggcctggcatggtggctgcgcgggcgcgaagaaaaagcgccggaggagccgcagccggtaaaaatgccggaaaataactcggtggtcgaagctacctggaatgacgtacagcttgaggattcactgggaatggaagtgggctaccgcctgatcccgatggtggattttcaacaggatggcgaattgctcggacgtattcgcagcattcgtaaaaaattcgcgcaggatatggggttcctgccgccggttgtccacattcgcgacaatatggatttacagcctgcgcgctaccgtattttgatgaaaggggtagagatcggcagcggggacgcctatccgggacgctggctggctattaaccccggcacggcggcgggaacgctaccgggcgagaaaaccgtcgatccagcttttggccttgatgccatctggattgaaagcgccctgaaagagcaggcgcaaattcagggctttaccgtcgtggaagccagtaccgttgtggcgacgcaccttaaccacttgattggccaattctccgccgaactgtttggccgccaggaagcgcagcaactgttggatcgtgtctctcaggagatgcctaaactcacggaagatctggtccccggcgtcgtgaccctcacaactttacacaaagtcctgcaaaacttactggcggaaaaagtcccgattcgcgatatgcgcaccattctggaaacgctggcggaacatgcgccgttacaaagcgatccgcatgaattaaccgccgtggtacgcgtggcattaggacgagcgattacgcaacagtggttccccggtaatgaagaagtgcaggtgattggcctggataccgcgctggagcgtttgctgcttcaggcattgcagggcggcggcggtcttgagcctgggttggcggatcgcctgctggcgcagacgcaagaggcgctttctcgccaggaaatgcttggtgcgccgccggtattactggttaaccatgcgctacgtccattattgtcccgctttttgcggcgcagtttaccgcagctggtggtgttgtcgaaccttgagctttccgataaccgtcatatccgcatgacggcgaccattggaggaaaataa

SEQ ID NO: 370452 - DNA, 1152 bp, Salmonella enterica
gtggcagaagagagcgacgacgacaaaacagaagcccccacaccccaccgacttgaaaaagcgcgggaagaagggcagatcccccgttccagagaactgacctcactgctgatattgctggtgggcgtttgtattatttggttcggcggcgagtcgttagcgcggcaactggcgggaatgctctcagcaggcctgcacttcgatcaccgtatggtgaacgatcctaacctgatcctggggcagataattttgctgattaaagcggcgatgatggcactgctaccgctcatcgcgggcgtggtactggtggcgcttatctcgccggttatgcttggcggcctgatttttagcggtaagtcgctacagccaaaattttctaaattaaacccgctgccgggaattaagcgcatgttttcggcgcagaccggcgcggaactgctaaaagcggtgttgaaatccacgctggtcggctgcgttaccggcttttatctctggtatcactggccacaaatgatgcgcctgatggcggagtcgccgatcgtcgcaatggggaatgcgctggatctggttggactctgcgcgttactggtggtactgggcgtgattccgatggtgggatttgacgtgtttttccagatctttagccacctgaaaaaattacgcatgtcgcggcaggacattcgcgacgaatttaaagagagcgaaggcgatccgcatgttaagggcaaaattcgccagatgcaacgcgccgccgcgcagcgccgcatgatggaagatgtgccgaaagcggacgtcattgtcactaacccgacgcactattccgtggcgctgcagtatgacgaaaacaaaatgagcgcgccgaaagtggtcgcgaagggggctggattaatagcgctgcgcattcgcgagatcggcgctgaacatcgggttcccactttagaagcgccgccgctggcgcgggcattatatcgccacgccgaaatcggtcagcaaattcccgggcagttatatgctgccgttgcggaagtgttggcctgggtctggcagcttaaacgctggcggcttgcgggcgggcaacgtcctccacaacctgagaaccttccggtgccagaagcgctggattttatgaacgagaagaatactgatggctaa

SEQ ID NO: 370453 - DNA, 195 bp, Salmonella enterica
atggcgttaatagagatagccggatacgataagaaagtctcgtatccggccgggttgacggattcgaacccgataagcgcagcgccatcaggtcaaaaaagcttaaaacccaagactgtccagcaggtcgtccacctgatcctgactggcgacgacgccagctttcgaggtatccacctgcgggccgttgagtaa

SEQ ID NO: 370454 - DNA, 648 bp, Salmonella enterica
atgatgatgcaaccatctatcaagcctgctgatgaaggttcagcaggagacatcattgcgcgcatcggtagtctgacccgaatgctgcgcgacagcctgcgtgagctggggctggaccaggcgattgccgaagcggcggaggcgatccctgatgcgcgcgaccgtctggattacgtcgtccagatgacggcgcaggcggcggaacgcgcgctaaacagtgtcgaagcctcgcagccgcatcaggatgcgatggagaaagaggcgaaagcgctaacccaacgttgggacgagtggtttgacaatccgatcgagcttgccgacgcccgtgaactggtgacggatacgcgccagtttctcagggatgtcccgggccataccagctttactaacgcgcaactgctggacatcatgatggcgcaggatttccaggatctgacgggtcaggtgatcaaacgcatgatggacgtgattcaggagattgagcgccagttattaatggtactgctggaaaacatcccggaacagagcgcacgaccaaaacgcgagaacgaaagcttactcaacggcccgcaggtggatacctcgaaagctggcgtcgtcgccagtcaggatcaggtggacgacctgctggacagtcttgggttttaa

SEQ ID NO: 370455 - DNA, 390 bp, Salmonella enterica
atggcggataaagagcttaaatttttggttgtggatgacttttcgaccatgcgtcgtatcgtgcgcaacctcttaaaagagcttggatttaacaatgtggaagaggccgaagacggcgtcgatgcgctgaacaagctccaggcgggcggctttggttttattatctccgactggaacatgccgaacatggatggcctggagctgctgaaaaccattcgcgccgatagcgccatgtcggcgttacccgtgttgatggtcacggcggaagccaaaaaagagaatattatcgccgccgcacaggctggcgccagcggttatgtcgtaaaaccgttcaccgcagcgactctggaagagaagctcaacaaaatctttgagaaactgggcatgtga

SEQ ID NO: 370456 - DNA, 1050 bp, Salmonella enterica
atgagtaaaatcagggtattgtcagttgatgattccgcgctaatgcgccaaatcatgactgaaattattaatagccatagcgatatggagatggtggcgactgcgccggacccgttggtcgccagggatctcatcaaaaaatttaatccggacgtattgaccctggacgttgagatgccgcgtatggacggcctcgattttctggaaaaactgatgcgcctgcgaccgatgccggtggtgatggtctcttcgctgaccgggaaaggttctgaagtgacgctacgggcgctggagttgggggccatcgattttgtcaccaaaccgcagcttggcattcgtgaaggtatgctggcgtatagcgagatgatcgccgaaaaagtgcgtaccgccgcgcgggcccgcatcgccgcacataaaccgatggcggccccggcaaccttaaaagccggtccgctgctcagttccgaaaaactgattgctatcggcgcttcaacgggcggtactgaagctatccgacatgtgctgcaaccgctgccgctttccagtccggcagtgattattacgcagcatatgccgcctggctttacccgctcgtttgccgagcgtctgaataaactctgtcaaatcagcgtgaaggaggcggaggacggcgaacgcgtattgccaggtcatgcctacattgcgcccggcgacaagcatatggagctggcgcgtagcggggcgaattatcaaatcaaaattcatgatggcccgccggtaaaccggcatcggccttccgtggatgtgctgtttcattcggtggcgaaacacgcggggcgcaacgccgtaggcgtcattcttacggggatgggcaacgatggcgccgctggaatgttagcgatgtaccaggctggcgcctggaccattgcgcaaaacgaagcaagttgtgtggtgttcggcatgccgcgcgaggccatcaatatgggtggcgtaagcgaagtggtcgatcttagccaggtaagccagcagatgctggcgaaaatcagtgccggacaggcgatacgtatttga

SEQ ID NO: 370457 - DNA, 867 bp, Salmonella enterica
atgacatcatctctgccctccgggcaaacgtcagtattgttacagatgacacagcgcctcgcgctgtccgacgcgcattttcgtcggatatgtcaattaatctaccagcgcgcagggatcgtgctggccgaccataagcgggatatggtttataaccgcctggtccgtcggctgcgtgccctgggactggatgattttggccgttatctcagtatgctggaggctaatcaaaacagcgctgagtggcaggcttttatcaacgctctgactaccaacctgaccgctttttttcgcgaggcgcaccattttcccatccttgcggaacatgcgcgtcgccgccacggcgagtaccgcgtctggagtgcggcggcatcgacaggagaagaaccttacagtatcgccattacgctggcggatgcgttagggatggcccccggtcgctggaaagtattcgccagcgatattgatactgaagtgctggaaaaagcgagaagcggtatttatcgcctcagcgaactgaaaacgttatcgccgcagcagctacaacgttacttcatgcgcggtacggggccgcatgaaggactggtgcgcgtgcgtcaggaactggccaattatgttgaattttcctccgttaatttattggaaaagcagtacaacgtacccggtccctttgacgcgattttttgccgtaacgtcatgatctattttgataaaacgactcaggaggacattctgcgccgttttgttccactccttaaacctgacggactgttgtttgccggtcactcagaaaactttagcaacctcgtgcgcgagtttagcctgcgcggacagacggtgtatgcgctaagtaaggataaagcatga

SEQ ID NO: 370458 - DNA, 1662 bp, Salmonella enterica
atgtttaaccgtatccgcgttgtcacaatgctgatgatggtgctgggggttttcgcactgctacagcttgtttccggtggtttgctgttttcttcattgcagcataaccagcaaggttttgttatttctaacgaattacgccagcaacaaagcgaactcacgtcgacatgggacttaatgctgcaaacgcgcattaacctgagccgctccgccgcacgcatgatgatggacgcttctaaccagcagagcagcgccaaaacggatttactccagaatgcaaaaacgaccctcgcacaggcggcggcgcactacgccaatttcaaaaacatgacgccattgccagcgatggcggaggccagcgcgaacgtcgatgaaaaatatcagcgctatcaggccgcattagccgaacttattcagtttctggacaatggcaatatggatgcctacttcgcccagccaacccagggaatgcaaaacgcgttgggcgaggcgctgggcaattacgcccgggtgagcgaaaacctgtaccgccagacatttgatcaaagcgctcatgactaccgttttgcgcaatggcaactgggggggcttgcggtcgtgctggtgctgattttgatggtggtttggttcggcattcgtcatgccctgcttaacccattagcgcgagtgattactcatatccgtgaaattgccagcggcgatctgacgaaaacgctcaccgtctcaggacgtaatgaaattggcgaactggcgggaacggttgaacatatgcaacgctcgctgattgacaccgtgacgcaggttcgtgaaggttcggatgcgatttattccggcaccagtgaaattgccgccggtaataccgacctctcttcccgtaccgaacaacaagcctccgctctggaggagacggcggccagcatggaacaactgacggccaccgtgaagcaaaacgccgataacgcccgtcaggcttcgcaactggcgcaaagcgcctccgagaccgcgcgtcatggcggcaaagtggtcgacggcgtggtaaacaccatgcacgaaattgccgacagttcgaaaaaaatcgctgacattatcagcgttatcgacggtattgccttccagactaacattctggcgctgaacgcggcggtagaagcggcgcgcgcgggagagcaggggcgcggttttgcggtcgtggcaggcgaggtgcgtaatctggccagccgcagcgcccaggcggcgaaagaaataaaagcgttgattgaagattccgtctcgcgtgtcgataccggttctgtgctggtggaaagcgccggggaaaccatgactgacatcgtcaatgccgttacgcgcgtcacggatatcatgggcgaaatcgcctccgcctcggatgagcaaagccggggtatcgatcaggtcgctttggccgtttccgaaatggatcgcgtaacgcaacagaacgcctcgctggttcaggaatccgcagcggccgccgccgcgctggaagagcaggccagccgtctgacccaggcggtatctgctttccgcctggcatcgcgaccgctggtggcaaataaacctgagatgcgtttgtcagtggacgctcagtccggcaatacgccgcggtcagtagccgccggggatgatgcgaactgggaaaccttctga

SEQ ID NO: 370459 - DNA, 504 bp, Salmonella enterica
atgaccggtatgagtaatgtaagcaaactggccggcgagccgtcaggtcaggaattcctggtgtttacactgggaaatgaagagtacggcatcgatatcctgaaagtgcaggagatccgtggctatgaccaggtgacgcgcatcgccaatacaccggcctttataaaaggggtgactaacctgcgcggcgtgattgtccccattgtcgatctgcgcgtgaaattctgcgaaggcgacgttgagtatgatgacaatacggtagtgatcgtactgaatctggggcaacgtgtcgtcgggatagtggtagacggcgtgtctgacgtactgtcgttaacggcggaacagatccgtccggcgccagaatttgccgtgaccttgtcaacagaatatttgacgggattgggcgcgctcggcgagcgtatgctgattctggtgaatatcgaaaaactgcttaacagcgaagagatggcgctgctggatatcgcagcatcacacgtcgcgtaa

SEQ ID NO: 370460 - DNA, 2016 bp, Salmonella enterica
gtgagcatggatattagcgatttttatcagacattttttgatgaagctgacgagctgttggctgatatggagcagcatctgctggatttggtgccggaatccccggacgctgaacaactgaacgccatttttcgcgcggcgcactccattaaaggcggcgcgggcacattcggcttcactattctgcaggaaaccacgcatttaatggaaaacctgctggatgaagcccgacgcggtgaaatgcagctcaataccgacattatcaacctgtttttggaaacgaaagatattatgcaggaacagctcgacgcctataaaaactccgaagagccggatgccgcaagcttcgaatatatctgcaatgcgctacgccagttggcgctggaggcgaaaggcgaaaccacgccggcggtcgtagaaaccgcggcactaagcgcggcgatccaggaagagagcgtagccgaaaccgaatcgcctcgtgacgagagtaaactgcgcattgtactttcacggttgaaagccagtgaggtcgatctgcttgaagaagagttgagtaatctggctactctgacggatgtcgttaagggggcagattcactgtcggcaactctggatggcagcgtcgcggaagatgacattgtcgcggtgctctgttttgtcatcgaggccgatcagatcgcttttgaaaaagtggtcgccgcgcccgtggaaaaagcgcaagagaaaaccgaggtagcgccggtagcgcctccggcagtcgttgcgccagccgccaaaagcgcggcccatgaacatcatgcggggcgtgaaaaacctgcgcgtgaacgcgagtccaccagcattcgcgtggcggtagagaaagtggatcagctcataaacctggtcggcgagttagtgattacccagtcaatgttggcccagcgttctaacgagctggacccggtaaaccacggcgatctcattaccagtatggggcagttacaacgtaacgcccgcgacttacaagagtcggtgatgtcgattcgtatgatgcctatggagtacgtcttcagccgtttcccgcgtctggtacgcgatttagcgggcaaactgggcaagcaggtagagctgacgctggtggggagctccactgaacttgataaaagcctgatcgaacgcattatcgacccgctgacgcacctggtgcgcaacagtctcgaccacgggattgaaatgccggaaaaacgccttgaggcggggaaaaatgttgtcggcaatctgattctttccgcagaacatcagggcgggaatatttgtattgaagtgaccgatgacggcgcggggcttaaccgtgagcgtatcctggcgaaggccatgtcgcaggggatggcggtgaatgaaaacatgaccgacgatgaagtaggcatgttgatcttcgcgccgggattctcaactgcggaacaggtcacggatgtctccggtcgcggcgttggcatggatgtggtgaaacgtaacattcaggagatgggcggtcacgttgagatccagtcaaaacaaggctccggcaccacgattcgtattctgctgccgctgacgctggccatcctcgatgggatgtcggttcgcgtggcgggggaagtttttatcctgccgttaaatgcggtgatggagtcgctgcaaccgcgtgaagaggatcttcatccgctggcgggcggcgaacgggttctggaagttcgcggcgagtatttgccgctggtcgaattgtggaaagtgtttgacgtggacggggcgaaaaccgaagccacgcagggcattgttgtgatcctgcaaagcgcgggacgccgttacgcgctgctggtcgatcagctcatcggtcagcaccaggtggtggtcaaaaatctggaaagcaattatcgcaaggtaccggggatttccgccgcgacgatcctgggcgacggcagcgtcgcgctgattgttgatgttaccgcattgcagggtttaaaccgcgaacaacgtatggcgatcacagccgcctga

SEQ ID NO: 370461 - DNA, 930 bp, Salmonella enterica
atgaaaaatcaggctcatcccattgtcgtcgtaaaacgccgcaggcacaaaccgcacggcggcggggcgcacggttcctggaaaattgcctacgccgattttatgacggcgatgatggctttttttctggtgatgtggctgatttccatctccagccctaaagaattaattcagattgccgaatattttcgtacgccgttggccaccgcggtaacgggggggaatcggattgccaatagcgagagcccgataccaggcggcggcgatgattacacccaacagcagggtgaagtggaaaagcagccgaatatcgacgagctgaaaaaacggatggagcagagtcgcttaaacaaactgcgcggcgatctggatcaactgatcgaatccgatcccaaactgcgcgcgttacgtccgcatctgaaaattgatttagttcaggaggggttgcgcatccagattatcgacagccagaaccgcccgatgtttaaaaccggcagcgccgaagttgagccgtatatgcgcgatatcctgcgtgcgattgcgccagtgttaaacggtatacctaatcgcattagcctggccggccataccgatgactttccctacgcgaacggcgaaaaaggctatagcaactgggaattatccgccgatcgcgccaatgcctcgcgtcgcgaactggtcgctggggggctggataacgggaaagtattacgggtggttggcatggccgccacgatgcggctgagcgatcgcggtcctgatgacgccatcaaccgccgtataagcctgctggtgttaaacaaacaggcggaacaggccattttgcatgaaaacgctgaaagccagaatgagccggtaagtgtattacaacagcctgcggcagccccgccggcaagcgtacccacatcgccaaaagcggaaccgaggtga

SEQ ID NO: 370462 - DNA, 888 bp, Salmonella enterica
gtgcttatcttattaggttacctggtggttatcggtacagttttcggcggttatgtcatgaccggcggacaccttggggcactctatcaacctgctgaactggtcatcattggcggcgcggggataggggcgttcattgtcggcaacaacgggaaggccatcaaaggcacgatgaaagcgatcccgttgttatttcgtcgttcgaaatacacaaaatctatgtacatggatttgctggcgttgctctatcgcctgatggccaaatcacgtcagcaggggatgttctcccttgaacgcgatattgaaaatccgaaagagagtgaaatcttcgccagttatccgcgtattctggccgatgcggtaatgcttgattttattgtcgattatctgcgcctgatcatcagcggcaacatgaatacgttcgaaattgaagcgttgatggatgaagagattgaaacccatgaaagcgaggcggaagtcccggccaacagcctggcgatggtgggggattcgctgcctgcctttggtattgtcgcggcggtaatgggggtggttcacgctctggcttcagccgatcgtccggcagcggagttgggggcgctgattgcccatgccatggtaggtacgttcctcggtattttactggcttatggattcatttcaccgttagcgaccgttttgcgccagaagagcgccgaaaccaccaagatgatgcagtgcgtaaaaattacactgctgtctaatctgaacggctatgcgccgccgattgccgtggaatttggtcgtaaaacgctttattccagtgagcgtccatcgtttattgagttggaagaacacgttcgtgcagtaagaaacccaaaccagcagcagacgactgaggaagcatga

SEQ ID NO: 370463 - DNA, 579 bp, Salmonella enterica
atgagtgaaaaaagcattgttcaggaagctcgcgatatccagttggcgatggagttgattaatcttggcgctcgtctacaaatgctggaaagcgaaacacagctcagccgtggtcgcctcatcaggctgtacaaagaattacgcggtagcccgccgcctaaagggatgctgccattttcgacagactggtttatgacctgggagcaaaatattcatgcctccatgttctgcaacgcctggcaatttttactgaaaaccggcttatgcagcggtgtggatgcggtgattaaagcttatcggctttatcttgagcagtgtccgcaaccgcctgaagggccgttgttggcgctgactcgcgcatggacgttggtgcgttttgttgaaagtgggttgcttgaattgtcgagctgtaactgctgcggtgggaactttattacccatgcgcatcagcccgtaggcagctttgcgtgtagtttatgccagccgccatcccgcgcagtaaaaagacgtaaactttcccgagatgctgccgatattattccacaactgctggatgaacagatcgaacaggctgtttaa

SEQ ID NO: 370464 - DNA, 342 bp, Salmonella enterica
atgcatacatccgagttgctaaaacacatttatgacatcaatttgtcatatttactccttgcacagcgtttgatcgtccaggacaaagcatctgcgatgttccgcctcggtatcaacgaagagatggcaaacacactgggcgcgttgaccctgccgcagatggtcaaactggcggagacgaaccagttagtttgtcatttccggtttgacgatcatcagacgatcacccgtttgactcaggattcgcgcgtcgatgatttacagcagattcacacaggtatcatgctttcaacgcgtttgctcaatgaagtggacgatacggcgcgtaagaaaagggcatga

SEQ ID NO: 370465 - DNA, 429 bp, Salmonella enterica
atgagctacacccatattcttgtcgccgttgccgtcaccccggaaagtcaccagctactggctaaagctgtctctatcgcccgccctgtccaggcgaaagtaagcctgattactctcgcttccgatcctgaactgtataaccagttcgccgcgcccatgatggaggatttacgcgcggttatgcatgaggagaccgagaattttcttaagatgctgggggaaaaggcggattatccgattgaacaaactttcatcgcatcaggtgagttaagccagcatattttggctgtgtgccgcaaacaccatgttgatctggtcatttgcggcaaccataaccatagtttcttttcgcgcgcatcctgctcggcaaaaagtgtcgtcagcgccagccaggtagatgtgttgctggtaccgttagcgggcgactag

SEQ ID NO: 370466 - DNA, 1422 bp, Salmonella enterica
atgagtcgtttagtcgtagtatctaatcgaattgcccccccggataataaaggcggcgccggcggcctcgccgttggcgtgcttggcgcgctaaaagcggctggcgggttgtggttcggctggagtggcgagacaggtaacgaggatgagccattaaaaaaggtgacaaaaggtaatattacctgggcatcgtttaacctgagcgaacaagattacgaagattattactgtcaattttccaatgcggttctctggcctgcgttccactatcgtctggacctggtacagtttcagcgtcctgcatgggaaggctatatgcgggtgaatgcgctattagcggataagttattgcccctcattaaagagaacgacatcatttgggtgcatgactaccacctgttaccgtttgccagcgagctgcgtaaacgcggcgtgaacaaccgaattggttttttcctgcatattccattcccgaccccggagatttttaacgctttaccgccgcatgatgaactgctggagcagttgtgtgactttgatctgctagggttccagaccgaaaatgatcgcctggcttttctggatagcctttcgagtcaaacgcgagtcacgactcgcagcggcaagcagcatatcgcgtggggtaaagacttccagacagaagtgtatcctatcggtattgagcccgatgagattgctctgcaggctgccgggccgttgccgcctaaactggcgcagctcaaggcggaactgaaaaatgtgaagaatattttttccgtcgagcggctggattattcgaaagggctgccggaacgttttctggcgtatgaagcgctactggaaaactacccgcagcatcggggaaaaattcgttatacccaaattgcgcctacgtcacgcggcgaagtacaggcatatcaggatattcgccaccagcttgagacggaagcaggccggattaatgggaaatatggacaattgggctggacgccgctctattatctgaatcagcatttcgaccgtaaactgttaatgaagatattccgttattcagacgtcgggctcgtcaccccgttgcgtgacgggatgaacctggtggcgaaagagtttgtcgccgcgcaggaccccgctaatcctggcgtactggtactgtcacagtttgccggcgcggcgaatgaactgacgtcggcgttaatcgtcaatccttacgatcgggatgacgtggcggcggcgctcaatcgtgcgttaacgatgccccttgccgagcgtatttcgcgccatgcggaaatgctggacgtgatcgttaaaaatgacattaaccgctggcaggagcgttttattcatgacctaaaggaggtcacgccgcgtagccctgagcgccagcagcagaacaacgtggcgacgttccctaagctggcctga

SEQ ID NO: 370467 - DNA, 903 bp, Salmonella enterica
atggtctttctaaatggcgagcagcgtcacactgtctatacttacatgactaatgagaccgtttgtgagtctcaatatgatgataaggaggagaccagggtggcagaaccgttaaccgtatcccccgaactcactgcgaactatgcgtatttttttgaccttgatggcacattggcagagataaagcctcatcccgatcaggtagtggtaccgcataaaatccttcagttgttagaccgtctcgcggcgcacaacgcaggggcactggcattgatttcagggcgttcaatgactgagctggatgctttggcgaagccttttcgctttccgctcgctggcgttcacggggcagagcgtcgtgacatcaatggtaaaacccatatcgtgcgccttcctgaagcggtagtccgtgaggtggaggcgttattacgttcgacgcttgtagcgctgcccggaacggagctggagacgaaggggatggcgtttgcgctgcactaccgtcaggctccggaacatgaagcggcgctgttggcacttgcgcaacacgttacgcagcactggccgcaactggcgttgcagcctggtaaatgtgttgtggaaatcaaacctaagggaaccaataaaggcgaagccattgctgcctttatgcaggaggcgccctttgcgggacggattcccgtttttgtgggcgacgatttgaccgatgaggctggctttggcgtggtgaatcacgctggcggaatttccgtaaaagtgggcgtcggggcaacccaggcggcatggcggctggaaagcgtacccgatgtctggcgctggctggaacaaatcaattatccacaacaagaacaacaagtaatgaataacaggagagatggctatgagtcgtttagtcgtagtatctaa

SEQ ID NO: 370468 - DNA, 558 bp, Salmonella enterica
atgaaaaaggtcgcggtgctgttggcgccaggatttgaagaagcagaggccattgttactcttgatattctgcgacgtttgcatatcgacgtcgaaacgctggcgtgtgctgaatcacgggcggtggtgagttaccatgatattcctatggttgcggacagcacgctgagtgaacgccagcaggcgctttttgatgcggtagtgctgccgggcggtccgcaggggagcgctaatctggcggctaatccggcggtgatcgctttcgttgcgcgtcatgatgcggcaggcaaatttatttgtcctatctgttccgcggcggcaagggtgctgggtgctcacggattgctgaaggggcgtcgttatgtctgttccggcgacctgtggaaagcggttccggaaggtgtctatgtggatgcgcccgttgttgaagatggtaatttaattagcggcaaaggcttgggtcatgtctttgatttcgcgctaaccctttccgccagactgctgggagacgatgcgccggttcgcgaacaggctgaacatatctattatccctggtaa

SEQ ID NO: 370469 - DNA, 504 bp, Salmonella enterica
atggcagctgtaggaatggttcaaaagctcaacacgccaatgaaccttgagttttacgcatcaaatctttacctccatctaagcgaatggtgttctgaacacagtttaacaggcaccgccacctttcttcgtacccaggcgcaaggcaacgtgacgcaaatgatgcgcatgtttaattttatgaaaaacgccggcgccacccctatcgttaaagccattgacgttccgggtgaagagctctgctctctggaagaattgttccagaaaaccctggaggattatcagcaacgcgccagcacgctgtcgcgtctggcagatgaagcgaaagcgctgaatgatgcctcaacgctcgattttctccataccctggaaaaagagcagcagcaggatggcgtacttttacaaactattctcgaagaagttcgcagcgctaaacgagcagggttatgtctggcgcaaaccgatcagcatctccttaacgtcgtgacctatcagcatcactga

SEQ ID NO: 370470 - DNA, 639 bp, Salmonella enterica
atgaaaattgcactgatgatggaaaatagccaggccagcaaaaatgccatcatttataacgaacttagcgccgtcgccaatgaaaagggatttcccgtttttaacgtcggcatgtgcgacgaaaatgaccatcacctgacgtacattcatttaggcatcatggcgagtattctgcttaatgcaaacgcggttgattttgtggttactggctgtggcactggtcagggcgcgctgatgtcgttaaatattcatccaggtgtcatttgtggctattgcatcgatccggcagatgcttttctgtttgcgcagatcaacaacggcaatgcgttgtccctgccatttgcgaaaggctttggctggggcgctgagctgaacgtgcgtttcatctttgaaaaagcgtttaccgggcgtaaaggtgaggggtatccgcctgagcgcaaagcgccgcaggtacgcaatgcgggcattttgaatcaggttaaggccgcggtcgtcaaagagaattatctggatacactgcgggctatcgatcctgaactggttaaaacggcggtttcagggccgcgtttccagcaatgtttgtttgaaaacggccagaataaagaaatagaagcgtttgtacgtgagatgctggggtaa

SEQ ID NO: 370471 - DNA, 336 bp, Salmonella enterica
atgaagcctcttatttttactctttcactgctagccctgacgggatgcaccattactcgacaagcgcaggtcagcgaagccagcccgataagcggcatcgtgcgcctgacgtataaccagccgctattttttacttcacggacagatgactatgtatctcacgggaccgcaacacgcgaatgccagcagatgggctatgccgatgccgtttcgtttggtcagccggtaggaacctgtagcatttatgcgggctcgttgtgtctgaacacccgatttaccctctcctggcagtgccggggcgttgccgtcccgcaaatcatgccgctttattattaa

SEQ ID NO: 370472 - DNA, 498 bp, Salmonella enterica
atgctgaaaacagaaatgatcgacaaactgaatgagcaaatgaatctggagttgtactcctccctgctctatcaacaaatgagcgcgtggtgtagctatcacagttttgaaggcgcggccgcatttcttcgtcgccatgcgcaagaagagatgacgcatatgcagcgcctgtttgactaccttaccgataccggaagcctgccgcgcattcataccgtttcttcgcccttcgctgagtacgcctcgctggatgagctgttccgcgcgacctatgagcatgagcagcttattacgcaaaaaattaatgaactggctcatgccgcaatgaccagccaggattatccgacatttaatttcttgcagtggtatgtggcagaacagcatgaagaagaaaaactgttcaaatctattattgataaattaacgctggcgggaaaaagcggcgaagggctttatttcattgataaagaactctccaccctggatacgcaaaattaa

SEQ ID NO: 370473 - DNA, 240 bp, Salmonella enterica
atggattccattcacggtcacgaagtactcaacatgatgattgagtctggcgagcagtacacgcatacctcgctggaggcggcaataaaagcgcgctttggcgagcgggcacgatttcacacctgttcagcgtcagatatgacggcggcggaactggtcgcgtttctggcggcgaaaggaaagtttattgcggtggaggacggtttttcaacgcatgagagtaaaatctgccgccattaa

SEQ ID NO: 370474 - DNA, 1269 bp, Salmonella enterica
atgccttaccctgcgccgcggatatcaccgttctttgttaccggggtagtagaaagcgtgaaaaacagaactctgggcagtatttttatcgtggcaggcaccactatcggcgccgggatgctggcaatgccgctggcagcggctggcgttggtttcagcgtcacgctgggattgttgattggcctgtgggcgctgatgtgttataccgcgctactattactggaggtatatcaacacgttccggcggataccggactgggctcgttggcaaaacgctatcttggacgttacggacagtggcttacgggattcagtatgatgttcttaatgtatgcgctcaccgccgcctacatttccggagccggagaattactggcatccagtattaataactggcttggcgccacgctctcgcccgctgccggggtgctgctgttcacctttgttgccggtggggtggtgtgtgtgggcacctcgctggtcgacctttttaaccgcttcctgtttagcgcaaagatcatttttctggtcatcatgcttgcgttgctcacgccacatattcataaagtaaatcttcttacgcttcctttacagcaggggctggcgttatccgccataccggtcattttcacctcgtttggttttcacggaagcgtaccgagtattgtgagttatatgaacggcaacattcgccggctgcgttgggtctttatgacgggtagcgccattccgctagtggcctatattttttggcagctcgccacgcagggaagtatcgactcgccgacattcagagggctactggccagccatgccgggttaaatggcctgctgcaggcgctcagagaagtggtcgcttcgccacatgtcgaactggcggtccacctgttcgccgatctggcgttggcgacctcttttctgggcgtagcgctaggattatttgattacctggccgatctattccagcgccgcagtacggtgtccggacgtctgcaaaccgggctgattacctttctgccgccgctggcgtttgcacttttctacccacgtggatttgtgatggcattaggctatgccggcgtagcgctggcagtgctggcactgctcatccctgctatgctggtctggcagtgccgtaaacagagccctcaggcgggatatcgtgtggcaggcggcacgccagcgctggcgctggtgtttatctgcggcattgtcgtgattggcgtccagttttcgatcgcactggggtttctgcccgatccaggttaa

SEQ ID NO: 370475 - DNA, 666 bp, Salmonella enterica
atgaaaatggaaccattaaacgagaacgagctggaatggctggatgatgtgctgacgaaatacaataccgatcaggccattttggatgtcgcggagctggacggtctgattactgcggtactaagttctccgcgtcccatcgagccggaacagtggctggtcgcgatatgggggggacccgcgtacgtaccgcgctggacatctgaaaaagaaatgacgcgatttatggatctggtgttccagcacatggcggacacagccgcccggcttgaagattatccagaacagttcgagccgctgtttggcctgcgagaagttgatggccatgaattaacgattgttgaagaatggtgctttggttacatgcgcggagtgtcgctgtccgactggtctgacttgccggatacgctaaaaccggcgctggaagcgattgccttacacggcactgaagaaaactttgcgctgttggataaaatgagcccggaagcgttcgataaaagcgttgacgctatccgtatcgcggcgcttgagcttcatgcctggtggatggcgcatccgcacacgacgccgctacagatgccgataaaagcagaggtgaaagtggggcgtaacgatccttgtccatgcgggagcggcaaaaaatttaagcagtgctgcctgcattaa

SEQ ID NO: 370476 - DNA, 327 bp, Salmonella enterica
gtggtaaaaagacgtaatttattgcattttaataacggtgcccgatcagagcgcgatcttggggatctggtcactaaagtttttgagaaagcggcgaaaaaagaaccgcaaccgctatacacatttagcctgccgttgctgagtgtgcaggatgagatccgtgtttactgtaagaaaaaaaatatcaaaatagggtacgatacgctgtttatggaaataaccttttctgctgacagagaagcggtagacgaactcattaaacacttttttactgaaaataagctctatttgagagggcggttttatctgtccgcggcggtggtataa

SEQ ID NO: 370477 - DNA, 1434 bp, Salmonella enterica
atgcaaaagaaaacctgggccgttttattgataccattgtgcctcaccgcttgccaccagacgacctaccgatcaacagccaaagatgaaattctcacagggagctatattgacccgaccaaaacacgctttccgttagcggattattcacagtcggttgataaatggatacctccggactcggctgattacactattccggttattgatagtgctacccaacaacgctactttaacgcactaaaatctcattatttcggaatggacagtgaagcgcactcgccgtggaatggtttttatattaccgcattgctgaaaaaaaacgcagcacaggcccgggatgccagtattaagcagtttcttagcgacggcagtgcttattggggggaaaacttcagactttatacctctcgctggaaagaggaggttagagggaatacggatacgcagattgacaatatctataatgcctcccggcgaggcattatggtcagagaaagtttagtcagagcgctgccaacggacgacccgctctttaacgatccccgtcaggcgggcgaggggtatccgtttgataatttacaaatgtcttcgctgcgtcccggtacgccggtctatacgctgacgaagagcaaagaccaacgctggcaatatgtcgtttcaccagcggtaactggctgggttcatagtgaagatattgccagtacggatcagaaatttataacacagtgggttttgctcgctcacaagcaactgggggcatttatcaacgcgccggtttctgtccatgccgcaggcgtctattatttcaccgggcggccgggcactattttaccgttccggcatcaacgggcgggccagttcctcattgcggcgccagttcgcgacagcaacggtcgcgcgtttatccattgggtctggctaagcggtaacgagtttacggctatgccgtggaaaatgacgccggaaaatatcgccgtgctaatgaaagcaatgcacggcgccccctacggttggggaaattttaacttttataatgattgttcagccgaagtccgcagcctgttaatgccgtttggcatattcctgcccagacattcatccgcgcaggtagaggcggctggacgggtggtcgatcttagtcataaaaatccccaaatgcggatcgattatctcaccagatacggaaagccgtttactacgctggtctatattccagggcatattatgctgtatatcggtaacacaaccatgaatgggcaggttatgccgatgacttatcagaatatctggggattgcgcccaaaccatgctaatagccggagcattatcggtgaggcagtatttttgccgttactgcgtttttatcctgaaaatcctgagctgatatcgctggctggtaaggttctgtttaagcttggttatatagaatag

SEQ ID NO: 370478 - DNA, 549 bp, Salmonella enterica
atgcaatttaatatccctacgttgctcacgctgtttcgcgtcatcctgattccattctttgtcgtggtgttttatttgccgttcgcctgggcgccgatggtcagcgcgctgattttctgtattgccgcgattaccgactggtttgacggctttctggcgcgacgctggaaccagagtacgcgtttcggcgctttcctcgaccccgtcgccgacaaggtgctggtggcgatcgccatggtgctggtcaccgagcattatcatagctggtgggtgacgttacctgcggcgacgatgatagcccgcgaaattattatctctgctctgcgtgaatggatggcggagctgggcaaacgcagtagtgtagcggtctcctggatcggtaaagtcaaaactaccgcgcagatggtggcgctggcgtggctcttgtggcgtccgaatatctgggtagagtatgccgggatcgcgcttttctttgtcgcagcggtgctaacattgtggtccatgttgcaatatttgagcgctgcacgtggagatttgcttgatcagtga

SEQ ID NO: 370479 - DNA, 1833 bp, Salmonella enterica
gtgagtgaaatatttgacgcaaaggcgtttttgaaaaccgttaccagccaacccggtgtctatcgtatgtatgacgccggcggtacggttatttatgtcggtaaagcaaaagacctgaaaaagcgtctttccagctactttcgcagcaacctggcttcgcgtaaaaccgaagcgctagttgcgcaaattcaacacattgatgtcacggtaacgcataccgaaacggaagcgctgctgcttgagcataattacatcaagttgtatcaaccgcgttacaacgtgttgttgcgtgatgataaatcctatccttttatttttctgagcggcgatacccatccgcgtctggcgatgcaccgtggcgccaaacatgcgaaaggcgagtacttcggcccatttcctaatggctatgccgtgcgggaaacgctggcgctgttacagaaaattttccctatccgccagtgcgaaaacagcgtatatcgcaaccgctcgcgtccttgcctgcaatatcagattggccgctgtttaggcccctgcgttgcaggactggtcagcgaggaggagtatgcgcaacaggtggagtatgtccggttgtttttgtccggtaaggacgaccaggtcttaacacagctgattgcccggatggaaaaggccagccaggatctggcatttgaagaggcggcgcgtattcgcgatcagatccaggcggtacgccgggtcacggaaaaacagtttgtctccaatgcgggcgacgatctcgacgttatcggcgtggcttttgatgcgggtatggcctgtgtgcatgtgctgtttattcgccagggtaaggtgctgggcagccgcagctattttccaaaagtacctggcggtacggaactgggcgaagtggtggaaacctttgtcgggcagttttacctgcagggtagccagatgcgcacgctaccgggcgagatactgctcgattttaatctgagtgataaaacgctgctggccgattcgttgtcggaacttgccggacggcgtattcatgtccagacaaaaccgcgcggcgatcgcgcccgttatctcaagctggcgcggaccaacgcggcaacggccttaatcactaaactctcgcagcagtccaccatcacgcagcgtttgaccgcgctggcggcggtattaaaacttcctgcgatcaagcggatggagtgttttgacatcagccataccatgggggagcaaacggtcgcatcctgtgtggtatttgacgctaacgggccgttacgcgccgagtatcgtcgttataatatcgcgggcatcacgccgggtgatgactacgcggcgatgaatcaggtgctacgtcggcgttatggcaaggccatagaagaaagtaagattccggatgttattctgatcgacggcggaaaagggcagctcgcccaggcgaaagccgttttcgctgagctggatgtcccctgggataagcatcgtcctttgctgcttggcgtcgccaaaggcgcggacagaaaggccggtctggaaatactcttttttgaaccggaaggcgaggggtttagcctgccgccggactcgccggcgctgcatgttattcagcatattcgcgatgagtcgcacgatcacgcgatcggcgggcaccgtaaaaaacgcgcgaaggttaaaaataccagtacgctggaaactattgaaggcgttgggcctaaacgtcgccagatgctgctgaaatatatgggcggtttgcaaggactacgtaacgccagcgtagaagaaattgcaaaagtgccgggtatttcgcaaggtctggcagaaaagatcttctggtcgttgaaacattga

SEQ ID NO: 370480 - DNA, 657 bp, Salmonella enterica
ttgatcaacgttcttcttgttgatgaccacgaactggtgcgcgcagggatacgacgcattcttgaagatataaagggcattaaagttgtcggtgaagcgtgctgcggagaggatgcggtaaaatggtgccgtactaacgccgttgacgtcgtgctgatggatatgaacatgcccggtattggcggccttgaggcgacgcgtaaaattgcccgatcgacagcggatatcaaagtgatcatgctgaccgtccatacggagaacccgttgcccgccaaagtgatgcaggctggcgcagctggctatctcagcaaaggcgctgcgcctcaggaggtggtgagcgctattcgttcggtgtattccggacaacgttatatcgcctccgatatcgctcagcagatggcgctcagtcagattgagcctgcaaaaacggaaacgccgttcgccagtttgtctgaacgcgagttgcagattatgctgatgatcaccaagggtcagaaggtcaatgagatttcagaacagctgaatctcagtcctaaaacggtgaacagctatcgctatcgtatgttcagtaaattaaacattcatggtgatgttgagctgactcacctggcaatccgccatggcctgtgtaatgcggagacgttaacaagccagtga

SEQ ID NO: 370481 - DNA, 225 bp, Salmonella enterica
atgagtacgcctgatttttccaccgctgagaataatcaagaactggctactgaagtcaactgcctgaaagccatgttaacgctgatgctgcaggcgatgggccaggccgatgcagggcgcgtgattcttaaaatggaaaaacagatcgcgcagatggatgatgaagcacaagcggcggtattttccagtacggttaagcaaattaaacaggcttaccgccagtag

SEQ ID NO: 370482 - DNA, 723 bp, Salmonella enterica
atgcaggaaaatgatttcttcacctggcgacgcgcaatgttgttacgctttcaggagatggcggcagcagaggatgtttatactgaattgcaatatcagacacagcggctggaatttgattattatgccctgtgtgttcgtcatcccgtcccctttacccggcctaaaatatcgcttcgtaccacttatcctccggcgtgggtaacgcattaccagtccgaaaactattttgcgatcgatccggtattaaagccggaaaatttcaggcagggtcatttacattgggatgacgtgctatttcatgaagcgcaggcgatgtgggatgccgcccagcgtttcggattacgcagaggcgtaacccagtgtgtgatgttgccgaaccgggcgctgggctttttatctttctcccgtagcagtttacgctgctcctcgtttacctacgatgaagtggagctgaggttgcaactgctggcgcgggagagtctttcggcgctgacaagatttgaagacgacatggtgatggcgcctgagatgcgtttcagtaaacgtgagaaagagattctgaagtggacggcggaagggaagacctcatcggagatcgccattattctgtcgatttctgaaaataccgttaacttccatcagaaaaacatgcagaagaaattcaatgcgccaaataaaacacagattgcctgctacgctgcggcgacaggtctgatatga

SEQ ID NO: 370483 - DNA, 753 bp, Salmonella enterica
atgagtgcgatcgaagtcaccaacctggtcaaaaaatttcatggtcaaacggtgctgcacggtatcgaccttgaggtaaagcccggagaagtcgtcgccattatcggcccgagcggctcagggaagacaacgttattacgctgcattaacctgctggaacaaccggaagcgggcaccattaaagtgggcgatattatcatcgataccgcccgcccattcagccagcaaaaagggttgattcgccagctacgtcagcatgtcggctttgtctttcagagttttaacctgttcccgcatcgtaccgtgctggaaaatatcattgaaggtccggtgattgtaaagggagagccgaaagccgaggcgacggcgctggcgcgggaactgttagccaaagtcgggttggccggtaaagagacccgttatccgcgccgcctgtcgggcgggcaacagcagcgcgtagcgattgcgcgcgcgctggcgatgcgcccggaagtgattctgtttgatgagcccacgtcggcgcttgatcctgaattagtcggcgaggtgcttaatacgattcgccagctggcgcaggaaaagcgcacgatggtgatcgttactcacgaaatgggctttgcgcgtgacgtggctgaccgggcaatatttatggatcaggggcaaatcgtcgagcaggggccggcgaaaaccttgttcgccgagcctcagcatccgcgtacccgccagttccttgagaaatttttagtgaaataa

SEQ ID NO: 370484 - DNA, 669 bp, Salmonella enterica
atgcaagaaagtatccaactggttattgaatcgctgccgtatttgcttaaaggcgccgtctttaccctgcaactgagtattggcggtatgttttttggtctgctgctgggatttgtgctggcgctgatgcggatgtctccgctatggctggttcgctggctggcgcgcttttatatctcgatttttcgcggtacgccgcttatcgcccagttatttatgatctattacggcctgccgcaatttgggattgagctggaccctatcccggcggcgatgattggtttatcgctcaataccgcggcttacacgtccgagacgctgcgcgcggcgatctcggctatcgacaaggggcaatgggaagcggcggcgagcattggcatgacgccgtggcaaacgctacgtcgcgctattttgccgcaggcggctcgcgttgcgcttccgccgttgagcaacagctttatcagcctggtgaaagatacgtcgctcgccgcgacgattcaggtgccggagttgttccgccaggcgcagttaattacctcgcgaacgctggaggtgtttaccatgtatctggccgcgtcgttaatctactgggtaatggcgaccgtcttatcggcactgcaaaactattttgaaaaccagcttaaccgccaggagagagagccaaaatga

SEQ ID NO: 370485 - DNA, 987 bp, Salmonella enterica
atgccactacatcacttaacgcgctttcctcgcctggagcttattggcgcgccgaccccgctcgaatacctgccgcgattgtctgattatcttggccgtgagatttacattaagcgcgatgacgttacgcccattgcaatgggcggcaataaactgcgtaagctggagtttctggtggccgacgcgctgcgagaaggggcggatacgctgataaccgcaggggcgattcagtcgaaccatgtccgtcagacggcggcggtcgcggccaaattggggctgcattgcgtcgctttgctggaaaatccaatcggtaccaccgcggaaaattacctgacgaatggtaatcgcctgttactggatttatttaatacgcaaattgagatgtgcgatgcgctaaccgatccggatgcgcagctgcaaacgctggcgacgcgcattgaagcgcaagggttcaggccctatgtgattccggtcggcggctccagcgcgctgggggcaatgggatacgtagagagcgccctggaaatcgcccagcagtgtgaagaagttgtcgggctctcttcggtggtggtggcctccggcagcgccggaacgcacgccgggttagctgtcgggctggaacatctgatgcctgacgtcgaactgattggcgtgaccgtttcacgttctgtcgccgagcagaaacccaaagtgattgccttgcagcaggctattgccggtcagctggcgctgacggcgacggcggatattcatttatgggatgactattttgccccgggttacggcgtgccaaatgacgcggggatggaggcggtgaaactgctggcgagcctggagggggtgttgctggatccggtatataccggcaaagcgatggcgggtctgatagacggcatcagccagaaacgctttaacgatgacgggccgattctctttattcacaccggtggggcgcctgcgctgtttgcctaccatcctcatgtataa

SEQ ID NO: 370486 - DNA, 801 bp, Salmonella enterica
atgaaattagcactgctgggacgtcaggcactgatgggagtaatggctgtagcgctggtggcgggaatgagcgcgaagagctttgccgatgagggtttgctgaacaaagttaaagaacgcggcacgctgctggtagggctggaaggtacctatccgccgtttagctttcagggcgacgacggcaaattaaccggttttgaagtcgatttcgccgaggcgttggcaaaacatctgggcgttaaagcgtcgttgaagccgaccaaatgggacggaatgctggcgtcactggactctaaacgcattgatgtagtgataaaccaggtcacgatttcagacgtccgcaagaaaaaatatgatttctctacgccttatactgtctccggcgttcaggcgctggtgaaaaaaggcaatgaaggcacgatcaaaacggcggccgatctgcagggcaaaaaagtcggcgttgggctggggactaactatgaagaatggctacgtcaacatgttcagggcgtggatatccgtacttatgacgatgatcctacaaaatatcaggatctgcgcgtaggccgtattgacgcgattttagtcgatcgtctggcggcgctggatctggtgaaaaaaaccaaaggtacgctggccgtcaccggtgatgcgttttcgcgtcaggagtccggcgttgcgttacgtaaaggcaacgaagacttgttgaaggcggtagataacgccattgcggaaatgcaaaaagatggcaccttaaaagcgctttccgaaaaatggtttggcgctgacgtgacccaataa

SEQ ID NO: 370487 - DNA, 552 bp, Salmonella enterica
atgacggtgcagcaacctaaaaggcggcccttgagccgctatcttaaagactttaaacacagccagacgcattgcgcgcattgtcacaaactgctcgaccgcattacgctggttcgccgtggcaagatcgttaataaaatcgctatttcacagctggatatgctacttgacgacgctgcctggcagcgggagcagaaggagtgggtggcgctgtgtcgcttttgcggcgatttgcactgcaaaaagcagagtgattttttcgatattatcggtttcaagcagtatttgtttgaacaaaccgagatgagccatggcacggtgcgggaatatgtcgtgcgtttacgacgtcttggcaactacctcagcgagcaaaacatttcccacgatctgctgcaggacggttttctcgatgaaagcctggcaccatggttgccggaaaccagcaccaataattatcgtatcgcactgcgtaaataccagcaatataaagcgcatcagcagattgcgcccagacagaaatccccctttaccgccagttctgatatatattaa

SEQ ID NO: 370488 - DNA, 720 bp, Salmonella enterica
gtgaattcactgtataccgctgaaggtgtaatggataaacactcgctgtggcagcgttatgtaccgctggtgcgtcacgaagcattgcgcctgcaggtgcgattgccggcgagcgtggaactggacgatctgctacaagcgggcggcatcgggttattaaatgcggtcgaccgatatgacgctttgcaaggaacggcatttaccacttacgcagtgcagcgtattcgtggggcgatgctggatgaattacgcagccgcgattgggtgccgcgtagcgtccggcgtaatgcccgcgaagtggcgcaggcgatgggacaactggagcaggaactggggcgtaatgcgacggaaaccgaagtggcggaacgtcttggcatccctgttgcggagtatcgtcagatgttgctcgataccaacaacagccaacttttctcttacgatgagtggcgggaagagcatggcgatagcatcgaactggtgactgaagaacatcaacaggaaaacccgttacatcaactgctggagggcgacctgcgacagcgggtaatggacgcgattgaatcgctgccggaacgcgagcaactggtgttaacgctgtattaccaggaagagctcaacctcaaagagattggcgcggtactggaagttggcgaatcgcgggtcagccagttgcatagtcaggccatcaaacgattacgcaccaaactgggtaagttatag

SEQ ID NO: 370489 - DNA, 1206 bp, Salmonella enterica
atgaaagaaatcaccgtcactgaacctgcctttgtcacccgcttttcctgttctggctcggcctgccgcgatcactgttgtaagggctggaaaatcacgctggataagacgacggtcaaaaagtaccttaccagcaaggatgtaaccatcagagagattgccaaaaatagtattattcttttaaagaaagacccaaataactggggggagattaaattaccatctgggacaggaagctgcccttatctggatgacgatcgtctgtgcaaggtacaaaaaacactgggagctaaagcattaagttatacctgcactacgtttccgcgggtgttccatacttataaaaacgaggtacgacattctctaagccttgcctgcccggaagtgactgcgcatattttaaacgatactgatgcggtaacactcaatgaaaaggcgatcattcagcagaagtacaataccgcgccgctattctccccacagcaaaaactacttaacttgttttgcctgagtttgattaaccatgctgccagcaatccggatgcggcattatacgcgttgatcaagtttgtaatgtacgtgcagaagtttccccggattgatgacgctgcattaggggagattgagcaagtgtatggcacgttagtttcccagttgcagtccggttcgttaactcaggaactcgctaatattacgccggataagaaattcaaaacatccctggtactgttgatgcaggattatttcagggctctcccaccgagcagaggaagctatgtcctcgatcactatatccagtgtcttctgcgggtgctgacggcggaagagggcgtttcaatggagcagaaggttagcgatattgagtcctcattagcgcgctgtttacaggcggatgagcagcagaagaactgggccttcagaaatttaattctctataaaatttgggaaaataatttccccaaccagccgaatgtcgacccgttacgcgcgctgtatattatcgtggcggaatatgcctttattaagctattaacggcagccagcgtgcatgagcgcgggcggcttgagtgggatgacgttaccaatattgtgtatagctttcactcccgcagccagcataacagcgaggtggcggcgaattttcatcgccatatagaaacggtgcgtactggcgacgatctgtcgatgattcatcttctgacatag

SEQ ID NO: 370490 - DNA, 1518 bp, Salmonella enterica
atggcacaagtcattaatacaaacagcctgtcgctgttgacccagaataacctgaacaaatctcagtcctcactgagttccgctattgagcgtctgtcctctggtctgcgtatcaacagcgcgaaagacgatgcggcaggccaggcgattgctaaccgcttcacttctaatatcaaaggtctgactcaggcttcccgtaacgctaacgacggcatttctattgcgcagaccactgaaggtgcgctgaatgaaatcaacaacaacctgcagcgtgtgcgtgagttgtctgttcaggccactaacgggactaactctgattccgatctgaaatctatccaggatgaaattcagcaacgtctggaagaaatcgatcgcgtttctaatcagactcaatttaacggtgttaaagtcctgtctcaggacaaccagatgaaaatccaggttggtgctaacgatggtgaaaccattaccatcgatctgcaaaaaattgatgtgaaaagccttggccttgatgggttcaatgttaatgggccaaaagaagcgacagtgggtgatctgaaatccagcttcaagaatgttacgggttacgacacctatgcagcgggtgccgataaatatcgtgtagatattaattccggtgctgtagtgactgatgcagcagcaccggataaagtatatgtaaatgcagcaaacggtcagttaacaactgacgatgcggaaaataacactgcggttgatctctttaagaccactaaatctactgctggtaccgctgaagccaaagcgatagctggtgccattaaaggtggtaaggaaggagatacctttgattataaaggcgtgacttttactattgatacaaaaactggtgatgacggtaatggtaaggtttctactaccatcaatggtgaaaaagttacgttaactgtcgctgatattgccactggcgcgacggatgttaatgctgctaccttacaatcaagcaaaaatgtttatacatctgtagtgaacggtcagtttacttttgatgataaaaccaaaaacgagagtgcgaaactttctgatttggaagcaaacaatgctgttaagggcgaaagtaaaattacagtaaatggggctgaatatactgctaacgccacgggtgataagatcaccttagctggcaaaaccatgtttattgataaaacagcttctggcgtaagtacattaatcaatgaagacgctgccgcagccaagaaaagtaccgctaacccactggcttcaattgattctgcattgtcaaaagtggacgcagttcgttcttctctgggggcaattcaaaaccgttttgattcagccattaccaaccttggcaatacggtaaccaatctgaactccgcgcgtagccgtatcgaagatgctgactatgcaacggaagtttctaatatgtctaaagcgcagattctgcagcaggctggtacttccgttctggcgcaggctaaccaggttccgcaaaacgtcctctctttactgcgttaa

SEQ ID NO: 370491 - DNA, 1407 bp, Salmonella enterica
atggcttcaatttcatcattaggtgtagggtcaaacttacctctggattcactgctgactaaactgaccaacgctgaaaaaggacgcttaacgccgatcacacagcagcagagtgctaatacggcccgtctaacggcatacggtactttaaaaagtgcactggagaagtttcaaacagcaaacacggcgttaaataaagccgatctgtttaaaagtacgaatgtcaccagcagtacagaagacctgaaagtctcgacggaagctggggccgcacctggaacttatgtggttagcgtaactcagttagcacaagcacaatctttgagtacagcaaccaaaattacatctaccaaagaagtgctgggagataccacatctgacagccgtaccataaaaattgaacagaaaggccgtaaagaaccacttgaaatcaagctcactaaagatcaaacctctttagagggtatccgtgacgccattaatgatgctgacagtggtatttccgccagtatcgttaaagttaaagaaggcgattatcagcttgtactgaccgcagatagtggcacggataatcaaatgactatctctgtggaaggcgatagcaaactcagcgatctgttgtcctatgatagtagtactggcacgggcaaaatgaagcaactggttgctgcagataatgctttgttaaccgttaacggcattgatattgagcgaccgagtaataaaatcactgacgctccacaaggcgtgacgcttgaactaaccaaagaagtaaaagatgcccgtattaccgtcacaaaagataatgaaaaggcgaccgaagccgtcaaaggttgggttgatgcctacaactcactgcttgatacctttagttcattaacaaaatatacagaggttgatccaggggctgaagaacaggacaaaaacaacggtgcactacttggagataccgtggtgcgaacgattcaaactggaatccgcgctcagttcgctaatggtgcaagtacaggtacatttaagaccctgaatgaaattggtattacttctgatggtaccaccggaaaactaaaaattgatgataccaagcttaaaaaagcgctggatgaaaataccgcttctgtacgtgagctgctggtaggtgatggtaaagaaacggggatcaccaccaaaattgccaccgaagtgaaaagttatctggccgatgacggcattattgacagcgcccaggacagtattaacgccacgctgaaaaagctgactaagcaatatctgaccgtcagcagtagcattgacgacaccgttgcccgttacaaggcccagtttacccaactggataccatgatgagtaagctgaataacaccagtacttatttgacccagcaatttaatgctatgaacaagtcctga

SEQ ID NO: 370492 - DNA, 408 bp, Salmonella enterica
atgtacaccgcgagcggtatcaaagcttatgcgcaagtcagcgtggaaagcgccgtgatgagcgccagcccgcatcagttgattgaaatgttgtttgatggcgcgaatagcgctctggtgcgcgctcgcctgtttttagaacaaggcgatgttgtcgcgaaaggtgaagcgttaagcaaagccatcaatattatcgataacgggctgaaagccggcctcgatcaggaaaaaggcggtgagattgcgacgaatctttccgagctatacgactatatgattcgccgtttactgcaggctaatttgcgtaacgacgctcaggccatcgaagaagtggaagggttactcagcaatattgcagaagcctggaagcagatttcaccgaaagcatctttccaggagtctcgttaa

SEQ ID NO: 370493 - DNA, 369 bp, Salmonella enterica
atgacctcaaccgtggagtttatcaaccgttggcagcgtattgcgctgctcagtcaatcgctgcttgaacttgcgcagcgaggtgaatgggatctcttactgcaacaagaggtctcctatctgcaaagtattgaaacggtgatggaaaagcaaactccaccgggcattacgcgaagtattcaggatatggtcgccggatacatcaaacaaacgctggataatgagcagctcctgaaagggctgctgcaacagcgactggatgaactcagtagtttgatcggacaatccacccgccaaaaatcactcaacaacgcttatggccgtctttccggtatgttactcgtgccagacgcgcctggcgcctcataa

SEQ ID NO: 370494 - DNA, 1485 bp, Salmonella enterica
atgaaaaaccccacgttattgcagtacttccactggtattatcccgacggcggtaaactctggtctgagctggcggaacgtgctgatgggctgaatgatatcggtatcaatatggtctggctaccgcccgcctgtaaaggcgcctccggcggctattccgtaggctatgatacctacgacttgtttgacctcggcgaatttgaccaaaaaggaactatcgcgacaaagtacggcgataaacgccagttactgacggcgatagacgcgctcaaaaaaaataatattgcggtgctgctcgacgtcgtcgtgaaccacaaactgggcgcagacgaaaaagaacgtattcgcgttcagcgcgtgaatcaggatgaccgcacgcaaatcgatgacaacatcattgaatgcgaaggctggacgcgctacaccttccctgcccgcgcgggccagtattccaactttatttgggactatcactgtttcagcggcattgatcacatcgagaatcccgacgaagacggcatttttaagatcgtcaatgactataccggcgatggctggaacgatcaggttgatgatgagctgggtaatttcgactatctgatgggggaaaatatcgattttcgcaatcacgcggttacggaagagattaaatattgggctcgttgggtcatggaacaaacccactgtgacggctttcgcctggacgcggtaaaacatatacccgcctggttttataaagaatggattgagcatgtacaggcggttgcgccaaaaccgctgtttattgtcgcagaatactggtcgcatgaagtggataaactgcaaacgtacatcgatcaggtcgacgggaaaaccatgctgttcgacgcgccgttgcagatgaaatttcatgaagcctcgcgccagggcgcggagtatgacatgcgccacattttcaccggcacgctggtagaagccgacccttttcatgcggtgacgctggtcgctaaccacgatacacaaccgttacaggcgctggaagcgccggtagaaccctggttcaaaccattggcctatgcgctgatcctgcttcgtgaaaacggcgtaccgtcggtgttttatcccgatttatacggcgccagctatgaggataatggcgaaaatggcgagacctgtcgggtcgacatgccggtgattaaccaactggatcggctgatcctcgctcgtcagcgttttgcgcacggtatacaaacactctttttcgatcatcctaactgtatcgcctttagtcgcagcggtactgaagagaatccaggctgtgtggttgtactttccaatggcgacgacggtgaaaaaaccctcctgctcggcgacaattacgctaacaagacctggcgtgattttctgggaaaccgcagtcagcatgttgtaactaatgatcaaggcgaagcgacgttcttctgcaacgcaggcagcgtcagcgtgtgggtcattgaggacgtgtga

SEQ ID NO: 370495 - DNA, 414 bp, Salmonella enterica
atgaaaaaagtagcgatcgttggcgcattgctggttctggccggatgcgccgaggtggaaaactataatgatgtggtgaaaacgcccgcgccggccggtctggaagggtactggcagtcaaaaggcccgcaacgtaagctggtgagccctgaagctatcgccagcctggtggtgactaaagaaggcgatacgctggactgccgccagtggcagcgcgttattgctctgccgggcaagctgaccatgctctccgatgacttaaccaatgttacggttaagcgtgagctctatgagattgagcgcgacgggaataccctggaatatgatggcatgacgctgcaacgggtcgctcgtccgacgccggagtgcgccgccgcgttagaaaaaacgccgctgccgacgccgctgccgtaa

SEQ ID NO: 370496 - DNA, 1206 bp, Salmonella enterica
atgtcatggcaacacttcaagcaaacctggttaattaaattctgggcgccggcccctgcggtgatcgcagccggtattctctctacctactattttggcatcaccggcacgttttgggccgtgacgggcgaatttacccgctggggcgggcaaattttgcagctttttggcgttcatgccgaacagtggggctactacaagctgattcatctggaaggtacgccgctgacgcgtatcgacggcatgatgatcctcggcatgttcggcggctgtttcgccgcggcgctgtgggccaacaacgtaaaactgcgtatgccgcgcagccgaatccgtatcgtacaggcggtggtcggaggcatgatcgctggcttcggcgcgcgtctggcgatggggtgtaacctggccgccttttttaccgggatcccgcagttctccctacacgcgtggttctttgcgctagcgaccgctatcggctcctggttcggcgcccgctttacgttgctgccgatatttcgcataccggtgaaaatgcagaaggtctccgcggcttcgccactgacgcagaaaccggatcaggcaagacggcgtttcaggctcggtatgctggtctttatcggcatgattggctgggcgttattaacggcaatgcatcagccgaaactggggctggcgatgctgttcggcgtcgggtttgggctgctgatcgagcgcgcgcaaatctgctttacttcggcctttcgcgatctgtggatctccggacgcgcccatatggcgaaagcgattattttcggcatggcggtcagcgccattggtattttcagctacgtgcagttgggcgttgcacctaaaattatgtgggctggcccgaatgcggtcattggcggactgctgttcggttttggcatcgtgctggcgggcggctgcgaaaccggctggatgtaccgcgccgtagaaggccaggtgcattattggtgggtgggcctcggcaatgtcatcggttcaaccatcctggcttactactgggatgatttcgcgcccgcgctggcgaccagttgggataaagttaacctgctgaatacctttggtccgctggggggtctgctggtcacctacctgttattatttgccgcgctgatgttaattatcggctgggaaaaacgttttttccgccgtgcggggctgacgcctgctaaggaatctgtatga

SEQ ID NO: 370497 - DNA, 234 bp, Salmonella enterica
atgaaaaatatcgtccctgattaccgtctggatatggttggcgaaccttgcccgtacccggcggtcgccactctggaagcgatgccgcagctaaaaaaaggtgagatcctggaagtggtgagcgactgtccgcaatccattaataatattccactggatgcgcgcaatcacggttatacggtgctggatatccaacaggatggcccgacaattcgttatctgattcaaaaataa

SEQ ID NO: 370498 - DNA, 315 bp, Salmonella enterica
atggcagcaatacaggggattgaaggggttattagccagttacaggcgacggcgatggccgcgcgcgggcaagacacgcactcgcagtcgacggtgagttttgccggccagctacatgctgcgctggatcgtattagcgacagacagacggcggcgcgcgttcaggcggaaaaattcactctgggtgagccgggcattgcgcttaatgacgtgatggccgatatgcaaaaagcgtccgtctccatgcaaatggggattcaggtgcgcaacaagctggtcgccgcgtatcaggaagtgatgtctatgcaggtttaa

SEQ ID NO: 370499 - DNA, 1683 bp, Salmonella enterica
atgagtgcgactgcatcgactgcaacccaacctaaacctctcgagtggcttaatcgcctacgcgcgaatccccgaattccgttaattgtggcgggttccgctgccgtggcgatcgtcgttgcgatggtgctgtgggccaaaacgcccgattaccgcacgctatttagcaacctttccgatcaggacggcggcgcgatcgtcgcgcagttgacccagatgaatatcccctatcgctttgccaatggcagcggcgcgattgaagtgcccgccgacaaagtgcatgaactgcgtctgcgtctggcgcagcaggggctgcctaaaggcggcgcggtaggctttgaactgcttgatcaggaaaaattcggtatcagtcagttcagcgagcaggtgaattatcagcgcgcactggaaggtgaactggcccggacgatcgagacgctgggtccggtaaaaagcgcccgcgttcacctggcgatgccaaagccgtcgctatttgtgcgggaacaaaaatccccttccgcctccgtcaccgtcacactggaaccgggtcgggcgctggatgaaggacaaattagcgccgtggtacatctggtttccagcgctgtcgccggtttgccgccaggaaacgtcactctggtcgatcaatccggtcatctgctcacgcaatccaataccagcggtcgcgaccttaatgacgcgcaattaaaatttgctaatgatgtggaaagccgcatccaacgccgtatcgaagccattctgtcgcctatcgtcgggaacggtaatgttcacgctcaggtaaccgcccagttggattttgccaataaagagcagacggaagagcactacagcccgaacggcgatgcgtcgaaggccaccctgcgttcacgtcagttgaatattagcgaacaggtaggcgcgggctatcccggcggcgtgcctggcgcgctgtcgaaccaaccagcgccgcctaacgaggcgccgatcgccacgccgccgaccaatcaacaaaacgcgcagaatacgccacaaaccagcaccagtaccaacagtaacagtgctggcccgcgcaatacgcagcgtaatgaaaccagtaactacgaagtggaccgcaccattcgtcacaccaaaatgaatgtgggcgatattgagcgtctctccgtggccgtcgtggtgaattacaaaacgctggcggatggcaaaccgctgccattgaccgccgatcagatgaaacagatcgaggatttaacccgtgaagcgatgggtttttctgataaacgcggcgatacgctaaacgtggtgaattcaccgtttagcgcagtggataacaccggcggcgaactgcccttctggcaacagcagttctttatcgatcagttgctcgcggcaggtcgctggttactggtgctggtggtggcctggattctgtggcgcaaagcggtacgtccgcagttgacgcgccgcgttgaagaagcgaaagcggcgcaggaacaggcacaggttcgccaggaaaccgaagaagccgtggaagtacgccttagcaaagacgagcagctccagcaacgccgggctaaccagcgtctgggcgctgaggtgatgagccagcgtattcgcgaaatgtcagacaacgatccgcgcgttgtggcgctggtcattcgccagtggatgagtaacgatcatgagtaa

SEQ ID NO: 370500 - DNA, 996 bp, Salmonella enterica
atgagtaatcttagcggtaccgataaaagcgtcattttgttgatgaccattggcgaagaccgggcggcagaggtgtttaaacacctctcaacccgcgaagtacaggcgttaagtacggcgatggctaacgtgcgtcagatctccaacaaacaactgacggacgtactatcagagtttgagcaagaagcggagcagttcgccgcgctgaatatcaacgccaacgaatacctgcgctccgtactggttaaagcgctgggcgaagaacgcgcctccagcctgctggaagatattctggaaacgcgcgataccaccagcggtatcgaaacgctcaactttatggaaccgcagagcgccgccgacctgattcgcgacgaacacccgcagattatcgccaccattctggtccaccttaaacgcagtcaggccgccgatattctggcgctgtttgacgaacgactgcgtcatgatgtgatgctgcgtatcgcgacatttggcggcgtacaaccggcggcgctggcggagttgaccgaagtgctgaatggcctgctcgacggtcagaacctgaaacgcagcaaaatgggcggcgtaagaaccgcggcggaaattatcaacctgatgaaaacgcagcaggaagaagcggttattaccgctgtgcgcgaattcgacggcgaactggcgcagaaaatcatcgacgagatgttcctgttcgaaaatctggtggatgtggacgatcgcagtatccagcgtctgctgcaggaagtggattccgaatcgctgctgatcgctctgaaaggcgccgaaccgccattacgcgagaagttcctgcgcaatatgtcccagcgcgccgccgatatcctgcgcgacgaccttgccaaccgtggcccggttcgtctgtctcaggtggaaaacgagcagaaagcgattctgcttattgtgcgtcgtctggcggaaaccggcgaaatggtgattggcagcggcgaggatacctatgtctaa

SEQ ID NO: 370501 - DNA, 708 bp, Salmonella enterica
atgtctaatgaattgccttggcaagtctggacccccgacgatctcgccccgccgccggagacgtttgtgccggttgaggctgataacgtgaccttgacagacgatacgccggagcccgaactcactgccgaacagcagctggagcaggagctggcgcagctaaaaatacaggcccatgaacaaggttataacgccgggctggcggagggacggcaaaaaggacacgcgcagggataccaggaagggttagcgcaggggctggagcaaggacaagctcaggcgcagacgcagcaggcgccgattcatgcccgtatgcagcagttagtgagcgagtttcagaacacgcttgacgcgctcgatagcgttatcgcctcacggctgatgcaaatggccctggaggctgcgcgtcaggtcatcggccaaacgccggcggtggacaactcagcgctgattaaacagatccaacaactgttgcagcaagagccgctctttagcggcaagccgcagttgcgcgtgcatccggacgacttacagcgggtggaagagatgctgggcgccacgctcagtcttcacggatggcggttgcgcggcgatccaacgttgcatcacggcgggtgtaaagtctctgccgatgagggcgatctggacgccagcgtcgctactcgctggcaagagttgtgtcgcctggcggcgccgggagtgctctga

SEQ ID NO: 370502 - DNA, 1371 bp, Salmonella enterica
atgaccacgcgtttgacccgctggcttaccgcgctcgacaactttgaagcaaaaatggcgttattgccggcggtgcgtcgttatggacgtttaacccgcgccactggcctggtactggaggccaccggtctccagcttccgctgggcgccacctgcattattgagcgccaggacggccctgaaaccaaagaggtggaatcggaagtcgtcggttttaacggccagcgtctgtttttaatgccgctggaagaggttgaaggcattctgcccggtgcccgcgtttacgcccgtaacgggcatggcgacggtctgcaaagcggcaaacagttaccgctcggcccggccctgcttggtcgggtgctggatggcggcggtaaaccgctcgacggactgcctgcgccggatacgctggaaaccggcgcgttaatcacgccgccgtttaacccgctacagcgaacgccaatcgaacatgtgttggataccggcgtacgcgctatcaacgcgttgttaaccgtagggcgcggtcagcgtatgggactctttgccggttccggcgtcggtaaatcggttctgcttggcatgatggcgcgctacacgcgggcggacgtgattgtcgtgggacttatcggcgaacgtggccgcgaagttaaagattttatcgaaaatattctcggccccgacggtcgcgcgcgttcggtggtgattgccgccccggcggatgtttcaccgctgctgcgaatgcagggcgccgcctatgccacccgcatcgccgaagattttcgcgatcgcggacagcatgtgttgctgattatggattcgctgacgcgctatgcgatggcgcagcgtgaaattgcgctggcaatcggcgaaccgccagccaccaaaggttatccgccctcggtgttcgcaaagctgccggcgctggtcgagcgtgccggtaatggcatccacggcggcggctctatcaccgcgttttataccgtgttgaccgagggggacgaccaacaagatcccattgccgactcggcacgcgcaatcctcgacgggcacattgtcttgtcccgccgtctggcggaggccgggcactatccggccattgatatcgaggcgtcaatcagccgggcgatgaccgcgctcattaccgagcagcactatgcgcgggtacggctatttaaacagttgctttccagtttccagcgtaaccgcgatctggtcagcgtcggcgcctatgccaaaggcagcgatccgatgctcgataaagccattaccttatggccgcaactggaagcgtttttacagcaaggcatttttgaacgggccgactgggaagactctctgcaggcgctcgatttaattttcccgacggtgtga

SEQ ID NO: 370503 - DNA, 444 bp, Salmonella enterica
atggcacaacatggcgctctggaaacactcaaagatctggccgaaaaagaggtagatgacgcggcgcgtttactgggcgaaatgcgtcgcggctgccaacaggcggaagaacagctcaaaatgctgatcgattatcagaatgagtatcgcagtaatttgaacaccgatatgggcaacggcatcgccagtaatcgctggatcaactatcagcagtttattcagacactggaaaaggcgatagagcagcatcgcctccagcttacgcagtggacgcaaaaagtcgacctggcgctgaagagctggcgtgagaaaaagcagcgacttcaggcctggcaaaccttacaggaccgacaaaccgcggcagcgctgttagctgaaaaccgcatggatcagaaaaagatggatgaatttgctcagcgtgcagcaatgaggaaacccgaatga

SEQ ID NO: 370504 - DNA, 1218 bp, Salmonella enterica
atgatcaccctgccccaactgatcaccaccgataccgacatgaccgcgggtctgacgtcaggaaaaaccaccggttcagccgaggactttctggcgctcctggcgggcgcgttaggcgcagacggcgcacagggcaaagacgcccgcatcacgctggccgatttacaggcggcaggcggcaagttatcgaaagagctactgacccaacatggcgagccgggccaggcggtgaagcttgccgacctgctggcgcaaaaagcgaatgcgacggatgaaacgcttaccgatctgacacaagcgcagcatctactgtctacgctaacgccatcgttgaaaaccagcgctctggccgcattgagtaaaacggcgcagcatgatgagaaaacgcccgcgctgagcgatgaggatcttgccagtctgagcgccttattcgccatgctgcccggacaacctgtcgcgacgcctgtcgccggagagacgccggctgaaaatcacatcgccttgccgtcactgttgcgcggcgacatgccatcggcgccgcaggaagagacacatacgctctcttttagcgagcatgaaaaagggaaaaccgaggcgtcgcttgcgcgcgccagcgacgatcgcgccacggggccatcactgacgccgctggtggtcgctgccgccgcgaccagcgcgaaagtggaggtggatagcccgcccgcgccagtaacgcatggcgcggcaatgccgacgctcagcagcgccacggcgcaaccgctacctgtcgcctcagccccggtactcagcgcgccgttaggcagccatgaatggcagcaaacgttcagtcagcaggtcatgttatttacgcgtcagggacagcaaagcgcgcagcttcgattgcatccggaagagttaggtcaggtgcatatttcgctcaagctggatgacaatcaggcgcagctccagatggtatcgccgcacagccatgtccgcgccgcgctggaagccgccctgcccatgttgcgcacccagttggcggaaagcggcattcagttgggacaaagcagtatcagtagcgaaagctttgccggacagcagcagtcttcatcgcaacaacagtctggccgcgcccaacacacggacgcgtttggcgctgaagatgacatagcgttagcggcgccggcctcgcttcaggccgccgcgcgcggcaatggcgcagtggatatcttcgcctaa

SEQ ID NO: 370505 - DNA, 468 bp, Salmonella enterica
atgactgactccgcgattaacaaaaagagcaaacgctcgatttggatacctttgctggtgttgattaccctcgccgcctgcgcgaccgccggttatagctactggcgtatgcagcagcaaccgaccacgaacgctaaagcggaaccggctccgccgcccgcgccggtattttttgcgctggatacgtttaccgtcaatctgggcgatgcggatcgcgtgttgtatatcggcgtgaccctgcgtctgaaagacgaagcgacgcgcgcgcgattaaatgaatatctgccggaagtgcgcagccgtctgctgttgttgttttcccgtcagaatgccgccgagctctcaacagaagctggcaaacaaaaactgattgccgccattaaagagactctggccgcgccgctcgttgccggacaaccaaaacaggtcgtcactgacgtgctttatacagcttttattctgcggtaa

SEQ ID NO: 370506 - DNA, 1005 bp, Salmonella enterica
atgggcgatagtattctttctcaggctgaaatcgatgcgctgttgaacggcgacagcgacaccaaagacgaacccactcccggtatcgcaagcgatagcgatattcgcccttacgatcccaatacccagcgtcgcgtcgtgcgtgaacgcttgcaggcgctggagattattaacgagcgtttcgcacgccagttccggatgggattatttaacctgctgcgccgcagcccggatattaccgtgggcgccatacgtattcagccgtatcacgaatttgcgcgtaacctgccggtaccgactaacctgaacctgatccacctgaagccgctacgcggcaccgggctggtggtgttctcgccgagtctggtgtttattgccgtcgataacctgttcggcggcgacggtcgttttccgaccaaagtcgagggccgcgagtttacccatacggaacagcgtgtcatcaaccgtatgctgaaactggcgctggaaggctatagcgacgcatggaaagccattaatccgctggaagtggagtatgtgcgttccgaaatgcaggtgaaatttaccaatatcaccacctcgccgaacgatatcgtcgttaatacgccgtttcatgtggagatcggcaatctgaccggtgaatttaacatctgtctgccatttagcatgatcgagccgctgcgtgagctgctggtgaatccgccgctggaaaactcgcgccatgaagatcagaactggcgtgataacctggtccgccaggttcagcactctgaactggagctggtagccaattttgccgatattccgttacgtctttcccagattttgaagctgaaacccggcgatgtactgccgattgaaaaacccgaccgcattattgctcatgtggacggcgttccggtactcaccagccaatatggcaccgtaaacggacagtatgcgctacgcgtagaacatttgatcaacccaattttgaattcgctgaatgaggaacagcccaaatga

SEQ ID NO: 370507 - DNA, 414 bp, Salmonella enterica
atgagtgacatgaataatccgtccgatgagaatactggcgcattggatgatctgtgggctgacgcgttaaacgagcaaaaagcgaccaccactaaaagcgccgccgacgcggttttccaacagcttggcggcggcgatgtcagcggtgctatgcaggatatcgatctgattatggatatcccggtcaaactgaccgtagagctgggccgcacgcgaatgaccattaaagaactgctgcgtctgacgcaggggtcggtcgtcgcgctggacgggctggcgggcgagccgctggatatcctgattaatggctacctgattgcccagggtgaagtggtcgtcgtggcggataaatacggcgtacgtatcaccgatattattacgccatccgagcgtatgcgtcgtttgagtcgttaa

SEQ ID NO: 370508 - DNA, 378 bp, Salmonella enterica
atgatgaagacagaggccacggtttctcagcccaccgcgccagccggatcgccgctcatgcaggtgagcggcgcattaattggcattattgcgctcattctggcggcggcctgggtgattaagcgtatgggattcgcgccaaaaggaaatagcgtccggggactcaaggtgtcagccagcgcctcgcttggcccgcgcgaacgcgtggtgattgtcgaggtcgaaaatgcgcgtctggtactgggcgtgaccgcctcgcagatcaacctgctgcacaccctcccgcccgcggagaatgacacggaagcacccgttgccccaccggcggatttccagaacatgatgaagagcttactcaagcgttccgggagatcctga

SEQ ID NO: 370509 - DNA, 738 bp, Salmonella enterica
atgcgccgtttgttattcctttctctggcgggtctgtggctttttagtcccgccgctgctgcgcaactgccggggcttatcagccaaccattagcgggcggaggccaaagctggtcattatccgtccagacgctggttttcatcacctcgctgacgtttctgccggcgattttactgatgatgacgagcttcacgcgtatcatcattgtttttggcctgttgcgtaacgcgctgggcacgccctcggcaccgccaaatcaggtgttactcgggctggcgttgtttttgaccttttttattatgtcgcccgtcattgacaagatttacgtggatgcttaccagccgtttagcgagcagaaaatttctatgcaggaagcgctggataaaggcgcgcaaccgttacgcgcgttcatgttgcgccaaacccgcgaagccgatctggcgctgtttgcccgtctggccaatagcggtccgttacagggaccggaagcagtaccgatgcgtatcctcctgcccgcttatgtcaccagcgaattaaagacggcgtttcagatcggttttacgatttttatcccttttttgattatcgacctggtgatcgccagcgtattgatggcgttagggatgatgatggtgccgccagcgacaatcgccctaccgtttaagctgatgctgtttgtgctggtcgatggttggcaattgcttgtggggtcgctggcccaaagcttttacagttag

SEQ ID NO: 370510 - DNA, 270 bp, Salmonella enterica
atgactcctgaatccgtcatgatgatgggcaccgaggcgatgaaagtcgctctcgccctggctgcgccgctgttactcgtcgcgctgattaccggcctcattatcagcatcttgcaggccgcgactcagattaatgaaatgacgctgtcgtttatccctaaaatcgtcgcggtattcatcgcaattatcgttgccggcccgtggatgctcaacctgctgctggactacgtacgcactctgttcagcaatttaccttatatcatcggataa

SEQ ID NO: 370511 - DNA, 795 bp, Salmonella enterica
atgatacaggttacaagcgagcaatggctatactggctgcatctctatttctggcctttgctgcgcgtactggcgctgatttcaacggcacccattctcagcgagcgcgctattcccaagcgggtaaaactggggttgggaataatgattaccctcgttatcgcgccgtcgctaccggcaaacgatacgccgcttttttctattgccgccttatggctggcgatgcaacaaattctgatcggtattgcgctgggatttaccatgcaatttgcctttgcggcggtgcgtaccgcaggtgagtttatcggtctgcaaatggggctttcctttgccaccttcgtcgacccgggcagccacctgaatatgccggttctggcgcgtattatggatatgctcgccatgctactgtttctcacctttaatggccatttgtggcttatttcgctgctggtcgataccttccacactctgcccatcggtagtaacccggtgaacagtaatgcatttatggcgctcgccagggccggagggctcattttcttaaacggactgatgctggcattgccggtcattaccctcctgcttacgctcaacctggcgctggggctattaaaccgcatggcgccgcagctctcgatatttgttatcggtttcccgcttaccctcaccgtcggcattatgctgatggccgcgctaatgccattaattgcgccgttttgcgaacatttattcagcgaaattttcaatttgcttgctgatattgttagcgagatgccgataaataataacccataa

SEQ ID NO: 370512 - DNA, 624 bp, Salmonella enterica
atgtcaacgattattatggatttatgcagttacacccggctagggttaagcgggtatctggtcagcagaggggtgaaaaaaagggaaatcaacgacatcgaaaccgttgacgaactcgctatcgcttgtggcgcgcatcagccttcggtggtgtttattaatgaggactgtttcattcatacgccttcagacagtcaacaaataaagcaaatcattaatcaacatcctgacacgttatttattgtttttatggcaattgctaatgtgcattttgatgaatatttattagtaagaaaaaacttattgattagctcgaaatcgattaaacctgactcgctggataccattcttggcgatattctgaaaaaagagtcgggtatttcaggaaccataaatttaccaacattgtcgttaagtcgaactgaatccagcatgttgcgaatgtggatggaaggtcagggaaccattcagatttctgacagaatgaatattaaagcaaaaacagtatcctcccataaggggaatataaaaagaaagataaaaacgcataataaacaagtgatctatcacgtagtgcggctgacagataacgtcactaacggcatttttgttaacatgcgctga

SEQ ID NO: 370513 - DNA, 195 bp, Salmonella enterica
atgaaggtgaatgatcgggtaaccgttaaaacggacggcggtccccgccgaccgggcgtggtactggcagtggaagaatttagtgaaggcacaatgtacctggtttcgctggaggattacccgcttggcatctggttcttcaatgagtcaggtcaccaggatggtatttttgtcgagaaggcggagcaggactaa

SEQ ID NO: 370514 - DNA, 228 bp, Salmonella enterica
atgaaaacggcaaaagagtacagtgatacggccaagcgcgaagtgagcgtcgatgtagatgcgctactggcggccatcaatgaaatcagcgaaagcgaggttcaccgtagccaggaagatcctgagcgggtgagcgtagacggacgggaatatcatacatggcatgaattagctgaagcattcgagctggatattcatgattttagtgtaacagaagtaaaccgttaa

SEQ ID NO: 370515 - DNA, 816 bp, Salmonella enterica
atgctctcaatccatgaccccttgctgatttttaccgatctggacggcacattgctgaacagccacacgtttgagtggcagcccgcggctccctggcttacacgcctgcatgaaagcggcgtgcccgtgatcctctgtagcagtaaaaccgcggctgaaatgctccagctccagacgacgttaaatctacagggactgccgctgattgcggaaaacggcgcggtgatccaactggacgttcattgggaagaccatcccaactatccccgcctgatagccggtatttctcacaacgaaatccgcctcgtcctgcataaattgcgtgaaaaggaacagtttaagttcaccacgtttgatgacgttgacgatcaggtgataagcgaatggacgggcctaaaccgggcacagtctgccctaacccgtctgcatgaagcgtcggtgtcgctgatctggcgcgatagcgatgaacgcatggcgcagtttgtcgcccatttaaatgacctgggactgcaatttgtccatggcgcccgtttctggcatgtgctggacgcctccgccggtaaagatcaggctgccaactggctgattgaagcatatcgtcggcagtggcgcgcgcgtcctctgacgttgggactaggagacggccccaatgatgcgcctttactggatgtgatggattatgcggttgtcgtcaaagggctaaaccgggagggcgtacatttgcgtaacgacgatcctcagcgcgtctaccgtagccagaacgaagggccggatggctggcgcgaaggaatggactatttcttttcccgctcctga

SEQ ID NO: 370516 - DNA, 1713 bp, Salmonella enterica
gtgccgcacgaaacactgttagacaatcaaggctggtttaaaaagctggcgcggcgttttggtcccggtcatgtcgtcaacacctgttttctgatcgtgatgctgttctcgacgctacttacctggcgggaagtgatgatactgaaagacgcgtatgtcgccagtcagcgcaatcatctggggagcgtcgcgaatgtccttgaccgccaactgcaattcaacatggacaggttgatctttttacgcaacggtatgcatgaagcgctggtggcgccgctggctttttccgcattgcaaagcgcggtgacgcagtttgagcaacgacgcgtcagacatttctggcaactggagctggataagcggcggacattgccgttgtatggcgtttccgatcaatttgtcgcccggacgacgcttctttcgcgggagagtcgtgacctggcaaatgaattaaccgccacgctggagttagggtatctggcgcgtctggcgcgctcatccgccatgctgacgctggagacgatgtatgtttctcgctcagggttttacctctcaactctccctacggcgtacggtagcgatattgtctcccgttactatcagtacgtgactcagccctggtttatcgagcaaagccaacggcgtaacccacagcgcggcgtgcggtggtttacctccgcacagccctatgttgctgacgagcagaaaaaagtgacagccagtctaccgctggatcacgataattactggtatggcgtactggcaatggatattcccgtcgcgtcattacagcggttcctgcgcgatgcggccgaaaaggatattgaaggggaatatcagctatacgataaccatctccgtttgttgacggactccgcgccggaacaacaaaccgcgaatacgttaaatgaccgtgagcgcgccttactggcgcgtgaaatagaaaaagataccctgggcgggctgcgtttaggaacgcattatgtaagctgggagcggctggatcattttgatggcatcctgctgcgcgtgcatacattacgtgaaggcatacaagggaattttggcagcattagtatcgcgctgacgctgttatgggtgctttttacggcgatgctgttgatctcctggggcgttattcgacatatggtcaaaaacatgtttgttctgcaaaattcgctgcaatggcaggcatggcacgatccgctgacccggctatataaccgtggcgcgctgtttgaaaaagcgtccaggctggcaaagcgctaccgggaagcccgccagccattttctgtgatacagctggatttagattattttaaaagcgttaacgatcgctttggtcatcaggcaggcgatcgcgtgttgtcccatgccgctgggctcattggcagcaccattcgagcgcacgacatcgccggacgggtagggggcgaagagttttgtatcgtgctgcccggcgcgacgaaagcgcaggcgctgcagattgccgaacgcatacgccagcgcattaatgacaaagagattctggtgacgaaaagcacgacgcttcgtatcagcgcgtcaatggggatcagtagcgcggaggaatacggcgactatgattttgagcagttgcagtcgctggccgacaaacggctttattacgccaaacagtccggacgtaaccgtatttgcgccagcgacgcgactcaggagcgggaaaagaaatag

SEQ ID NO: 370517 - DNA, 186 bp, Salmonella enterica
atggtcttttctgtcagtgaggaagttaccgtgaaagagggtgggccccggatgatcgtcaccggttattccagcggaatggtagagtgtcgctggtatgatggttttggcgtaaagcgggaggcattccatgagaatgagctcgtgccaggcaaggaaaggcgcgggcgggacgaagcccgatga

SEQ ID NO: 370518 - DNA, 912 bp, Salmonella enterica
ttggcaggaagtagcttactgacattactcgacgatatcgccacgctgctggacgatatttcggtaatgggcaaattggccgcgaaaaaaaccgcgggcgtactgggggacgacctgtcgctcaatgcgcagcaggtgaccggcgttcgcgctaatcgcgagctaccagtggtatggagcgtggcgaaaggatcattaatcaacaaggttattctggtgccgttggcgctgctgataagcgcatttatcccgtgggccatcacgcctttattaatgttaggcggcgcgtttctctgctttgaaggggtagaaaaagtcctgcatacctttgaggcgcgaaaacacaaagaagacccggcggagcggcaaaaacgtcttgaagcgctggctgcgcaagatcctttggcctttgaaaaagataaagtaaaaggggcggtccgtaccgatttcattctttccgctgaaattgtggccattaccctggggattgtcgcgcaggcgccgctgcttaatcaggtgttggtgctggcggggattgcgttggttgtgaccattggcgtgtatggcctggtgggtattattgtcaaactggatgatatggggtactggctggcggaaaagcgtagcgtgctggcgcagggcgtcggtaaaggattactgattatcgcgccctggttaatgaaagcattatccattgttggtacgctggctatgtttctggtcggcggcgggattgtcgtacacggtattgcgccgctacaccatgccattgaacattttgcgcagcagcagggggctttcatggcgcatacgatccctgcggggctgaatctggtgctcggctttattatcggcgccattgtggtggcgctggtgaaaggtgtggcgaaaattcgcggtgtttcgcactga

SEQ ID NO: 370519 - DNA, 921 bp, Salmonella enterica
atgcgtttccggcagttattacctctttttggcgcgctttttgccttgtatatcatttgggggtctacctattttgttatccgcataggcgttgaaagctggccgccgctgatgatggcaggcgtacgttttctctcggcggggatgttgctcatggcgtttttgctgctgcgcggcgaaaaacttccgccgctgcgccagaccatcaacgccgcgctgattggtctactgctgctggcggtgggtaacggtctggtgacggtggcggagcatcaaaacgtgccatcgggcattgctgccgtcgtggtcgccactgtcccgctatttacgctgtgctttagctacttttttggtattaaagcgcgcaaattagaatgggtggggattgccattggacttgccgggattattctgctgaacagcggcggcaatttaagcggcaatccgtggggcgcgattttgatcctgataggttcgatgagctgggcatttggttccgtttacggctcgcgcatcgccctccctgtgggcatgatggcgggtgcgattgaaatgctggcggcgggcgtggtattgctttgcgcggcgtttctttccggcgaaaagctcgccacgctgcctggcttatcggggtttatggccgtcggctacctggcgttgttcggttctattatcgccattaatgcctatatgtacctgattcgcaacgtcagtccggcgctggcgaccagctacgcctatgtgaatccggttgtcgccgtgttgcttggcactggcctgggcggcgagaggttatcgcccgttgaatgggccgcgctgggtgtgattgtgtttgccgtagtgctggtgactctgggtaagtacctgtttcccgccagggcggtggtcacgccgtgtaaaacggaagattcacgccagtag

SEQ ID NO: 370520 - DNA, 471 bp, Salmonella enterica
atggcggacgttcacgataaagccacgcgcagtaaaaatatgcgcgcgatagcgacccgcgatacggctattgaaaaacgtcttgctggcctgttaagcgcgcaggggattacgtttcatactcaggacgcgacattaccgggcaagccggactttgtggtgaatgattatgattgtgtgatttttactcacggctgcttttggcatcatcaccactgttatctgttcaaagtgccggccacgcgaacggctttctggctggaaaaaatcggtaagaacgttgagcgcgatgagcgcgatattcagcgtttacaggcgcttggctggcgggtactgatcgtctgggagtgcgccttgcgcgggcgagcgaaattgagcgacgcggcgttggcggagcgcctggaagagtggatctgcggcggcggcgccagcgcgcagatcgacacccaggggattcatctactggcgtga

SEQ ID NO: 370521 - DNA, 1431 bp, Salmonella enterica
atgcaggaaaatatttcagtaacacacgcccggaacctcatcgccgacgacgccggaagcgagatccaggcgatgctgagtcaattgctggaaatctacgatgttaaaacgctggtggcgcaccttaacggcctgggcgaacagcactggagcccggccatcttaaagcgcgtaatgatgaacgcggcatggcatcgtttgagcgacaatgaactcacctgtcttaaaacagggttgccgacgccgccagcgcatcatccgcattacgcctttcgttttatcgatctcttcgcgggcatcggcggcattcgccgcggatttgaagcgataggcggacagtgcgtgtttaccagcgaatggaataagcacgcggtacggacatataaagcgaactatttttgcgatccgctgcaacatcgctttaatgaagatatccgcgatatcacgttgagccaccgggaaggggtcagcgatgatgaggcggcggaacacattcgccagcatattccgcaacatgatgtcctgctggcgggctttccctgtcagccattttctctggcgggcgtttccaagaaaaatgcgctgggccgcgcccacggctttgcctgcgagactcaggggacgttattttttgatgtcgtaagaattatcgacgctcgccgccccgcgctgtttgtgctggaaaacgtgaaaaaccttaaaagtcacgaccagggcaacactttccgcattattatgcaaacgctcgatgaactgggatatgacgtggcggatgccgctgacaatggcccggacgatccgaaaattatcgacgggcagcactttcttcctcagcatcgggaacgtattgtgttggtgggattccgtcgcgatttaaacctgaaaaccgattttacgttacgcaatatcgcccgttgttatccaccgcgccgtccgacgctggcagaactgctggagcccgtcgtcgaagccaaatatatcctgacgccggtgctgtggaaatatttatatcgctacgcgaaaaagcaccaggcgcggggaaacggttttggctatggcatggtttatcctgacaatccggaaagtgtggcgcgcacgttatctgctcgctactacaaagatggtgccgaaattctgatcgatcgtggttgggatatggcgaaaggcgaagtgaatttcgacgatgctggcaaccaacaacatcgtccccgccgactcacgccgagagagtgcgcgcgtttaatgggatttgaggcgccgcaaacgtaccagttcaggatacctgtctcggatacgcaggcctatcgccagtttggcaactccgtggtggtgccggtatttgctgcggtagcaaagctgttggaacccaaaattcaccaggcggtgacgttgcgtcagagagagacggtagatggcggacgttcacgataa

SEQ ID NO: 370522 - DNA, 696 bp, Salmonella enterica
atggactcaggatattggcaatcgcagtttgaagactggctacgtcaccaccaccaggaacaggatgccgcccatgacatcttccattttagtcgtgtttgggcaaccgcgcaaacgctcggggaaaacagtcctgtcgactggctggtggtgctatcggcatgttatttccatgacatcgtcagcctggcgaaaaatcatccgcagcggcatcgttcttccattctggcggcggcagaaacccggcgtatttttctgcgggattttcctgactttccggcagaaaaactggcgggcatttgtcatgctatcgaagcgcatagcttcagcgcaaaaattgcgcctaccacgccagaggcaaaaatcgtgcaggatgcagacaggctggaggcgttgggcgccattggtctggcgcgggtcttcgcggtctccggcgcgctgggcgtcgcgctgtttgatgccgacgatccctttgccgacagacggcctcttaacgataagcaattcgcgctcgaccattttcaaaccaaactgctgaaactgccgctgacgatgcagaccgaacggggcaagtacctggcgcagcgtaatgcggattttctggtgtcgtacatggcgaaattgagcgctgagctgaaaggcgactatgaaacacgggatgaggcggtcatccagatgtttgctacgcatcagtaa

SEQ ID NO: 370523 - DNA, 312 bp, Salmonella enterica
ttgagtaccagggaggacaacgccacccgtagcatgggcggtaaattagcgttatgggttttttataccttttgcggctacttcatctgggcgatggcgcgttgcgtgtggctgatgtccgccatacaaaccgagccggttctcggcccaatcagcactcctggcagcgcaacggaaaaatggcttaacgcgctttcgctgggcgtcgtctggcttattctggggagtattgcctggtacacccggcctcgcaaaaacagggggtatcccgccgacactcagccagaaacgcgcaagcacgcaaggatgtaa

SEQ ID NO: 370524 - DNA, 1197 bp, Salmonella enterica
atgaacagaaaagttctggcactgcttgtcccggcgttattagtggcaggcgcagcaaatgcggctgaaatctataataaaaatggcaacaaactcgacctgtacggcaaagttgatggtctgcgttacttctctgacaatgcaggcgacgatggcgaccagtcctacgcccgtattggctttaaaggcgaaacgcagatcaacgatatgctgaccggctatggtcagtgggaatacaacattaaggtgaacaccaccgaaggcgaaggtgcaaactcctggactcgtctgggctttgccggtctgaaattcggcgagtacggctctttcgattatggccgtaactatggtgttatctacgacattgaagcctggaccgatgcgctgccggaattcggcggtgatacttatacccagaccgatgtctatatgctgggcagaaccaacggcgttgccacctaccgtaataccgacttcttcggtctggtggaaggcctgaacttcgcgttgcagtaccagggcaataacgaagatcctggcgcaggcgaaggaacaaccaacggcagcgatgcaggtagtggttctcgcaaactggcccgtgaaaacggcgacggtttcggtatgtctacctcctacgactttgacttcgggttaagcctgggtgcggcctactcttcctctgaccgtacggacaatcaggttactcgtgggtatggtgatggccatcattactatgccaatagctatgccggcggtgaaactgccgaagcctggaccgtaggtgccaaatatgacgcctacaatgtttacctggcggcgatgtacgctgaaacccgcaacatgacctattatggcggcggcgatggcggtaatggcggtatcgctaacaaaacccagaactttgaagtggttgcgcagtatcagttcgatttcggtctgcgtccgtccatcgcctacttgcagtctaagggcaaagatttaggcggccaggataaagatagccgtggtaactatcgttacaccgacaaagatctggttaaatatgttgacgttggtatgacttactacttcaacaaaaatatgtccacctacgttgattataaaatcaacctgctggacgaagatgatgacttctacgcaaacaacggtattgcaaccgatgatatcgtaggtgttggtctggtctaccagttctaa

SEQ ID NO: 370525 - DNA, 213 bp, Salmonella enterica
atgacgacgaaaatcactggtttagtaaaatggtttaaccctgaaaagggctttggtttcattacgcctaaagatggcagcaaagatgtgtttgtgcatttttccgccattcaaagtaatgaattccgcactctgaatgaaaatcaggaagtggagttttcagtagaacagggaccaaaaggtccatcagcggtcaacgttgtggcgctttaa

SEQ ID NO: 370526 - DNA, 378 bp, Salmonella enterica
atgagcaatagctggagggtgaaaactgaaggtgattacatctctccacccagtcatataatggatacaccattactgggctatgaatatgttatgctgcaacgattactggcgcattcactgaatctaccgctaccagagagcgggcagtgtaatatctattgtggcgttcttgtcagtgatggaagtaatatttttcagatttttgaatatcagtctctggagcaaaggatttttcagcagttacaattaattccggtagataaagcaagcctttgccatgacgaaatcaataaaatacagttcgacagaacaaagaaagattactttcctgtctatcattttccaggagatgcctgtttcgttgtaaaaatgtag

SEQ ID NO: 370527 - DNA, 279 bp, Salmonella enterica
atgagttcggttccttatcacagtaacaattctgtcatgccggtccgggtaacgatttatgaagccgttaatattataaaaaagcaagctaatgaagagattacagccagtgaaatatggcgttatgcgctctatgggcaccctacgctatccatctattttcagtctccggtgatctttcggcggattaaaaccagaaaaaataaaatatttttaatgaagggaaaggatgatccagttaatcgactctgttacctgaacagtgatatcattttatga

SEQ ID NO: 370528 - DNA, 780 bp, Salmonella enterica
atgaaaatctgttcaatgatttatttatgcacaacaatatttttattgagcgcctgtgtgcgttcccccattgacgcaaagaaaaaggacgtccccagaacggaaagtagtatcagtaaaaatatggccagtcagttaacagataaagatatctttggtaacgagaccacacttgccgtttcagaagaagatatccaggccgcactggaaggtgagaaattcagcgtaccgctgaattctgccgtcattctggttcagtctggtaatcgcgcaccggaagctattatgcagcaggaaatgagcaagtattatactgttgcgacgttctctggcatcccggacagacaaaagactgtgacctgcagtaaagacaaaattaaagacggaaatcaggacattgctactgccgaaaatatgaactggatgcaggcgctgcgctatgttgccgcgaaaggacatcagaaagccattatcgtttatcaggatacgttgcagtctggcaaatatgacgccatgacaaaaaacaccgtctggtcagattttaaaaatgaaaaactgaccgacagcgtatcgttgcgttatctggtgcgtttcaccttagtgaacgtggctacgggcgaatgggccacctggtcgccactcaactatgagaatacagtacttccaccacagccggggaaaaaagattccgcagaggcaactacagaacagcagatttcgcagctcaggcaaagaacctatgcgtcaatggtgaaagatctggtgaaccgctaccagtaa

SEQ ID NO: 370529 - DNA, 366 bp, Salmonella enterica
atgacggcacagcttgcctgcgatgcgttacagatggcgctgtggcggcgtaaatgtccggaaaatgtcatcgtgcatacagacagaggcggtcagtactgttctacggattaccagagcttactgaaacgccataatctgcggggaagtatgagcgccagaggttgttgttacgacaatgcctgtgcggaaagcttcttccatacgctgaaggtggaatgtatccacggagaggactttgtcagccgggaaataatgcggacagcagtgtttaattatattgagtgtgattacaatcggtggcgtcgtcacagtgcctgtggcggtctcagtccggaacaatttgaaaaccagaacctcgcttag

SEQ ID NO: 370530 - DNA, 582 bp, Salmonella enterica
atgacttttaaaatgagcgaacaggcgcagacaattaaaattttcaatctgcgttcagatactaacgaatttattggtgcaggtgatgcgtatattccgccgcacacaggactaccggcaaactgtactgatatcgcccctcctgatattcccgccagtcatattgctatatttgacgctgaaacccagacatggagtttgcatgaggatcaccgcggcgagatggtttacgacacaacaaccggcaatcaggtttatatctccgctcctggtccgttgcccgaaaatgtcacatcagtttcaccaggtggtgaataccagaaatgggatggtaaggctaaggtctgggtaaaagacgaagcggctgaaaaagcagcgcagcttcgtcaggcggaagaaaccaaaagccgtcttttgcaaatggcatctgaaaaaatcgcgccattgcaggatgcagttgatcttggaatcgcaacagatgatgagaaagcgcggctcgacgaatggaaaaaatatagggtgctggtaaaccggatggatacagccgcccctgactggccggaaagaccagccagccagtag

SEQ ID NO: 370531 - DNA, 1710 bp, Salmonella enterica
atgattattggattcggaaataatgtcgtctcctcactggcggctgatattaccgccagccagacgaccattcaggtgatgcctggtgtgggagcgatgtttgctaatttgctgaccagcgattatgcaaacagctcaaaccctcttaaaacttacgccaaaattacactgacagacgcaaaagaaacagtttttgaggtatgccatctgacagcagttaataatgacatgctgacggttattcgcggtcaggaaggtacaacagcgaagggatggtcactgaatgacgttatagcgaattttgcgacgcgaggatctgaaaatcagtttgtacaaattgaagagctccagagtgggcattatgtcgctggtgtggccggaggtacagaaaataatctgacgctggagttaccagcaacttatttcgtcaatggtggagttgactggacattgcgcactccacttgtggttattccggcgctaaacaataccggagccagcactctgcaactgacgatgggaggacgtgtgcttggcatattcccactatacaaggggaataaagcagagttatcggccaatgatattattaaagatattcctgtcttatgcgttctggataatacaaaaacctatttttctgtgcttaatcccctggagatttatttgggatcacggtatttgcagaaggaccagaacctgtccgacgtaccggataaggccaaaggtcgctccagtcttgaggtctacagcaaaaccgaaagtgatgaaaactacatggctaaaagccagtgtggtgcggatatcccgaataagccgctgtttgtacaaaatatcggagcgctccctgcatcaggtacggctgttgcagcgaacagactggcatcacgcggcgcgcttccggcactgactggtacgacaagaggcagcgatagtggcctgataatgggcgaggtttacaacaatggctatccgacgcaatacggaaatattttacgtctgaccggaaccggtgatggggaaatcctcattggctggagcgggacaaatggtgcgccagcgcccgcatatattcgcagccatcgagataccgccgatgctgagtggtccgaatgggcaatgctttacaccacactaaacccacctccggattcgcatccagtaggggcggcgattgcatggccatctgatgctactccggcaggttacgctctgatgcaggggcagtccttcgataaatctgcttacccgttactggctatagcgtatccgtccggcgttatccctgacatgagaggctggacaataaagggtaagcccatcagtggacgtgccgtattgtcgcaagaaatggacggcaataaatcgcactcgcacaccgcgcgggcgcaggttactgacttagggacaaaatctacctcatcctttgattacggcacgaaatcgaccaataccacgggcaatcatactcaccagttcggcggttatatcaattcatactggggagattccaatcacacctcatttcagccaggaggtggtgcatggacacaggccgctggcgaccatgcacatacagtttatatcggaggacatgagcacaccatgtatataggtccacacggacacgtcgttattgtggacgcagacggtaatgcggaaaccacggttaaaaacattgcatttaactacatagtgaggctggcataa

SEQ ID NO: 370532 - DNA, 627 bp, Salmonella enterica
atggcagctcttcttgaaagcattattccggcctacccctatacgcaatataatgacgatccggatatagttgccttttttgatgcttataacaaactggcacaggggtatcttgattactttaacaacctgaatttaccttgctggacctccccggcgattaccggtgagttgctggactggattgcggcgggtatttatggggaatcacgccccttgcttcaaatctccgaggatgccattgctcgtggggcgtataacactattgagtacaataatgtcgcgtatgcaaaactgagaaattatgttcccggctcagcgtcatatgttccggacgactattttaaacggatactgacatggaatttttataaaggcgatggttcgcacttctgtatcaactggttcaaacgacggcttgcacgctttatacatggagctaacggaatagacccacctgtacagtccacttttgatattagtgtaatgcccgataagggcattttttttgtctccattcctgactatggcgatggtgtcggacactttcttaaagatgcaattgaccagtcgctggtgaaactcccttttatttatacctattcggtaacggtggttgagcaatga

SEQ ID NO: 370533 - DNA, 630 bp, Salmonella enterica
atgtacggtgtacagggaacgcctgactgttaccggattgaactgaaaaatgtttatggtgtacaggagaatctgatctcataccgacaggcatcgctgggggcatgggtagcgattgctggtggcggcgatccttatgaagtggcttacgctatctataaagccgtgccagatatctccgtactgacgaatgatgtagtgaatccatcaggcgctgcggtggataaaaaaacgataccgatcattgtgtatccggatacgtatcacgtgccgtttgtagtgccatcatcacaaaacgttacgcttttaatcacctggaatacagcctcaaccagctatatcgatccaaccgggattgaaaaagcagtgcagcaaagcattgctgattacattaacggaattgcaacgggtgaaccaataaacattttcctgattcgggatatttttcttaatcaggttaaggggcttgtatcttcaaaccttgtatcaatgattgatattcaggttggaataaacggaaaaattgtcccacctgcaaccgactccagcctggtttatggtgatacttacgcctatttttccacttcatcttcacaaattcaggttaagcaatatggcagctcttcttga

SEQ ID NO: 370534 - DNA, 411 bp, Salmonella enterica
atggaaaacacaaatattgttaccactgagcagcaggcaccaaacaccatttctgccagtaacgcaatttttaacgttcaggcactgggtcagttaacagctttcgctaacctgatggcagactcacaggtgacggtaccggcacaccttgcagggaaaccagccgactgtatggctatcgtcatgcaggctatgcaatggggcatgaacccttatgcatgctggtcattatcagctggtgctaacccaaactttatagcaacgcagatggggcataccgatgcacagatggtttacaaggtgtatggaaagtggatgtcagagaagagcgcagaacaggtttctctgctcaaccaggcactttcccgctatgccccatcactgccccaaagcatggtagcagcgcagtag

SEQ ID NO: 370535 - DNA, 1203 bp, Salmonella enterica
atgacacaattcgcttctcctgttctgcactcgttgctggatacagatgcttataagttgcatatgcagcaagccgtttttcaccactactatgatgtgcaggtagcggctgagtttcgttgccgtggcgacgacctgctgggtatttatgccgatgctattcgcgagcaggtggacgcgatgcagcacctgcgcctccaggaggacgagttccagtggctctccggcctgcccttttttaaaccggattatctgaactggttacgcgagtttcgctataacccagctcaagtctgtgtcaccaacgataacggcaagctgaatattcgcttaaccggcccgtggcgtgaagtcattatgtgggaagtgccgctgctggccgtgatcagtgagctggttcatcactaccgctcgccaaacgcgggcgttgatcaggcgctcgacgcgctggaaagtaagctggttgatttcactgcgttaaccgccaatctcgatatgtcccgcttccacctgatggacttcggcacccgccgccgtttctctcgtgaagtgcagcaggcgatagttaaacgtctccagcaggagtcatggttcgtcggcaccagcaactatgatctcgcgcgtcgcctggcgctgacgccgatgggcactcaggcgcacgaatggttccaggcgcatcaacaaatcagtccggacctggcgaccagccagcgtgccgcgttggccgcctggcttaacgaatatccggaccagcttggtatcgccttgacagattgcattacaatggatgcgtttttacgcgatttcggcattgaattcgccagccgttatcaggggttacgccacgactcaggagaccctgtcgcatggggcgaaaaggcgattgcccattatgaaaagctggggattgatccgctgacaaaaacgctggtcttttcagataaccttgatctgccaaaggcggtcgagctctatcgccatttcgcctctcgcgtgcagttaagcttcggcatcggtacccgcctgacctgcgatatccctcaggtaaaaccgctcaatatcgtgattaagctcgtggaatgtaacggaaagccggtggctaaactttccgacagccccggtaaaacgatctgtcatgataaagcgtttgtgcgcgcgctgcgtaaagcgttcgatctcccgcaggtgcgtaaagcaagttaa

SEQ ID NO: 370536 - DNA, 1437 bp, Salmonella enterica
atgttagagcaactttcacaactctttgaatttctatggggtggcccattatttttgtgtgttatcggcattggcttttatttcacagtacgcctcaaatttttccagattatcaatttaaaagaaatttaccgtaatacaattggtacacttgccggaaaaaataaacaaaacactactggcgaggcagcgtctaaaaaatccttaaaatcaatagaggtggctgccactgtgctatccggctcattaggcgcgggaacgatcgcaggtgttgctgcggctattgcggttggcggacctggggcaattttctggatgtggatcattgcggtcgtgggtatgatgaccaaaatggttgaagtgacgctggcggtgaaataccgaagtaaaggtgagaatggcgaatattatggcggcccaatgcattatattaagaaagggctcaataaaaaatggcatcccctggcaggattatatgcgtttgcattaatgattctggttattacggatgcctgttttgtgcaaactaatacgatggcggcggtcattcactatacgtttgaaatcccaacaagcgtcatcgggggatttattgtcatcgtaggcgcgttggttattttaaaaggactctccagtcttggtaaattctgtacgattgcacttccaccgatcaccattgcctatttcattggtgccgctggtgtagtggtattgaatatcgaggctatcccacaggttataaaaagtattttctattatgcctttgcccctgcgccagcagtcggtggctttgtcgggtcaaccatcatgatggccatcagtaaaggagccagtcgcggaatattcactaacgaagccggcatgggtacctcggccacagtacatgctactgccaacgtggattatgctttccgtcagggaatgtggggggcagtggaagtattttttgtctcaatgattacctgtaactttaccgcatttgctgtacttgcttctggtatgtggacagacgccagttatcaaggtattcagattatctttgccgccttaaaagaaacatggcatccgattattgttcaggttctctgtctcggtgtggcgttgattctgtttacttcttatcttggttcatatattaaatttcgcacttcgataaactatatctttggcgataagctagaacgcatcattaaatggctatattttttgccgccactgattgccgttaatatggaaatcccggtaatctggttaatggctgatattgctgtcggttttctggttatccccaacgtaattgctctgttcttgctgcgtaaagaatttattagcgaattcaatttattcagaacgcgtacacagcgggacactcattctgaaaaaacaacgcaaattacgcacgtaaatatgtcgaagagtgaagggaaagaggagtaa

SEQ ID NO: 370537 - DNA, 1215 bp, Salmonella enterica
atgcatgagcttattaaataccagtttaatacacgtcggaaaaaatatggtacaggagcggctttaagtttgcttaacggaaatgttgggcgtgaggtgttagcatttcataaaaaattacccaattatgccgttacgccgttacataatctggcgcatctaagccggcggcttggactagggtccatccatattaaagatgagtcctggcgttttggtctgaatgcttttaaaggtctgggcggctcttatgctgtaggaaaatatctcgctgataaattgcaatgtgatattaactcgttaagttttgctgcccttaacactcctgagattaaagaaaaaattaaggattgtgtttttgttaccgcgacggatggcaatcatggccgtggtgtggcgtgggcggcggagcaattaggtctaaaagccgtcgtttatatgcctaaaggatcatcgttaatccgggcagagaatattcgccatcatggagctgaatgcaccatcaccgatctgaactacgatgatgcagtgcgactggcccatagaatggcgcaaacaaaaggctgggtgcttttgcaggatacagcttggacagggtatgaagagatcccaacgtggattatgcaaggctatatgacactagcggttgaagcttatgatcagctcgcagaaacaaacagtccgttgccaacccaccttattttacaagcgggggtgggatcatttgctggcagtgttatgggttattttgttgaaaaaatgcaggaaagtatccctaatattattgtggttgagccgcatcaggccaactgtctttatcaatccgcagttatgaatgatggtcaacctcactgcgtcactggcgatatggcgacgataatggccgggcttgcgtgtggggagccgaatattatcagttggcctattattcgggacaacaccagttgttttatttccgctgatgattgtctggcggctaagggtatgcgcatttctgccgcgccgcgtccaggtacggatacgccttttatttccggcgagtccggagctattggcgtagggttgctttatgagttgatgaacaatatgcattatcaggatcttgctaatcgcttacagcttgatgccaatgctcatgttctgcttattagcaccgaaggcgatacgtccccagatatttatgaagatatagtctggaacggacgcagtgcttaa

SEQ ID NO: 370538 - DNA, 462 bp, Salmonella enterica
atgaagcttgacgcctgggataaaaacattctgacattattgcagcgcgataatcgtctttctcagcgggaaatcgccgaacaggtcaatctttcaccttcggcagtgaatcgtcgtatcgcggcactggaggaggcgggcataattaaaggcaatgtcagccttattgatgctggcaaagtgggacgcccggtcacgattgtggtgcaggtggtgatcgaaaacgagcgattcaatttactggaagaggctcgtcaacggtttgtcagttgcccgcaggtgcagcaggtctactacgtaacgggcgatttcgactttttactggtgctcaatgttcgtgacatggcggaatatgaagcgcttacccgtgagcttttcttttcctcaggcaatattaagtcttttaaaacgattgtcgtgatgcaaaacgccaagcaagagatgcgcgtcctgatcgagtaa

SEQ ID NO: 370539 - DNA, 1401 bp, Salmonella enterica
atgagcgttgtgcctgtagccgacgtactccagggccgcgtagccgttgaccaagaagtcaccgtgcgcggatgggtgcgtacccgccgagattcaaaagctggcatctccttcctcgccgtttatgacggctcctgctttgatcctgtacaggctgtcattaataattctctgcccaattataatgaagaagtattacacctgacgacaggctgctccgtggtagtaacaggtaaggttgtcgcgtcgccgggacaggggcaaagtttcgaaatccaggctacgaaagtagaggtcgcaggctgggtggaagatccggatacctacccgatggcggcaaaacgccatagcattgagtatctgcgtgaggtcgcgcatctgcgcccgcgcaccaacctgattggcgcggtagcgcgcgttcgccatactctggcgcaggcgctgcatcgcttcttcgatgagcagggtttcttttgggtctccaccccgctgattaccgcttccgataccgaaggcgctggcgaaatgttccgcgtctcaacgttggatctggaaaacctgccgcgtaacgaccagggcagagtagattttgacaaagacttttttggcaaagaatcattcctgaccgtctccggccagctcaacggtgaaacgtatgcctgtgcgctgtccaaaatctatacttttgggccgaccttccgcgcggaaaattccaacaccagccgccacctggcggagttctggatgctggagccggaagtggcgttcgccgatctggaagacaacgcccgtctggcggaagccatgctgaaatatgtcttcaaggcggttctggaagagcgtgcggatgatatgaagttctttgccgaacgcgtagataaagacgctatcgctcgtctggagcgttttgtctctaccgacttcgctcaggtggattacaccgatgcggtcgccattctggaacgctgtggtaagacatttgaaaacccggtgttctggggcgtcgacctctcttccgaacacgaacgttatctggcggaagagcatttcaaagcgccggtagtggtgaaaaactatccgaaggaaattaaagcattttacatgcgccttaacgaagatggcaaaaccgtggcggccatggatgtgctggcgccgggaatcggcgaaatcatcggtggttcccagcgtgaagagcgtctggatgtgctggatgcccgtatggccgaaatggggctgaataaagaggattactggtggtatcgcgacttgcgtcgctacggtactgtaccgcattccggctttggcctgggctttgaacgccttatcgcttacgtcacgggtgtgcaaaacgtgcgcgatgttattccgttcccacggaccccacgcaacgccagcttctga

SEQ ID NO: 370540 - DNA, 1092 bp, Salmonella enterica
atgatgaagcgcaaaatcctggcagcggtgatccctgccctgctggctgctgcaaccgcaaacgcagcagaaatttataataaagatggtaataagctggatctgtacggtaaagccgtgggtcgtcacgtatggacaacgaccggcgatagcaaaaatgccgaccagacttatgcccagattggttttaaaggggaaacgcagattaacaccgatctgaccggtttcggtcagtgggaataccgtactaaagcagaccgcgctgaaggcgaacagcagaactcgaatctggtccgtctggccttcgcgggtttgaaatacgcggaagtgggttcaatcgattatggtcgtaactacggtatcgtttacgatgttgaatcctataccgatatggccccctacttctccggcgaaacctggggcggcgcctatactgataactacatgaccagccgtgctggcggtttgttgacctaccgtaactctgacttctttggtctggtggacggtctctctttcggtatccagtatcagggtaaaaatcaggacaaccacagcattaactctcagaatggcgatggcgtaggttacaccatggcatatgagttcgacggctttggcgtcaccgcagcgtacagcaacagcaagcgtactaacgatcagcaggatcgcgatggtaatggcgatcgcgcagaatcatgggccgttggcgcgaaatatgatgcaaacaacgtctacctggctgccgtatatgctgaaacccgcaatatgagcattgttgaaaatacggttaccgataccgtggaaatggcaaacaaaacgcagaacctggaagtggtcgctcagtaccagtttgacttcggcctgcgtccggcaatctcgtatgtgcagagtaaaggtaagcagttgaacggcgccgacggctcggccgatctggcgaaatatattcaggcgggcgcgacttactacttcaacaaaaacatgaacgtatgggttgactaccgtttcaacctgctggacgaaaacgactacagctccagctacgttggcaccgacgatcaggcggctgtcggtattacttaccagttctga

SEQ ID NO: 370541 - DNA, 1191 bp, Salmonella enterica
atgtttgagaacataaccgccgctcctgccgacccgattttgggcctggccgatctgtttcgcgccgatgaccgtccagggaaaattaaccttggcattggcgtatataaagatgaaaccggcaaaacaccggtgctcaccagcgttaaaaaagccgagcagtatttactggaaaatgaaacgacgaaaaactatctcggcattgacgggattccggaatttgctcgctgcactcaggaactgctgttcggcaaaggcagcgcgctgattaacgacaagcgcgcacgcacggcgcaaacgccgggcggtaccggcgcgttacgcattgccgccgactttttggcaaaaaatactccggtaaaacgggtgtgggtgagcaaccccagctggccgaaccacaaaagcgtgtttaacgctgccggcctggaagttcgggagtacgcttactacgatgcggaaaatcacacgctggattttgaagcgctacaagccagcctgagcgaagcacaggccggcgatgtggttctgttccacggttgctgtcataacccaaccggcattgaccctactctggaacagtggcaggttctggctgagctttccgttgaaaaagggtggctgccgctattcgatttcgcttaccagggctttgcccgcggcctggaagaagatgcggaaggtctgcgcgcctttgccgcgctgcataaagagcttattgtcgccagctcctactccaaaaacttcggcttatataatgagcgcgtcggcgcctgcaccctcgtggctgccgatgcggaaaccgtggatcgcgcttttagccagatgaaatccgccattcgcgctaactactccaacccgccagcgcacggcgcgtccatcgtcgcgactatcctgagtaatgacgccctgcgcgctatctgggaacaggaactgacggacatgcgccagcgtattcagcgtatgcgtcaactgttcgtgaataccttgcaggaaaaaggcgcgaaccgtgacttcagctttattatcaagcagaacgggatgttctcattcagcggtctgaccaaagatcaggtgctacgtctgcgtgaagagtttggcgtttatgccgtggcttctggtcgcgtgaacgtggcgggcatgaccccggataatatggcgccgctgtgcgaagccattgtcgcggtactataa

SEQ ID NO: 370542 - DNA, 648 bp, Salmonella enterica
atgaactatcgtattattccggtcaccgcgttctcccagaactgttcattaatctggtgcgaacaaacccggctggcggcgctggtcgatccgggcggcgacgcggaaaaaattaaacaggaagtggacgccagcggcgtgacgttgatgcaaattttactcacgcatgggcatctcgatcatgtcggcgcggcgagtgaactggcgcagcattacggcgttcctgttatcggtccggaaaaagaagatgagttctggctgcaaggactgccggcgcaaagccgcatgtttggtctggatgagtgtcagccgctgacgcctgatcgctggctgaacgacggcgatcgcgtcagcgtagggaatgtgacgttacaggtgttacattgtccgggacacacgccgggacacgtggttttctttgatgaacagtcgcaactgctgatctccggcgatgtgattttcaaaggtggcgtcgggcgcagcgattttcctcgcggcgatcacacccagttgattgacgccattaagcgtaaattattgccgcttggcgatgatgtgacctttattcctggccacggcccgctctctacgctcggatacgagcgtctgcataatcccttcctgcaagatgagatgccggtctggtaa

SEQ ID NO: 370543 - DNA, 549 bp, Salmonella enterica
atggacaaatttgacgctaatcgccgcaagctgctggcgcttggtggtgtcgctctcggcgccgccatcctgcccgcgccagcgtttgccacactctcgaccccacgcccgcgcattttgacgttaaacaatctccataccggagagtcaatcaaggcggagtttttcgatggaagagcctacattcaggatgaattagcaaagttaaaccattttttccgtgactatcgcgcgaataaagtccgatcaatcgatccccgcttgtttgaccaactttaccgacttcaggggctgttagggacgcgtaaacctgtgcagctcatctcaggctaccgttctcttgataccaataatgaattacgcgcccgtagcagcggcgtagcgaaaaaaagctaccatacaaaagggcaggcgatggattttcatattgaaggcgtggcgctgagcaatattcgcaaagcggcgttatctatgcgcgcaggtggtgtaggatattacccacgtagtaactttgtgcatattgataccgggccggcgcggcactggtaa

SEQ ID NO: 370544 - DNA, 1851 bp, Salmonella enterica
atgttgcttaacaagatgtgtggtcgttgtctgtcggcaatcagtttatgcctggccgtaacattcgctccactgttcaatgcgcaggccgatgagcctgaaatgatacctggcgatagcgccgttgccgcgccggatctagctgggccgcagaagcaatcagccgcgacggcgattatggccgggattcagccgctgccggagggcgtttcagccgagaaagtccgggctgatttacagtcgcagcttccttccggctatacgccggtctatatgagccagctgacattgctgtatgccgcgcgcgacatgaagcccatgtgggataatcgcgatgcggtgaaagtcttccagcaacagttggcggaggtggcgattgccggattccagccgcagtttaccgcctgggtggcattgttgaccgatcccgccgtaaacggtatggcgcgcgatgttgtgttgtcagacgctatgatgggctatctccatttcattgcgaatatccccgtcaaaggccagcgctggttatatagcaacaaaccttacgcattggcgacgccgccagtctcggtgattaaccagtggcaaatcgcgctggaagaggggcagttgccgatgtttgtcgccagcctggcgccgcagcatccacagtatgcgcccatgcatgacgcgctgctgaagctggtggcggactctcgcccgtggccgcagttggccaataccgcaacgctgcgcccggggcaatggagtaacgatgtgcctgcgctgcgcgaaatattacagcgtacggggatgctggatggcggtccaaagatagccttacccggcgataacactgctgatagcgccgtcgtcagcccctccgccgtggtcgacgaaacatcggtggcgcagccggtcgacgaacaaacggcccgccgtagtaagccggctccggcggtacgcgccgcctacgataatgaactggtcgaggcggtaaagcgttttcaggcatggcaagggctgggggcggatggcgttattggcccggcgacgcgtaactggcttaatatgacccccgcgcaacgcgcaggcgtactggcactgaatatccaacgtttacgcctgctgccggcggaactctctaccggtattatggtaaacattcccgcttattcgctggtctactatcagaatggcaaccaggtgctggcttcgagggtgatcgtcgggcgtcccgatcgtaaaacgccgatgatgagcagcgcgctgaataatgtggtggtgaacccgccgtggaacgttccgcccacgcttgcgcgtaaagacattttaccgaaggtgtggaatgacccaggctatctggagcgccatggctacaccgtgatgcgcggctggaacagcaaagaagcgatcgatccgtggcaggttgactggaccaccattacgccatcgaatcttccgttccgtttccagcaggcgccaggcgcgcacaattcgctggggcgttataaatttaatatgccgagctctgatgcgatctatctgcacgatacgcctaaccatactctctttcagcgtgacgccagggcgttaagttccggctgcgtgcgggtcaataaggcctctgaactggcgaatatgctcttgcaggatgctggctggaacgatgcgcggatctcaggcgccctgaagcaaggcgacacgcggtatgtcaatatccggcagaacattccagtaaatctttactatctgaccgcgtttgtcggcgcagatggacgtatgcaatatcgtacagatatttacaattacgatctcacagcgcgatccagcgcacaaattgtgccaaaggttgaacaattaatcaggtaa

SEQ ID NO: 370545 - DNA, 4467 bp, Salmonella enterica
atgattgaacgcggtaaatttcgctcgctaacgctgattaactggaacggtttttttgcccgtacttttgacctggatgaactggtcacgacgttatccgggggcaacggtgccgggaaatccacgacgatggcggcgttcgtcacggcgctgatcccggatcttacattactgcactttcgtaacaccacggaagccggcgccaccagcggttcgcgcgataaaggtctgcacggtaagctgaaggcgggcgtctgttactccatgctcgacaccattaattcccgccatcagcgggtggtggtcggcgtgcgtctgcagcaggtcgctgggcgcgatcgcaaagtggacatcaaaccgttcgctatccaggggctgccgatgtcggtacagccgacacaactggtgacggagacattaaacgaacgtcaggcgcgcgtactgtcgcttgctgagctgaaagacaagcttgacgagatggaaggcgtgcagtttaagcagtttaactccatcaccgattatcattcgctgatgtttgacttagggattatcgcccgtcgtctgcgctccgcttccgatcgtagtaaattctatcgtttgatagaggcctcgctgtacggcgggatctccagcgccattacccgatcgctacgcgattatttattgccggaaaacagcggcgtgcgcaaggcgttccaggatatggaagcggcgctgcgcgagaaccgactcacgctggaagcgattcgtgttacccaatccgatcgcgatctgtttaagcatttgatcagcgaagccaccgattatgtggcggcggattatatgcgccacgccaatgagcgtcgggttcaccttgatcaggcgttggcgtttcgacgcgaactgtacacatcgcgcaaacaactggcggctgagcagtacaagcacgtcgatatggcccgtgagttgggcgaacataacggcgccgaaggttctcttgaggcggattaccaggcggcgagcgatcacctgaatctggtgcaaaccgcgctgcgtcagcaggaaaaaattgaacgctacgaagcggatcttgaagagctgcagattcgactcgaagagcaaaacgaagtggtggcggaagccgccgaaatgcaggacgaaaatgaagcgcgtgccgaagccgccgagctggaagtcgatgaactcaaaagccagcttgcggattaccagcaggcgctggatgtacagcaaacgcgcgcgattcagtataaccaggcgatatcagcgcttgcccgcgctaaagaactttgtcatctgccggatctaacgccggaaagcgccgccgaatggctggatactttccaggcaaaagagcaggaagctacggaaaaactgctgtcgttggaacaaaaaatgagcgtggcgcaaaccgcgcacagccagtttgagcaggcttaccagctagtagcggcgatcaacggcccgctggcgcgtagcgaagcctgggacgtggcgcgcgagctgttacgggacggcgtgaaccagcgtcatctggcggaacaggtacagccgctgcggatgcgcctgagcgaactggaacagcggctgcgcgagcagcaagaggcggaacgtctgctggctgagttctgtaagcgacagggcaaaaattttgatattgacgaactggaagcgctgcatcaggagctggaagcccgcatcgcgtccttgtctgagagcgtgtcgtcagccagcgaacagcgtatggccttgcgtcaggaacaggaacagctgcaatcccgtatccagcatctgatgcaacgcgctcctgtctggctggcggcgcagaatagcctgaaccagcttagcgaacagtgcggcgaggagtttacgtccagccaggaagtgaccgaatacctgcaacagctactggagcgtgagcgcgaagccattgtcgaacgcgacgaagtgggcgcgcgtaaaaatgcggttgatgaagagatcgaacgtttaagccagccgggcggcgcggaagatcagcgtttgaatgcgctggcggagcgttttggcggggtactgctgtcggaaatctacgatgatgtcagtcttgaagatgcgccgtacttttccgcactgtatggcccgtcgcgccatgcgatcgtcgtaccggatttatcgcaaatagccgaacagcttgaaggtctgaccgactgcccggaagatctgtacctgatcgaaggcgatccgcagtcttttgatgacagcgtattcagcgttgacgagctggaaaaggcggtggtcgtgaaaattgccgaccgtcagtggcgttattcgcgttttccgtcgctgcctatttttggccgtgcggcgcgcgagaaccgtattgaaagtctccatgcggaacgggaagtgctttccgagcgctttgccacgctctcgtttgacgtgcagaaaacccagcgtttgcaccaggcgttcagccgttttatcggtagccacctttctgttgcctttgaggacgatccggaagcggaaattcgccgactgaacgggcgtcgcgtcgagctggagcgcgcgctggcgacgcatgaaagcgacaaccagcagcagcgccttcagtttgagcaggccaaagagggcgtttccgcgcttaaccgtttgctgccgcggctgaatttattggccgatgaaacgctggccgatcgggtcgatgaaattcaggaacggttggatgaggcgcaagaagcggcgcgatttgtgcagcaatatggcaaccagttagccaaactggagccggtggtttccgttctgcaaagcgatccggaacagtttgagcagttaaaagaagactatgcatggtcgcagcaaatgcagcgcgacgcgcgccagcaggcttttgctctggctgaagttgtcgaacgtcgggcgcatttcagctattccgactcggcggaaatgctgagcggcaacagcgatctcaacgaaaagctgcgccagcggctggagcaggcggaagccgagcgtacccgcgcccgcgaagcgctgcgcagccatgccgcgcagttaagtcagtacagccaggtcctggcctcgctaaaaagctcttacgacacgaaaaaagagctgcttaacgatttgcagcgcgaattacaggatattggcgttcgcgccgacagcggggcggaagagcgtgcccgccagcgtcgcgatgaactgcacgcccagttgagcaataaccgttcgcgtcgcaatcagcttgagaaagcgctcaccttctgcgaagcggagatggagaacctgacccgtaagctgcgcaagctggagcgtgattatcatgaaatgcgcgagcaggtcgtgaccgcgaaagccggctggtgcgcagtcatgcggatggtgaaagacaatggcgtggaacgccgtctgcaccgtcgtgagctggcttatctgtcggcggatgaactgcgctccatgtcggataaggcgttgggcgcgctgcgcctggccgtcgcggataacgaacatctgcgcgacgtattgcgtctgtcggaagatccgaaacgcccggaacgtaaaatccagttctttgtggccgtttaccagcatctgcgcgaacgtattcgtcaggatattattcgtaccgacgatccggttgaagccattgaacaaatggagattgagctgagtcgtctgacggaagagctgacatcgcgtgagcaaaagctggcgatcagttcccgcagcgtggcaaacattatccgcaagactatccagcgtgagcagaaccgtattcgcatgctgaaccaggggttgcaaagcgtctcgtttggccaggtgaatagcgtgcggttaaacgtcaacgtgcgtgaaacgcatgccaccttgctggatgtgctttcagaacagcaggagcagcatcaggatctgtttaacagcaatcgtctgaccttctccgaagcgctggcgaaactgtaccagcgcctgaatccgcagatcgatatggggcaacgcacgccgcagaccatcggcgaggagctgctggactaccgtaactatctggaaatggaagttgaagttaaccgtgggtccgacggctggctgcgtgcggaatccggcgcgctatcaacgggggaagctatcgggaccgggatgtcaattctggtgatggttgtgcaaagctgggaagacgaagcgcgcagactgcgcgggaaagatatttcgccatgtcgcctgctgttcctcgatgaagcggcgcgtctggatgcgcgctctatcgccacgctgtttgaactatgcgaacgtttgcagatgcagctcatcatcgccgcgccggaaaacatcagtccggagaagggcacgacctataaactggtgcgtaaagtgtttcagaatactgagcatgttcatgttgtcgggctgcgtggctttgcgccgcagcttccggaaacgcttcccggtacgcaaacggaagatacgccttcagaagcgagttaa

SEQ ID NO: 370546 - DNA, 705 bp, Salmonella enterica
atgtcattgacaaatattgaacaagtgatgccggttaagctggcgcaggcgctggcgaatccgttatttccggcgctggatagcgcattacgttcgggccgccacatcgggctggacgaactggataatcatgcctttctgatggattttcaggaatacctggaagagttttacgcgcgttataacgtggaactgattcgcgcgccggaggggttcttctacctgcgtccgcgttctaccacgcttatcccgcgctcggtgttatccgaactggatatgatggtcggtaaaattctctgctacctctatcttagcccggagcgtctggccaacgaagggatctttactcagcaagaattgtacgacgagctgcttacccttgcggacgaagccaaactgctaaagctggttaataaccgctcgacgggatctgacgttgatcgtcagaaactgcaggaaaaggtgcgttcttctttaaaccgcctgcgtcgtttgggcatggtatggtttatgggccacgacagcagcaaattccgcattaccgaatcggtcttccgctttggcgcggatgtccgcgccggcgacgatcctcgcgaggcgcagcgtcgtctcatccgcgacggggaagcgatgcccattgaaaaccatctgcaacttaatgatgagaccgaagagagtcagccggacagtggagaggaagaataa

SEQ ID NO: 370547 - DNA, 1323 bp, Salmonella enterica
atgagtgaattttcccagacagtccccgaactggttgcctgggccagaaaaaacgacttttccatctcgctgccggtagacagactttcctttctgctggcggtcgccacgttgaacggcgaacgccttgacggcgagatgagtgaaggcgagctggtggatgcattccgccatgtgagtgatgcgtttgagcaaaccagcgaaaccatcggcgtgcgcgcgaacaacgcgattaacgatatggtgcgtcaacgtctgctgaaccgctttaccagcgagcaggcggaaggcaatgcgatttaccgattaaccccgctcgggattggcatcaccgattactacattcgtcaacgcgaattctctacgctgcgtctttctatgcagttgtcgattgtggccggcgaattgaagcgcgcggcggatgcggcagcggaggggggcgatgagttccactggcatcgcaacgtttacgcgccattgaaatattcggtggcggagattttcgacagtatcgatctcacccagcgcatcatggatgaacagcagcagcaggtgaaagacgatatcgcacaactgctgaataaagactggcgggcggcgatttccagctgtgagctgctgctttccgaaacgtccggtacgctgcgcgagttgcaggatacgctggaggcggcgggcgataagctgcaggctaacctgctgcgcattcaggatgccacgatgacgcacgacgatctgcattttgtcgacaggctggtgtttgacttacaaagtaaactcgaccgcattatcagttggggtcagcagtctattgatttatggatcggctacgatcgtcacgtgcataaatttatccgtaccgcgatcgatatggataaaaaccgtgtcttcgcccagcggttgcgccagtccgtgcagacttattttgacgatccctgggcgctaacctacgcgaatgccgatcgtctgctggatatgcgcgatgaagagatggcgttgcgtgacgatgaagtcaccggggagttgccgccggatctggaatatgaagagtttaacgagatccgcgagcagttagcggccatcattgaagaacagctggctatctacaaaaccagacaaacgccactggatcttgggctggtggtgcgcgagtatctggcgcaatacccgcgcgcgcgtcatttcgacgtggcgcgtattgttatcgatcaagcggtacgtcttggcgtagcgcaagcagatttcaccggactgccagccaaatggcagccgattaatgattacggagccaaggtacaggcgcatgtcattgacaaatattga

SEQ ID NO: 370548 - DNA, 804 bp, Salmonella enterica
atgcaggatcgcaattttgatgacattgctgaaaagttttcccgtaacatttacggcacgaccaaaggacaactgcggcaagccattctgtggcaagacctggatcgcgtgctggaggagattggcgggcggaaactgcgggtgctggatgccggcggcggcgaagggcaaacggcgattaagatggcggaacgcggccatcaggtgacgttatgcgatctgtctggcgaaatgatcgcccgcgcgcggcaggcggccgaggcaaaaggtgtgagcaaagacatgcattttatacaatgcccggctcaggacgtcgcttcgcatttggaaagcccggttgatctgatattgtttcatgctgtgctggagtgggtagccgatcctgtcggcgtattagaaacgctctggtcagtattgcgccctggcggcgcgctgtcgttgatgttctataacgctaacggtttgctgatgcacaatatggtggcgggtaattttgactacgtgcaggcggggatgcctaaacgcaagaagcgcacgctgtcgcctgactacccgcgcgaccccgcgcaggtgtaccagtggctggaggcgattggttggcagattaccggtaaaaccggcgtgcgtgtgtttcatgattatctgcgtgaaaaacaccagcagcgtgactgttatgagaccctggtcgaactggaaacgcgttattgccgccaggagccgtatattagccttgggcgctacattcatgtcaccgcgattaaaagcccggcgctagccgcagatgcaaggataacctatgagtga

SEQ ID NO: 370549 - DNA, 777 bp, Salmonella enterica
atgctttttacgctaaagaaagtgattggcggtatgttattgccgcttccgctgatgttgctgatcattggcgtcggcctggcgctgctctggtttagccgctttcagaagaccggaaaagtatttatcagcgtaggttggctggcgctattgctattaagcctgcaacccgtctctgaccatttgctgcgtccgatagaaaaccgctaccctacctggcagggtccgcaaaaggtggaatatattgtggttctcggcggcggctatacctggaacccgcagtgggcgccgagctctaatttaattaacaacagcttgccgcggctggcggaaggcattcggctgtggcgcgcgaatccgggagccaggctgatttttaccggcggcatagcaaaaaccaatacggtaagcacggcggaagtcggtgcgcgggtggcgcagtcgctgggcgtaccgcgtagcgatattattacgctggataagccaaaagatacggaagaagaagccgccgccgttaagcaggccatcggcgacgcccctttcctgttggtaacctccgcctcgcatttgccgcgtgcgatgattttctttcagcatgccgggctgaatccgcttcccgcgccggcgaatcagttggcgatcgattcgccgctcaatccctgggagcgggcaattccgtccccggtctggctgatgcacagcgatcgcgctgggtatgaaacattagggcgactttggcaatggctgaaaggcatatcaggcaagccaggggagtaa

SEQ ID NO: 370550 - DNA, 894 bp, Salmonella enterica
atggaacagttgcgggccgaactcagtcatttgttgggtgaaaaacttagccgtatagagtgcgtgaatgagaaagcggattccgcattgtggtcattatatgacagccagggcatcccgatgccgctgatggcgcgaagttttaccactcccggcgttgcgcagcaactggcctggaaaacctcaatgctggcgcgtagcggtacggtgaggatgccggtaatctatggcgtattgacgcatgaagagcatcctggtccggatgtgctgctgctggaacgactgcgcggtgtaccggtagaggcgccggcgcgcactccggaacgctgggaacagctaaaagatcagattgtcgaagggctgttagcctggcatcggcaggatagccgcggttgcgttggcgccgtagaccatactcaggagaatatctggccttcctggtatcgtcagcgggtggaggtgctgtggacgacgctaaatcagttcagcaataccggcctgacgatgcaggacagacgcattctgtttcgtaccagagaatgtcttccttcgttatttgaagggtttaacgacaactgcgtactggtgcatggcaacttctgcctgcgcagtatgcttaaagacgcccgtagcgatcagcttctggcgatggtcggccccgggctgatgctgtgggcgccgagagagttcgaactgtttcgcctgatggataatccattggcggagggattgctttggcattatctgcaacgcgcgccagtggcggagtccttcatctggcggcgttggctctatgtgctgtgggacgaggttgcgcaattggtcaataccggacgttttaaccgtaccaattttgatctggcggcgaaatcattactcccctggcttgcctga

SEQ ID NO: 370551 - DNA, 747 bp, Salmonella enterica
atgagtttcgtcgtcatcattccggcccgtttttcatctacccgactgccaggaaaaccattagtggatattaatggtaagcccatgattgttcatgtcctggagcgggcgcgcgaatctggcgcggaacgcattattgttgccaccgatcatgaagacgtggctcgtgcggtagaagcggctggcggcgaagtgtgcatgacgcgcgccgatcaccagtccggcaccgaacggttggcggaagtggtagagaagtgcggattcagcgacgataccgttattgtgaacgttcagggcgatgagccgatgatcccggcggttattattcgccaggtcgcggaaaatctggcgcagcgccaggttggcatggcgacgttggcggtgccgattcacagcgccgaagaagcgtttaacccgaatgcggtaaaagtcgtgctggatgctgaaggctatgcgctttacttttcccgggcgacgattccctgggatcgcgaccgctttgcaaaaagtctggaaacggtaggagatacttgccttcgtcacctgggcatttatggctatcgcgcgggttttatccgccgttacgtgagctggcaacccagccagctggaacatattgaaatgctggagcaactccgtgtgctgtggtacggcgaaaaaattcatgtcgccgtcgccaaagcggtgcccggcacgggcgtagacaccgccgacgacctggagcgcgtgcgcgctgaaatgcgttaa

SEQ ID NO: 370552 - DNA, 183 bp, Salmonella enterica
atggatcatcgtctgcttgaaatcatcgcctgcccggtatgtaacggcaaactctggtataaccaggaacagcaagaattaatttgcaaactggataatctcgctttcccgttacgcgacggcattcctgtattgctggaaaatgaagctcgcgccctgacatctgatgagagtaaatcatga

SEQ ID NO: 370553 - DNA, 1233 bp, Salmonella enterica
atgtcattgccgtacctttctctttcccaggcccggtgtcttcaccttgctgcgcaggggctattgaaaaagccacgccgtaacgtgctgcctggcgatgttcttgccgccatctcacgcatggcgttgctgcaaattgataccatcaatgttgtcgcacgtagcccctatctggtgctgtttagccgtctcggttcgtacccgcaggcctggctggatgaggcgctgcgacgcggcgagttaatggaatactgggcgcatgaggcctgtttcttaccacgccgcgactttaaacttatccgccatcgtatgctgtcgccggaaaagatgggctggaaatatcgcgcggcatggatgcatgagcacgcggaagaaatagaacagctagtgcggcatattcaggagcacggtccggtgcgttctgccgattttgaacatgcgcggaaaggcgtcagcggctggtgggaatggaaaccacataaacgccaccttgagggtttatttaccgccggaaaagtcatggttgttgagcggcgtaattttcaacgtgtatatgatttaacgccccgtgtgatgccgcactgggatgatgaacgcgatggactgtcacagtcgcaggcggaaaacctgatgctggataatagcgcgcgcagtctggggattttccgtgaacagtggctggcggattactaccgcctgaaacgtcctgacctgaagggatggcgggagagccgggcggaacagcagcagattattccggtcgaggtggaaacgttggggcggatgtggcttcatgccgatcttctttcgcagctggaaccagcgctgaataacgccttaaaggcgacccatagcgcagtgctgtcgcctttcgatcctgtggtatgggatcgcaagcgggcagcgcagctcttcggatttaactatcggctggaatgttatacgcctgcggcgaagcgccagtacggttattttgtgctgccgctattataccagggccgtttagtcgggcgaatggatgccaaaatgcaccgtaaaacgggggtgcttgagattatctcgctgtatctggaggacgatattcgccctggcgttagtctgcaaaaaggaatctggcaggcgattagcgcgtttgctgcctggcaacgggcatcgcgcgtgacgctgggacaatgtccgccaggcctgtttagcgccatgcgtcatggctgggaaatagaccctgcaccataa

SEQ ID NO: 370554 - DNA, 978 bp, Salmonella enterica
atgattgcgcgtatctggtcgggtgaatccccgctatggcggttactgctgccgctctcctggctgtatggcctggtgagcggggcgattcgtctgagctataagcttggttttaaacgcgcctggcgagcgccggtaccggtggttgtggtagggaatcttacggctggcggtaacggtaaaacccccgtagtcatttggctggtggaaaagctgcaacagcgtggcgtgcgcgtgggggtcgtttcccgcggctacggcgggaaagctgccgcttatccgctgctcctgacgcctgagacgacaaccgcagaagcgggagatgaaccggtattgatttatcagcggaccggcgcgcctgtcgcggtggcgcctgaacgcgccgcggcggtgaaagcgattctggcggcgcataatctgcagattattatcaccgacgatgggttgcagcattaccgactcgcgcgagatattgaaattgtggtgattgacggggtgcgccgttttggcaacggctggtggcttcctgccggccctatgcgcgaacgcgccagtcgcctgaaaaccgtggacgccgctatcgtcaatggcggcgtcgcccgggcaggcgaaatacccatgcagctagcgcctggactggcggtgaacttacgtacgggagcgcgttgcgatgtagcgcagctgagcaatattgtggcgatggcgggcatcggtcatccgccgcgctttttcgccacgctggaagcctgtggcgcgcatccgcaaaagtgtgtcccgctggcggatcatcaaacgctcgcccctgctgacgttcaggcgttggtcggtgaaggacagaccctggtaatgacggaaaaagacgcggtgaaatgccgtgcttttgccgaagataactggtggttcttaccggttgatgcgcgtttgtccggtgagcagcctgataagttgcttgaacatatcacctcgctggttcgctag

SEQ ID NO: 370555 - DNA, 1749 bp, Salmonella enterica
atgcataacgataaagatctctctacgtggcagaccttccgccgactgtggccaaccatagcgccttttaaagcaggtctgatcgtggcgggcatagcgttaattctcaacgcagccagcgataccttcatgctatcgctcctcaagccattactggatgatggtttcggtaaaacggatcgctcagtgttgctgtggatgccgctggtggttattgggctgatgatattacgaggcatcactagctatatctccagctactgtatttcatgggtgtcaggcaaggtggtaatgaccatgcgccgtcgcctgtttggccatatgatgggaatgcccgtcgccttctttgataaacagtctaccggtacgctgctgtcgcgtattacttacgattcagaacaggttgcctcttcttcatctggcgcactgattaccgtggtgcgtgaaggggcatcgatcatcggattgtttatcatgatgttctattacagctggcagttgtcgatcatcctggttgttttagcaccgattgtgtcgattgcgattcgcgttgtctcaaagcggttccgcagcatcagtaaaaatatgcagaacacgatgggacaagtgactaccagcgctgaacaaatgctgaaaggacacaaagaggtactgatttttggcggtcaggaagtcgaaactaaacgctttgataaagtcagcaataagatgcgactgcaaggcatgaaaatggtctctgcctcgtcaatttccgatcctatcattcagctcattgcctcgctggcgctggcgtttgtcctctatgctgcgagcttcccaagcgtaatggatagcctgacggcagggaccatcaccgtggtgttctcctccatgatcgcgctgatgcgtccattaaaatcgctgacaaacgttaacgcgcagttccagcgtgggatggcggcttgtcaaacgttgtttgcgattctggatagcgaacaggagaaagatgaaggtaaacgtgtcattgaccgcgcgaccggcgatctcgaattccgcaatgtgacgtttacttacccgggccgtgaagtgccggcattgcgtaacatcaatttgaaaattcctgccgggaaaaccgtggcgctggtggggcgttccggatcgggtaaatcaactatcgccagtctgatcacccgtttctacgatattgatgaagggcacatcctgatggatggtcacgatctacgcgaatacactctggcctctctacgtaatcaggtggcgctggtttcgcaaaacgtgcatctgtttaacgacacggtcgccaataacattgcttatgcccggacggaagaatacagccgcgagcagattgaagaggcggcgcgcatggcctatgccatggactttatcaataagatggataatggcctggataccatcatcggcgaaaacggcgtactgctttccggcggtcagcgccagcgtatcgcgatcgcccgcgccttactgcgcgacagcccgattctgatccttgatgaagctacgtccgcgctggataccgaatctgaacgtgcgattcaggcagcgttggatgagctgcagaaaaaccgtacctctctggtgattgcgcaccgtctctccaccatcgaacaggcggatgagatcgttgtagtcgaagacggtattatcgttgagcgcggcactcatagcgagctgctggcgcaacacggcgtttacgcccagctacataagatgcaatttggccaatga

SEQ ID NO: 370556 - DNA, 2265 bp, Salmonella enterica
atgaagataacgacggtcagcgtatgcgtagtatgcggcatacttccgctcatgatattgccagtattacctgatacgtggattctcgcggtgctgttttgtctggcatgtttgctttgcctcataccccatcactatgcgcgctacgcggcattaaccttgctctttttcatgtgggggatatttgccgccaggcaggccatctgggcgggaaacgtcctgcccgctgcgacgcaggaggcgacagtcgtcattactgccaccgatcatatgaccactcattatgggcgaattacccatttgcatggaaagccactctttcctgctgtagggattgtcctgcatggccagtacttacccacggaagtgtgtgccggacagcagtgggcgatgacgctgaaggtcagagcggtacacggacagcttaacgaaggcggttttgatagccagcgttacgcgctggcgcagcaccaaccgttgaccgggcgttttctacaggctaaagcgattaaccctgagtgtagcttgcgtgggcgctatcttgcttcgcttcgcgctacgcttgcgccttatccgtggcagcaggttattctggcgttgggaatgggggagcggggagcggtgtcgcaggaggtgaaggccgttatgcgcgatacggggactgcccatttgatggcgatttccggcctgcatatcgcttttgctgcgttattggctgccggattaatccgtggcggacaattctttttgccggtcagatggattcgttggcagacgccattgctgggcggcattctttgcgcgatatgttatgcctggcttaccggcttacaaccgcctgcgctgcgcacggtggcggcgctgagcgtctggggaggattaaaattaagcggacgacagtggagcggctggcaagtctggtgctgctgtctggccgcgattattttcgccgatcctgtggcggttatatcacaaagtctttggctgtcagcatttgcggttgccggcctgttattctggtatcagtggtttcctgcgccaaacggaaattttccacggggcttacgttggttgcttaacctgcttcacctacaggcaggcattacacttctgcttttgcctctccaggtggcgctttttcatggcataagcgttaccgcaatgctggcgaatctttttgccgtaccctgggtcacatttgtgacggttccgctcatcctggcgggaatgattctgcatttaaccgggccgttttttcttgaagagtgggtatggtacctgaccgatcgcgcgttagccgcgctattttacctgttgaatgctttaccgcagggctgggtcaatattgataaccgttggcagtggctgacgcttttaccctggctaacgcttatcgcgtggcgattaaacgtctggcgtacctgtccggcggtctgtttatgcgggttattgttgatgagctggccactctggcggccgataaacgccagcggatggcaggtgcatatgctggatgtcggtcaggggctggcgatagcgatcgtcaggggcgataaagtaatactctacgataccggtcgggcatggccggagggcgacagcgggcaacaggttattattccctggttgcgctggcataatctgacgccggagggcgttattttgagtcatgagcatctggatcatcggggcgggctgcgttcgctacagcaggtctggccgtcaatgtggattcgcagcccgttaggctggcagggacatttgccctgttttcgcggtgagcagtggcaatggcaggggctaacgtttcaggcgcactggccgttacgcgaaagtgccgatcgaggaaataaccgctcctgtgtggtcaaagtggatgacggcgtacatagcatcctgctcacgggcgatattgaagcgggcgctgaacaaaaaatgctaagtcgttactggcgacatcttgcggcgacgtttatccaggtgccgcatcatggtagtaatacgtcgtcgtcgctaccatttattcagcgcgtacatggtgaagcggcgctggcgtccgcatcgcgctataacgcatggcggctgccgtcccgcaaggtaaaacagcgctaccgacagcaggcgtatcagtggtttgatacaccccaccaggggcaaatttcgctgctgttttctccgcagggctggcgcatacaaggcttacgggatcaaattttacctcgctggtatcatcagtggtttggcgtgtccgaggataacgggtag

SEQ ID NO: 370557 - DNA, 285 bp, Salmonella enterica
atgaccaagtcagaattgattgaaagacttgcaacccagcaatctcacattcccgctaaggcggttgaagacgcggtaaaagagatgctggagcatatggcctcgactcttgcgcagggcgagcgtattgaaatccgcggtttcggcagtttttctttgcattaccgcgcgcctcgtaccggacgtaaccccaagaccggcgataaagtggaactggaaggaaaatacgttcctcactttaaaccgggtaaagaactgcgcgatcgcgccaatatttacggttaa

SEQ ID NO: 370558 - DNA, 1674 bp, Salmonella enterica
atgactgaatcttttgctcaactctttgaagaatccttaaaagaaatcgaaacccgcccgggttccatcgttcgtggtgttgttgttgctatcgacaaagacgtagtactggttgacgccggtctgaaatctgagtctgccattccggctgagcagttcaaaaacgcccagggcgaactggaaatccaggttggtgacgaagttgacgttgctctggatgcagtagaagacggcttcggtgaaactctgctctctcgtgagaaagctaaacgtcacgaagcatggatcacgctggaaaaagcttacgaagatgctgaaactgttaccggtgttatcaacggcaaagttaagggtggcttcactgttgagctgaacggtattcgcgcgttcctgccaggttctctggtagacgttcgtccggtgcgtgacactctgcacctggaaggcaaagagcttgaattcaaagtaatcaagctggaccagaaacgtaacaacgttgtggtttctcgtcgtgccgttatcgaatccgaaaacagcgcagaacgcgatcagctgctggaaaacctgcaggaaggcatggaagttaaaggtatcgttaagaacctcactgactacggtgcattcgttgatctgggcggcgttgacggcctgctgcacatcactgatatggcctggaaacgcgttaagcatccgagcgaaatcgtgaacgttggcgacgaaatcaacgtgaaagtgctgaaattcgaccgcgagcgtacccgtgtatccctgggcctgaaacagctgggcgaagatccgtgggttgctatcgctaaacgttatccggaaggtaccaaactgaccggtcgcgtgaccaacctgaccgactacggctgcttcgttgaaatcgaagaaggcgttgaaggcctggttcacgtttccgaaatggactggaccaacaaaaacatccacccgtccaaagtggttaacgttggcgacgtagtggaagtgatggttctggatatcgacgaagaacgtcgtcgtatctccctgggtctgaagcagtgcaaatctaacccgtggcagcagttcgcagaaacccacaacaagggcgaccgcgttgaaggtaaaatcaagtctatcactgacttcggtatcttcatcggcctggacggcggcatcgacggcctggttcacctgtctgacatctcctggaacgttgcaggcgaagaagcagttcgtgaatacaaaaaaggcgacgaaatcgctgcagttgttctgcaggttgacgcagaacgtgaacgtatctccctgggcgttaaacagctcgcagaagatccgttcaacaactgggttgctctgaacaagaaaggcgctatcgtaaccggtaaagtcactgcagttgacgcgaaaggcgcaaccgtagaactggctgacggcgttgaaggttacctgcgtgcttctgaagcatcccgtgaccgcgttgaagatgcgactctggttctgagcgttggcgacgacgttgaagctaaattcaccggcgttgatcgtaaaaaccgcgcaatcagcctgtctgttcgtgcgaaagacgaagctgacgagaaagatgccatcgcaactgttaacaaacaggaagatgcaaacttctctaacaacgcaatggctgaagcattcaaagcagctaaaggcgagtaa

SEQ ID NO: 370559 - DNA, 684 bp, Salmonella enterica
atgacggcaattgccccggtaataaccattgatggcccaagcggtgcaggtaaaggcaccttgtgcaaagcaatggcggaagcattgcaatggcatctgctggattccggcgcgatataccgcgtactggcgctggcggcattgcatcaccatgtcgatctcgcctctgaagatgcgctggtgcctctggcgtcccatctggacgtgcgtttcgtctcaacggacggcaacctggaagttatcctggaaggcgaggacgttagcggcgaaatccgtacgcaggaagtcgcgaacgcggcatcccaggtggcagcattcccacgcgtgcgtgaagcgcttcttcgccgccaacgcgcattccgcgaagcgcctggtttaatcgccgatggacgcgatatggggaccgtggtcttcccggatgcgccggtaaaaattttccttgacgcctcctcggaggaacgtgcgcatcgacgtatgctacagttgcaggagaatggctttagtgttaactttgaacgccttttggccgagatcaaggaacgcgacgatcgcgatcgtaatcgcgctgtagcgccgttagttcctgctgctgatgcattagttttggattctacccgattaagcattgagcaagtgattgaaaaagcgttacaatatgcgcgccaaaaattggctctcgcttaa

SEQ ID NO: 370560 - DNA, 762 bp, Salmonella enterica
atgaaaaataaatcattactactggcggtggcgatttccgccacgctactggcaggatgtaaaaatggcgtgaatggcaatttaatcgccagttcaggcatgtcagcctacaaagccgccacactgtccgatgcggatgttaaggcattatctaataatgcctgtaaacaaatggacagcgagaatcaactggcaggttcgaaaagcaaatacaccaaacgtctgagcaaaatcgccaaagcgctgggtaacaacattgacggtacgccggttagctataaagtctatatgaccagcgatatcaacgcatgggcgatggcgaacggttgcgttcgcgtatactccggcctgatggatctgatgaccgataatgaaattgaaggcgtactgggccatgaactgggccatgtctctttagggcactctcgcaaggcaatgcagaccgcttatgccacgctggcggctcgcgatgcgatttccgccaccagcggcgtcgcagcgcagctttcccagtctcaattgggcgatctggcggaaggcgtcatcaattcggcgttttctcgcagtcaggagtcggatgcggatgacttctcttacgatctgctgaaaaaacgcgggattaacacccagggcttagtcacggcattcgataaattcgccacaatggacgcaggtcatgcaaaatcattgatggactcccacccggcttcagccgatcgcgcgcagcatatgcgcgacagaattgccgaagataaaaagtaa

SEQ ID NO: 370561 - DNA, 1284 bp, Salmonella enterica
atggaatccctgacgttacaacccatcgcgcgggtcgatggcgccattaatttacctggctccaaaagtgtttcaaaccgtgctttgctcctggcggctttagcttgtggtaaaaccgttctgacgaatctgctggatagcgatgacgtccgccatatgctcaatgccctgagcgcgttggggatcaattacaccctttctgccgatcgcacccgctgtgatatcacgggtaatggcggcccattacgtgcgccaggcgctctggaactgtttctcggtaatgccggaaccgcgatgcgtccgttagcggcagcgctatgtctggggcaaaatgagatagtgttaaccggcgaaccgcgtatgaaagagcgtccgataggccatctggttgattcgctgcgtcagggcggggcgaatattgattacctggagcaggaaaattatccgcccctgcgtctgcgcggcggttttatcggcggcgacattgaggttgatggtagcgtttccagccagttcctgaccgctctgctgatgacggcgccgctggcccctaaagacacaattattcgcgttaaaggcgaactggtatcaaaaccttacatcgatatcacgctaaatttaatgaaaacctttggcgtggagatagcgaaccaccactaccaacaatttgtcgtgaagggaggtcaacagtatcactctccaggtcgctatctggtcgagggcgatgcctcgtcagcgtcctattttctcgccgccggggcgataaaaggcggcacggtaaaagtgaccggaattggccgcaaaagtatgcagggcgatattcgttttgccgatgtgctggagaaaatgggcgcgaccattacctggggcgatgattttattgcctgcacgcgcggtgaattgcacgccatagatatggatatgaaccatattccggatgcggcgatgacgattgccaccacggcgctgtttgcgaaaggaaccacgacgttgcgcaatatttataactggcgagtgaaagaaaccgatcgcctgttcgcgatggcgaccgagctacgtaaagtgggcgctgaagtcgaagaagggcacgactatattcgtatcacgccgccggcgaagctccaacacgcggatattggcacgtacaacgaccaccgtatggcgatgtgcttctcactggtcgcactgtccgatacgccagttacgatcctggaccctaaatgtaccgcaaaaacgttccctgattatttcgaacaactggcgcgaatgagtacgcctgcctaa

SEQ ID NO: 370562 - DNA, 1089 bp, Salmonella enterica
atggctcaggtctttaattttagttcaggtccggcgatgctaccggcggaagtacttaaactggcgcaacaggaactgcgtgactggcacggtcttggtacgtcggtaatggaaattagccatcgaggcaaagagtttatccaggtcgctgaagaggcggagcaggattttcgcgatctccttaatatcccctccaactataaagttttattttgtcacggcggcggtcgcgggcagtttgctggcgtgccgctcaatctgctgggcgataaaaccacggcggattatgtcgatgctggttactgggcggcgagcgccatcaaagaagccaaaaaatactgtgcgccgcagattatcgacgccaaaatcaccgttgacggcaaacgtgccgtaaaaccgatgcgcgagtggcagctttccgataacgccgcttatttacactattgcccgaatgagaccattgacggcatcgccatcgatgaaacgccggattttggcccggaagtggtcgtcacggcggatttttcttctaccatcctgtctgcgccgctggacgtctctcgctatggcgtaatttatgctggcgcgcagaagaatatcggtccggcaggactgacgctggttatcgtccgggaggatctgttaggcaaggcgcatgagagctgcccgtccatcctcgactacaccgtcctgaatgataacgactcgatgtttaatacgccgccgactttcgcctggtatctttccggtctggtgttcaaatggttgaaagcgcagggcggcgtggcggcgatgcacaaaatcaatcagcaaaaagcggagttgctgtacggtgtgattgataacagcgatttctaccgtaacgatgtcgcacaggccaaccgttcgcggatgaatgttccgttccagttagcggacaatgcgctggacaaggtctttctggaagagtctttcgccgccggtctgcacgccttaaaagggcaccgtgttgttggcgggatgcgcgcctctatctataacgccatgccgattgaaggggtaaaagcgctaaccgatttcatgatcgattttgagcgtcgccacggctaa

SEQ ID NO: 370563 - DNA, 693 bp, Salmonella enterica
atgaaagcatttgatttgcaacgaatggcgctggataacgtgccggtagcgtttttgggggaagtggcgctgcgtagcttttacacctttgttctggtgtttcttttcttaaaggtgacaggacgacgcggcgtacggcaaatgtcgctttttgaagtgctgatcattttgacattgggatcggcggcaggcgacgtcgcgttttatgatgacgttccgatgctccctgttctggtggtattcatcaccctggcgctgctctatcgcctggtcatgtggctgatggcgcatagtgaaaagttggaagatctgctggaaggcaagtcggtggtcattgttgaagacggcgaactggcgtgggaaaaactgcagcgctcgaacatgacggagtttgagttttttatggagcttcgcttgaatggcgttgagcaactggggcaggtcagactggccatcctggagacaaacggacaaatcagcgtctatttctttgaaaataaagacgttaagccggggttaagcattcttcctgagcactgtacgccacgctttatcgtggcgccggaggctggcgactatgcctgcgtacgttgcagtgaagtgatacgcatgaatatcggggaaaagcaattatgtccgcgctgcgcaaatccagaatggacgaaggcaagccgggctaaacgcgttgtttaa

SEQ ID NO: 370564 - DNA, 1836 bp, Salmonella enterica
atgtcccggcgagatagcgcccgtcacataaaacccgtatcattgcgcgctttccgtacgacaaaagtgattttcatgacgcaaacatttattcccggcaaagacgccgcgctggaagactccatcgcccgcttccagcaaaagttactcgacctcggctttcacatcgaagaggcctcctggctgaacccggtgccaaacgtctggtcagtgcatattcgcgataaagagtgcgcgttatgctttaccaacggaaaaggcgcgaccaaaaaagcggcgctggcctcggcgctgggcgaatacttcgagcgtctgtcaaccaactacttctttgctgatttctggcttggcgaaacggtcgccaatgggccattcgtgcattacccgaacgaaaagtggttcccgctgactgaaaatgacgacgtaccggaaggcttgcttgatgcccgtctgcgcgcgttttacgatccggaaaatgaactcaccggaagccagttaattgatcttcagtccggcaatgaagctcgcggcgtctgcggcctgccatttacccgtcagtccgataaccagaccgtgtatattccgatgaatatcatcggcaacctgtacgtctctaacggaatgtccgccggcaatacgcgtaatgaagcccgcgttcagggactgtcggaagtcttcgagcgttatgtgaaaaatcgcatcattgcggaaagtatcagtctgccggagattcccgcagaggtgatggcgcgttatccggcggtaatggagtcaatcgccacgctggaagccgagggtttcccgattttcgcctatgacggctcgctgggcggtaagtatccggttatctgcgtcgtgctgttcaacccggctaacggtacctgctttgcttcttttggcgcccatcctgactttggcgttgcgctggagcgtacagtgaccgagctactccagggacgcggtctgaaagatcttgatgtcttcacgccaccaacgttcgatgatgaagaagtcgcggagcacactaatctggagacccacttcatcgactccagcggcctgatttcctgggatctgttcaaacaggacgccgattatccgttcacggactggagtttttccggcactaccgaagaagaattcgccacgctgatggccatctttgctgctgaagataaagaagtttacattgccgattacgagcatctcggcgtatacgcctgtcgtattatcgtaccgggaatgtctgatatttatcctgccgaagatctgtggctggccaacaacaatatgggtagccatcttcgtgagactctgctttcgctgcccggtagcgcctggaataaagaagattatctcaatctgattgaacaattggatgaagaaggttttgacgatttcacccgcgtgcgtgaactgttgggtctggcgaccggagcggacaatggttggtatacactgcgcgtcggcgaattaaaagcaatgttagcgttagcgggcggcgatttggagcaggcgctaatctggacagaatggacgatggagttcaattcgtcggtctttagtccgacacgcgcaaactattaccgttgcctgcaaactctgctgctcctgtcgcaagaagatgcgcgtcagccactgcaatatctcaatgcttttataaaaatgtatggcgcagaggctgtagaggccgccagcgccgcgcttagcggtgaagcggctttttatggactaccggctgtcgaccacgatctacaagcgttcccggcgcatcagtccttgttaaaagcgtatgataaattacagcgcgcgaaagcggcatactggtcaaaataa

SEQ ID NO: 370565 - DNA, 858 bp, Salmonella enterica
gtgaaagctgacaacccttttgaccttttactccctgcagcaatggccaaagtggctgaagaagcaggcgtctataaagcaacgaaacatccgcttaagactttctatctggcgattaccgccggcgtattcatttcaattgcctttgttttttatattactgcgacaaccggtactggcgcgatgccttatggcatggcgaaacttatcgggggtatctgtttctctttgggactgattctctgtgttatttgcggcgctgatctcttcacctctactgttctgatcgttgtagctaaagctagcggtcgcatcacctgggggcaactggctaaaaactggttaaacgtctattttggtaacctgattggcgctctgcttttcgtgttactgatgtggctttccggcgagtatatgactgccaacggtcaatggggacttaacgtcctgcaaaccgccgaccacaaaatgcaccacacttttattgaagctgtctgcctcggtattctggcgaacctgatggtttgtctggccgtgtggatgagctactcaggtcgtagcctgatggacaaagcgttcatcatggtactgcccgtcgccatgtttgtcgccagcggttttgagcacagtatcgcaaacatgtttatgattcctatgggtattgtaatacgcgattttgctacaccggagttttggaccgcggttggttcgtctccggaaagtttttctcacctgaccgtgatgagcttcatcactgataacctgattccggtcacgatcggtaatattatcggcggcggtttgttggtcgggttgacatactgggtcatttacctgcgtggtaacgagcatcattaa

SEQ ID NO: 370566 - DNA, 2283 bp, Salmonella enterica
atgtccgagcttaatgaaaagttagccacagcctgggaaggttttaccaaaggtgactggcagaatgaagtaaacgtccgtgacttcattcagaaaaactacactccgtatgagggtgacgagtccttcctggctggcgctactgacgcgaccaccaagctgtgggacagcgtaatggaaggcgttaaacaggaaaaccgcactcacgcgcctgttgactttgacacctccgttgcttccaccatcacttctcacgacgctggctacatcaacaaagcgcttgagaaaattgttggtctgcagactgaagctccgctgaagcgtgcgattatcccgttcggcggcatcaaaatggttgaaggttcctgcaaagcgtacaatcgcgagctggacccaatgatcaaaaaaatcttcaccgaataccgtaagactcacaaccagggcgtgttcgacgtttatactccggacatcctgcgttgccgtaaatccggcgttctgaccggtctgccggatgcgtatggccgtggccgtatcatcggtgactaccgtcgcgtagcgctgtacggtatcgactacctgatgaaagacaaattcgcacagtttacgtctctgcaatccgatctggaaaacggcgtaaatctggaagcgactatccgtctgcgtgaagaaatcgctgaacagcaccgcgctctgggtcagatcaaagaaatggcagctaaatacggctgcgatatctctggtccggcgactaacgctcaggaagcaatccagtggacttacttcggttacctggctgcggttaaatctcagaacggcgcagcaatgtccttcggtcgtgtatccaccttcctggatgcgtacatcgaacgtgacctgaaagcaggcaaaatcaccgagcaagacgcacaggaaatgattgaccacctggtcatgaaactgcgtatggttcgcttcctgcgtactcctgaatatgatgaactgttctccggcgacccgatttgggcaaccgaatctatcggcggtatgggcgttgatggccgtactctggtcaccaaaaacagcttccgtttcctgaacaccctgtacaccatggggccgtctccggagccgaacatcaccgttctgtggtctgaaaaactgccgctgaacttcaagaaattcgccgctaaagtctccatcgacacctcttctctgcagtacgagaacgatgacctgatgcgtccggacttcaacaacgatgactacgctatcgcatgctgcgtaagcccgatgatcgttggtaaacaaatgcagttcttcggcgcgcgtgcaaacctggcgaaaaccatgctgtacgctatcaacggcggcgttgatgaaaaactgaaaatgcaggttggtccgaaatccgaaccgatcaaaggcgatgttctgaacttcgacgaagtgatggatcgcatggatcacttcatggactggctggctaaacagtatgtcaccgcgctgaacgttatccactacatgcacgacaagtacagctacgaagcctctctgatggcgctgcacgaccgtgacgttatccgcaccatggcgtgtggtatcgcaggtctgtccgttgctgctgactccctgtctgccatcaaatatgcgaaagttaaaccgattcgtgacgaagatggtctggctatcgacttcgaaatcgaaggcgaatacccgcagtttggtaacaacgacgctcgtgtagatgacatggcggttgacctggtagaacgtttcatgaagaaaattcagaaactgaccacctaccgtggcgctatcccgacgcagtctgttctgaccatcacttctaacgttgtgtatggtaagaaaaccggtaacaccccggatggtcgtcgcgctggcgcgccgttcggaccaggtgctaacccgatgcacggtcgtgaccagaaaggcgctgtcgcttctctgacctccgttgctaaactgccgtttgcttacgcgaaagatggtatttcttataccttctctatcgttccgaacgcactgggtaaagacgacgaagttcgtaagactaacctggcaggtctgatggatggttacttccaccacgaagcgtccatcgaaggcggtcagcacctgaacgtcaacgtcatgaaccgtgaaatgctgctggacgcgatggaacatccggaaaaatatccgcagctgaccatccgtgtatctggttacgcagtacgttttaactccctgacgaaagaacagcagcaggacgttattactcgtaccttcacgcagaccatgtaa

SEQ ID NO: 370567 - DNA, 960 bp, Salmonella enterica
atgccagttacgttaagttttggtaatcgtcataactatgaaattaatcattcacggctagcccgtttgatgagtcctgataaagaagaagcgctatacatgggggtatgggatagatttaaggactgcttcagaacacacaaaaaacaagaggtgctggaggtattatatacactcatccatggatgtgaacgtgaaaatcaagctgaacttaatgttgatataaccggcatggagaagatacatgcctttacacaattaaaacaatatgctaatccatctcaacaagaccgctttgttatgcgttttgatatgaatcagacacaagttttatttgagattgatggcaaggttattgataaatgtaatttgcatcgtctcctcaatgtttcagaaaactgtatttttaaagtgatggaagaagatgaagaagagttgttttttaaagtatgtattaagtatggagaaaaaattgcccgctatccagaattattagaaggatttgctaataaacttaaagatgcagttaatgaggatgatgacgttaaggatgaagtttataagcttatgcgatctggagaagatcgaaaaatggaatgtgttgaatggaatggtactcttactgaagaggagaagaataaactacgctgtcttcaaatggggtcttttaatattactacccaattttttaaaataggttactgggaattagagggggaagtcctgtttgatatggttcatccaacacttagctatctgctacaagcatataaaccgtcattgtcatctgatttaatagaaactaacacgatgctgttttctgatgtattaaataaggattatgatgattatcaaaataataaaagagaaattgatgctattctaagaagaatatatagatcacataataacactttatttataagtgaaaagtcgagttgtcgcaatatgcttatataa

SEQ ID NO: 370568 - DNA, 168 bp, Salmonella enterica
atgatacacttacagtatgtattgcggttgaggcgttacgagctgatgaatgagccagaatttctggcggtgcgagttatgcagcatagatttgccgtatattttatactgaatagaggtaaaatagctccattgcagcacattctggaacagccacacattctgtag

SEQ ID NO: 370569 - DNA, 798 bp, Salmonella enterica
atgagtaacttaaccaattgtattacaaatgaaagtgttgcagtaactgctgataaaaagccggttattggtcgcattcactcctttgagtcctgtggcaccgttgatggcccaggcatccgctttattaccttttttcagggctgcctgatgcgctgcctgtattgccataaccgcgacacatgggatacgcatggcggtaaagaaatcaccgttgaagacttaatgaaagaggtggtgacctatcggcattttatgaatgcttctggcggcggcgtgacggcatccggcggcgaggccattttgcaggcagaatttgtacgcgactggtttcgcgcctgtaaaaaagaaggtatccacacctgtctcgacaccaacggctttgtgcgccgttatgacccggtgattgatgaactgttggacgttaccgatctggtgatgctcgatctcaagcagatgaatgatgagatccaccagaatctggtcggtgtctctaatcaccggacgctggaattcgcgcagtatttatcaaagaaaaatgtgaaggtctggatccgttacgttgtcgttcccggctggtctgacgacgatgattccgcgcatcgcctgggcgagtttacccgcgatatgggtaatgtcgaaaaaatcgaactgttgccctatcatgagctgggcaaacataaatgggtggcaatgggcgaagaatataaactggatggcgtgaagccgcctaaaaaagagaccatggagcgtgtaaagggtattcttgagcagtatggtcataaagtgatgtattaa

SEQ ID NO: 370570 - DNA, 1422 bp, Salmonella enterica
atgccgaatgtgcaggaaaaacagttgcgatggtacaacatcgccctgatgtcgtttattaccgtttggggattcggcaatgttgtcaataactatgctaaccaggggttagtggttgtcttctcctgggtgtttatttttgcgctctatttcattccttatgccttaatcgtggggcaactgggctcaaccttcaaagagggaaaagggggcgtcagtacctggattaagcatacgatggggccggggttggcttaccttgcggcatggacctattgggtcgtgcatattccctacctggcgcaaaagccgcaggcgatactcattgcattgggatgggctttaaaaggcgacggctcgttgataaaagaatataccgtcgttgccttgcaggggctgacgctggcattgtttgttttctttatgtgggttgcttcccgggggatgaaatcgctaaaggttgttgggtctgtggccgggattgccatgtttatcatgtcaattttatatgttgtgatggcagtgaccgcgccagcaattacaaacgttgaaattgcgaccactaacatcacctggcagtcatttattcctcatatcgattttacctatatcaccaccatctctatgttggtctttgcggttggtggggcagagaagatctcgccttatgtcaaccagacgcggaatccaggaaaagaatttccgaaggggatgctctttttagccgtcatggttgcggtctgcgctatcctcggttcgttggcgatgggaatgatgtttgattcgcggcatatacctgacgatttaatgactaatgggcaatattatgcattccagaaattgggtgagtattaccatatgggtaattcattaatggtgatttatgccattgccaatactctggggcaaatcgccgcgctggtgttttctattgatgcgccactgaaagttttactgggtgatgcagacactaaatatatcccgcagcgcttatgtcgtactaacgcttcaggtacgcctgttaacggttatttgctgacattagtgttggtcgctatcttgattatgttgccaacgcttggcatcggcgatatgaacaacctgtacaaatggctgcttaatctcaattcagtcgttatgccgctgcgctatctgtgggtatttgtcgcctttattgccgtcattcgactggcgcaaaagtacaaacccgaatatgtgtttattcgcaaccgggcgttggcgttaactgtgggaatatggtgttttgccttcaccgcgtttgcctgccttaccggtattttccccaaaatggaggcgttcacgccggagtggacattccagctgacgttgaacatcgtgacgccttttgtcctggtcgggttgggattaattttcccactgctggcgcgtagaaacacataa

SEQ ID NO: 370571 - DNA, 1149 bp, Salmonella enterica
atgtccacctatacccgtcccgtcatgcttttgctgtgcgggctacttttgttgaccctggccattgcggtactgaatacgcttgtgccgctgtggcttgctcaggcaaaccttcctacctggcaggtggggatggtcagctcgtcttattttaccggcaatctggtcgggacgttatttaccgggtatttaattaaacgcattgggtttaaccgtagctattatcttgcctcgctgatcttcgccgcgggttgtgtcgggttgggggtgatggtggggttctggagctggatgagctggcgttttattgccggtatcggctgcgccatgatttgggtggttgtcgaaagtgcgttgatgtgcagcggaacctcgcataatcgcgggcgcctgctggctgcctatatgatggcctattacatggggaccttccttggacaattattggtcagtaaagtatctggtgaattgctgcacgtccttccctgggtgaccggaatgattctggcgggaattctgccgctactctttacccgaattgtaaatcagcaaacgcaggcacgtcattcctcttctattagcgccatgctgaagctacgccaggcgcgtcttggcgtgaatggttgtattatttccggcattgttcttggttcattatatggcctgatgccgttatatctgaagcatcaggggatggctaacgccagcatcggtttctggatggcggtgctggtgagcgccggcattttggggcaatggccaatgggacgtctggcggacaaatttggtcgcttgctggtgttacgcgtacaggtattcgttgtcatactcggtagtattgccatgttaacccaggcggcgatggcgccagctctgtttattctgggggcggcgggttttacgctttatcccgtcgcaatggcctgggcctgtgaaaaagtcgaacatcaccagcttgtggcaatgaaccaggcgctgttgttaagttatacggtagggagcctgttggggccgtcttttgctgcgatgttaatgcagaattattcagataatctgctgtttattatgatcgccagcgtatcgtttatttatctgctgatgctgttacgtaacgccggccagacgcctaatcctgtcgcccacatctga

SEQ ID NO: 370572 - DNA, 864 bp, Salmonella enterica
atgggaagtggatggcatgaatggccgttgatgatcttcacggtctttggtcagtgcgtggccggtggttttattgttctggctttggcgctgatgaagggcgacctgcgcgcggaaacgcagcagcgggtgatcgcctgtatgtttggtctgtgggtgctgatggggattggctttatcgcctcgatgctgcatctgggctcgccgatgcgcgcgtttaactcgcttaaccgcgtgggtgcttccgcactgagcaatgaaattgccagcggctcggtgttttttgcggtcggcgggattggctggctgctggcggtactgaaaaagctgccgccggcactgcgcacactctggctgattatcacgatggtactgggcgtcgtcttcgtctggatgatggtacgcgtctataacagcatcgatacagtaccgacctggtatagcgtctggacgccgctgggcttcttcctgacgctctttatagggggcccgctactgggttatctgctgctgcgcatcgcaggcgtgaacggttgggcgatgcgtttgttgcctgcggtgtcggtgctggcgctggtggttattgccattatggtggccatgcagggcgcggaactggcgacgattcacagttccattcagcaggcgtctgctctggtgccggattatggttcgctgatggcctggcgtatggtgctgcttgcggcggcgttgtgctgctggattgtgccacagttaaaagggtatcaacctgcggtaccgttgctctctgtcgccttcattctgatgctggcgggggaattgattggccgcggcgtattctatgggctgcatatgaccgtgggcatggcggtagccagctaa

SEQ ID NO: 370573 - DNA, 618 bp, Salmonella enterica
atgacaacccagtatggattttttattgattccagccgttgcaccggttgcaaaacctgcgaactggcctgcaaggactacaaagatttgaccccggatgtcagcttccgtcgcatttatgagtatgcaggtggcgactggcaggaggataacggcgtctggcaccagaacgtctttgcctactatctctccatctcctgtaaccactgcgaagacccggcctgcaccaaagtctgcccgagcggcgcgatgcacaagcgcgatgacggttttgtggtggtgaacgaagaggtctgtatcggttgccgctactgccacatggcctgcccgtacggcgcgccgcagtacaacgcggccaaaggtcatatgaccaagtgcgatggctgttatgaccgggtggcggaaggtaagaaaccgatctgcgtcgaatcctgtccgctgcgggcgctggatttcggcccgatagacgaactgcgcaaaaaacacggtgagctggctgccgtcgcgccgttaccgcgcgcgcatttcacgaagccgaatattgtgattaaacccaacgccaacagccgcccgaccggggacactaccggttatctggccaatccgaaggaggtataa

SEQ ID NO: 370574 - DNA, 2445 bp, Salmonella enterica
atgaaaactaagatccctgatgccgtgctggcagccgaggtgagccgtcgtggtttagtcaaaaccaccgcgataggcggcctggcgatggccagtagcgcatttaccctgccatttacccgcatcgctaacgccgcagaggcgataagcccgacgaaaaccgacgagaaagtcgtctggagcgcctgtacggtaaactgtggcagccgttgtccgctacgtatgcatgttgtggatggcgaaatcaaatatgttgaaacggataataccggaaacgatgattacgatggcctgcaccaggttcgcgcctgcctgcgcggtcgttctatgcgtcgtcgcgtctataacccggatcggctcaagtatccgatgaagcgcgtcggcgcgcgcggcgaaggtaaatttgagcgtattagctgggacgaagcctacgatatcattgccaccaatatgcagcgtcttatcaaagagtatggcaacgagtccatttatctgaactatggcacgggaacgctgggcggcactttgacacgttcatggccgccaggaaaaacgctggtcgctcgtctgatgaactgctgcggcggttatcttaatcactacggtgattactcttccgcgcaaatcgcagcgggtctgaactacacctatggcggctgggcggatggcaatagtccgtccgacattgaaaacagtaagctggtggtattgtttggcaataaccctggcgaaacccgcatgagcgggggcggtgtaacgtattatcttgaacaggcgcggcagaaatcaaacgcgcggatgatcattatcgatcctcgttacaccgacaccggcgccggtcgcgaagatgagtggattccgattcgtccaggtaccgatgcggcgctggtcaatggtctggcatatgtcttaatcaccgagaacatggtcgatcagccgttcctggataaatattgcgttggttatgacgaaaaaaccttgcctgccagcgcgccgaaaaacggtcactacaaagcctatattctgggccagggtaaagacggtatcgcgaagacgccggagtgggcggcgcaaattaccggtatcccggcggatcgcattattaagctggcgcgagaaatcggcagcgctaaacccgcctatatttgccagggatggggaccacaacgtcatgctaatggagaaatcgccacgcgcgccatctcgatgctggcgatcctgacgggtaatgttgggattaacggaggtaacagcggcgcgcgcgaagggtcttatgccctgccatttgaacgtatgcccacgttagaaaacccggttgaaaccagcatctccatgtttatgtggaccgatgccattgaacgcggcccggaaatgacggcgctgcgtgatggcgtgcgggggaaagataagctggacgtgccgattaaaatgatctggaactatgctggcaactgtttgattaaccagcactctgagattaaccgcacccacgaaatcctgcaggatgacaagaaatgcgaaatgatcgtcgttatcgactgtcatatgacctcgtcggcaaaatacgccgatattctgttgccggattgcactgcttctgagcagatggactttgcgctggatgcctcctgcgggaacatgtcttacgttatcttcactgaccaggcaattaaaccgcgcttcgagtgtaagacgatttatgagatgaccagcgaactggcgaaacgtcttggcgtggaacaacagtttaccgaaggacggacgcaagaagagtggatgcgtcatctgtacgaacagtcgcgtaaatccattccgaatctgcccacctttgaggagttccgtaagcaaggcatcttcaaacagcgcgaccccgaaggccaccatgtcgcctataaagacttccgcgaagatccgcaagcgaatccacttacaacgccatcgggcaagattgaaatctattcacaggcgttggcggatatcgccgctacctgggagctgccggaaggcgacgtgatcgatccattaccgatctacacgccaggttttgaaaactataacgatccgctaacggataaattcccgctgcagttgacgggtttccactataaagcgcgtgtgcattccacttatggcaacgtagacgtactgaaagccgcctgtcgccaggaaatgtggattaacccaatggatgcgcagaaacgcggtatcaacaatggcgataaagtccgcatcttcaacgatcgcggcgaagttcatatcgaggctaaagtgacgccgcgcatgatgccgggcgtggtcgctctgggagaaggcgcatggtatgacccggatgcaaaacgcgtggatcagggcggatgtattaacgtactgacgacccaacgtccttctccgctggcgaaggggaacccgtcacatacgaacctcgttcaggttgaaaaggcgtaa

SEQ ID NO: 370575 - DNA, 1293 bp, Salmonella enterica
atgctcgatcccaatctgctgcgtaatgagccagacgcagtcgctgaaaaactggcacgccggggctttaagctggatgtagataagctgcgcgctcttgaagagcgtcgtaaagttttgcaggtcaacacggaaaacctgcaggcggagcgtaattctcgatcgaaatccatcggccaggcgaaagcgcgcggggaagatatcgagcctttacgcctggaagtgaataaactgggcgaagagctggatgcggcgaaagccgagctggataccttgctggcggagatccgcgatatcgcactgaccatcccaaacctgcctgcggatgaagtgccggtaggtaaagatgaaaacgacaacgttgaagtcagccgctggggtaccccgcgtgagtttgattttgaaatccgcgatcacgtcaccttaggggaaatgcactccggcctcgactttgccgccgcggttaagctgaccggctcccgttttgtggtgatgaaaggacagattgcgcgtatgcatcgcgcattgtcgcagttcatgttggatctgcatacggaacagcacggctatagcgaaaactacgtgccgtatctggttaaccacgacacgctgtatggcaccggtcaactgccgaaattcgcaggcgacttgttccatacccgtccgctggaagaagaagcagacagcagcaactatgctttgatcccgacggcggaggttccgctgaccaatctggtacgcgatgaaatcatcgacgaagatcaactgccgattaaaatgacggcgcatacgccttgtttccgttctgaagcaggttcttatggtcgtgatacccgtggcctgattcgtatgcatcagtttgacaaagttgagatggtgcagatcgttcgcccggaagattctatggctgcgttggaagagatgaccggccacgcggaaaaagtgctccagctactgggactgccgtaccgtaaaatcattctgtgcactggcgatatgggcttcggcgcctgcaaaacctatgacctcgaagtctgggttccggcgcagaatacctaccgcgagatctcttcctgctctaacgtctgggacttccaggcgcgtcgtatgcaggcacgttgtcgcagcaagtccgacaaaaagacccgtctggtccataccctgaatggttctggtctggcggtaggtcgtaccctggtggctgtgatggaaaactatcagcaggctgatggccgcattgaagtgccggaagtattacgtccgtacatgaacggactggaatatatcggctaa

SEQ ID NO: 370576 - DNA, 1344 bp, Salmonella enterica
gtgagcaatctgtcgctcgatttttctgataatacgtttcaaccgctggccgcgcgaatgcggccggaaaatttagcgcagtatatcggccagcagcatttgctggccgcaggtaagccgttgcctcgcgctattgaggccgggcatctgcactccatgattttatgggggccgccagggacggggaaaaccacgctcgctgaagtgatcgcccgctacgccagcgccgatgtcgagcgtatttccgccgtcacttctggggtaaaagagattcgtgaagctatcgagcgcgcccgccagaatcgtaatgctggtcgccgtaccatcctgtttgtcgatgaagtgcatcgctttaacaaaagccagcaggacgcctttttaccgcatatcgaagatggcactatcacctttatcggcgcgaccacggaaaatccctcttttgagctgaactcggcgctattgtcgcgagcgcgggtctatctgctgaaatcgttgaccactgacgatatcgagcaagtactggaccaggcgatgcaggacaaaacgcgtggttacggcgatcaggatatcgtgttaccgaatgagacacggcgagcgattgctgagctggtcaatggcgacgcgcggcgcgccttaaatacgctggaaatgatggctgatatggcggaggcggatgacagcggcaaacgcgttttattgcccgccttgttgaccgagatcgccggcgagcgcagcgcgcgttttgataacaaaggcgatcgcttctacgatcttatttccgccttacataaatcagtgcgcggcagcgcgccggatgccgccctctattggtatgcccgtatcattactgcgggaggcgatccgctgtacgtggcgcgtcgctgcctggcgattgcctcggaagatgtgggtaatgccgatccgcgcgcgatgcaggtcgccattgccgcgtgggattgtttcacccgcgttggcccggctgaaggcgaaagggcgatcgcgcaggctatcgtttatctcgcctgcgcaccgaagagcaacgccgtctataccgcctttaaggctgcgctggccgacgcgcgcgaacgtcctgattatgacgttcctgtccatctgcgtaatgcgccaaccaaactgatgaaagagatgggctatggccaggagtaccgctatgcccacgatgagcccaatgcctatgctgcgggtgaagtgtacttcccgccggaaatcgcgcaaacgcgctattatcatccgacaaatcgtggtctggaaggcaagattggcgaaaagctcgcctggctggctgaacaggatcaaaatagccccacaaaacgctaccgctag

SEQ ID NO: 370577 - DNA, 612 bp, Salmonella enterica
atgaaaaaaatggcaatcgcctgtgcattactttcaagcgttgtagccagcagcgtatgggctgacgccgccagctctctgaaaagccgtctggataaagtgagcagctttcatgccacctttactcaaaaagtcaccgatggcagcggtgccgcggtgcaggagggacagggtgatttatgggttaagcggccaaatctattcaactggcatatgacgcaacctgacgagagtattctggtttctgacggcaaaacgttatggttctataacccgtttgtagaacaggctaccgccacgtggttgaaagatgccactggaaatacaccgtttatgctgattgcccgcaaccaggccagcgactggcagcagtataatattaagcaggatggcgataattttgtgctgacgccgaaagccagcaacggcaatctgaaacagttcaccatcaatgtgggacgcgacgggactatccaccagtttagcgccgtagaacaagacgatcagcgtagcgcctatcagctaaaatcccagcaaaacggcgctgttgatccgtcaaaatttacgtttactccgccgcaaggggtaacgatagacgaccaacgtaagtag

SEQ ID NO: 370578 - DNA, 4083 bp, Salmonella enterica
ttgagccaggaatatactgaagacaaagacgtcacattgacgaagttaagcagcgggcgccgacttctggaagcgttgttgatacttattgccctttttgccgtctggttgatggcggccttgttgagctttaacccttcggaccccagttggtcgcaaaccgcctggcatgaacccatccataatttaggcggcgcgccgggcgcgtggctggccgatacactgttctttatttttggcgtaatggcctacaccatccctgtcattattgtcggcgggtgttggtttgcgtggcgtcatcagtctacggatgattacatcgactattttgctgtgtcgctacgccttatcggcgtgctggcgctgattctcacttcctgcggtctggcggccattaatgccgacgatatctggtatttcgcctctggcggcgtaattggcagcctgttaagcaccacgctgcagccgttgttgcatagtagcggcggaacgataatgcttctctgtatttgggctgccgggctgacgctctttaccggctggtcctgggtcagtatcgccgaaaaattaggcggctggctgcttaatatactgaccttcgccagcaaccgtacccggcgtgatgatacgtgggttgacgacgaagagtatgatgacgaatacgatgaagaaaccgacggcgtgcagcgtgaatctcgccgggcgcgtattttgcgcggcgcgttggcgcgtcgtaagcgactggctgaaaaattcagcaatccacggggccgtcagaccgatgccgcgctcttttccggcaaacggatggatgatgacgaggacattcagtatagcgcgcgcggcgtcgctgccgatcccgacgacgttctgttttcgggcaaccgtgcgacgcagccggaatatgatgaatatgatccgctgttaaacggccattctgtcaccgaaccggtcgccgccgctgcggctgcaactgccgtcacccagacgtgggcagcgtccgccgatcccataatgcaaacgccgcccatgcctggggctgagccggttgtcgcgcaaccgaccgtggagtggcagcccgtaccggggccgcaaaccggcgaaccggttatcgcgcctgcgccggaggggtatcagccgcatccgcaatatgctcaaccgcaagaggcgcaaagtgcgccgtggcagcaacctgtgcctgtcgcttccgcgccgcaatacgccgcgacgccagcgaccgcagcagaatatgactctcttgcgccgcaggaaacacagccgcaatggcaggcgccggatgccgaacaacactggcagccggagccgacccatcagccggagccggtttatcagccggagccgatagcggctgaaccttccaacatgccgccgccggttatcgaacagccggttgccaccgagcctgaacctgacacagaagagaccagacccgcccgtcctccgctttactattttgaagaggtggaagagaaacgcgcccgtgagcgcgaacaactggcggcatggtatcaaccgattccggagccggtaaaagagaacgtgccggtcaaacctacggtatctgtcgcgccgtccataccgccagtggaagcggtagccgccgccgcgtcgcttgacgcaggtattaagagtggcgccctggcagcaggcgccgcggccgctgcgcctgcatttagtctggctaccggcggcgcgccgcgtccgcaggtgaaagaggggattggtccgcaactgccgcgtccgaaccgcgttcgcgtgccgacccgacgggaactggcatcgtacggtattaagctgccgtcacagaggattgcagaagaaaaagcccgcgaggcggagcgcaatcagtacgagacgggcgcgcagctaaccgatgaagaaatagatgcaatgcatcaggacgagttagcccgtcagtttgcgcagtcgcagcagcatcgttatggtgaaacgtatcagcatgatactcaacaggcagaagatgacgagaccgctgcggaagctgaattagcccgccagtttgccgcttcgcaacagcagcgctattccggcgagcaacccgctggcgcgcagccgttctcactggacgatctggatttctcgccaatgaaagtattggttgatgaaggtccgcacgaaccgctgttcacgccgggtgtcatgcccgagtcaacgcctgttcagcaacctgtagcgccgcagccgcagtatcagcagccgcagcaaccggtagcgccgcagcctcagccacagtaccagcagccgcaacagccggtagcgccgcaaccgcagtatcagcagccgcagcagccggtagcgcctcagccgcagtatcagcagccgcaacagccggtagcgccgcagccgcagtatcagcagccgcagcagccggtagcaccgcagccgcagtatcagcagccgcagcagccggtagcgccgcagccacagtatcagcagccgcagcagccggtagcgccgcagccacagtatcagcagccgcaacagccgacagcgccgcaagacagcttgatccacccgctgttgatgcgtaacggcgacagtcgtccattacagcgtccgacgacgccgctgccttcgttagatcttctgacgccgccgccgagcgaagttgaaccggtagatacctttgcgctggaacaaatggcgcgtctggttgaagcgcgtctggcggatttccgcattaaagctgatgtggtgaactattcgccaggcccggtcattactcgctttgaactgaatctggccccgggcgttaaagcggcgcgtatctccaacctttcccgggatctggcgcgctcattgtcaacggtagccgtacgcgttgtggaagtcattccaggcaaaccttacgtagggttggaattgccgaacaagaaacggcaaaccgtttatctgcgcgaagtgttggataacgccaaattccgcgagaatccgtcgccgcttaccgtggtgttaggtaaggatatcgcgggcgatccggtagtggcggatctggcgaaaatgcctcacctgctggtggccggtacgaccggttccggtaagtcggtcggggttaacgccatgatcctcagtatgctgtataaagcgcagccggaagacgttcgctttatcatgatcgacccgaaaatgttagaactctcggtctatgaaggtataccgcatctgctgacagaagttgttaccgacatgaaagacgcggctaacgcgttacgctggagcgtcaatgagatggagcgtcgctataagctgatgtccgcgctcggcgtgcgtaatctggctggttataacgagaaaatcgccgaagcggcccgcatgggacgcccgattccggacccgtactggaagccgggcgacagtatggatgttcagcatccggttctggaaaaactgccgtatatcgtggtactggttgatgaatttgccgacctgatgatgaccgtcggtaaaaaagttgaagagttgatcgcgcgtctggcgcagaaagcgcgcgccgcggggattcacctggtactggcgacgcagcgtccgtcggtcgatgtgattactggtttaattaaagccaacattccaacccgtatcgcttttaccgtatccagcaagatcgactcccgcaccattcttgatcagggtggcgctgagtcgttattgggaatgggggacatgctctattccggaccaaactccaccatgccggtacgtgtccatggggcgtttgtgcgtgaccaggaagtccatgcggtggtgcaggactggaaagcgcgcggtcgtccgcaatatgtggatggcattacctccgacagcgaaagcgaaggtggcggtggcggttttgacggcggcgaagaattagatgcgctattcgatcaggccgttaatttcgtcacccagaagcgtaaagcgtccatttccggcgttcagcgtcagttccgcatcggctataaccgtgcggcgcgtattatcgaacagatggaagcgcagggtattgtcagcgctcaggggcataacggtaatcgtgaagtgctggctccgccgccttttgagtaa

SEQ ID NO: 370579 - DNA, 495 bp, Salmonella enterica
atggtagatagcaagaagcgccctggcaaagatctcgaccgtatcgatcgtaacattcttaatgaactgcaaaaggatgggcgtatttccaacgtcgagctttctaaacgagtaggactttcgccgacaccttgccttgagcgtgtgcgtcggctggagcgacaggggtttatccagggctatacggcgctgttgaacccgcattatctggatgcgtcacttctggtattcgttgagattaccttaaatcgcggcgcgccggatgtgtttgaacagtttaatgccgccgtgcaaaagcttgaagagattcaggagtgtcatttggtttccggcgatttcgactacctgttgaaaacccgtgtaccggatatgtcagcgtatcgaaaactattgggagagacgttgctgcgcttgccaggtgtgaacgacacccgaacttacgtagtgatggaagaggtaaaacagagtaatcgtctggttattaagacacgctaa

SEQ ID NO: 370580 - DNA, 969 bp, Salmonella enterica
atgggcacgaccaaacacagtaagctgcttattctgggctcaggaccggcgggatataccgcggcggtgtatgccgcgcgcgcaaatttacagccggtacttattaccggtatggaaaaaggcggtcaactgactaccacgacggaagtggaaaactggcccggcgatccaaacgatttgaccggcccgctgctgatggaacgcatgcatgaacatgcggcaaaatttgaaaccgagataatttttgatcacatcaacaacgtggatctgcaaaatcgtccgttccgtctgacaggtgacagcgcagagtacacttgtgatgcgttgatcattgcgaccggcgcttccgcgcgctatctggggctgccatcggaagaagcctttaaagggcgcggcgtttccgcctgcgcaacctgcgacggtttcttctaccgcaatcagaaagtagcggtgatcggcggcggcaacaccgcggttgaagaagcgctttatctgtccaacatcgcttcggaagtgcaccttatccatcgccgtgacggtttccgcgctgaaaaaatcctcattaagcgcctgatggataaagtcgaaaatggcaatatcattctgcacaccaaccggacgctggaagaagtgaccggcgatcagatgggcgtcaccggtctgcgtcttcgcgacacgcagcagagcgataatatcgagacgctggacatcgccggacttttcgtagccatcggtcatagcccaaacacggcgctcttcgaaggccagcttgagctggaaaatggttatatcaaagttcagtccggcacccatggcaacgccacacaaaccagcatccctggcgtattcgcggcgggtgacgtcatggatcatatttaccgtcaggcgatcacctctgcaggtacgggctgtatggcggcgctggatgctgaacgctatctcgatggtctggccgacgcgagcaaatag

SEQ ID NO: 370581 - DNA, 1767 bp, Salmonella enterica
atgaataaaacccgtcaaaaagagctgacccgctggttaaaacagcaaagcgtaatctcccaacggtggttgaatatttcccgcctgttggggttcatgagtggcgtattaattgtcgctcaggcctggatcatggcgcgtatcctgcaacatatgatcatggagaacattccacgggaagcgctgttgctcccttttatcctgctgatactggtctttgtcctccgcgcctgggtggtgtggttgcgcgagcgcgtcggttttcatgccggacaacatattcgctttgagatccgccgtcaggtgttggatcgtctgcagcaagccggcccagcctggattcagggcaagcccgccggtagctgggcgacgctggtgttggagcagattgacgatatgcatgactattatgcgcgctatctgccgcaaatggcgcttgccgtttgcgtaccgctcttaatcgtggcggcgattttcccgtcaaactgggcggcagcgctgattctgctgggcaccgccccgctcattcccctatttatggcgatggtggggatgggcgcggctgacgccaaccgccgcaatttcctggcgcttgcccggctaagcggccattttcttgaccgtctgcgcgggatggaaacgctgcgaattttcggtcgtggagaagcggaaactgagagcattcgcgcagcatcgcaggattttcgtcagcgcacgatggaagtactgcgcctcgcctttttatcttccggcgtgctggaatttttcacctcgctttctattgcgctggtcgccgtttattttggcttctcttacctgggcgagctgaactttggtcattacggtaccggcgtgacgctcgccgccgggttcctcgccttgatcctcgcgccggagtttttccagccattacgcgacctcggcacgttttatcatgctaaggcgcaggcggttggcgcggcggatagtctgaagacgtttctggaaacacccctcgcccacccggcgcgcggcgaagttgagctggcggaaaacgaacctgtaaccattgacgcagtcaatcttattatcacctcgccagaaggcaaaacgcttgccgggccgctgaatttctcattagcggcaggagaacgcgccgtcctggtaggacgcagcggttccggtaaaagctctctgttgaatgtattatccggttttctctcctatcagggatctttgcgtattaacggtgtcgagcttcgcgatctctcgccggaatcctggcgccagcatctctcctgggttgggcaaaacccgcaattacctgcggcgacgctacgcgaaaatgtattactggcgcgcccggacgccagcgagcaggaactttatgccgcgcttgacgccgcatgggtaagcgagtttttaccgctgctgccgcagggagtagacaccccgctcggcaatcatgccagcagactttccgtcggccaggcacagcgtgtagcggtcgcccgtgcgctacttaatccctgtcaactgctactgctggatgaaccggcggcaagcctggacgctcacagcgagcaacgcgtcatgcaggcgttaaaagcggcgtcaaaacgccagaccacattaatggtgacgcatcagttggaagatctcgccgactgggacgctatctgggttatgcaagatggcgcgattgtcgaacaaggcagttatgccgaactcagcgccgccaacggcgcttttgcgacgttattggctcatcgtcaggaggatatttaa

SEQ ID NO: 370582 - DNA, 1722 bp, Salmonella enterica
atgcgcgcgctactcccttatctgacgctttataaacgccataaatggatgctaacgctgggaattgcgctggcaatcctgaccctgcttgccagtatcgggctgctgacgctttccggctggttcctgtccgcgtccgctatcgcaggcttcgcgggaatttacagttttaactatatgctcccggcagccggcgtgcgcggcgcggccattacccgtaccgctggtcgttattttgaacgtctggtaagtcatgacgccacgttccgcgtgctgcaacatctgcgtatttatacctttagcaaacttttaccgctctcccccgcgggtctggcgcgatatcagcaaggtgaactgctgaaccgcatcgttgccgacgttgacacgctggatcatctctatttgcgcgtcatctccccgctggtcggcgcttttgtagtgattatgattgtcaccctggggcttagcgttctcgacgtgacgctggcgatcacgctgggcggcattatgctgttgacgctgtttattatgccgccggtgttttatcgcgccggcaaaaataccggccaaaatctgacgcatctacgcggtcagtatcgccagcagctcacgtcatggttacagggccaggcggaactcaccatttttggcgccagcaaacgctatcgggcgcaaatggaagccaccgaattacaatggcatgaggcccaacgccgacagtctgaactcaccgccttatcgcaggcgttaatgctgctgattggtgcgctggcggtgatgttaatgttgtggatggcctccggcggcgttggcggcaatacgcagcccggcgcgctcatcgcgctgtttgtcttctgcgcgctggcggctttcgaggcgcttgcgcccgttaccggcgcattccagcatctggggcaggttatcgcctctgcgcttcgtatcactgaattaacggagcaaaaaccggaggtgacctttccgcaatcagaaactcccgcgccggaaaaggtcacactcaccctgcgggacgtttcgtttcgttatcccgaccagccgattaatgcgctcaatgccctctcattacaggctaatcctggcgagcatgtcgctattctggggcgtaccggctgcggaaaatcaacgctgttgcagctactcacccgcgcctgggacccgcaacaaggcgaaattctgctcaacgatcttccgctatcctcgttgagcgaatccgccttacgccggactatcagcgtggtgccgcagcgtgtccacctgttcagcgccacgctgcgtgataatttattactggcggcgcccaatgccagcgacgaagccctttccgatatgctgcgtcacgtcggcctcgaaaatctgctcgaagatagtgggcttaatagctggctcggcgaaggcggtcgtctgctatccggcggcgaacttcgtcgtctggccatcgcccgcgcgctgttgcatgatgctccgttaatgctgttggatgagcccactgaggggctggatgcgaccaccgagagcgaaatgctggaattacttgccgatgtgatgcgcgagaaaaccgtcctgatggtgacgcaccgtttgcgcggcctggcccgttttgatcaaatcatcgtaatggacgacgggcgcatcattgagcgaggcactcatgcagaattgttagccggacaagggcgctattatcagtttaaacaacgtctgtaa

SEQ ID NO: 370583 - DNA, 705 bp, Salmonella enterica
atgcgtctggttcagctttcccgacattctatcgccttcccttcgccggaaggcgctttacgcgagcctaacggtttactggcgctgggcggcgatctcagccctgcccggttgttaatggcctaccagcacgggattttcccgtggttttcgccgggcgacccgattctgtggtggtcgcccgatccgcgcgccgtgctgtggcctgaaaagtttcacctcagtcgcagcatgaagcgctttcacaacgcatccccttaccgcgtgacgctcaattacgctttcgatcgggtcattgatggatgcgccaatcaccgtgacgaaggcacctggataacgcgtggtattgaggaagcctatcgccgattacatgaattgggccacgcgcactccattgaagtgtggcgcgatcgggaactggtcggcgggatgtatggcgtctcgcagggggcgctgttttgcggcgaatcgatgtttagccgccaggagaatgcctctaaaaccgcactgctggttttttgcgctgaatttatccgtcacggcggtaaacttattgattgtcaggtacttaatagtcataccgcctcgctcggtgccattgaaattccacgtcgtgactacctcgatcacctcgcggccttacgccaacagccgctggcctcccgtttttgggtgccgcggacattatttttgccccggaagtga

SEQ ID NO: 370584 - DNA, 219 bp, Salmonella enterica
atggccaaagaagacaatattgaaatgcaaggtaccgttctcgaaacgttacctaataccatgttccgcgtagagttagaaaacggtcacgtggttactgcacacatctccggtaaaatgcgtaagaactacatccgcatcctgacgggcgacaaagtgaccgttgagctgaccccgtacgacctgagcaaaggccgcattgtcttccgtagtcgctaa

SEQ ID NO: 370585 - DNA, 912 bp, Salmonella enterica
atgataaaaacggatctcaatgattttgcgtggtttgtgcatgtggtcgaagagggtgggtttgccgcggcggggcgtgcgcttgatgaaccaaaatcaaaactgagccggcgtattgcgcaactggaggaacggctgggcgtgcgattgattcagcgaaccacccggcagtttaacgttaccgaagtgggacaaacattctatgagcactgtaaagcgatgctggtggaagctcaggcggcgcaggatgccattgccgcattgcaggtagagcctcgcggtatcgtgaagctgacctgcccggtgacgctgctgcatgtacacatcggcccaatgctggcgaagtttatggcgcgttatcctgatgtttcgctacagcttgaagcgaccaatcgtcgggtggacgtcgtaggggagggggtggatgtggcgattcgcgtcaggccgcgcccgtttgaagatagcgacctggtgatgcgcgtcctggctgacagagggcatcgcctgtttgccagcccggatcttatcgcacggatgggaatcccttccgcgccggcggagttgagccattggccagggctaagtcttgcatccggcaagcatattcaccgctgggaactttatggcccgcagggcgcacgtgcggaagtccattttaccccgcgtatgattaccaccgacatgttggcgctacgcgaggcggcgatggcgggcgtggggcttgtgcagctacctgtcttaatggtgaaagaacaactggccgccggtgaactggtcgcggtgctggaagagtgggagccccggcgggaggttattcatgctgtgttcccatcccggcgagggctattaccttccgtacgtgcgttggtcgattttttgacggaagagtatgcgcggatggtggaagagtaa

SEQ ID NO: 370586 - DNA, 861 bp, Salmonella enterica
atgaaacagattacaggcgtctataccgcacctcgcccgcactgggttggcgatggatttccggttcgttcactcttttcttatcagtcacatgcgcagcagttgagtcccttcctgctgctggattatgccgggccgcacacatttacgccgggtaatgaaaaacgcggcgttggggagcatccacaccgcggtttcgagaccgtgacgattgtttatagtggcgaagtcgagcatcgggactctaccggtcgcggcggcgttatcggcccgggcgacgttcagtggatgaccgcaggcgcaggcattttgcatgaagagttccattccgacgcgtttacccgtcggggcggcgaactggaaatggtgcagttgtgggttaaccttccaatgaaggacaaaatgaccaccccgggttatcaaagcattacccacgatgttatcccgaccgttacgttaccggatgacgccggagtcgtgcgggtcattgcagggcgttatgaagagacaaaaggcccggcgcacactttctcgccgctcaatgtctgggatatgcgcctgcaacgcaatcgccagcttacattggcacagccggaaggatggagcaccgcgctggtggtactgaaaggcaatatcacggtgaacggcacgacgccggtcaacgaagcgcaactggtggtattgagccagcaagggaaaacgctgcaccttgaggccagcagcgacgccagcgtattgctgttatcaggcgagccgctgaatgaaccgattgtgggttacggcccatttgttatgaacacgaaacaagagatcgcagaagcagtccgcgatttcaactccggccgttttggccaaatctga

SEQ ID NO: 370587 - DNA, 678 bp, Salmonella enterica
atgtcaagtcctgctaattttaatggtttgcgcccggtaattgatgttaacgattccgtgatgcttttaatcgatcatcaaagcggtcttttccagaccgtaggcgatatgccaatgccggaattacgcgctcgcgccgcggcgttggcgaagatggcgacgttagcgaaaatgccggtcattaccacggcatccgtaccgcaaggtccgaacggcccgctgatcccggagatccacgctaatgcgccacatgcgcagtacattgcgcgtaaaggtgaaattaacgcctgggataacgaagatttcgttaaggcggtaaaagcgacgggtcgtaagacgctgatcattgccgggacgattaccagcgtgtgcatggcattcccggccattagcgcggtagcggaaggttataaggtatttgccgtgatcgacgcatccggtacctacagtaagatggcgcaggagatcaccctggcgcgtatcgtacaggctggcgtcgtaccgatggatactgccgcagtcgcctctgagctgcaaggcacctggaaccgtgaagacgccgccgcgtgggccgacgtttatactcaggtattcccggcctatcaactgctgatagaaagctacagcaaagcgcaggatgtggtgaaaaacaacgaaatgttggattcacagcgctaa

SEQ ID NO: 370588 - DNA, 198 bp, Salmonella enterica
atgcccggactgataggctactggaagcaacttcccaccaaagatgaatatattaaaaaacacaatatgagcaaaatatcctgctacagttgtggtcacgagaaattcagcgatgttggtttgatacaggtatgggataatcacagaagaattctttgtgctaagtgtaagactactcttttcagagaagaggattag

SEQ ID NO: 370589 - DNA, 2277 bp, Salmonella enterica
atgctcaatcaagaactggaactcagtttaaacatggctttcgccagagcgcgcgagcaccgtcatgagtttatgaccgtcgagcatctgttgctggcgctgctcagcaacccatcggctcgcgaagcgctggaagcatgctccgtggatctggtggcgctccgtcaggaactcgaagccttcattgaacaaaccacacccgtactgcctgccagtgaagaagagcgtgatacgcagccgacgttaagtttccagcgtgtcctgcagcgtgccgtcttccatgttcagtcttccgggcgtagtgaagtgactggcgcgaatgtgctggtggctatctttagcgaacaggaatcacaggcggcttatctgctgcgcaagcatgaagtgagccgtctggatatcgtgaactttatttctcacgggacgcgaaaagacgaaccgagccaatcttccgatctcggcaatcagccaactggcgacgaacaagctggcggggaggaacgtatggaaaacttcacgacgaatcttaaccaacttgctcgcgtgggcggcatcgatccgctgattggtcgtgaaaaagaacttgaacgcgcgatccaggtcttgtgtcgtcgccgtaaaaataacccgttgctggtaggggaatccggcgtcggcaaaacggcgattgccgaagggctggcctggcgtatcgtgcagggcgatgtgccggaagtgatggccgattgcaccatttactctctggatatcggttcgctgctggcgggcaccaaataccgcggcgattttgaaaaacggtttaaggcgttgctgaaacagcttgagcaggataccaacagcatcctgtttatcgatgaaatccataccattatcggcgctggcgcggcgtcgggcggacaggtggatgcggcaaatctgattaaaccgctgctttccagcggcaagatccgggtgatcggctcaacgacctatcaggaattcagcaatatttttgagaaagaccgtgcattagcgcgccgtttccagaaaattgatattaccgagccttcggtggaagagacggtgcaaattatcaacggcttgaaacctaagtacgaagcgcaccacgacgtgcgttataccgcgaaagcggtgcgtgcggcggtcgagttggcggtaaaatatatcaatgaccgccatctgccggataaagccattgacgtgattgacgaagcgggcgctcgggcgcgtctgatgccggtgagcaaacgtaagaaaacggtcaacgtggcggatattgagtccgtagtggcgcgaattgcgcgaattcctgaaaagagcgtctcgcagagcgatcgcgatacgctgaagaacctgggcgatcgtctgaaaatgctggtcttcggccaggataacgcgattgaggcgctgaccgaagctattaagatgagtcgtgccggtctgggccatgagcataaacctgtcggctcattcttgttcgccgggccaactggcgtagggaaaactgaagttacggtacagctttcaaaagcgctgggtattgagctgttgcgcttcgatatgtccgaatatatggagcgtcatacggtgagccgtttgatcggcgcgcctccgggatacgtcggtttcgaccagggcgggctgctgacggatgcggtgattaagcatcctcatgcggtgctgttgctggatgagatcgaaaaagcgcacccggatgtctttaacctgctgctgcaggtgatggataacggtacgctgaccgataacaatggccgtaaggcggatttccgcaacgtggtgctggtgatgaccaccaacgccggcgtgcgagaaaccgaacgtaaatctattggtcttattcatcaggacaacagtaccgatgcgatgggcgagatcaagaaagtgtttacgccggagttccgtaaccgtctcgacaacattatttggttcgatcatctgtctggcgaggtgattcatcaggttgtcgataagtttatcgtcgagttgcaggctcagttggatcagaaaggcgtctctctggaagtcagtcaggaagcgcgcgactggctggcggaaaagggctatgaccgggcgatgggcgcacgaccgatggcgcgtgtgattcaggataacctgaaaaaaccgctggccaatgagttgctgtttggatcgctggttgatggcggacaggtcaccgtcgcgctggataaagagaaaaatgcgttgacgtatggcttccagagtgcgcaaaagcacaagccggaagccgcgcattaa

SEQ ID NO: 370590 - DNA, 321 bp, Salmonella enterica
atgggtaagacgaacgattggctggattttgaccagttggtggaagatagcgtgcgcgacgcgctaaaaccgccatctatgtataaagtgatattagtcaatgatgattacactccgatggagtttgttattgacgtgttacaaaaattcttttcttatgatgtagaacgtgcaacgcaattgatgcttgcagttcactatcaaggcaaagccatctgcggcgtgttcaccgccgaggtggcggaaaccaaagtggcgatggtgaacaagtatgcaagggagaacgagcatccgttgctgtgtacgctggaaaaagcctga

SEQ ID NO: 370591 - DNA, 222 bp, Salmonella enterica
atggaaacgggtactgtaaagtggttcaacaatgccaaagggtttggtttcatctgccctgaaggcggcggcgaggatattttcgcccattattccaccattcaaatggatggttacagaacgcttaaagccggacagtctgtccggtttgatgtccaccaggggccaaaaggcaatcacgccagcgtcatcgtgcccatcgaagcagaggccgttgcatag

SEQ ID NO: 370592 - DNA, 1947 bp, Salmonella enterica
atgacggcattgcttgaactgtgcaatgtgagtcgtagctacccctccggagaagagcaggtggcggtgttgaaagatatctccctgcaaatccacgccggggagatggtggcgatcgtcggcgtttccggttctggaaaatcaacgctgatgaatatcctcgggtgcctggataaaccgaccagcggcacttatcgggtggcggggcgggacgtctcgacgctggacccggacgcgctggcgcagctgcggcgtgagcattttggctttatctttcagcgctaccatctgttgtcgcatttaacggcagcgcaaaatgttgaaatccccgccgtctacgccggcattgaacgcaaaaaacgccaggcgcgcgccagagagttgcttttgcggctgggattaagcgatcgcgtcgattacccaccttcacagctttctggcggacagcagcagcgtgtcagtattgcccgcgctctgatgaacggtggacaggtgattctggcagatgagccgaccggcgcgctggatagccattccggcgaagaggtgatggcgattttgcgccaactgcgcgatcgcggacatacggtgatcattgtgacgcacgatccgctgattgccgcccaggcggagcggattattgaaattcacgatggcaagattgtccataatccgcccgcggaggaaaagaaacgcgaacagggcgttgacgctgccgtagttaatacggctcccggctggcggcaatttgccagcagctttcgcgaagcgctgtcaatggcgtggttagcgatggccgctaacaaaatgcgtactttactgaccatgctgggaattattatcggtattgcgtcggtggtgtcgattgtggtggtcggcgacgccgcaaaacagatggtactggcggatatccgcgctatgggcactaacacgattgatattcatccaggcaaagattttggcgacgacaatccgcagtatcgacaggcgctgaaatatgacgatctggtcgctattcagaaacagccgtgggttaactctgcgacgcccagcgtttcaaagagcttacgtcttcgctatggcaatattgatattgccgtaaatgctaatggcgtcagtggcgattattttaacgtttacggcatgtcctttagggaggggaacaccttcaattctgtacagcaacaggatcgcgcgcaggtggtggtgctggatgccaacacgcgacgccagctatttccaaataaagcgaatgtcgtaggggaagtggtgctggtgggtaatatgccggttattgttattggcgtggcggaagagaaaccgtccatgtacggcaatagcaatctgttgcaagtttggttgccctatagcacgatgtcagatcgcataatgggtcagtcatggcttaactcgatcaccgttcgtgtgaaagatggcgttgatagcgatcaggctgaacagcagcttacccgcctgctcaccttacgccacggtaaaaaagacttcttcacctggaatatggacagcgttctgaaaacggctgaaaaaaccacctatactcttcagttatttctgacgctggtggccgtcatttcgctggttgtcggcggcattggcgttatgaatattatgctggtttccgtcaccgagcgaacgcgtgaaatcggcatccgtatggcggtaggcgcgcgcgccagcgatgtgctacagcagtttcttattgaagcggtgctggtttgcctggttgggggagcgctggggattagcttgtcgatgttcatcgcatttatgctacagcttttcctgcccggctgggagatcggtttttcactgactgcgctggcgagcgcgtttttatgttcgacgtttaccgggatactgtttggctggctaccggcgagaaacgcggcgcgactggacccggtggatgcgctggcaagggagtaa

SEQ ID NO: 370593 - DNA, 1119 bp, Salmonella enterica
atgcgtgctaagggaaagaaatttaaaaagcgttatctggtcattattttaattcttttagtgggggggatggctggctggcgaatgataaatgccccgctgccaacttatcagacattaatcgtgcggccaggcgatcttgaacagagtgtactggcgactggaaaactggacgcgttgcgtaaagtggatgtcggcgcgcaggtgagcggccagttgaaaacgctgctggtctccattggcgataacgttaaaaaagatcagctactcggcgtgattgacccagatcaggcggagaaccagataaaagaggtcgaggccaccttgatggagctgaacgcggagcgtcagcaggcagccgctgagttaaagctggcgcgggttacgctggcgcgccagcagcagttagctaagactcaggcggtatcgcaacaggatctggataccgcggcgacggagatggcggttaaacaggcgcgtattggcaccatagatgcccagatcaaacgtaatcgggcctcgttggacaccgcgaaaaccaacctggaatatacccgtattgtcgcccccatggcgggggaagtgacgcaaatcactaccctgcaaggacaaacggtgattgcagctcagcaggcgcccaatattctgacgctggcggatatgagcaccatgctggtaaaagcgcaggtctcggaagcggacgtgatccatcttcgggcggggcagaaagcatggttcaccattgcaggcgatccgcaaacgcgctatgaaggcgttttaaaagatattctgccgacgccggaaaagatcaacgacgctattttttattacgcccggtttgaagtgccgaatcccaaaagaatcttgcgtcttgatatgaccgcacaggtttatattcaactcatggatgtcaaaaatgtgctgattattcctctcgccgcgcttggcgaaccggtgggcggcaatcgttataaagtggcgctgttgcgtaacggcgaaaaacgtgagcgcgaagtggtcattggcgagcgtaacgatacagacgtggaagtggttaaaggtctggaagcgggcgatgaggtgatcatcggcgaaagcaggccaggagcgacgccatga

SEQ ID NO: 370594 - DNA, 951 bp, Salmonella enterica
atgacacagcttacagataatacctggtacacttcagattacatctctcctttacaattatttattcgtctgacgcgcgggcaattacagccaggaaaattctggcgtaaagccagctttcgtcgcaagtttttaatccgctcattagtcatgccgcgtgcgaccagccaattactgaccaatctcacccaatggccggagttaaatacgttacttgctcgtcagccgcgtttgcctattcggctacatcgtccttatatggctgtaaatattaaacgcgatttcgccttagatgcgctgtgttttcattatcaacagatgcgccaacttttatcgcgggaacaacaagttagctatttaagtcagtatggcctgaatcttgctaaatttgaaactaaaaccggcgagttgtttcaacttgatttagtcagtctggtctcactggataaagaaggtgaaagcactattgttgttcgcgacgcacagttacgtattctggcagagatcacatttaccctgtgtcgctttaaccaacaacgcacactatttatcggcggattacagggcgcggcaaacgacgtccctcacgaaattatccagcaggcgaccaaagcctgccatggtctttttcccaaacgcatcgtgatggaggctctctgtcagtttgcgcaagtctttcaggcggagcagattatagccgtgagtaacgatgcgcacgtttaccgtagctggcgatacatggataaaaagacgcaaatgcatgccgactatgacgcgttttgggaatcgttaggcggtgaaagaattaaaggaaattactatgcgctaccgctggcgatcgcccgaaaaagcgaatcggagatcgccagtaagaaacgggccgagtatcgccgccgctatgcgttactcgatagcgtcgtcgaacaggttccggtcacattcaaacgttaa

SEQ ID NO: 370595 - DNA, 1659 bp, Salmonella enterica
atgattctcgaacgcgttgaaatagtaggatttcgcggtatcaaccgactgtcgttgatgctggagcaaaacaacgtgctgattggggaaaacgcctggggaaaatccagcctgctggatgcgctgactctgttattgtcgccggaactcgatctctaccattttgtccgtgaggatttctggtttccgcctggcgacataaaaggacgcgagcatcacctgcatattattctgacttttcgcgaaacgcagccagggcggcatcgggtacgtcgttatagagcgctggaagcatgctggtcgctttgcgaggatgattttcaccgtattttttatcggctagagggcgaatgcggcgccgatggcagcgtgatgacgctgcgcagttttctcaatagcgatgggcagccattactggtggaaaatattaacgatcaggtgcgccacctggttcgtctgatgccagtgctacgtttgcgcgatgcgcgctttatgcgacgtattcgcaacggtacggtgcccaatgtgccggatgttgaagtcacggcccgacagctggattttctggcgcgtgagctggcgacccggccgcaaaatttaaccgacgggcagattcgtcagggactgtccgcgatggtgcaactgcttgaacactatttctcagagcagggcgcaggacaggcgcgtcaccgactcatgcgccggcgttcgcaaaatgagcagcgtagctggcgctatctggatattattaatcggatgatcgacaaaccgggcagccggtcgcatcgggtgatcctgctggggcttttctccacgctgttacaggcgaaagggacgctgcggttacataaagacgcgcgaccattactgctggtggaagatccggaaacccgtttacatcccattatgctttcagtcgcctggcaattgctcaatctgttaccgctacagcggatagcgacaaccaactcaggcgaactgctctcgctaacgccggtggagcatgtcgtacggctggtgcgcgaatcttcccgcgtcgccgcctggcgtctgggcccgggcgggttaagcgcggaagatggacggcgtatcgcctttcatatccgctttaatcgcgcgtcgtcgctgtttgcgcgttgctggctactggtggaaggcgagacggaaacctgggttattaatgagctggcgcgtcagtgtggacatcattttgatgcggagggcattaaagtcattgagtttgctcagtccggcctgaaaccgctggtgaagttcgctcgccgtatgggaatcgagtggcatgtcctggtggatggcgacgaagcggggaaaaaatatgccgcgacggtccgcagtctgcttaataacgatcgggaagaagaacgcgaacatctcacggcgctgcctgcgctggatatggaacattttatgtatcgtcagggctttgccgatgtttttcaccgggttgcgcaacttccgcctaatgtgccgatgaatacccggaaaattatcactaaagctatccaccgctcgtcaaagccggatttggcgattgaagtcgcgatggaagccgggcggcggggaattgacgccgtgccgccgctgttcagaaagatgttctcgcgcgtggtttggctggcgcggggccgggcggattaa

SEQ ID NO: 370596 - DNA, 900 bp, Salmonella enterica
atgttttcaggacttttaatcattctggttccactgattgtgggctatctcattccactgcgacataaagccgcattacaactcattaaccggctactgagctggatcgtgtatcttattctcttttttatgggaataagcctggcgtttttggataacctcgccagtaatctggtggcgatttttcattattccgccgtcagtattacgattattttattgtgtaatatcgccgccttattgtggctggaacgtatcctcccgtggcgtcaccatcatcagcaggaaaaactgccttcgcgtattgccatggcgctggagtcgctgcaactgtgcggcgtagtggtattggggtttgttatcggcctgagcggactctctgttttacagcacgccaccgaagccagtgaatatacgctgatctttttattgttcctggtggggattcagctacgaaatagcggcatgaccttaaagcaaattgtgcttaaccgccggggaatgatggtcgcggtcgttgtcgtggcaagctcattactgggcggcgtgattaatgcgtttatcctggacttaccgctaaaaaccgccctggcgatggcgtcaggtttcggctggtactctctttccggtattttgctgacggagtcgtttggaccggttatcggcagcgcggcattttttaacgatctggcccgcgagctcttagccattatgcttattcccggtctggttcgccgcagccgttcaacggcgttgggcctgtgcggagcgacttcaatggactttacgttgccggtattacagcgctccggcggcgtagagattgttccggcggctatcgtacatggctttatcctcagcctgctggtccccctcttaatggcgttcttctcggcctga

SEQ ID NO: 370597 - DNA, 1653 bp, Salmonella enterica
atgttttgtgtgcaatgtgaacaaaccatccgtacaccagccggaaacggctgctcctacgcgcagggaatgtgcggtaaaacagctgaaacgtccgatctgcaggatctgctgattgcggctttgcaaggtttgtctgcctgggcggtgaaggcccgtgaatatggcatcattaatcacgacgttgataactttgcgccgcgcgcgtttttctccacgctgaccaacgttaacttcgactctccgcgtatcgtcggctacgcccgtgaagcgattgccttgcgtgaagcgttgaaagcgcagtgcctgagcgtggatgctaatgcgcattgcgacaatccgatggccgatctgcaactggtcagcgacgatctgggcgaactgcaacgtcaggcggcggaatttaccccgaataaagacaaagccgccattggcgagaacatcctcggcctgcgtctgctgtgcctgtacggtctgaaaggcgcggcggcgtatatggaacacgcgcacgttctcggtcaatacgacaacgacatttacgcgcagtaccacaaaatcatggcctggctgggcacctggcctgctgacatgaacgcgctgctggagtgcgcaatggaaatcggccagatgaacttcaaagtgatgagcattctggacgccggtgaaaccaccaaatacggtcacccaacgccgactcaggtcaacgtcaaagcgactgaaggcaagtgcattctgatctccggtcacgatctgaaagatctctacaacctgctggaacagaccgaaggcaccggcgttaacgtctatactcacggtgaaatgctgcccgcacatggctatccggaactgcgtaaattcaagcatctggtcggtaactacggcagcggctggcagaatcagcaggtcgaattcgcccgcttccctggcccaatcgtgatgacctctaactgcattatcgacccgaccgtgggcagctatgacgaccgtatctggacccgtagcatcgtcggctggccgggcgttagccatcttgaaggcgatgacttcgggccggtcattgcccaggcgcagcaaatggcgggcttcccgtatagcgaaattccgcatctcatcaccgtcggttttggccgtcagaccctgctcggcgctgccgatacgctcatcgatctggtcagtcgtgaaaaactgcgccacatcttcctggtcggcggctgtgacggcgcgcgcggcgagcgtaactactttaccgatttcgccaccagcgtgccggatgactgcctgatcctgactctggcgtgtggtaaataccgtttcaacaaactggagtttggcgatatcgaaggtctgccgcgtctggtcgatgccggtcagtgtaacgatgcttactctgccatcatcctcgccgttacgctggcggaaaaactgggctgcggcgtcaacgatctgccgctatcgctggtgctctcctggtttgagcagaaagcgatcgtgattctgctgacgctgctgtcattaggcgtgaaaaatattgtcaccgggccgaccgcgccgggcttcttcacgccggatctgctggctgtgctcaacgagaagttcggtctgcgttccgtgaccaccgttgaagaagacatgaagcaattgctgagcgcgtaa

SEQ ID NO: 370598 - DNA, 969 bp, Salmonella enterica
atgacgatgccaacctcacagtgtccctggcgaatgcaggtgcatcacatccgtcaggagacgccggatgtatggacaattgcgctattatgccatgattactacccttaccgcgccgggcagtatgcgctggtgagcgtgcgtaattcagcggaaacgctgcgcgcctacaccctttcgtctacgccgggcgtcagtgaatatatcacgctgaccgttcgtcggattgacgatggcacgggttcacagtggttgacccatgacatcaagcgcggcgattacatctggctgtctgatgcaatgggcgattttacctgtgacgataaaacagaagataagtttctgctgctcgccgccggttgtggcgtaacgccaatcatgtcgatgcgtcgctggctggcaaaataccgcccacaggccgatgtgcaggtcatctttaacgtccgttcgccggatgatgtgatttttgccgacgagtggcgacagtatccggtcacgctagtggcggaaaatcatgccacggaaggttttgtcgcgggccgtctgaccacggaattattacagcgcgtaccggatttggcatcgcgcaccatcatgacctgcggcccggcgccctatatggatttcgtcgaacagggagtgaaagcgcttggcgtaacgcgcttctttaaagagaagttcttcacgccggtggcggaaacggcaaccagcggcctgaaattcaccaaactacagccagcgcaggaattttatgccccgatcggtacgacgctgctggaggcgctggagagtaataaagtaccggttgccgctgcctgtcgggcaggtgtttgcggctgctgtaaaaccaaagtcgtttccggcgactatacggtgagcagcaccatgacgctgagcgaggcggagattgccgaaggttacgtactggcctgctcctgccatccgcagagcgatcttgttctcgcataa

SEQ ID NO: 370599 - DNA, 1719 bp, Salmonella enterica
atgaaacaaaccgttgccgcttttattgccaaaacgctggaacaggctggcgtaaaacaaatctggggcgtcactggcgactccctgaacggcctgagcgatagtcttaatcgtatgggaaccattgaatggatgccaacccgccacgaagaggtcgccgctttcgctgccggcgcacaagcgcagcttaccggcgagctggcagtgtgcgccggttcatgcggaccgggcaacctgcacctgatcaatggcctgtttgattgccaccgtaaccacgtccctgttctggcgatcgccgcccatattccgtccagtgaaatcggcagcggttatttccaggagacccacccgcaggagttgttccgtgaatgcagccactattgcgagttggtttccagcccggagcagatcccgcaggtactcgccatcgccatgcgcaaagcggtgctaaatcgcggcgtctccgtggtcgtacttccgggtgacgtggcgctgaaacccgcgcctgaaaacgccgtcacccattggtaccatgccccgcaccccgtcgttacgccggcggaggaagagctgaaaaaactggcgcaactgctgcgctactccagcaatatcgcattaatgtgcggtagcggctgcgcgggcgcgcatgaggagttggtcgcgttggcggcaaaactaaaagcgccaatcgttcatgccctgcgcggcaaagagcacgttgagtacgataacccttatgatgtgggaatgaccggcctgattggcttctcttctggcttccacaccatgatgaacgccgatacgctgatcctgctcggcacccagttcccctaccgcgccttttatccgagcgatgccaaaatcattcagattgacatcaacccgggcagtattggcgcgcacagcaaagtcgacatggcgctggtgggcgatattaaagccacgcttcgcgccctgctgccgctggtggaagaaaaaagcaatcgtaaattcctcgataaagctctggagcactatcgggacgcccgtaaagggcttgatgacttagccaaactcagcgataaagccatccacccacaatatctggcgcaacaaattagtcatttcgccgctgacgacgctatttttacctgcgatgtcggcacgccgaccgtctgggcggcccgctatctaaaaatgaacggcaagcgccgcctgctgggctcgtttaaccacgggtcaatggccaacgctatgccgcaggcgctcggcgctcaggctaccgcgccgggtcgtcaggttatcgcgatgtgcggtgatggcggcttcagtatgctgatgggcgattttctctcggtggtacagatgaagctgccgataaaaatcgtcgtctttaataacagcgtgctgggctttgtggcgatggaaatgaaagctggcggctaccttaccgacggtaccgaactgcacgacaccaatttcgcgcgtatcgccgaagcctgcggcattaccggtattcgcgtggaaaaagccgcagacgtggacggagcgctacagcgcgcgttttccattgacggcccggtactggttgacgtggtcgtggcaaaagaagaactggcgatcccgccgcagatcaaactggaacaagctaaaggatttagcctgtacatgctgcgcgccattattagcggccgcggcgatgaagtgatcgaactggcgaaaacgaactggctaaggtaa

SEQ ID NO: 370600 - DNA, 1002 bp, Salmonella enterica
atgattgatttacgcagtgataccgttacccgaccgggccgcgccatgctcgaggcgatgatgaccgccccggtcggggacgacgtatacggcgatgaccctactgttaacgcccttcagcgctacgccgccgacctttccggtaaagaagcggcgctttttttacccaccggcacccaggccaatctggtcgcgctgcttagccattgtgaacgcggcgaagagtatatcgtcggtcagggcgcgcataattatctttatgaagctggcggcgcggcggtgctcggcagcattcagccgcagcccatcgacgccgccgcggacggtacgctgccgctggagaacgtggcggcgaagattaaagcggatgacatccacttcgcgcgcacgcgcttgctcagtctggaaaatacgcataacgggaaagtgctgccgcgcgcgtatctgaaagacgcctggacatttacccgcgaacgtggactggcgctgcacgttgacggcgcccgaatttttaacgcggtggttgcctacggttgtgagttaaaagagattacgcagtattgcgactcttttaccatctgcctgtcaaaaggtctcggaacgccggtcggttcgctgctggtcggcaaccgcgattacattaaacgcgcgacgcgctggcgtaaaatggtcggcggcggaatgcgtcaggccgggattctggcagcggccggactgtatgcgctgaagcataacgtggcgcgtctgcaagaggaccatgataacgccgcctggctggcgcagcagcttcgcgaagcgggcgcggaggtcatgcgccacgaaacgaatatgctgtttgttcgcgttggcgaagcacaggccgccgcgcttggcgactatttgcgggaacggaatatcctgattaacgccgcgccgagtgtgcgtctggtgacgcatctggatgtttctcgcgaacagcttgccgacgtcgtcgcccactggcgcgcctttttagcccgctaa

SEQ ID NO: 370601 - DNA, 1434 bp, Salmonella enterica
gtggcgcaacgcattctggttctcggcgccagcggctatatcggccagcacctggtctttgcgctaagtcagcaaggacatcaggtgcgggcggcggcgcggcgcgtcgaacgtctggaaaaacagcgcctcgccaacgtcagttgtcataaggtcgatctgcactggccggaaaatttacccgcgctgcttcgcgacattgataccgtttactatctggtacacggcatgggcgaaggcggcgattttatcgcccatgagcgtcaggcggcgctcaacgtgcgagacgcgctgcgccagacgccggttaaacaacttattttcctcagttcattgcaggcgccagagcatgagcaatccgatcacctgcgcgcccgccagcttacggctgacacgctgcgcgacgcaggcgtgccggtgacggaattacgcgccgggatcatcgtcggcgcaggctccgccgccttcgaagtcatgcgtgacatggtttacaacctgccaatactcacgccgccgcgctgggtgcgttcgcgcaccacgcccatcgctctggaaaatttactctactacctggtcggcttgctggaccaccctgcgcacgagcatcgtattctggaagccgccgggccgcaggtattaagctatcagcagcagtttgaacgttttatggccgtcagcggtaaacggcgtccgctgatcccggtgccttttccgacccgctggatttcggtctggtttttaaacgtcattacctccgtgccgccgactaccgcaaaagccttaatccaggggttaaggcacgatttgctggccgatgacgccgcgttaaaaaagttgatcccccaaacgcttatcacctttgatgacgccgttcgccgcacgctaaaagaagaagaaaaactggtgaactccagcgactggggctacgacgcgctggccttcgcccgctggcgtcccgaatacggctattttccaaagcaggcgggctttaccgcgcagaccccggccagcctatcggcgctatggcaggtcgtaaatcggctgggtggcaaagagggctattttttcggcaatattttgtggcagacgcgcgccgcgatggaccgtctggtggggcataaactggcgaaaggccgcccgtcgcataccttgctcaagcctggcgatacggtagatagctggaaagtgatcattgtcgaaccagaaaaacagctcacgctcttgtttggcatgaaagcgccgggtctggggcggcttagcttcacgctgcacgataaaggtcgctaccgcgaaattgacgtgcgcgcctggtggcatccccacggaatgccgggcctgatttactggctactgatgatcccggcgcacctgtttattttccggggaatggcaaggcgtattgcccgatttgcagaacaaatcacagaaaaatga

SEQ ID NO: 370602 - DNA, 1014 bp, Salmonella enterica
atgaaggtactggttaccggcgccaccagcggcttaggtcgaaacgcggttgaatttttgcgcaataaaggcatcagcgtcagagcgacgggtcgcaatgaagcgatgggcaagctgcttgaaaaaatgggcgcggaattcgtccatgcggatttaaccgaactggtctcctcgcaggctaaagtgatgcttgccgggatcgacacgttgtggcactgctccagctttacctcgccctggggaacccaacaggctttcgatctggcgaatgttcgcgccacccgccgtctgggagaatgggcggtcgcctggggcgtgcgcaattttattcatatctcctctccctcgctctattttgattaccaccatcaccgtgatatcaaagaagatttccgcccgcatcggtttgccaatgagttcgcccgcagtaaagccgccggcgaagaggtgattaatctgttggcgcaggccaatccgcaaacacgttttacggtattgcgtccacaaagcctgtttggcccgcacgataaagtatttatcccacgtctggcgcatatgatgcaccattacggtagcgtcttattaccgcacgggggcagcgcgctggtcgatatgacctactatgaaaatgcgatccacgccatgtggctggccagccagccgggctgcgatcatctgccttctggccgcgcttataacatcactaacggcgaaaaccgtaccttacgcagcatcgtacaaaagttaattgatgaattgactatcgattgccgcattcgctctgtgccttacccgatgctggatatgatcgcccgcagtatggagcgcttcggcaaaaaatccgccaaagagcccccgctaacgcattacggcgtgtcaaaactgaattttgattttacgctcgatacgactcgcgcgcaggaagagctgggctaccagcccatcatcacgctggacgaaggcattgagcgcaccgccgcttggctgcgcgatcacggaaatttaccgcgttaa

SEQ ID NO: 370603 - DNA, 831 bp, Salmonella enterica
atgaaagcgctactgtggctggtgggtctcgcgttgctgttaacaggctgcgcgagcgaaaaaggaattatcgataaagagggatatcagcttgatacccgacatcgggcgcaggcggcctatccgcgcattaaagtcctggtgattcactatacggcggaaaactttgacgtttcgctggcgacgttaacgggccgcaacgtcagttcgcattacctgattcccgcaaccccgccattatatggcggtaaaccgcgcatctggcaactggtgccggaacaggatcaggcctggcatgcgggcgtcagtttctggcgaggcgccacgcgtctcaatgatacgtctattggcattgagctggaaaatcgcggctggcgaatgtccggcggggtgaaatctttcgcgccgtttgaatccgcgcaaattcaggcattgattccgttagcgaaggacattatcgcgcgctatgacatcaaaccgcagaatgtggtggcccatgcggatatcgcgccgcagcgtaaagacgatcccggcccgcgcttcccgtggcgcgagctggcggcgcaggggattggcgcctggcctgacgcccagcgtgtggcgttttatctggctggacgcgcgccgtatacgccagtcgataccgcaacggtgcttgcgttactctcgcgctatggctatgaagtcaaagccgatatgacggcgcgcgagcagcagcgggtgattatggcgttccagatgcacttccgtccggcgcaatggaacggtatcgcagatgccgaaacgcaggcgattgccgaagcattactggagaagtacggccaggattaa

SEQ ID NO: 370604 - DNA, 324 bp, Salmonella enterica
atgcagttttcaacaaccccaacgctggaaggacaaagcatcgtggagtattgcggtgtggtaacgggcgaagccattttaggcgccaatattttccgcgattttttcgccggcattcgggatatcgtcggcggacgttccggcgcgtatgagaaagagctgcgtaaagcgcgtgaaatcgcttttcaggaacttggcgagcaggctaaagcgttgggtgccgatgcggtggtaggcatcgatattgattacgaaactgtcggcaaggatggcagtatgctaatggtcagcgtcagcggaacggcggtgaaaacgcgccgatga

SEQ ID NO: 370605 - DNA, 516 bp, Salmonella enterica
atgcgctattctaaactctctttgctcatcccgtgcgcgcttctgcttagcgcctgtacgaccgtcactcccgcctacaaagataatggcccgcgtatcggcgcgtgtgtggaaggcggcccggacagcgtggctcaacaattttacgactaccgtattcaacaccacagcaatgatatcgccgcgcttcgcccctacttgagtgataacctggcgaaattgttgaccgacgccagccgcgatacggagcaccgccagttgatgagcggcgatctgttctccagccgcgctacgctgccggatagcgccaacgtcgccagcgcatcaaccattccgaaccgagatgcgcgcaacattcctctgcgggtggcgttaaaacagggcgatcaaagctggcaggatgaagtgcttatgattcacgaaggctcatgctgggtgattgacgacgttcgctatctgggcggagatgtccatgcccctgccggtacgctgcgccagtcaatagaaaaccgttaa

SEQ ID NO: 370606 - DNA, 729 bp, Salmonella enterica
atgagtattcaattaaacggcattaattgcttttacggcgcgcatcaggcgctgttcgatatcacgctggattgccccgaaggcgaaacgctggtgttgcttggcccaagcggggcgggtaaaagttcgctgctgcgtgtactcaatctgcttgagatgccgcgctccggcactttgactatcgccgggaaccattttgactttacgaaaacgccgtccgataaggcgattcgtgagctacgtcaaaatgtcggaatggtctttcagcaatataatctttggccgcatctcaccgttgtgcagaatctgattgaagcgccctgccgcgtactgggtctgacaaaagatcaggcgctggcgcgcgcagaaaagctgctggagcgtttacgtctgaagccatatagcgatcgttatccgttgcacctttccggcggtcagcagcagcgcgtcgcgattgcccgcgcgctgatgatggagccgcaggtgctgctgtttgatgaaccgaccgccgcgctggacccggaaattaccgctcaaatcgtcagcattattcatgagctggcggaaacgaacattactcaggtgatcgttacgcatgaagtcgaagtggcgcgtaagaccgccagtcgtgtgatttatatggaaaatggtcacatcgtcgagcacggtgatgcgggttgctttgcccaccctcagaccgaagcgttcaaaaactatctctctcactaa

SEQ ID NO: 370607 - DNA, 732 bp, Salmonella enterica
atgaaaaaagttctgattgccgcgctaattgcaggctttagcctttccgctacagcagcccagaccattcgttttgcgaccgaagcgtcctatccgccgttcgaatcgatggatgctaataacaagattgtcggctttgacgtcgacctggccaacgcgctatgtaaagagatcgacgcctcctgtacctttaccaatcaggcgttcgacggcctgatccccagcctgaaattccgccgcttcaacgctgtaatggcgggaatggatatcacgccggaacgtgaaaagcaggtgctgtttaccacgccatattacgacaactccgcgctgttcgtgggtcagcagggcaaatacaccagcgttgatcaactgaaaggcaagaaagtcggcgtacagaacggtacgacgcaccagaaattcatcatggataagcatccggaaatcaccaccgtaccgtatgacagctatcagaacgcgaagctggatctacaaaatggccgtatcgacgctgttttcggcgacacggcggtcgtgaccgaatggctgaaagccaatcctaagctggcgccggtcggcgataaagtcaccgataaagattatttcggcaccggcctgggtatcgcggtacgtcagggcaacaccgagctgcagcagaaattcaatactgcgctggaaaaagtgaagaaagatgggacttacgagaccatctataacaaatggttccagaagtaa

SEQ ID NO: 370608 - DNA, 717 bp, Salmonella enterica
atgaacgaattttttcctttagcaagcgccgccgggatgaccgtcggccttgccgtctgcgcgctgatcattggcctcgcgttagccatgttctttgccgtctgggagtccgtaaaatggcgcccgattgcctggataggctccgcgctggtcactattttgcgcggcctgccggaaattctggtggtgctgtttatctatttcggctcctcgcaactcctgcttacgctgtctgacgggtttaccctccatctcggctttacgcagatcccggtgcaaatggagattgagaactttgacgtcagtccgttcctgtgcggcgtgattgcgttgtccctgctgtatgcggcctatgcgtcgcagacgctacgtggcgcgctgaaagccgttccgtctggtcagtgggagtcgggtcaggcactgggattatcaaagacggcgatttttttccgtctggtgatgccgcagatgtggcgtcacgccctgccagggctgggtaatcagtggctggtgttgctaaaagatacggctctggtcagccttatcagcgttaacgatctgatgttgcagaccaaaagtattgccacacgcacccaggaaccgtttaactggtacattattgcggcggctatttacctggtcattacgctgatcagtcagtacattctcaaacgcatagacctgcgcgcaacacgttttgagcggaggccagactaa

SEQ ID NO: 370609 - DNA, 669 bp, Salmonella enterica
atgcttgagtacttacctgaactgctaaaagggctacacaccagcctgacgctgaccgtggcttctattgccgtcgctttggtgctggcgttagtttttaccatcatcctgacgctaaaaacgccgttcgtggtgtggctggtgcgcggctatatcacgttgtttaccggtacgccgttgttggtgcaaattttcctgatctactacggacccggtcaattcccgacactgcaagagtatccgctactctggcatctactgtctgaaccgtggctgtgcgcactgatcgcgttgtcgctaaacagcgccgcttataccacgcagctattttatggcgcgattcgcgcgattccggaaggtcagtggcagtcctgcggcgcgctggggatgagtaagaaagatacgctggcgattttgttgccctatgcgtttaaacgcgccctctcctcctattctaatgaggtggtactggtcttcaaaagtacctcgctggcctataccatcaccttgatggaagtcatggggtacagtcagttgctctatggtcgtacctacgatgtggtggtatttggcgcggcaggcgtaatttacctggtcgtcaacggtctattgacgctgatgatgcgtttgattgagcgtaaagccctggcgtttgagcggcgcaattaa

SEQ ID NO: 370610 - DNA, 732 bp, Salmonella enterica
atgaaaaagttagttctggctgcattactcgcctctttcgccactggcagcatcgccgctgaaaaaatcaatttcggggtttccgccacctatcccccgtttgaatccctggatgcgagtaataaaattgtgggcttcgatatcgatctggcaaccgcattatgcaagcaaatgcaggcagaatgtacttttaccaatcatgctttcgatagtcttatcccggcgctgaaattcagaaaatatgatgccgtcatttccggaatggacattaccccggagcgcagtaagcaggtcgcctttagcaatccctattatgcgaactctgcgctggtgattgccaaaaaagacacctataagacctttaccgatctaaaaggtaagcgtatcggtatggaaaatggcaccacgcatcaaaaatatctccaggataaacatccggaggtcaaaaccgtggcctacgacagctaccagaatgcgattatcgacctgaaaaatggccgtattgacggtgtctttggcgataccgcagtggtcaatgagtggctgaaaacgaatccgcaactgggtccggcaacagagaaagtgaccgatccgcaatacttcggtaccggacttggcatcgcggtgcgcccggacaataaggcgttgctggaaaaactgaataatgcgctggccgccattaaagcggacggcacttatcagaaaatcagcgatcagtggttcccgcagtaa

SEQ ID NO: 370611 - DNA, 1488 bp, Salmonella enterica
atgaaagcgattattctgctgtttgacagtctgaataaaaactatttgccgccctatggcgatttgctaacgaaagcgcctaactttcaacgcctggcggcacatgccgccacctttgacaatagttatgtcggcagtatgccctgtatgccagcccgtcgggaactgcacaccgggcgctataatttcctgcatcgtgagtgggggccgctggaaccctttgatgattccatgccggaattattgaaaaaagcggggatctacacccatcttatcagcgatcatctgcattactgggaagacggcggcggtaactaccataaccgctatagctcctgggacgtagtacgcggtcaggagggcgatcactggaaggcaagtgttggcgagccgcccattccggaagtactgcgcgttccacaaaaacaaaccggaggcggcgtttccgggctatggcgtcatgactgggcgaaccgcgaatacatccagcaggaagccgattttccccagacgaaagtttttgacgccgggtgcgattttatccataaaaatcatgccgaagataactggttattgcaggttgagacgtttgatccgcatgagccgttttataccaccgaggaatatttatcgctctatgacgatgagtggcaaggcccgcattatgactggccgcgcggcaaagtcagtgaaagcgaggaggcgatagcgcatattcgctgtcgttatcgggccttggtttccatgtgcgaccgcaatctgggacgtatccttgatctgatggatgaacacgatctctggcgcgatacgatgctgattgtcggtaccgatcacggcttcttgctgggggagcacggttggtgggctaaaaatcagatgccctattataacgaggtggcgaataacccgctgtttatctgggacccgcgcagcgcggtatgcggagcgcgacggcagtcgctggtgcagatgattgactgggcgccaacgctactggattattttcagcaacctattcccgcagatatgcagggccaaccgctggcgaaagtcattgccagtgatgaacccgtcagggaaggcgcgctgtttggcgtgtttagcggacatgttaatgttaccgacggacgctatgtttatatgcgggccgcgcagccggggcgtgagcatgacattgcgaactacacgttaatgccgatcaagatgaatgcgcgttatgacgtggatgaactgggaaaattatctctggcacctccgtttaactttactaaagggcttcaggtattacgtattccggccagggaaaaatataaaggtgtgaatagctttggtcatctcttgtttgatctcagagacgatccgcagcagcaacatcctattcatgatgaggccatcgaagcaaggatgatcaacttacttatccgtttgatgaaagaaaatgatgctccggcggagcagtatcgccgtctgggtctggatgttgtctaa

SEQ ID NO: 370612 - DNA, 321 bp, Salmonella enterica
atgaaagattctgtaaatattttattcgtatgcggttatggtgtaggcagtagcgtaatgttacagactgttgttaaaaaagcgttagcaaaatatgacttctcttttgatatggagcatacggcagcgggagaggtcggtggatttaccgactgggcagatatttatgcgatttcgaaaaaattgcttgatgtcgttagccttgaccctaaacacggacaatatcttattcccattgaaaatatcatggatggcgaatcaataggtaaacagatttacgatgtggtagagaaaaattttccgcacctgctcaacaaatga

SEQ ID NO: 370613 - DNA, 1344 bp, Salmonella enterica
atggagggcgttcagacgatgtttgccaaatttatagatgttattcaaacgtttttaactgaaccggcaatattaattgggatattagtcggtgttggctatgcgctggataaaaagacgcctataaaaattatcaccggtatgatcagcgcgatggtcggtttgatgatggtgttatttggcggctttcaattttcagccacttttaaaccggttgcagaggcagtcagcaaggcttatggcgtgcatggatacttaatggattcatatgccatgaaagccgcgacgcaaatagcgctgggcgataatttcggctatgtaggatacgtttttgtactggcgttttttactaacctgttattagttttatttggccgttataccggcgcaaaaggtatatttcttaccggtaataccggggtctctcattcacaggcagtactgtggttaatcgtcttctggctggggttcggttgggtacaatccattgtgattgccggggtattgaccggggtcttttgggcgttttcaactacgcttattgttaaacccatcgccaaagtgaccaataacgccggttttaccattgcgcataaccagatgctgggactgtggtttttctcgaaattcgcgcataaattcggcgatccggaaaagcatgacgccgaaaacctgaaacttcccggttggttagccatttttaaccacaacgtgacggcaatcgccattgtgatgacgctcttcgttggcggttttctattggcgacagggatcgataacgtacagttaatggcgaaaggaaaaccctggtatatttatatcatcaatctgggcctgcaattctctatgtatatggtcatcttgctgcagggcgtgcggatgatggtaggcgaaattaacggttcgtttaaaggatggcaggatcgctttattcctaacgctataccggctgtggatgttgctgctttattacctttttcgccgaacgcggccacgctgggattcgtcttttgtactttcggcacgattttttccatgggcatcctgctgctcatccatagccctattatggtattgcctggttttgttccgctcttcttttccggcggtcccatcggcgtattagccaaccgaatggggggatatcgttccgttattatttgtactttcctgttagggattattcagactttcggtacggtatgggccattcctttaaccgggctggcaaaagaaggcgtgggctggacgggaatatttgactgggcgactctgtggcctgcgatttgtgaattactgaaatttattgcttcaacgttccatcttggtccttattccatttaa

SEQ ID NO: 370614 - DNA, 1128 bp, Salmonella enterica
atgcagtgcgcactctatgacgcgggtcgctgccgttcctgtcaatggattacgcagtcggttaacgaacaactttccgcaaaaacagccgatttacatcgtttgctcgccgggctgcctgttgaacagtggtgtgcgccgattggcggcccggaacagcatttccgcaacaaagcgaaaatggtcgtgagcggtagtgtagaaaaaccgctcttcgggatgctgcatcgcgacggtacgccggtcgatctttgcggctgcccgctgtatcccgcctcctttgcccccgtattcagcgcgctaaaaccttttattgcccgtgccggactcacgccttataacgtggcgcgaaaacgtggcgaactgaaatacctgttgctgacggaaagtcagttcgatggcggcatgatgctacgcttcgtgttgcgttcagaaaccaaacttacgcaactgcgcgcggcgttaccgtggctgcgcgcgcaactgccgcagctcagagtgatcaccgcaaatatccagccggtacatatggcgattatggaaggggagacggaaatctacctgacggatcagcaggcgctggcggaacgttttaacgatgtgccgctgtggattcgcccgcaaagtttctttcagaccaaccctacggtcgccagccgattatatgcgacggcgcgcgactgggtagggcaactgccggtacgccatatgtgggatcttttttgcggagtgggcggattcggcctgcactgcgcgacgccgcagatgcaattaaccggtattgagatcgcgccggaggcgattgcctgcgcgaagcaatccgctgccgagctgggattgacccgccttcatttccaggcgttggattccacccaattcgccaccgcacaaggtgaaacgcccgacctggtgttggtgaatcctccccgccgcggcattggcaagccgttgtgcgattaccttgcacaaatggcgccgcgttttattatttattcaagctgtaacgcgcagacgatggcgcaggatattcgtcatctgccgaactaccgtattcaacgtgttcagcttttcgatatgttcccgcataccgcgcattatgaggttttagcgttactgcgcaggctgtag

SEQ ID NO: 370615 - DNA, 402 bp, Salmonella enterica
atggcgattattttgattcgcggtctcgatgtgctgatgattatgaataccctcggcatacgcgggatgggcgagtttattcatcgcagcgtgcagacgtggagcttaaccctggtctttctggccagtttagtgctggtctttgttgaaatttattgtgcgttttcgctggtgaaaggccgtagctgggcgcgctgggtgtacctggcgacacaaattattgtgagcggatatctgtgggcggcgtcgttaggctacggatatccggagttgtttagcatcgcgggagaatcgaagcgtgatatcctgcattccctggtcatgcaaaaactccccgatcttttaattctgtttctgctgtttattcccgctcccagccgtcggttcttccggctgcaataa

SEQ ID NO: 370616 - DNA, 846 bp, Salmonella enterica
atgaataacttaccggttgttcgctcgccctggcgcattctgattctggtgctggggtttacttttctctatgcgccgatgttaatgttggtgatttactcgtttaacagttcgaagctggtgacggtgtgggcgggatggtcgacgcgctggtatggcgagctctttcgggataccgccatgatgagcgcagtgggactaagcctgacaattgccgcctgcgcggcgacgatggcggtggtgctcggtactatcgccgcggtggtgatggtgcgatttggacgatttcgcggcgcaaacggctttgcgtttatgatcaccgcgccgctggtgatgccggatgtgattaccgggctgtcgctgctgctgctgtttgtcgcgcttggtcatgctatcggctggccctccgatcgcgggatgctgaccatctggttggcgcacgtcactttctgtaccgcctatgtggcagtggtgatcgcttcgcgattacgcgaactggatcgttcgattgaagaggcggcgatggatcttggcgcggcgccgttgaaggtctttttcgtcattacgttaccgatgatcatgccagcggtgatctcgggctggctgttggcctttacgctctcccttgacgatctggtgattgccagcttcgtttccggtcccggcgccaccacgctaccgatgctggttttctccagcgtgcgcatgggcgtgaacccggaaatcaacgcgctggcgacgttaatcctcggcgtggtaggaatcgtcggatttattgcctggtacctgatggcgcgagcggaaaaacagcggattcgcgatatccagcgtgcaagacgcggctga

SEQ ID NO: 370617 - DNA, 954 bp, Salmonella enterica
atgagcacacttgaacctccggcacgcatcagtaaacctggcggcgcggcgctatggttggcgcgaatgcaaatgaaacatgggcgtaagctggttattgctttgccttatatctggctcattctgctgtttttactgccgtttcttatcgtctttaagataagtctggcggaaatggcgcgggcgatcccgccgtataccgatctgctggaatgggctgacggtcagttgtcgattacgctcaatctcggtaattttttgcaactgaccgacgatccgctttatttcgaagcctatctgcaatcgttacaaattgccggtatttccacaatctgctgcctgctgctgggctacccgctggcgtgggcggtggcgcacagcaagccctccacgcgcaatatcctgctgctgttggtgatcctgccctcgtggacgtcttttttaatacgcgtctatgcctggatgggcattttgaaaaacaacggtgtgctgaacaatgtgttgctgtggctaggggttatcgatcagccgctgacgatcctgcacactaacctggccgtctatatcggcattgtttatgcgtatctgccgtttatggttctgcccatttataccgcattaacacgtattgattattcgctggtggaagcgtcgctggatctcggcgcccgaccgctgaaaacattttttagcatcattgtcccgctcaccaaaggcggaatcatcgccggctcgatgctggtttttatcccggcggtgggcgagtttgtgatcccggaactgcttggcgggccggacagtatcatgattggtcgcgtcctgtggcaggagtttttcaataaccgcgactggccggttgcttctgcggtcgccattattatgttgctgctgctgatagtaccgatcatgtggttccataaacatcagcaaaaaagtgtgggggagcatggatga

SEQ ID NO: 370618 - DNA, 1134 bp, Salmonella enterica
gtgaatgatgtcccccaccgcccgcaggtgaaaacccgtaaagcgctgacgccgcttctggaaattcgcaacctgacgaagtcattcgacgggcaacatgctgtcgatgatgtcagtctgactatctataaaggcgagatttttgccctgctgggcgcgtcaggttgtggaaaatcgactctgctacggatgctggcaggttttgaaccgccgagcagcgggcaaattatgctcgacggcatcgatctggcgcatgttccgccgtatcagcgtccgattaatatgatgtttcagtcctatgcgttgtttccgcatatgacggtagagcagaacatcgcttttggtctgaagcaggacaaactgccgaaggcggagattaccagccgcgtcaatgagatgctgggtctggtgcacatgcaggagtttgcgaaacgtaagccgcatcagctttccggcggtcagcgtcagcgcgtggccctggcgcgcagcctggcgaaacgtcctaagctgctcttgttggatgaaccgatgggcgcgctggataaaaaattacgcgaccggatgcagcttgaagtggtggatatccttgagcgcgtcggcgtgacctgcgtcatggtgacgcacgatcaggaagaagcgatgacgatggcggggcgcattgccatcatgaaccgtggaaaatttgtgcaaattggcgaaccggaggagatttacgagcatccgacgacccgctacagcgccgaatttatcggatcggtaaatgtttttgagggcttactgaaagcgcgtgaagaggacggtctggtcattgacgcgcccggtttggttcatccgttaaaagtcgatgcagatgcctctgtcgttgataatgtgccggtatatgtggcgctacgtccggaaaaaatcatgctctgtgagtcgccgcctgccgatggctataatttcgccgtcggcgaagtggcgcatattgcgtatctcggcgatctgtctatttatcatgtgcggctaaaaagcgggcagatgatcagcgctcaactgcagaatgcgcaccgttaccggaaagggttaccgacctggggcgatgaagtgcgtttgtgctgggaagcggatagctgcgtggtcctgacggtataa

SEQ ID NO: 370619 - DNA, 1116 bp, Salmonella enterica
atgatgaccgccttaaagaaaaaatggctatcgggtctggttgcgggtgctctgatggtcgtctctgtcggcacgctcgctgccgaacaaaaaacgctgcacatttataactggtcagattatatcgcgccggacacggtggcgaactttgaaaaagagaccgggattaacgttatctatgatgtctttgactctaacgaagtgctggaaggcaagttaatggcaggcagcaccgggttcgatctggtggtgccatcggccagttttcttgagcgccagctcaccgcgggcgtttttcagccgctggataaaagcaaacttcccggctggaaaaacctcgatcctgaactgctgaaactggtagcgaagcacgatcctgacaacaaatacgccatgccctacatgtgggccacgacgggcattggctataacgttgataaagtgaaagcggtgctgggggatgatgcgccagtgaatagctgggatttagtcctcaagccggaaaatctggagaagctaaaaagctgcggcgtctctttccttgatgcgcctgaagaaatttttgccactgtgctgaactatctgggtaaagatccgaatagcagcaaagcggatgactacaccggcccggcaaccgatctgttgttgaagctacggccaaacattcgctattttcactcctcgcaatacattaacgatctggctaatggcgatacctgtgtggccatcggctgggcgggcgatgtctggcaggccgctaaccgggcgaaagaggcgaaaaatggcgtcaatatctctttctcgatccccaaagagggggcaatggcgttttttgatgtgtttgccatgccggctgacgccaaaaataaagacgaggcctaccagttccttaattatctgctgcgccctgatgtgattgcccatatttccgatcacgttttctacgccaatgcgaataaagaggcgacggcgctggtcagccagcaggtgcgcgataacccgggaatttatccgccggcggatgtgcgggccaagttgtttaccctgaaagtgcaggagccgaagattgatcgcgtccgcacccgcgcatggacgaaggtgaaaagcggtaagtaa

SEQ ID NO: 370620 - DNA, 477 bp, Salmonella enterica
atgatatcactggtcgttcccactctggatacgttgcgtcaatggctcgacgacctgggcatgaatttcttcgaatgtgatacctgccaggcgctgcatttgccgcatatgcagaattttgacggcgtctacgatgctaaaatcgatttggtggacaacaccattcttttttccgcgatggcggaggtcaggccttccgcgttgctgccgctggcggccgatctctctgctatcaacgccagttcgttgacggtaaaagcctttctcgatatgcaggatgataatctaccaaaactggttgtgtgccagtctttatccgttatgcaaggcgtcacctacgaacagttcgaatggtttgttcgccaaagtgaagagcagatttctatggtgatccttgaggccggggcgcatcagcttctgtttaacgcggaagaagacgcgcaaaaaaccagcgcagttgaccattttcttcactaa

SEQ ID NO: 370621 - DNA, 903 bp, Salmonella enterica
gtgaaaattgccatattgtccagggatggaacgctctattcttgcaaacgtctgcgcgaagcggcgatgcggcgcggccatctggtcgagatactcgatcctctttcctgctatatgaatattaatccggcagcgtcgtcgatccattacaaggggcgtcgtctgccccattttgacgccgttattccccgtattggttcggccattaccttttatggtaccgctgcgctacgtcagtttgagctattgggtagctatccgctgaatgaatccgtcgccattacccgcgcgcgcgataagctgcgatcgctacaacttctggcgcgccaggggatcgatcttcccattaccgggatcgcccattcgccggatgataccagcgatcttattaagatggttggcggggcgccgctggtcgtgaagctggtagaaggcacgcaagggatcggcgtggtattggcagagacgcgtcaggctgctgaaagtgttattgatgcgtttcgggggctgaatgcccatatcctggttcaggaatacattgccgaagctaaaggatgcgatattcgttgtctggtcgtcggcaatgaggttgtggcggcgattgagcggtgcgcgaaagccggtgattttcgctccaatcttcatcgcggcggggtggccagcatcgcgacgatcacgccccgtgaacgggatatcgccatcaaagccgcacagacgctggggctggatgtggcgggcgtcgatattttacgcgccgcgcgcgggccgctggtgatggaggtgaatgcctcgccgggactggaaggtatcgaaaagactacgggcgtggatatcgcggggcgaatgattcagtggatagaacgtcacgctacgcctgaattttgccttaaaatcggcggctaa

SEQ ID NO: 370622 - DNA, 540 bp, Salmonella enterica
atgagtccgaccattgaacttctttgtggccatcgttctattcgccatttcaccgatgaacccgtgactgacgcgcagcgagaggccattattgccgccgcgcgcagcacgtccagttccagttttttacagtgcagctctattatccgtattaccgatcgggcgctgcgtgaggcgttagtgcccctgacgggcgggcaaaagcatgtggcgcaggccgctgagttctgggtattttgcgccgattttaatcgtcatttgcagatctgtcctgacgcgcagctggggcttgccgaacaactgttgctcggtgtcgtcgatacggcgatgatggggcaaaacgcgctgacggcggcggaatcactggggttaggcggcgtgtatatcggcggcatccgtaacaatattgagtctgttaccgaactattaaaattgccgaagcatgtattgccgctctttggcctgtgtttgggatggcctgcggataatccggatctgaaaccgcgcctgcctgccgagcttgtggttcatgagaactag

SEQ ID NO: 370623 - DNA, 291 bp, Salmonella enterica
atgcgcacgattggcgtgttacccaaaagcgtactgatactggaatgcctcggtatgattttgctggcgcttgctctgctatcgcttaatcattaccttacgctgcccgcgccgttcaatacgccgctggctggcgtattgatggttttcctcggcgtcgtgttgatcctccccgccgcggtggcgatgatgtggcgtattgcgcagttactggcgccgcagttgatgaaacgtccacccgacatttcttcccgttcagatagagaaaagcataatgagtccgaccattga

SEQ ID NO: 370624 - DNA, 264 bp, Salmonella enterica
atgtttactgttatttttggccgcccagggtgcccttattgcgtgcgtgcaaaagagttggcggaaaaactgagcaaagaacgcgacgattttaactaccgctatattgatatccatgctgaaggcattactaaagcggatttggaaaaaaccgtaggtaaacctgtagaaaccgtaccgcagatttttgtcgatcaaaaacatatcggcggctgtacggattttgaagcatgggcaaaagaaaatctgaatcttttcgcctga

SEQ ID NO: 370625 - DNA, 378 bp, Salmonella enterica
ttgaaacataaacacgggtgggcaagcgttgtctgctgctttgtactctttattgtggtgtgtctttcattaactatgcatgtacaaggcgcttttcgcgcggcagggcatcctgagattggactgttattttttacgttgcctggtgcggtggccagtttttgttctcaccgacgcgaggtgatccgaccgctgatcggggcgatgctggcggcgccgttttgcctggtgttaatgcgcgtggtatttatgcctacccgatcgttttggcaagaactggcgtggttatttagcgccgtattctggtgtgcgttaggcgcgctctgttatttgtttattagcagcctgtttagccaccggcgaaaaaaacgccaatag

SEQ ID NO: 370626 - DNA, 1686 bp, Salmonella enterica
gtgaatataaacgtcgcagatttgttaaatgggaattacatcctgttattatttgtggtcctggctcttggcctgtgtcttggcaagttacgtctgggttcagtccaacttggtaattccattggcgttttagtggtctctctattattagggcagcaacactttagtattaacaccgacgcgctaaatctgggatttatgctgtttattttttgtgtcggcgtcgaggctggccccaactttttttcgattttttttcgcgacggtaaaaattatctgatgcttgccctggtcatggtcggtagcgctctgctaatcgccttaggccttggtaagctattcggctgggatatcggcctgacggccggtatgctggctggctcaatgacctccacgcccgtgctggttggcgcaggcgataccctgcgacattccggcatcgccagcacccaactctcctccgctcttgataatctgagcctgggctatgccctgacctatctgattgggttggtcagtctgatcgtgggcgcgcgctacttgcctaaactacagcatcaggatttgcaaaccagcgcccagcaaattgctcgcgagcgcggtctggataccgatgctaatcgcaaggtttatttgccggttatccgcgcctatcgggttggcccggaactggtggcctggactgacggcaaaaacctgcgcgagctgggtatttaccgccagacaggctgctatatcgaacgtattcgtcgtaacggtattctggcgaacccggatggcgatgcggtgctgcaaatgggcgatgagattgcgctggtcggctatccggacgcgcacgccaggctcgatcccagcttccgtaatggtaaggaagtgtttgatcgcgatctgcttgatatgcgcatcgtgacggaagaaattgtggtgaaaaaccacaatgcggtcggtcgccgcctcgctcagctcaagctgaccgatcatggctgcttccttaaccgcgtcatccgcagccagatcgaaatgcctatcgacgataacgtcgtgctgaataaaggcgacgtgttacaggtgagcggcgacgccagacgcgtaaaaaccatcgccgatcgcattggttttatttcgatccatagtcaggtgacggacctgctcgccttctgcgctttttttatcatcgggttaatgatcgggatgattaccttccagttcagcaattttagtttcggcatcggcaacgcggccggattgttgttcgccgggatcatgctcggtttcctgcgcgctaaccatcctacctttggttatattccgcagggcgcgcttaatatggtgaaagaattcggcttgatggtgtttatggcaggcgttggtttaagcgccggcagcggtatcagcaacggtctgggcgcggtcggcggacaaatgctgatcgccgggcttgtcgtcagcctggtaccggtggtgatctgcttcttgtttggcgcttatgtgctgcgcatgaaccgggcgctgctgttcggtgccatgatgggcgcgcgtacctgcgccccggcgatggaaatcattagcgatacggcgcgcagtaatattccagcgctgggttatgcggggacttacgccatcgccaacgttctgctaacgctggcggggacgcttattgtcatcatctggccggggttaggataa

SEQ ID NO: 370627 - DNA, 621 bp, Salmonella enterica
atgaaagaaaatgccgtaagacgcgccaatgatcctaagcgacgggaaaaaataattcaggccacactggaagcggtaaagacctatggcgttcatgccgtgacgcaccggaaaatcgccgctatcgctcaggtgccgcttggctcgatgacctactattttgccggtatggatgcgttattgagtgaagcctttacacttttcaccgagaacatgtcgcgtcaataccaggacttttttgcgcaggtgacggatgcggagggggcgtgccaggcgataacggaaatgatttacggctcgcaggttacgacgccggataatatggcgttaatgtatcagttatatgcctatgccagcgataagccagcgttaaaaatagtcatgcaaaactggatgcagcgtagccagaatacgctggcgcagtggtttgacgcacagaccgcccgcgcgctggatgcgtttatcgaggggatgacgctgcattttgtaacggatcgaacgccgctggcgcgtgaagcgattttacagatggtaaagcgaatcgccggagagtcaatgtcgtgtcactctgcgtcaggcaacaaaaaacccaccaaccttgaaccgaaatggcggggttga

SEQ ID NO: 370628 - DNA, 1212 bp, Salmonella enterica
atgaccgtcctctcctcacgtaacgccttaaaacgccgtacctgggcgctgtttatgttcttctttttacccggactgctgatggcctcctgggcaacccgaacgcctgctattcgggatattctttccgtctctaccgcggaaatgggggcggtcttattcgggctttctatcggttcaatgagcggtattctttgttccgcctggctggtgaaacgatttggcacccggaaggttattcgcacgacgatgacctgcgcagtaggcgggatggttattcttagcgtcgcgctgtggtgcgcctcgccgctgatttttgcccttggattagccgttttcggcgccagttttggcgccgccgaagtggcgattaatgtcgaaggcgcggcggtcgaacgcgagctgaataaaaccgttctgccgatgatgcatggtttttacagtttcggcacgctggcgggcgctggtgtcggcatggcgttaaccgcattaagcgtcccgcctaacatccatatcatcctcgcggctgccgtggcgatcgcgcccattttcatcgccattcgggcgatccctgacggtacgggtaaaaacgcatcggaagatgctcaccttcaggaaaaaggattacctttttatcgggacatccagcttttgcttattggcgtggtggtgctggcaatggcattcgccgaaggatctgcgaatgactggctaccgctactgatggtagacggacacggttttagcccaacctccggctctctgatctacgccggtttcacgcttggtatgaccgttggccgctttaccggcggctggtttattgaccgctatagccgggtgacggttgttcgcgccagcgcgttgatgggagcgttgggcattggcctgattatttttgtcgatagcgactgggttgccggcgtctcggtcattctttggggcttgggcgcttcgctcggcttcccgctgaccatttccgccgccagcgataccggtcccgacgcgccgacgcgtgtgagcgttgtcgccacgaccggctatctggcgtttttggtcgggccgccgctgttgggctatctgggagagcactatggattacgcagcgccatgatggttgtgctggcgctggttattctggcggcgctggtggcgaaggccgtcgccaaacctgtatcgactccgcaaccggtgatggagcataacgcatga

SEQ ID NO: 370629 - DNA, 816 bp, Salmonella enterica
atgagtattaaattaatcgccgtcgacatggacggcacgtttctgagcgatcaaaaaacctataaccgtgaccggtttatggcgcagtaccaacaaatgaagcggcaaggcattcgctttgtcgtggccagcggcaaccagtattaccagttaatctcgttctttccggaaattgcgcacgaaatcgcttttgtcgcggaaaacggcggctgggtggtcagcgaaggagaggatatttttaacggcgagctgacaaaagccgacttccagacggttgtcgaacacctgctcacacgcgccgatgtggagattatcgcctgtggaaaaaacagcgcctacacgctgaaacggtacaacgatgcgttaaaagccgttgcggcaatgtattatcatcgtctggagtttgtggataattttaataacatcaacgatgtctttttcaaattcggccttaatattaccgatgaacggataccggaagtacaggcggcgctgcacgacgctattggcgatatcatggtccccgttcataccggctatggcagtattgatttaataattcccggcgtgcataaagccaacggcctgcgtctgttacagcagcgctggggcattcatgatagtgaagtggtggtattcggcgacggcggcaacgatattgagatgctgcgtcaggccgggtttagttttgccatgtcgcacgccagcgaagcggtcgcggcggcggcgaaataccgcgccggatcgaacaatcaggaaggcgtgctggatatcatcgacagcgtattaaacaacgagccgccgttcaacgtctag

SEQ ID NO: 370630 - DNA, 1233 bp, Salmonella enterica
atgcagaatcgtttacaatcaggcggcaggctgggacgtcaggcgctgctttttcctctctgtctggtgctgtacgaattttctacttatattggcaacgacatgatccagccgggtatgctggcggtggttgagcagtatcaggcgtgcctggactgggttccgacgtccatgaccgcttatctggcgggcggtatgttcttacagtggctgcttggcccgttgtctgaccggattggccgtcgtcccgtgatgctggcgggcgtcgtgtggtttattgtcacctgcctggcgacgttactggcgaaaaacatcgaacaatttaccttcctgcgttttttgcaagggattagcctgtgttttatcggcgctgtagggtatgccgcgattcaggagtcctttgaggaggcggtgtgtataaaaattaccgcgctgatggcgaacgtggcgttaatcgcgccgctactgggaccactggttggggcggcatgggtgcatgttctgccgtgggaggggatgtttattttatttgccgcactggccgctatcgcctttttcgggctacagcgcgcaatgccggagaccgccacgcggcggggcgaaacgctgtcatttaaggcgctgggccgggattatcggttggtgataaaaaaccggcggttcgtcgcaggggcgttagcgctgggatttgtcagcctgccgttgttggcctggattgcgcagtcgccgattatcatcattagcggcgaacagctcagcagctatgaatatggtctgctgcaggtgcccgtttttggcgcgctcattgccggtaatctggtgttggcgcgtttaacctcccgacgtacggttcgctcgctgatcgtgatgggcggctggcctatcgtcgcggggctgatcatcgccgcggcggcgacggtggtttcatcccatgcttatttatggatgacggcgggattaagcgtatacgcttttggcattgggctggcgaatgccggactggtgcgtctgacgctcttctccagcgatatgagtaaaggaacggtctcggcggcgatgggaatgctacaaatgctgatttttaccgttggcattgaagtcagtaaacacgcctggttaagcggcggcaatgggctatttagcctgtttaatctggcaaacggtattctttggctactgctgatgctggtcttcttaaaagataagcggacggggaattcgcaaacagtctga

SEQ ID NO: 370631 - DNA, 675 bp, Salmonella enterica
atgctcagtttgcacggggatgagctggctatcccttttgatttcattgctccgagcctggatgttatgctggaaaaccttaacaactcgctgttttattttattaacgccacgcctgattccgcgcagtggataatttcgctcgctatctttatcgccaaagatgtcatcaacatcgtcccgctcttagccgtggtactctggctgtgggggccccgcgatcgggtctgcgcccagcgccagctgatcgttaaaatcggcatcgcgctgattatcagtctggcggtctcctggacaatgggacaccttttcccgcacgaccgtccgtttgtcgatcatatcggctataacttcctgcatcatgccgccgatgactcgttccccagcgatcacggtacggtgatttttacctttgcgctggcgtttttgttctggcaccgcctctggtcaggcatcgtgatgatggcgatagccatgaccatcgcctggtcgcgcgtctatctcggcgtacactggccgttagatatgattggcgcgctgctggtagcgatgcttggctgcctgagcgcacagctgatctggcaatggtacggcgcgccgctctaccaggcgctgcaacgttgttaccgtttctgtttcgcattgcccattcgaaaaggctgggtacgtgactaa

SEQ ID NO: 370632 - DNA, 759 bp, Salmonella enterica
atggaaacgcgacgcgacgagcgtattggtcaattgctgcaggccttaaaacgcagcgataaacttcatcttaaagaagccgcgaccctgttgggcgtctctgaaatgaccattcgtcgcgacctgaaccataaaagcgcgcctgtcgtgttgctgggcggctatatcgtactggagccccgcagcgccagccattatctgttaagcgatcaaaaatctcgtctggtggaagaaaaacgccgagccgctcagttggctgcgggcctggtacaagcccatcagacggtatttattgactgtggcaccaccacgccgtggatcattgaagccattgataatgaccttccctttacggcggtgtgctattcacttaatacctttctggcgctgcaggacaaaccccattgccgcgccatcctcagcggcggggagtttcacgccagcaacgccattttcaaaccgcttgatttccatgaaacgttaaacaatatttgtccggatatcgcgttttattccgccgctggcgttcataccagtaaaggcgctacctgctttaatctggaagagctgccggtaaaacattgggcaatgacaatggcacagtgccatgtactggtggtggatcacagtaaattcggcaaggtacgtccggcgcggatgggggaattatcacgctttgatacgattatcagcgaccgccgtcccgatgaggcctttgtggcctacgctaaagcgcaacaaattactctgatgtattaa

SEQ ID NO: 370633 - DNA, 1071 bp, Salmonella enterica
atggattacgccagcggtaaagtactggcggaaggcaacgccgatgagaaactcgaccctgccagtttgacaaaaattatgaccagctacgtggtgggccaggcgctgaaggcagggaaaatcaagctgaccgatatggtgacggtgggcaaagatgcctgggcgacggggaacccggcgctacgtgggtcgtcggtgatgtttctgaagccaggcgatcaggtgtcggttgcggatcttaataaaggcatcatcattcagtcaggtaatgatgcctgtatcgcgcttgccgactacgtcgccggaagccaggagtcctttatcggcctgatgaacgcctatgcgaaacgactggggttaaccaatacaaccttccagacggtacacggtcttgatgcgccagggcagttcagtaccgctcgcgatatggcgctgctcggcaaggccttgattcacgatgtgcctgacgaatacgccattcataaagagaaagaatttacttttaataatattcgtcaaccgaaccgcaaccgcctgttgtggagcaccaatctgcatgtcgacggcatgaaaacggggacaacggctggcgctgggtataaccttgtcgcctccgccacccagggcgatatgcgcctgatctctgtcgtgctgggggcgaaaacggaccgtattcgttttaatgagtcagaaaaactgctgacctggggtttccgcttctttgaaacggtcacgccgattaaacctgacgcgacattcgtgacgcaacgggtctggtttggcgataagcgtgaggtcaatttgggggcgggcgatgcggggtctgtgacgattccgcgtgggcagcttaaaaacctgaaggccagctttacgttgaacgaaccacagctcacggcgccgttgaagaaagggcaggttgtcggcaccatcgatttccagcttaacggaaaatccattgagcaacgcccgttaatggtgatggaaaacgtcgaggaggggggatttttcagccggatgtgggattttgtgctgatgaaactccatcagtggtttggcagttggttctcgtaa

SEQ ID NO: 370634 - DNA, 627 bp, Salmonella enterica
atgattacgctgtggggccggaacaactcgactaatgttaaaaaagtgttgtggacgcttgaagagctggaactgccatacgatcaaattctggcaggcggaaaattcggcgttaaccaggatgccgactatctggcgatgaatcctaatgggctggtgccgctgcttaaagatgatgaaaccgacctgttattgtgggaatccaatgccattgtccgctatctggcggcgcaatacggccagaaccggctatgggttgataatccggcgcggcgtgcggagggcgaaaaatggatggactgggcgaatcaaacgttaagcccggcgcaccgcgtgatcctgatgggactggtcagaaccccgccggaaaaacgcgaccaggcggcaattgaagctggtatcgaaaagtgtgatggcctgtttgcgcttcttgatgatgctctggcccgccagccgtggttctccggagataactttggcaccggcgatatcgctattgcgcctttcgtctataacctgctgaacgtgggtctgaaatggacgccgcgcccgaatctggagcgctggtatcagcagcttaccgagcgccctgcttttcgcaaagtggtgatgatcccggtgacctaa

SEQ ID NO: 370635 - DNA, 162 bp, Salmonella enterica
atgcgcgtcgatggcaatacggtgacggaagaaggccgtattctgggtgacagaaagcagcgtattcgggatgtgcgtgtcggacctgacggctacttatatgtgttaaccgatgagtccgacgggcagttactcaaggtaagtcctgcagccacgcgttag

SEQ ID NO: 370636 - DNA, 498 bp, Salmonella enterica
atggctaaagtcgatgtgaaatgcccgttttgcgcgcaaacggcatccgttaaaaagtatggtccggggagtgcagggcaccagcattaccgctgtcaggcatgttgccgcagctttcaggtcgactatgaataccgcgcctgtcagcccggcatgaaagggcaggttgttgatcttgccatgtacaatgccggtattcgtaatccgcaggggctggccatcaatccctggagcggcgcgctatggctgcatgaacacggtccgcgcggcggcgatgaaattaacatcccggaaaaaggcaaaaattatggctggccgctggctacatggggcgttaactatagcggtctgaaagtgtcggaagccaaaggtaaaattgtcgcgggggcggagcagccggtttattactggaaagattctccggcaattagcgggatggcctttatatcagcgacgtttttgtgccgtgacggcacaaactgtttatcggcgcgctaa

SEQ ID NO: 370637 - DNA, 426 bp, Salmonella enterica
atgtattcattactgatgctggtcgcttatcgtggttacagtgtgatcctttttgctccgctggtagcacttggcgcagttctgttcacccgtccagtgacggtcgccccggttttcagtgatatatttatggataagttgatcggttttgtaaaactttattttcctgtctttctgctgggcgcagtatttggcaagctgattgaatttgctggtttttactactcaattgtcagtgctgtgacctgtatggtgggccagaacaaagccatgccgatgattattcttgtatgcgctttattgacctatggaggcgtatcattgtttgtggtggcgtttgccaatctgttctttacttggctgattccacatatttacggtgatcagtttatgataaatctgccggggctgaaaaaaccgctgtaa

SEQ ID NO: 370638 - DNA, 891 bp, Salmonella enterica
atgcactttgatataaaagatttaaaattattccttgctatcagtgaagaagggagcttaacacgtggagcggaaaaaacttacatgtctgccgcatctggtagcgtgcgtatacgtaatcttgaacagagtatcaatctgagattgctgtatcgtagtagcaaggggataacgttatcctctgctggtgaaacatttaaacaccacgccagccttattgtgaatcagatggaaatgttacgtagcgatatgcaggagcatgttaaaggcatcaaaggacatgtcagaatattttccagtataactgctattgcagagtatctccccccattgttgagccatttccttacactatataacgatgtgaatattgatctcagggagtatccaagtccggaaattgtacgttctgttattgaggggaaaactgatctcggaattgttgctggtaatattacaacagataatcttgaaatactgccgttccgtactgataggctagtgcttatcaccgcgacagaccatccctttgctgacagaaaaagcgtgacctttcatgaattaattcaatatgaacaaatcagtctgcctgaagggacaggaatgtttgaatttatccgaaaaaaggcagaactagtaccatctaaactgaaaattagaatacaggtcggcaactttgaaacattttgccgtatggttgaagcaaaagtgggcattggtataatgcctcactctgctgcatcccgtttgcgtcagttgcatgaattttcgattattgatcttgatgaattttggtcattaagaaaattacaaatctgcgccagaagctttgacaaattacccggcttcacacaaaaactggttactatgctcacagctcagactgagtga

SEQ ID NO: 370639 - DNA, 1686 bp, Salmonella enterica
atgaacgatacactttctaatacccagcaatcacgtgagacaatagaatgtgatgttcttattgtgggagcaggacccgccggattatctgcagctcttaaacttaaattacaggcaaatgatgcaggaaaagaactgtccattatcgtccttgataaaggagctgagcctggttctcatattctcagtggggcagtcatggatccccgagcgctgaatgaactaattcctgattggcaggaaagaggcgcacccattaaacagcctgttactcaggataaattactgttactgacgaatgaaaaatgtattaatttgccggatgcattgattcctgataattttcgcaaccatggaaactttatcgtaagcctcggtaatctcattaaatggctcgccggtcaggcagaaacgtcaggcgtggatatttatgcaggcttttcggcaactgagatactgtatgatcaggatactaacattatcggtgtagtaactggtgatatgggacgtcatcgggatggcagcaagaaagaggggttccagagtggaatagaaattctggcaaaatatacaatttttgccgaaggggcccgcggtagtctggctaaagaactgatcaaaaaatttcatcttgatacaggcaaagcaccccagagttttagcataggcataaaagagttgtgggaggttccatcagaccagtcccatccggggcttgtaattcacaccacaggttggcctctggataaagagtcgttcgggggtgggtttctctatcatcttaatgataataaaattgcactaggtttggttgtgggacttgattattcaaatccctggttaagcccttttcaggaaatgcagcgcctgaaaacacacccttctatacgcaaatacattgaccggggtaagcgtattggttatggcgcaagagcaatcaataacggcgggattgcgtctatgcctgatccctgtttacctggtggtctgctgattggttgtaatgccggtacgctcaatgcaagtagaatcaagggcatccatacagctatcaaaagtggcatgatagcggctgacgctatatttaatgctttgctggacaacaggaaaaacgacatactgacagaatatcaaacattactgcgacagagctggctttggcaggaactggaaaatggtagtaatttcaaaccctggtttaaaaaagggcgtgtgataggttttatcatgactggcattgagcattggctgcttccccgaatgggtataaaaaaaatcccctggcgtgtaaaaaataaccgaccggacaatatcactctgcaaccggccaacaaaagccagaaaaaactgtacgacaaacctgacggtaaactgacgtttgatattttgtcatccgtctatctcagtaacacctggcatgatgacgaccagccagtacatttgaaaatcagtgatcagaatatccctatatccattaatctggatatttatggtggccccgaagaacgatattgccctgccggagtatatgaatttttacaggatagtgaaacacaaaacatgcgtctgcaaataaattcacagaactgtattcactgtaaagtttgtgacattaaagatcctaaacaaaatataacctggactacgcctgaaggtggcaacggaccaaattatacagggatgtaa

SEQ ID NO: 370640 - DNA, 369 bp, Salmonella enterica
atggcctcgctgaccagtcatgacatgaacgccgtgcatatccaggatcttcttgcggtggatacgtttattccccgcgcggtacagggtggcattgccggggaatgttcaatggaaaacgccgttggcattgcggcgatggtgaaatccgatcgcttacagatgcaggctatcgccagcgagctaagcgcccggttaaataccccagttgaagtcggtggtgtggaagccaacatggctgtggctggcgcgttaacgacgcatggatgcgccgtgccgctggcgatcctcgatttaggcgcaggatccaccgatgccgccattatcaataacgatggcgcagtacggcgttgtcgccgggcagggtaa

SEQ ID NO: 370641 - DNA, 129 bp, Salmonella enterica
atgccgccattatcaataacgatggcgcagtacggcgttgtcgccgggcagggtaatatccgtggtactgaaggcccgcgcaatgcggtagcgaccgggctggttttagccggagaagccaaaaaatag

SEQ ID NO: 370642 - DNA, 300 bp, Salmonella enterica
atgccaacagcaattgaaaaagccttggattttattggtggtatgaatacttcggcgccagtgccccattcaatggatgaaagcaccgctaagggaattctaaagtatttgcatgacttaggtgtgccagcgagtccggaagttgtgatggcacggggtgagcaggagggatggaatcctgagttcacgaaaaaagtggccggatgggcagagaaagtcgcctccggtaaccgcatccttatcaaaaacccagagtatttttcgacctatatgcaggagcagctcaaagaactcgtgtga

SEQ ID NO: 370643 - DNA, 1233 bp, Salmonella enterica
atgaaaaataatattgaagagacaataggtaagtacttgcctattttaatgatattacctctggcgggtttggcagagttagcttctttatattcaatccaggctttattaccaaagttaagtgaggtttataatatcccattgaatcaggtagggatgattttgtctgctgaggtggggtttctggcattagccatgttatttagcggcacgttatctgaccgttttgggcgaaagccaatcattttttattcgttgctggcaggaggtattttaactctattgtgcgcaactgcatcatcatggccgatgctggtggtataccgcgctttgctcggcattgcagtaagtggtattacggcggccgttacagtctatatcagtgaagaagtctctcctgctttggcagggattgttactggatattttatttttggcaattcgctagggagtatgtctggtcgtgtgtttgcaactttgatgatggagcatgtatctatagatacgattttctttatcttcggtggtgttctgattgctatggcactcgcggtgaagttgtttctcccgacatcccgacagtttgttcctacaccttcactacagcttggtgcagtgttgaaaggcgggttggaacattttaagaatatccgcgtatcattatgttttgtcattggatttattcttttcggctcttttacgtccatctttaattttctggcgttttacctgcatcgaccgccttatgagctgagctacacctggataggtttgattccagttagcttctcattaactttttttcttgcgccatatgctgcccgtgtcgcgttgaatattgggtcgatgaatgcgctcagtatgctgatcatctgtatgatggtcggtgcatttcttacgctaatcgccccttctctgtgggttttcatttcaggtatcgttttactgtcagtcgcatttttctctgctcattccaccgtattagcctgggtcagttcacggagtccaaacgcaaaaggacaggcgacatcgttttatctgctttgctactactctggcggtgcagtaatggggtatttaaacgggtatcttttctcctggcagggatggaatgctattgcggcatcatgtctgatgatgctggggataggattatttatctgccggtttattttcgcaaaatatgagaaacaaccgcaaatcaaaaaacagtcagttcaggagagtttctga

SEQ ID NO: 370644 - DNA, 1422 bp, Salmonella enterica
atgtctgctaaaacgctgtatgaaaaattagttgagtcacataccattcgtgaacttgataacgaaggacatgttttactttatattgatcgttcaatactgaatgaatataccagcccgcaggcatttagcgggttaagagaacgcggccgcaccgttcggcacaccgacacgtttttattgaatattgaccatgttaatcccacgcggtcgcaacgggatgacttaatgaccgatccgggaggacagctacaggttgattactttcgggaaaatgccgctgactttggcatcacattatttgatgtgctggatccgcgtcaggggattgaacacgtggttgctcatgaacaagggctagtgatgcctggcatggtgatcgccgccggggatagtcacacgacaacctacggtgcatttggcgcgctgggctttggtatcgggacgtcggaaattgaacatctgctggccacgcagacgctggtttaccgcaagctcaaaaccatgcgcgtaagtgttcagggagagctacctttcgcctgttccgcaaaagatattgttcttgaattgcttgaacgtattggcgctgatggcgcgaccggatatgccattgaatttgtgggtgaggccatcagcgcgttgagcgttgaaggacgaatgacgctctgcaacatggcggtagaagcgggggcgcgtggtgccattattgcgccggataaaaaggtttttgactatatctacggtaaaccgcaaatgcctgtaggtgaactctggcagcaggcattgctggaatggtcacagttgagcagcgatgctgatgcggtatttgataagacggtggcgatcaactgccatgatcttgagcctaaagtcacctggggaatcagtccggatcaaacaggttccatcaccggacgtgttcctttcccggaacaggaaaccaatccgcttaagcgcctggcgcttgagaaggcccttcattacatgggattaacggctggcatgttgctgaaagatattcgtatctctcacgcttttattggttcatgcacaaatggtcgcattgaggatttgcgtgccgttgcgaaggtgcttgaagggcgcaaaatcgccagccatgttcgcgggatcattgtgcctggttcaacaatggtaagacgccaggcggaagaagaaggactggcgaaaatctttattgctgccggttttgaatggcggcagtcgggttgctcaatgtgccttgcgatgaatgaagatgtattgtcgcccggcgatcgctgtgcatcaggtacgaatcgtaacttccctggacgacagggcgctggagcaagaacgcatttgatgagcccggcgatggttgcggcggcggcggtagcggggcatctggtcgatgttcggtcattacttcaggcaggggaataa

SEQ ID NO: 370645 - DNA, 627 bp, Salmonella enterica
atggatacgtttaagcaaatcagcgggcgaattgcgccgatgctggaaccgaatatcgacactgatgtgattatgccaaaacagttcctgaaagggatcgatcgccaggggctggataaaggggtgtttttcgatcgtcgctttatggctggcggccaaccaaatcctgattttattctgaacatgccgggctggcagagcgcgacattcctgctggttggccccaattttggctgtggatcgagtcgtgaacacgccgtatggggattaaaacaactgggaatacgggggctgataggtagcacatttgcaggcattttcgatgataactgccaacgcaacgggatcctcacggtctcattagatgaacctgctttggcgcgcctggcgcagcttgccgcgagtgctgataccaattctatcactgtttcactcgatcgctgcgaaattacgacggcagaggaaacgatctcctttgtgatcagtgaactcaaacgggcgatgctggccgcaggcgaagatgcgatagcctggacattgcaatacttgccggagattgaaaattttgaggttgcgcattattcacggcggccgtggttaaaacgccctgcatccccgcgcggttaa

SEQ ID NO: 370646 - DNA, 879 bp, Salmonella enterica
atgaaactggttcaatatcttgtgaacggtggcaaacgctacggcattatgcaggaaaccggaataattgatctctcgcagcggcttggcgacaaatatcccactttgaaatctctactgtgcgctaatgcgctgacggatgcggcgttatggtgtgatgagccggcggattattactaccaggaagtcacttttctgccggtgattgacgatccgcagaagatcatctgtgtcggaatgaattacgccgataagcgtattgagtttaatgaaaccaacccggccccaaccctttttgtccgttttgcggattctcagaccgggcataatggcctgctgctgaagcctgaaaataccaatgagttcgactacgaaggtgaattagccgtagtgattgggcggccatgctcccgggtcagcgctgaggatgctttagattatgtcgccggatacagctgctatatggatggttcagtgagggactggcagcatagctggtttacggctggaaaaaactggccttcgacaggatcattcggtccgtgtctggtgaccacagacgacattcccgatccccagatgctacgtttactgacacgactaaacgggcgggaggtgcagaacgaatctacggcaaatatgatccatcctatcgcttcactcattgcttatataagcacctttactctgctttcccctggcgacacgatcctcacagggtcgcctggtggagtgggcaaaaaacgcgttccaccgctgtttttacacgatggtgatgttattgaagttgagattgaacatattggaaccctgcgcaatgtcgtccgggatagccgttatttaacatcatctgttagctggcatgacgggagaaagtga

SEQ ID NO: 370647 - DNA, 915 bp, Salmonella enterica
atgagtacactgattgaatgcggcgcctctccgtttattccgggggttgcgctcaaggatgttcgtctggaaaatggtctgacggtaagagtggctatcggaggcagcggttcacctttggtactgctacatgggcatccgcagaatcatacaacatggcggaaagtcgcaccgacattggcgcaaaatcatacagtcattttgccggatttgcgtggctatggcgacagcgataaaccaacgagcgatccggcgcaccgtacctattcaaagcgcaccatggcgcaggatatcgtcatgttaatggatgcgctcggcttttcccgttttgcctttgtagggcatgatcgtggcggacgcgtaggacacaggctcgcgctggattatccggatcgtgtgacctgttgtacttttatcgacattgctccaaccgcgacgatgtacgccttgaccgataaatcctttgctacgcgttacttttggtggtttttcctgattcaacctttcccgttacccgaaacgatgattgcgcacgatccggcattttttctgcgtaagcatatttctggccagctaaaaatagagggcgcgacctcgcaggaagcattcaatgaatacctgcgctgttaccagaaccctgagatgatccacgcgatctgtgaggactaccgggctgctgcgacgattgatttggacgatgatgccgcagatacgtcggcgcgtatccggtgtccgttacagttgctgtggggagggctgggaacggtagggcaactatataatgtggttggtacctggaaagaaaaggcgctaaacgttcagggggaagcattgccttgcggacactccccgcaggaagagtgtcctgagtactttatccagaaacttcagtcctttttacattcagtgttataa

SEQ ID NO: 370648 - DNA, 966 bp, Salmonella enterica
atgaaaacgacacctgtaggaaaaaaacatcgccagccccttgagggctggccttctgttgaagatcttttcgtttttgtcaccgttgctcgcaacggtggatttgcccgggcagcgctggagctggggttatctccctcctatatcagcaaacgtatcgctatccttgaaaaatgtctcaacgcccggcttttttttcgaaataacagagtgatgcgtctcacaccggaaggcgaaaatgcgctgggtggggctatgcaggtcgtcagtgaaatggatggttttgtcagtcgtttggataatcaacgtggtgtgttggctggtaatatcaccatcaactgctcatttggttttgggcataaatatgtcgcagaggcgctgtcgtcatttatgatcgcctatcctgatattacggtaaaactcacgctaacggatcgtgaagtggatctggtggaagaggggatcgatattgaaattcgcgttggggatgatatcaacgaattgtatatcgcacggcagttagccactaatcgacggatcctgtgtgcttcccctgaatacctcgaacgccacggcaagccagagtctgttagtgcgcttgtgcagcacgattgcctaatgattcaggaaaaaaactcggcatttggcaattggatattaacggacggtaagcagcagacacattgccgactaaacggttttcattcttccaacagcggcagtgtggtgcttatttgggccttgaaaggccatggcattacattgcggtcggaatgggatgttgcgcagtatattgaacgaggtgagctggttcgcgtgttgcctcagtggtatcaggaagcgaatatctgggctgtatatacccggcgttcatcaagttctgatcgtatcaaaatctgcatcgatttcctcacggagcatcttgcacaatgcttgccaggcggtaaagcaccgggcgtactgtga

SEQ ID NO: 370649 - DNA, 273 bp, Salmonella enterica
atgacgttaaaaccaggtgagaaatccggtaataatggaggtatctatgtggaggttgggcctcgtggtgggataaaagataactttgccacgatagcggaaacaaaaccgcgccaccaacgcaacgccctaaaagctactgggtgctggcaaaaagaacacctaacagtaaacgtaagtcagagcatctggcgccacgacagttggcgccgactgatcacagtacgcccggtgctttaccgcctggcaagcattgtgcaagatgctccgtga

SEQ ID NO: 370650 - DNA, 399 bp, Salmonella enterica
atgaaattgataataatcctccttctcgcgctattcccgttatgttcatctgccagcaatcattatgcccttgtttttgaaaataacacgatactgcttgttttaaatcttaaatgttctccctgtgatttaaactgcgcaaatattcaataccagattttcaataaagagacggagtctgttatttcaggggttgctaagcctgtgacaacgggcatcgaaaataattttcgtggttatatgatgcgtaataataatacgttctacacattaattgaatcagataatgaaaacgtatgggatatgtctgttgaggagaagggaactcaacagaacaaagatgccgtgcaaaaagtaaaatatcagcttaatgctatttttgacaatggtacatgctga

SEQ ID NO: 370651 - DNA, 759 bp, Salmonella enterica
atgcgcaattacaggcagtggttagttttcagtaaagtcatattaacgctacttgggttgacgggatggtatggcccggcacaagctgccgttaatattgacagaacccgaattatttttgcttcagatgatgtcgctcaatcgttgacattatccaacgataatacaacgccgatgctgttacaggtatggaccgacgccggaaacattgacgcctctccggataatagcaaaacgccgctggtggcgctgccgccggtatttaaaatgcagccaggagaactgagaacgcttcgcctgctcctgagttcccgccagcagctggcaacggaccgggagagtctcttctggctaaacatttatcagataccgccagtcacccaggacattaaaaaccacccgcgaaaactggtattaccgcttcgtttgcggctaaaaattttaattcgcccgaccgaattaaaagcgcccacggaagcggaggagaaaaaattacgctttattgctaaagaaaatactatacggatagttaaccccacctcgtggtatatgagtttaacgttaacgatggataacaagaaaagtatcggcgatatcatggttgcgccgaaaacagcacttgatgtgccgctaacacgctcgccaacgccgggagcatcgataaattatgcagtaatcaatgattccgggaactggcgacaatataccgccatactggaaaaatatattagtaagagtgattttattcctgagttttga

SEQ ID NO: 370652 - DNA, 1326 bp, Salmonella enterica
atgctttttagtttccgaacgctattgtttatcaccagcctgttcgtcagcgccggaacatggtcgtcatgtatcaaagtcaccgataagagcgcgctctctgacgcggcgataaaagcgggctacacggcgcaaaactggatcggcgcaactgacacgaataccggtaatatcggtttgccaacggtgattagcgtcagtaatagtgaaacttttcaaccctccggcacactattggccagtgggatcggtaacttcctgacggccgccaccggcacgccctattccagtaaacaggtactttaccgctgcgattccgccgatgccgggaagctctatgagatgtattcgacaaatggcgatagcgcttttgcgggggcattttttactcccgaagtagaaggcgcttattatgatgtggagcgtaatgttgctgtccgtatgacaaacctcagtaccggcgaatattacagccgcttctggaaagaacgccaacttaccgcagacagttggtttcaggatgacaaatatatttatattcctgccagcgcgtttagcaacgtgttatatgagatgtttaaaattgactcaagaaaatattttgcctaccagaatccaatggaccgagatacctggacgcagcctcggggttatatcgcgtttaaaggcccaggcttgattaccgagcggatcaaagcgggactggatcatgccagcgattattatggctggcccagctattggcccggggcatggagtacatataatagcgtcacctatgttcgcggcgcgttatgtaaaatcacagattatcctgcgatcgtgaaaattccccctgtcgccgtcggcatattagccgccggaggcaatagtcaggcgcctttccacgtcagcctggaatgtgagtccggtgccgtgtccagtgccctcccgtccaccagcgccgctaatgtcgcaatgggttttgtcgttaatcaacccaccgccgtggcggcggcgcgtcgcctggggctaaccacatccgcaggcggtctgtcgtggctactggacacccattatggcgaacctggcgtagcttccggagtgggtatccgcatctataacgatgccggtacgccgattaacctgttacccgatcggatcaagacaggcactggcaacgcccgaggctggtatggctataaagatttaaccacacgggtatcatccggttcagtagaaacctatagcggtgattttactgcctcgcttgaggcgatcggcggacaaacagtaacggcaggaagcgtgaatgcgcaattacaggcagtggttagttttcagtaa

SEQ ID NO: 370653 - DNA, 2562 bp, Salmonella enterica
atgtcccccaccattaattggaaccgcaaaagccttgcgctattgatcgccatagtttgctcaggctccgcgcagggtgaagagtattattttgctcctgcgctacttcagggggccacttacggacaaaatattgcccgttttaatgaacagcaaacgccttccggagactatcttgccgacgtttacgttaatggcacgctggtaacctcgagcactaatattcgatttaatgctgtaaaagagggtcaacagactgaaccctgcctgcccttatcggtgatgaaagcagcacagataaaatcactccccgcgaccgacgctgcgaccgagtgtcgcccgctcagggagtgggtgcctcatgccggttggcaatttgatagcgccacgcttcgcctgttgctaacgattccaatgaccgaacttacgcacaaaccgcgcggttatatctccccttcagagtgggatagcggcgcgctggcgctgtttttacgccataacacaaactggacccacaccgaaaataccgacagccattatcgctaccaatacttatggagcggtttaaacatgggcgttaacctcggactttggcaggtccgtcatcaaagtaatctgcgctatgccaatagcaaccagagcggaagcgcctggcgctataatagcgttcgaacctgggtgcaaagacctgtcgcgtctattaacagtattctgtcgctgggcgatagctatacggactccagcttattcggcagtctgtcttttaacggagctaaacttgtcaccgacgagcggatgcgcccgcagggcaaacgcggttatgcgccggaagttcggggcgtagcggccagtagcgcgcacgtggtagtaaaacaactggggaaagtgatttatgaaaccaacgttccgccgggcccattttatattgacgatctgtacaacacccgttatcaaggcgatctggaggtagaggttatcgaggccagcggtaaaacctcacgtttcaccgtgccttattcttccgtgccggattcggtacgtcccggtaactggcactattcgctggccttcggcagggttcgtcagtactacgatattgaaaatcgtttctttgagggaacgttccagcacggcgttaataacaccattaccctcaacctcggttcacgaattgcgcagcgttaccaggcatggctggcgggcggcgtctgggccaccggtatgggcgcgttcggccttaacgccacctggtcgaacgcgcgcgcagagcataacgatcgccagcaaggctggcgcgcggaactcagttacagcaaaacgtttaccaccggcactaacctggtactggcggcttatcgttattcaaccaacggctttcgcgatcttcaggacgtgctcggcgtacgccgggaagcaaaaacggggattgattactactccgacacgctgcatcagcgcaatcgcctgtccgcgacggtaagccagccgttaggacggcttggcacgcttaacctcagcgccagcaccgcagactactacaataaccaatcgcgtataacacagctacaaatggggtatagcaaccagtggcggaatataagctacggggtgaatatcgcacgacagcgcaccacctgggattacgatcgcttttatcacggcgtcaacgaaccactggacgtgagtagccgacaaaaatataccgaaaccacaatgtcgtttaatgtctctataccgctggattggggcgaaaacagaacgtctgtcgccatgaattataaccagtccagtcaaagccgttcctcaaccgtatccatgaccggcagtagcggtgaaaacagcgacctgtcatggtcggtttatggcggctacgagcgttatcgcaatagtaatagcgatagcagcgcgccaacgacgtttggcggtaatctacaacagaacacccggtttggcgcacttcgcgccaactatgaccagggtgataactatcgtcaggaagggctgggcgcgtccggcaccctggttcttcaccctggcggtctgacggctggcccctataccagcgatacctttgcgcttattcatgccgatggcgcgcagggcgcgatcgtacaaaatggccagggcgctgtggttgatcgctttggttacgccattctgccttcgttatctccttaccgcgtcaataacgttacgctcgatacccgtaagatgcgcagcgatgccgaactgacgggaggaagtcagcagattgtgccctatgccggcgccatcgcgcgtgtcaatttcgccactatcagcggcaaagcagtgctgatctccgtgaagatgccggatggcggcataccgccaatgggcgctgatgttttcaacggtgaaggcacaaacatcggcatggtcggccagagtgggcagatttatgcccgtatcgcccatccgtcgggttctctactggtgcgctggggaacaggggcaaaccagcgttgccgggttgcctaccaactcgatcttcacaccaaagaaccgtttctctatctgaacaaaatctgcgagaaggaatag

SEQ ID NO: 370654 - DNA, 762 bp, Salmonella enterica
atgaaaatggatacccgacattccgcattatattacttaatagtttttctattgctggccctacccgccacagcatcgtgggcgagcgttactattttgggtagccgaataatttacccatcaacagcctcctccgtagatgtgcagttaaaaaataatgatgcaataccttatatcgtacaaacctggtttgacgatggcgatatgaataccagcccggaaaatagcagcgcgatgccgttcattgccacgccgccggtatttcgtattcaacccaaagcaggccaggtggtacgcgtaatttataacaacacgaaaaaattgccgcaggatcgtgagtcagtattctggtttaacgtattacaggtaccaccaacgaatattggcagcgacagtgggcaaaataaaatgttggtgatgctgcgctcaagaataaaacttttctatcgtcctgacgggctaggtaaacctgataatctggcgaaaaaattacagattaaaacggtaaataagggttccggaaaaagcggtattgttattgttaatccgcagccctggtttgcctctttaagtaacctgaatgtaaaagtgaacggcgcttcgtataacctggatgctgacatgattgcccctttctccagtcaaacctggtggctgccgggcaaacggtcactcaaatccttctccggtacagtcaccgttactttggttaacgacctgggcgcaaggataagcgagagctacgatgtcccccaccattaa

SEQ ID NO: 370655 - DNA, 537 bp, Salmonella enterica
atgtctatgaaaaaatatttagcaatgatcacaggctcgcttcttgtctccagcagcgcgatggctgtttctgataacaccatcacctttcaaggggaagtctctgatgaaacgtgctctgtcgtgattaatggtaatcaggctaaacccgtcgtgttattaccaacagtaagtactaaagatttatcagaacaagggaaaaccgcggggccaataacgtttgatattgggctgtccggatgtaccggctctcaggacaaaacaacaaaaatttccactgtctttgtcggtaatcaggtcaccagtaacggtaacctgggtaatactggcagcgcgaaaaatgttgaagtccaattactcgacacctcaggggagccaatcaatctgaccggcggctttactggcgacggcgacctacagctggaaccaaatgcttctgaagcgagcgcgacttataccgcgcggtattactctaccgggaaagcagaggctgggacagtcgctgccaccctacaatacgccgtttcgtataaataa

SEQ ID NO: 370656 - DNA, 735 bp, Salmonella enterica
atgaatgaaagcatatttttacttgataagcgtgttgtatttgatagtacgaagatgaccttatcgcatggtaatgagataatcagaatatcagaagctgagacccatctgcttcttgctttttggcatggtctttacaaaaaagaagatattattcatttagtttgggaaaatcgcggaggctgcgtctcagaatcaagttactataaactcattaatcaaatgagaaatgattttagtagcatcggtctacagccatctgacatcgtaactcgccctcgggtgggggtgtcgctgtctgttgccattgaacctataaaaaaaatcacctccctaaaggtgagtgatgaaaacgttaaaggcccctcgactcgggagaaaatattttacaaaattaaacgtcacagcgtatttgtggtattaacaggagccattcttctggcattgctctatggtgtatttactatatataaagcgcctgttcgtaacagccctgatagtttttttacatatcttggcgaatataacgattatgcaatctataaaacaaaagaggataaggtcacattaagtgaagtagtttttgcttttaactctctaaaaattaaaatttaccggcaaaatggacgccatctttattatatcagggagcctaacatgaatatttttctgcaatgcttaaatcctgttgaaatggcggtgccaaaatgtattacagtaaaagaacgttactga

SEQ ID NO: 370657 - DNA, 501 bp, Salmonella enterica
atgtattacagtaaaagaacgttactgattatatttgtaatatttatcgccattgtcgcaatcggatcggtaatagcgcttgaatgggtaaatcgtgactcttatagaaccaataatcttatatgcacgacaaaatcagaagcgtatattgaaccacgaaaattgtacatggatggtggacttgtgctggatcttaaatccggcaggattaccctgcactacgatgttactaccgatacgaaagagaaacggcttttttttcgtgatatctgcatcagcaaactgcgcagaacgggtatgaaaacatttacttttaaagtcaattcagttaagacttttgagtctgatactgctggcgatttgttttcctggttgagactgttacagcctggtacgattaatgagttaaagatggtcaaaattgggaaaaatacctacatgttttcgcttaatcgacatttgtataatgtgtgtaccaccagtagtaacgttgagttgtag

SEQ ID NO: 370658 - DNA, 1575 bp, Salmonella enterica
ttgaaagtaagaaagctatttctgatgttgtttattgccgttccactgatcgtaatgatattggtggggttactcgcgggtatcttccagctaaaacgagatatcgccgtcagcgccaatacgctgctgcggtttagcgcggatatatctgccgcctcctggcaagtcgccggaaaagccgccagactggctgagagttcctgcactgatacgctgaaagaactgtccagaacgcgggccttcactccttatgtacgtgacattgggtttctggaaaatggtgatatcacttgctcctttgtcacaggaaccgaacgctatcatttttcccggctggcagggctttccttacctgcttcttatccggaacggtggttgcgatctatcggtagtatggccgaaggacccgatcgccttgttgtggtttatgtgaaaaaagtagcagcgaataaagcggccttcgtcattgtggattcgcagtatgtccaggagctcatagagatattggcagcagagagagcatcagcctttagcctgacattcggcgcaggggaggcgattaccagcgctgcgacgttgcgcggtaaggcgtttttaacgcagcggttcacctcaaccgatcacactctccagctgatggtgcgaacccccttctcaacgttatcggcatactggttacaaaacctttttatttttgttccgctgtcattgtgtctttctgtagggatgatgttgttctacaggcgctggtatttaaaacgtttatctctggcccgggagattgccaggggaataacgcacaatgagtttacggtacattatcagcctgtttttaatgttaaacacggtagttgcggcggcgtggaggcgctaatgcgctggccgcaaccggatggccgttttataaccccggatatttttattaccgccgcagaaaatgaaggcatgattattccactctctcgtcatctgttcgaactgattgctcatgacgtaataaactggactgtaccggatgatttctatatcagcgtaaatatatcgcctgcgcatcttatggatgacggttttatacaagatatagaggcgctcaggactcgtttgggaacgataacgcttatgttggagctcaccgaacgtagcctgattgtagaaccttcacaggtcgcagaaaaactttcaacgctccgtgaaaaaggcgtgttaatagcgattgatgattttgggaccggctattgctcactctcctatctccagcaattacctgtagactctcttaaaatagacagaacgtttatcgataccattgataccagcagcgatgatgttcctgtcctggatactatcattacgctgagtcagcgactggggctcaatgtggttgccgaaggggtcagtacccagcaccaattgcgttacatcttaagccacggggtaggattcgttcagggatttctttatgccaggccgatgggggctaatgactttatgagctggcttggcaagtcggcccagaggcaaaatggtttgctcaagggggaaaacgaatctgcgagtggcctggtggctgaataa

SEQ ID NO: 370659 - DNA, 744 bp, Salmonella enterica
atgagtcagaacaattatctgattgacaaaagagttattcttgattgtgaacgaatgacgctttcctgcgccggagagtcgataacgatatctgaatcggaacgcagtttgcttatcgcttttcatgaaggcctttttaaaaaagatgatttaattaactatgtctgggggcgcaaaggtgtcgtggtctctgatgccagttattataaattgattaaccagctacgagggtcatttgataaaattggtcttaagggggcgtctgttgtgactcgccctcgcgtgggtgttttactctccgtttccattgaaccgttgagtgatgaggcgcaaaatactccgttgcctgctgttgctgaaacagaagtatcgacggttgaagtgcggcacgatgacactattattaccccaataccgggcgctgtgaataaaaaagattggctctacttttgcctggccgcgcttctgatgttttttatgatgtataaagttaagggtgaaaatattgattattttaccctccagggttcgtatgatggatacactttttatagtgtcgggcatgataaaacccatctgacggatatcgttgaagcgtactctgagatgagtaatgaaatacataaacaaaacggaaaaatcatttattacattcgcgttcctaatacaaatatttttgtccagtgtcttaaccaacttgatatagcggagccgaaatgcatttccataaaagaacgttattaa

SEQ ID NO: 370660 - DNA, 489 bp, Salmonella enterica
atgcatttccataaaagaacgttattaagcgtggcgacgcttggtatgctggctgtttcagtcgtactgatggtagtttgggtacgaaacagtaaccatagttctattaatactaatgaatttttatgtacgacaagaacggtaacgacgatacaacctaaagatatccatgccgatggcagtcttgttcttgattttaagatgaagagaattacgcttcaatatgaaataaaaacaaaagataacggtgtaaaaatattataccgggacgtatatatgaaaaatttacatcgaacagcacctggtgtttatacgttcgaagtatcccaggtaaaagtctttgccacggacacggctggcgatctgttatcatatttacgggttctgcatccggaagcggctaatgagattcgaatatctaaagtgggtgagaaaacctttttttattctcttaatcggcagctttataacgtttgtaccgcgcagtag

SEQ ID NO: 370661 - DNA, 525 bp, Salmonella enterica
atgaaaagacggtcttcgttccttgtttttttaggtttattattagcgtcacctttagctttggctaacgatcagcacaccgtatcgtttggttatgcacaaactcatctcagttcattgaaaaatagcgatagcaaagatctgcgaggctttaattttaaatatcgttacgagttcaatgagacctgggggatgttaggatcattcaccgcgacgcgcaatgaaatggagaactacacctggaaagaggggaaattgcataaaaatggttccgattctgtggactatggttctttgatgtttggaccaacatatcgttttaatgactatgtgagcctgtacggcaatgcgggtatagcgacgatgaaatttaataaacactcaaaagaagagtcctttgcctacggcgctggcgtaatatttaatccagttaagagtatatctatcgatgcatcatgggaagccagtcgtttcttcgctgtggataccaatacatttggtgtcagcgtaggttatcgcttctga

SEQ ID NO: 370662 - DNA, 528 bp, Salmonella enterica
atgttcccactcaatggagaatataattcgtgtcagatatcagctagcgaagatatcataattattattgatggacgagttttgattcagggggtctggaaaggttttaaggcgctcatgcagcattatccacatgctcgtcgaatctggctcacgcgcagagatattggaaaactttatccacatggctgcgatagagatcctgatatcgatcccgatttggcaaagcctgtttttattgagcatttcattaaatacgcttgtgcaaacgaagtagcggtcggtgaacttgcgccgttgacaaaaaaggaggaggagttgttatggcactttttatataaaaagtcgatgagtcagatcgccagtagctatggcatgagtcgtaagactttgtacattcatagattgcgtatctgtcgtaaatatggcttcaaacgctttttccatttgctatttatttaccaaagaagtcgccatatcttcgcatctaaaatttgccgtgtagacaaaaacgccgatcaggcttga

SEQ ID NO: 370663 - DNA, 360 bp, Salmonella enterica
atgaaaaagatcttagtatgtttcgccggcttggctttaaccgcatgtagcgctaattcgttgaattatggcgctgaacaggtacgggtgatgaccagcgagccaggtaaggaatgcagctacttaggggatatcacgggcagccaggggaatttctttaccggtggctggacttccaacagtaacctggaaacgggtgcccgtaacgatctgaaaaacaaagcttataaaatgggcggcaatacggtagtcctgttaacccagcgtgcaggccagacaggaagttcatggcacggttcgggctcaagcaaacaaacgaatgtcacgttaagcgggaacgtttatcgttgccctcgttaa

SEQ ID NO: 370664 - DNA, 1458 bp, Salmonella enterica
atgaagatcacttttacaggctatcggcagaccgccacgctggcgacgcttgctttcgtcaccacgcttgctggctgtacgatggcgccgaagcacgaacgccccgcatcgccgactgcgatggtctatccctacgcaacgtcaaccgtttctggcgcgccggatgccgctgacattggctggcgtgatttcttccacgatccgcttctacaggaactgatcgcgatcgcgttacgcaataatcgggatttacgcaaggcagggctcaatgttgaagccgcccgggcgttataccgtattcagcgcgcggagatgctgccgacgctcggcatcgccaccgccatggacgccggtcgcactcccgccgatctcagcgtcacggacgagcctgagattaaccgacgctacgagatggctggggcgacgacggcctgggaactggatctctgggggcgagtgcgaagccttagcgaccaggcattagccgcctatatggcgcttgatgagacgtacattgcggcgcgaatgagcctggtttccgaagtcgccagcgcctggctgacgctacgggctgaccgggagctgctgcgcttaaccgaagatacgctggccgcgcaaaaaagttcatacacattgacaacccagcttgcccggacaggcaacgccacacagctcgatctgcgtatggcggagatcgcgctgcgttctgccgaaatcaatcgcgcggcgtatacgcgacagttggcgcgggatcgtaacgcgctggaattgctgttgggccagccgctcacgcctgaactgtcgcgtcgactaaacgaggcggtcacgcttacggaagtcgcgatcccgaccacattgccaggcggattaccgtcagatctgctggtacgccgcccggatattcgcgccgccgagtacaggctgcgtggcgcaaacgcccgaataggcgcagcgcgcgccgccttcttcccgacaatcagcctgacaggcacggcgggaacggccagcgcgtctcttagcggactctttgaaccgggatcgggaagctggcgttttctaccgcaaatcaccttgcctctctttcacggcggcgcattacgcgctgacctggatagggcgcatgtccaaaaacagattgaaatcgccaggtatgaaaacgttattcagcaagcctttcgcgacgtggcggatggtctggcgggacagcgtacgctgaatgaccaggtgcaatcagaacaacgcgcggttgaagccagccaaatcgcctatgagctggccggactccgttttcaggaaggcgtcgatgactaccttacgctgcttgatacccatcgtatgctttatggcgcgcaacagcgcctggtacgcacacggctcatgcaacagctgaatatcattaatctgtataaagcattaggcggcggttggcgggaatacagcgagaaaaagcaaggttag

SEQ ID NO: 370665 - DNA, 3168 bp, Salmonella enterica
atgaaattcacccactttttcattgcacgacccatcttcgccatcgtcctgtcgctgttaatgctgctggctggcgctatcgcctttttaaaactgccgctgagtgaatatccggccgttacgccgcccacggtacaggttagcgccagctaccccggcgctaacccgcaagtgattgccgatacggtagccgcgccgctggaacaggtgatcaacggcgttgacggcatgttgtatatgaatacccagatggccattgatggtcgcatggttatctctatcgccttcgaacagggaaccgatcctgatatggcgcaaattcaggtgcaaaaccgggtatcccgcgcgctgcctcgcctgcccgaagaagtccagcgaattggcgttgtaacggagaaaacgtcccccgatatgttgatggtggtccatcttgtctcgccgcaaaaacgctatgactcgctttacctgtctaacttcgccatccggcaggttcgcgacgagctggcccgtttacccggcgtcggcgatgttctcgtctggggcgcgggcgagtacgccatgcgcgtctggctggacccggcgaaaatcgccaaccgcggtcttaccgccagtgatatcgttacggcgttgcgggaacaaaacgtacaggtcgccgccggttccgtcgggcaacagccggaggcctccgcagcttttcagatgacggtaaacacgctgggccgcctgaccagcgaagaacagttcggcgagattgtggtaaaaatcggcgctgacggcgaggtgacgcgtctgcgtgatgtcgcccgcgtcacgctgggcgcagatgcctatacgctgcgcagtttactgaatggcgaagcggcgccagcgttacagattattcaaagtccgggcgccaatgcgattgacgtttctaacgcgattcgcggcaaaatggatgagttacagcaaaacttcccgcaggatatcgaataccggattgcctatgatcctacggtcttcgtgcgcgcatcgctacaatcggtggcgattacgttgctggaagccctcgtgctggtcgtccttgtcgtggtgctgttcctgcaaacctggcgggcgtccattattcctctggtggcggttcccgtttcgctggtcggcacctttgccttgatgcacctgtttggcttttcgctgaatacgctttcgctgtttggtttggtcctgtcgataggtatcgttgtcgatgacgccatcgttgtggtcgaaaacgtggaacggcatatctcgcagggcaaaagccccggagaggcggcaaagaaggcgatggatgaagtcactggtcccattctttctattacctcggtgctaacggcggtctttatcccttccgcattcctggcgggcctgcagggtgagttttatcgtcagttcgcgttgaccatcgctatttcgaccatcctttcggccattaactcgctgacgctctcccctgcgctggctgccattttgctaagaccgcaccacgatactgcgaaggctgactggctaacgcggttgatgggcacggtcactggcggttttttccatcgctttaaccgtttcttcgacagcgcgtcgaaccgctatgttagcgccgtccgtcgggccgtgcgcggcagcgtcattgtgatggtgctctatgctggctttgtggggctgacctggcttggcttccatcaggtgccgaacgggtttgtgcctgcgcaggataaatactatctcgtcggcatcgcccagctcccaagcggcgcatcgttggatcgcacagaggcggtcgtgaaacagatgtccgctatcgcgctggcggaacccggcgttgaaagcgtcgtcgtcttccccggtctgtcggttaacggcccggtaaatgtgccaaattcggcgctgatgttcgccatgctgaaaccctttgacgagcgtgaagatccttcgctttccgctaacgctatcgccggaaagctaatgcacaaatttagccacattcccgacggatttattggcatcttcccgccaccgccggttccagggcttggcgcgacgggcggctttaaattgcagattgaagatcgtgcggaactgggatttgaagcgatgacaaaggtgcaaagcgagattatgtctaaggcgatgcagacgcccgaactggccaatatgctggccagtttccagacaaacgccccgcaattacaggtggatatcgaccgggtaaaggcgaaatcaatgggggtatcgctcaccgacatctttgaaacgttgcaaattaacctcggctcgctttacgtcaacgatttcaaccgatttggccgtacctggcgggtgatggcgcaggccgatgcgccattccgtatgcaacaagaggatatcggcctgcttaaagtccgcaatgcgaagggcgagatgatcccgcttagcgctttcgtcacgattatgcgccagtcggggccggacagaatcatccattacaacggcttcccctcggtagatattagcggtggaccggctccgggcttctcctccggacaggcgacggacgcgattgaaaagatcgtgcgtgaaacgttaccggaagggatggtcttcgaatggaccgatctggtttatcaggaaaaacaggccggcaattctgcgcttgctatctttgcgctggcggtgctgttggccttcctgatcctggcggcgcagtacaacagttggtcgctgcccttcgccgtcctgcttattgcgcctatgtcattactctcagccattgtcggcgtgtgggtatctggcggagataacaatatctttacgcagattggtttcgtggtgctggtcggcctggcggccaagaacgccattttgattgtcgagtttgcccgcgccaaagaacacgacggcgcagacccgctgaccgccgtactggaagcgtcccgcctgcgtctgcgtcctatcctgatgacctcattcgcctttatcgcaggcgtagtaccgctggtactcgcgacgggtgccggcgcggaaatgcgacatgcgatgggcatcgccgtgtttgccggcatgttgggcgtcacgctcttcggcctgttattgacgcctgtgttttacgtggtggttcgcaggatggcattaaagcgtgagaaccgcgttgattcacatgatcagcaagcataa

SEQ ID NO: 370666 - DNA, 1227 bp, Salmonella enterica
atgcgtagaacattcaaaattatgttgatagccggcgtcatcgccgccatcgggggcgtgatttacatggccggcgaagcactatgggataaagacaacgccgtcggccccccggccagcgcgccgcctccaccgtcggtaccggttgctaaagcccttagccgtacactcacgcctacggcggaattcaccggttttctggccgcgccggagaccgtggagctgcgttcgcgcgtgggaggaacccttgacgccgtcagcgttccggaaggacgtctggtaagccgcggacaactgctgttccagatcgatccgcgcccgttcgaggtcgccctcgacaccgccgtcgcgcaattacgtcaggctgaagtactggcccgccaggcgcaggcggatttcgatcgcattcaacgactggtcgccagcggcgccgtatcacgtaaaaacgctgacgatgtcaccgccacgcgtaatgcgcgacaggcgcagatgcaatcggccaaagccgccgtcgccgcagcgcgccttgaactctcctggacccgtattaccgcgcccattgccggacgcgttgaccgcatactggtgacccggggcaatctggtcagcggcggcgtagcgggtaacgccacgcttttgacgactatcgtgtctcacaatcccatgtatgtgtatttcgatattgacgaagccacctggctgaaggcgttacggcatacccgctccgacaaaaattcaccggtagtcaacatggggttaaccaccgataacgggctgccttatcagggcgtactcgactttatgggcaatcagatgaaccgcagcaccggcactatccgggcgcgcgccgtgattcctgaccccaacggaatgctttctcccggcctgtttgcccgaatcagtttgcccatcggcgagccgcgggaaaccgtgctgattgacgatatggcggtgagcgccgatcagggcaaaaattatgtgctgatcgtcggcaaggagaatcaggtggagtatcgtccggttgagctgggacaaatggtcgatggactccgcgtcgttacacagggagtacagccgggagaaaaaatcatcctcaaggggctggtgcgtcctggcatgaccgttgcgccgcgtctggtgccgatgcgacagaatgtgaccgacaaacagaccgcgacattgactaaagcggacggcgacagtgcgccgaaggcggtgcgccaatga

SEQ ID NO: 370667 - DNA, 2304 bp, Salmonella enterica
atgagtcagtcagaaaatcgtcacgacacgataagcttgcttattgaaggtatgacctgcgcgtcgtgcgtcgctcgcgttgaaaaaggtattaaggctgtgcctggcgtaacggacgctacggtgaatctggcgacggagcgcgccaccgtccgcgggacggcgtcggcggaggcggtgatcgcggcgattgaaaaaacggggtatgaggcgcgaccgatagagacggcggggcagggcgaagacgactctgaagagaaaaaagaggccgagcgcgtcaggctgaagcgcgatctgattctcgccagcgtgctggcgctccccgtttttgtgcttgaaatgggctcgcaccttattcctggtatgcacgagtgggtgataaaaacgattggcctgcaacaaagctggtactggcaatttgcactgaccctgttggtgctgacgatccccggtcgccgtttttaccttaaagggttcccggcgctggcgcgtctggcgccggacatgaactcgctggtcgccgtgggaaccgcagcggcattcggctactcgctggtggcgacctttacgcccgacctgttgcctgaagggacggtaaacgtctattacgaggccgccgcagtgattgtcgcgcttattctgctggggcgctttctggaggcaagggcgaaggggcggacttccgaagcgattaaacgtctggtggggctacaggcgcgggtcgcgcatgtgttacgcgagggccgcatcgaggatatccctgtcgacgaggttgtgctgggcgactgtgtggaggttcggccaggcgagcggataccggttgacggcgaagtgaccgaaggccgcagcttcgttgacgagtcgatgattaccggcgaaccgataccggttgagaaatccgcaggaagcgcggtggtgggcggtaccgtaaaccaaaaaggcgcgctcacgctgcgggcgaccgccgtcggcggacagaccatgctggcgcaaatcattcgtctggtggaacaggcgcagggttcaaaactgccgattcaggccgtcgtggataaagtgacgctgtggtttgtcccgatggtaatgcttattgctgcgctgacctttgtggtatggctggcgtttgggccgtcgcctgcgctgactttcgctctgatcaatggcgttgcggttctgattatcgcctgtccttgcgcgatgggcctggcgacgccgacctctattatggtgggaaccggtcgtggggcggaaatgggcgtgctgttccgtaagggggaggcgttacagctactcaaagacgctaaggtggtggccgtagacaaaaccgggacgcttaccgaaggccgcccggtactgaccgatctcgacgtggccagcggctttgaacgccgtgaggtgctggcgaaagtcgcggcggtagaatcgcgttcagagcatccgattgcccgtgcgattgtcgtgtcggcagaagaggaagggatcgcgctaccaggcatgaacggcttcgaatcggtgaccgggatgggcgtatacgctaccgttgacggtacgcgtgttgacgtgggggctgatcgctatatgcgcgaaattggcgtggatattagcggcttcgccaccaccgccgaacggttagggcaggaagggaaatcgccgctctatgcggctattgacggtcaactggcggcgattatcgccgtggccgatccgatcaaacccagtacgcccgccgcaattaacgctttacatcagctcggcattaaggtcgccatgatcactggcgataatgcccgcacggcacaggctatcgccagacagttaggaattgatgatgtggttgccgaggtattgccagaagggaaagtcgaggcgatacggcgcctgaaagcggcgtatgggcaggtggcgtttgtcggcgatggcatcaacgatgcgccagcgctggcggagtccgacgtggggctggcgattggcaccggcaccgatgtggcggtggaatccgccgacgtcgtactaatgtccggcaacctgcaaggcgtgccgaatgctatcgcgctgtctaaagcgaccatccgcaatatccaccagaatctgttctgggcctttgcttacaatacggcgctgattcctgtcgcggcaggcgcgctatttccggtctggggcatattattgtcaccggtattcgccgcaggggcgatggcgatgtcgagcgtgttcgtgctgggcaacgctttgcggctgcgccgtttccgggcgccgatggcaaccccatccgacacatccacgacccgaggaggagcgtcatga

SEQ ID NO: 370668 - DNA, 465 bp, Salmonella enterica
atgaacatcggtaaagcagctaaagcatcgaaagtctcggccaaaatgattcgctactatgaacagattggtctgattcccgcggcaagtcggacggattccggctatcgggcctatacccaggctgatgttaatcaattgcattttatacgccgcgcgcgcgacctcggtttttcagttgctgaaatcagcgacttactgaatctttggaataaccagtcgcggcaaagcgctgacgtcaaacgcctggcgcagacgcacattgatgaactggacagacgtatccagaacatgcagcacatggcgcaaaccctcaaagcgctgattcactgctgcgccggcgacgcgctgccagattgtcccattctgcatacgcttggacaacctgacgatagcgagccggaggcgcgtaccggagcggtattgcgccgtcctcgtcgccacggactggcaaagcgtctgtaa

SEQ ID NO: 370669 - DNA, 195 bp, Salmonella enterica
atgcagttccatattgatgacatgacctgcggcggctgcgccagtacggtaaaaaagacgattctgactctcgatgctaatgcgacggtgagaaccgacccggcgacgcgtctggttgacgttgaaacgtcgctatccgcggagcagattgccgccgccctgcaaaaggccggtttcccgccgcgcgagaggtaa

SEQ ID NO: 370670 - DNA, 1254 bp, Salmonella enterica
atgtacacccccctgaactggacgacgacacaacgacatgtggcgtttgccagctttaccagttggatgctggatgcgtttgatttctttatccttgtctttgtacttagcgatctcgccgaatggtttcacgcttccgtatcggacgtttccattgcgattatgctgaccctggcggtacgtcccattggcgcgctgctatttggccgaatggcggaaaagtacggacgtcgaccgatactgatgctcaatattctgttctttacggtgtttgaactgctttccgcctggtcgcccaccttcatggcatttctgatttttagggtcatgtacggcgtggcgatgggcgggatatggggcgtcgcgtcatcactggcgatggaaaccattcccgatcgttcgcgtggcctgatgtcgggcatttttcaggcgggctatccctgcggctatctgttcgcctcggttatttttggcctcttctacagtatggtaggctggcgcggtatgttcctgattggcgccctgcctgttgtcttactgccttatatctggtttaaagtgccggaatcccccgtctggctggcggccagagcgcgtaaagggaataccgcgctgcttcctgttctgcgcaaacagtggaagttgtgtctgtatctggtgctggtcatggcgttctttaactttttcagtcacggcacgcaggatctctatcctaccttcctgaagatgcagcatggttttgatccgcatctgatcagtatcattgcgattttttataacattgccgccatgctcggcggtattttctacggtacgctatcggaacgtattgggcgtaaaaaagcgatcatgatcgccgcctttcttgcgcttccggtactcccgctatgggcattttccagcggatcattcacgattggcctgggcgcgttcctgatgcagtttatggtgcagggcgcctggggagtcgtgccgacctggctgaacgagctggttccggcgaatgcgcgcgccgtgctgccagggtttgtttaccaactcggtaatttactggcgtcggttaatgcgacgttacaggcccgcatcgcggaaacgcatggcggaaattacgggttggcaatggcgatcgtggctggcgcggtggctattttaatctgtgtatttgtggcatttggtcgcgagacccggggagtcgtcatctccggtacagatagcgacgccctcccggagtcggccatcggtcatcgcacgtaa

SEQ ID NO: 370671 - DNA, 1959 bp, Salmonella enterica
atgttgaaagataaccaaaaacacaacgagtctgttgccccgaatagcgcctttctgtctgagttacaacgtgcattaccggaattttttaccgccgatcgctataacgagcagggcgaactgatcgcgaaaggcggatttgatctcgccagatttgagcgcgcgctgaaagcgcgtaatattgatgagctgactagcggttatcagattgattttattggtaaagattacgcaaaaaaacaggcgggtgaaaaatccgttaccgttatcgttcctgacgtggaacacaatactctggcagaaaataaaaacagccataatctttttctgaccggagataatctggatgtgttacgccatctgcaaaataattacgccgataccgtcgatatgatctatatcgatcccccttataacaccggatcggacgggtttgtctatcccgatcattttgaatatagcgatcgggcgttgcaggatatgtttggtcttaatgatactgaactggcacgtttaaaatccattcagggtaaatcgacgcactccgcgtggttatctttcatgtatccgcgtcttttcctggccaggaagctcctgaaagataccggatttatttttatctctatcgacgataatgagtacgccaatcttaaattaatgatggatgagatttttggcgaaggcggatttgtcaccaatgtgatgtggaagcgcaaaaaagagatttctaacgactctgataacgtttccatccagggggaatacattcttgtttacgccaaaaccggtcagggcgctttacgtttagaaccgctttctaaagagtatattcagaaatcctataaagaaccgaccgaacagtttccagaagggaaatggcgaccggtgccgttaacggtgtcaaaagggctgagcggcggcggctatacctataaaattaccacgccgaacggtacggtacacgaaagactatgggcttatcctgaagccagttaccaaaaactggtggccgataatctggtctattttggcaaagataacggcggtattccccagagagtcatgtacgcgcaccacagtaaagggcagccaacgaccaattactgggataacgtagcgtcgaataaagaggggaaaaaggagattctggatctcttcggcgacaacgtttttgatacgccgaaaccgaccgcattattgaagaaaatcatcaagctcgctatcgataaagacggcgtcgttctggacttttttgccggttccggcaccacggcccatgcggtgatggcgctgaatgaagaagatggggggcagcgcacgtttattctgtgtactatcgatcaggcattaagcaataacactatcgcgaaaaaagcaggttataacactattgatgaaatcagccgcgagcgaattacacgcgttgcggcgaagatccgcgccaacaatcccgcgaccaatagcgatctcggttttaaacattatcgttttgccactccgccacagcagacgctggacgatctggatagcttcgatattgctaccggccattttatcaataccagcggtcaactggccgctttcaccgagtcaggatttaccgacatgatcaatcctttttccgccagaggattgggcgtgccgggcggcgcaagcggcgaagagaccttattaacgacatggctggtcgccgatggttataaaatggatattgacgtacagaccattgatttttccggctattgcgccaggtatgttgataatacgcgcctgtatctgattgatgaacgatggggaacagagcagacccgcgatcttctcaactacattggtacgcaccagcttccggttcagaccattgtcatttacggctactctttcgaccttgaatccattcgtgaactggaaatcggcttaaaacagcttgatcaaaaagtgaacctggtgaagcgttattaa

SEQ ID NO: 370672 - DNA, 2973 bp, Salmonella enterica
atgatgaatattttactggaagaacttccccatcaggaacaggcgttagcggcgattctggcgagtttcaccggtatcgatcacgcgcaggccgatcataatcactatgctaatccgctgattaaggaacgttacgacgataaggccaatattgacgttaaaatggagaccgggacgggcaaaacctatgtctatacccggttgatgtatgaactgcatcagaagtatggcctcttcaaatttgtgctggtggtgccgacgccagccattaaagaaggcgcgcggaactttatcaccagcgattacgccagacagcatttttcacagttctacgaaaatacgcggatggaactttgcaccatcaacgccggtgattttaaagtaaagtcggggcgtaaaaattttccggcccagttattaagttttactgatgccagccgtcgtgatagccatacgattcaggttttgctgatcaatgcgcaaatgctcaattccgccagtatgacgcgagacgattacgatcaaacgctactgggcgggctgacgtcgcctgttaaagggctgcaaatgacgcgaccggtggtcattattgatgaaccgcatcgttttgcgcgagataacaaattttatcgagcgattcaggccattcagccgcaaatgatcgtccgctttggcgctaccttcccggatattgtcgaaggtaagggtaaaaataaatgtgtacgtaaagattactatcgccggcaaccgcagtttgatctcaacgcggtggacagttttaacgatggtttggtgaaaggtattgatatttattacccgaatctccccgaagaacaggccaacaatcgttatatcgttgacagcgtcacggcaaagaaattaatcctccgacgggggagcaaaattgccgaggttggcgtgggcgaaaatctcgccgatgtcgatgcaggatttgaaggcagtatcgaatatgccggcagtaaaatgttgtcgaacgatctggagctggaggcagggatggcgctggtgccaggaacctttggcgcgagctaccaggaactgattattcaggacgctatcgataagcattttgacactgagcaggcaaatttcttacgcagcaatgagccagaaaataatgccccgcgtattaagaccttaagccttttctttattgacagtattaaaagctatcgtgatgacgaaggctggttgaaagtcacttttgagcgtttgctgaaaaagaaactgacgcaactgattgacgattatcagcgcaagaccctgccgcgagaagtggagtatctgtcgtttctgcaggccacgctcgccagcctgcactcggataaccaaaacgtccacgctggttactttggcgaagaccgcggaagcggcgatgaggcgatccaggctgaggtagatgatattctgaaaaataaagagaagttgctcagtttttcagaccatcacggcaactgggaaacgcgccgctttctgttttcaaaatggacgcttcgcgaaggctgggataacccgaatgtttttgtcattgctaaattacgttcttccggtagcgagtcgagcaaaattcaggaagtggggcgcggcctgcggctaccggtagatgaaaacggccatcgcgttcatcaggaagagtggccgtcccgactgtcgtttctgattggttatgatgaaaaagcgtttgccagtatgctggttgatgagattaatcgcgacagcaaagttcagcttaacgagcagaaactggatgaggcgatgatcacactcatcgtcaccgagcggcaaaaagtcgatcctgcgtttacggagcttcgtttgctggaagatctggatgataaaaaactgatcaaccggagtaatgagtttaaacccagcgtcacgcttaacggggaaaccaaaagtggttttgcgtggctactggagttctaccctgagctgacgcaggcgcgggtgcgagcggatcgcattcgtgacaataagcccgcctcccgactgcgagtcaggttacgcaaagagaattgggaacaacttagcagtatctgggagcagttttcccgccgttatatgctgcaattcgagcgtagcggcgcgtctctggaacagattgccgccgaggtgctgcgcgatccggcgctgtatatacgccagaagccaagccaggtgcaacaacggctggtatcgaatgaagataatggccgttttgaagtggcgcagcgggaaggcgaattagccgccagcgaatttatggtgggcatgaaatatggccattttcttaagcaactggcgttacgcaccagtctgccggttaacgtcctgcacccggtgttaatggcgatgctgcgtgatgttttgcacggagattcacgctatttaagcgagatctcgttggacaatatgacccgcgcattacagacgcggattaatgcgcattttgcgcagcgccacgattatctgcctctcgattttcaggcttcaacgtcggtatttgattccacggcacggcagttcagagaggagattagcgctgaaattgtggggaaaaatgtggatgagaatgcgatagacgatccccgttctctctatcaaataccgccgttgcgttatgacagcgtcgatccagaattgccgctattaaaatacgattatccgcaacaggtttctgtgtttggcaaactgcctaagcgggccattcagatccccaaatatacggggggctctactacgccggattttgtgtaccgtattgagcgtcaggacgccgacagtgtttatttactggttgaaactaaagcagaaaatatgcgcgtaggcgatcaggttattcttgatgcgcaacgtaaattcttcgatatgctgcgtcggcaaaatatcaatgtcgagtttgcggaagcgaccagcgcgccggcggtattttctacgatcaatggcttgattgaggggaaggcaaactaa

SEQ ID NO: 370673 - DNA, 1404 bp, Salmonella enterica
atggagtttgatgccttctttttagcgagactccagtttgcctttaccgtctcttttcatattattttccccgcgattacgattggcttagccagttacctggtggtactggaaggtttatggctaaaaacgcgtaatcctgtctggcgctcgctctatcagttctggctcaaaatttttgccgtcaacttcgggatgggcgtggtctccggtctggtcatggcttaccagttcggaacgaactggagcggtttctcccagttcgccggcagtatcaccgggcctttattaacctatgaagtgctcaccgcattcttcctggaagcgggattcttaggcgtgatgctttttggctggaacaaagtcgggccgggcctgcatttcttgtctacctgtatggtggcgttgggtacgttaatgtcgacgttctggattctggcgtctaatagctggatgcataccccgcagggatttgaaattcacaacggtcaggtggtcccggtggactggttcgcggtgattttcaacccgtcgttcccgtatcgcctgttgcatatgtccgttgcggcgtttttaagtagcgcgatgtttgtcggcgcgtccgctgcctggcatttactgaaaggtaacgatacgccggctatccgccgtatgttctcgatggcgttatggatggcggtcgtggtggcgcccgttcaggcattgattggcgatatgcacggccttaacaccctgaagcatcagccggtcaaaatcgccgcgattgaggggcactgggaaaatacgcccggcgagccaacgccgcttacgctggtaggctggccggatatggaggcggaacggacccgctatgcgcttgagatcccggcgttgggcagtctgatcctgacgcatagcctggacaaacaggtgcctgcgctaaaagattatcccaaagaggatcgccccaactctaccgtggtgttctggtctttccgtctgatggtgggcatgggcgtactgatgatcttcctggggctggccagcctgtggctacgctaccgacgccgactgtatcattcgcggccctttatgcactttgcgctgtggatggggccgtccgggcttatcgccatccttgccggatgggtgacgactgaagtaggacgtcagccgtgggtggtctatggcctgctgcgaacgcgtgatgcggtttccgcgcacagcaccttgcagatgagcatcagtttgctggccttctttgtggtctattccctggtctttggggttggctatatttatatgattcgtcttatccagaaagggccgcagccggcggagacaccgaccgctgaaaccgatggcagacccgcgcgtcctatctctgccgtgggagaatcgcttgagcaggagaaacgcgaatga

SEQ ID NO: 370674 - DNA, 1011 bp, Salmonella enterica
atgaccatcgatcttccggttatctggtttgctattatcgtgttcgccacgctgatgtatatcgtaatggatgggttcgatctgggcgtcggtatcctgtttccgtttattcgcgataaacacgatcgcgatgttatggtgaactcggtcgcgccggtatgggacgggaacgaaacctggctggtgctgggcggggccgggctttttggcgcgttcccgttggcttatgccgtcatcaccgacgcgctgactatcccgctggtggttatgctgcttggtcttatctttcgcggcgtcgcttttgaattccgttttaaagccaccgagtcgcatcgcgcgttctgggataaatcctttatcgtcgggtcaatcctggcgacctttgcccagggggttgtggtgggcgcggtggtgagcggttttcaggtggaagggcgaacctttagcggttcgcagcttgactggctgacgccgtttaatctgttctgcggtgtcggtctggttgtcacctacgcgctgctgggcgctacctggctgattatgaaaagcgaagatccgctgcatagccggatgtgcgcgctgtcgcgcccgttgttgatcgtcttgttgttggtgatgggaggcgtcagcgtgtggacgccgctcacccacgacgacatcgccgagcgctggttcacgctgcccaatttatactacttcctgccggtgcctgtgctggtgttggcttttagcatctggctatggcgcagcgtgaaaaaaccagaatcccatgcgcgtccatttattctcacgctagggctgatttttctggggttcagcgggttaggcatcagtatttggccgaatattattccaccggatatttcgctgtatgccgccgccgcgccgccgcaaagtcaaagctttatgctggttggggcgctgataatcatcccgattattctggcttataccttctggagctactacgtcttccgtggaaaagtgcgacatggagagggatatcactga

SEQ ID NO: 370675 - DNA, 132 bp, Salmonella enterica
atggttaaagtgaaaaaatggtcgcggcgagtcgtatggatggtcgcgatatggtgcgccagcgtgcttctgctggcgggcgtcggaatgttattcagactgctcatgacctccgcaggatttcgctcctga

SEQ ID NO: 370676 - DNA, 1008 bp, Salmonella enterica
atgatgtctccgatctcctgtcactcttccgccgccccggcgatgaaaaagatcttttccgtcagcgacttcatcgcgtttggcgagcgttatggcattgattaccgcttccctgcgttaccgcagtatacgcagagtagtcccgtacttcatggcgatatcgaagagatagcgcttcccggcgggatttgcattacacgctcggatgttcacgtgttacaaccttatgaaaccacctctcgccatagcagtccgctgtatatgctggtggtgttggaaggtaacgtcgcgctggctgtcaatgagcagacctttttgttgagcgcggggatggcgttttgctcgcaactgagtgagcagcagacgatacgcgcccatcacggcgcagacagtaaattgcgcaccttatcgctgggaatgtacccggacggcggatggcgggagcgtttgcctgtctcgctggcagacgagtgggaaaatagcgcaacctcggcgagggtctggcaggtgccggagtttctgctttcggggctacgttatgcgcagcagcccggacctcatgcggcgtcacgccagttaatgctggaaggcatcatgctgcaattgctgggctatgcgctaaatctatgtcagcccgcaacgcaaaaacgcgggcttcccgtcaccggtgaatatcagcggctggagctcattcggcgtttactggagcagacgccggaaaaagcctacacgctgaacgaactggcgcgtcgggcggcaatgagtccaagtagcctgcggtgcaagtttcgccatgcctatgggtgtaccgtgtttgattatctgcgcgattgccgcctggcgcgcgcgcgtcgttatctgatggagggatacagcgtgcagcaggccgcctggatgtcaggctatcaacatgccactaactttgcgacggcatttcgtcggcgttatggctgctcgcccggcgagctgcgtgacgcgtctctgacggcgtcccgccactgtgcgtaa

SEQ ID NO: 370677 - DNA, 2091 bp, Salmonella enterica
atgtttgcgacaacgcgtatggcgctattgataggcggagctatcggcggcgcgacttttcctctttttgcccaggaaaccacaaaaaatgataccgtcattgtcacctcgcccgttcagagtggcgcgaccaagctggcgacgccagatattgaaacgccgcagtcggtatccattattacccgccagcagtttgaagagcagggcgcaaccagcgtgcgtcaggcggtcagctacaccccaggcgtatacagtaaccagataggcgcctctaaccgctttgattacatcgtattgcgtggtttttcggacggtagtctggataacgtctatctcgacgggttaaaaatgatgggcgacaccaattcgcacagttcgttggtggttgacccctggtttctggaagatatcgaggtggtacgcggcccggcgtccgttctgtatggtcgttcatcgccaggcggcattgtcgcgttgacgtcgcgaaaaccggcgtttgatgtcgggggagaagtgaagctgtttgccggcaatcacaaccagcgcggggcggcttttgatgtgaccggcccactggatgacaatgaacgtgtggcggcgcgtcttagcggtatgacacgttacgccgattcgcagtttacccccttgaaagaggaacgttatgcgctgatgccgagcctgacctggcgaattaccgatcggacgcgtcttgatcttatggcctatctgcaccgtgatccggaaggcggtagccactccggactgccttatcaaggcacggttgtaccttataacggcagaaaaatttctaacactttctttgaaggtgaagatgactacgacaaatacgatcgccgtgaaaatatggtgggttataacattgagcatctgttcgataacggctggtcggtacggcaaaaattgcgttatttgcataccaaagtgacgttgaatcaggtctatgccgcaggttggttgaatgaaacggcgctgaatcgcggctattccggctccggggagaaaatgtcggctatcgcgctggataatcagctcgacggcagcgtggataccggggcgattaatcatcgtctgctggtggggatcgattatcaggatcgcagtaatcatactactggctattatggcgcgtttccgccgattgacgctttcaaccctgtttatggcgctcagccggattacattacgttgtatagccgtgaaaaacataagctgcggcagaccggatactatttacaggatcagatgtcatgggatcgctggcgctttacgttgggcggtcgttacgatcgggtcagcgtgtctaacatcgacaaacttcatgattcacgcagcgatctcgataaaaacaacgtcagcacccgtgccgcgttgctttatctgttcgacaatggcgtcgccccctatctcagttattctaccgcgtttacgccgaccagcttcgccgacgaaaacggcaatgtgctggaaccgatgaaaggcaagcagtgggaggcgggggtaaaatacgaaccgctgggggggaatagccagtttagcgccgccgtgtatcgtattaaccagacaaatatcgcgaccaaagaagaacctaccgatccgtaccgctcgattggtgaaattgagtctaaaggggtggaactggaggccattagccatttgtcggatagcgtccgtttgcaggcggcgtatacctatactgatatccgttataagaaaagtagcccgcaagagcagggtaagcgcgcggtttatgctccacggaaccaggccagcgcctggctaagctacgatgtgaaaagcggtctgttagaggggctgactttgggctccggcatccggtacgtcaacggcgtgaccagcgatcgcctgaatacccacacgttgccgtcctatacattggtcgatatggtggtagggtatgatttatccagcattgggttaaatggcttgagcgcccagctcaacgtaaataacctgacggacaaacgctatgtcgctgcctgtaattcgctctcttattgttattttggcgccgagcgtagcattgtaggcagcgtgtcatgggcgttttga

SEQ ID NO: 370678 - DNA, 633 bp, Salmonella enterica
atggagccgtttcatgccgttgtgcttaccgtcagtctgtttgtgttaaccttttttaatcccggcgcgaatctgtttgtggtggtgcaaaccagcctcgcatcaggacgccgggcgggagtcatcaccggcctgggcgtcgccacgggagacgccttttattccgggctggggcttttcggtctggcgacgctcattacgcaatgcgaagcggtattttctcttatcaaaattgtcggcggcgcctatttattatggttcgcctggaacagtattcgccaccaggcgacgccgcaaatgagcacgctccagacgccgattgccgccccgtggacgattttctttcgccggggattaatgaccgatttatccaatccgcaaaccgtactgttttttatcagtattttttccgtaacgcttagcgcagaaacgcccacatgggcaaggttaatggcctgggccggaattgtgctgtcatccgttatctggcgtatttttctcagccaggccttttcgctccccgcagtccgccgcgcttatgggcgtatacagcgcattgccagccgtgttatcggcgccattatcgggatgtttgcgctcagacttctctatgaaggcgtgacgcaccgctaa

SEQ ID NO: 370679 - DNA, 276 bp, Salmonella enterica
atgaaaactggctacaaggttatgcttggcgcattagcgtttgtcgtgacaaacgtttatgccgcagaaatcatgaaaaaaacggactttgataaagtcgcctccgaatacacgaaaattggcacgatttccaccaccggggaaatgtcgccgctggacgccagagaagatttaatcaaaaaggcggatgaaaaaggggcggatgtggtggtgctgacgtccgggcagacagaaaataaaattcatggtacggctgatatttataaaaagaaataa

SEQ ID NO: 370680 - DNA, 1626 bp, Salmonella enterica
atgacgactgctcacagcgctccgcgcgataatagcgataaaccggtgatctggacggtctccgtaacgcgtctgttcgaactgtttcgggatatcagtctggaattcgatcatctggcgaccatcacgcctattcaactcggctttgaaaaggcggtgacctacattcgcaaaaaactggcgaccgagcgctgcgacgcgattatcgcggcgggttcgaatggggcctatttaaaaagccgcctgtcaataccggtgatcctcatcaagcccagcggattcgatgtattacaggcgctggcgaaagcgggaaagctcacctcgtctatcggtatcgtgacctatcaggagaccattccggctttacttgcctttcagaaaacgtttcacctccgtcttgaacagcgaagctatgtcaccgaagaggacgcgcgcgggcaaattaacgaacttaaggccaacggtattgaggccgtcgtcggcgcgggattaattaccgatctggcggaagaagcgggaatgaccgccatctttatttattccgcggcgaccgttcgtcaggcttttcatgatgcgctggatatgacccgtctgacacggcgccagcgcgtggattactcatccggcaagggattacaaacccggtatgaactgggcgatatacgcggccagtcgccgcaaatggagcagctccgccagacgattacgctctatgcccgctcccgtgcggcagtgctgattcagggggaaacagggaccggaaaagagctggcggcgcaggcgattcaccagacgttttttcaccgccagcctcaccgtcagaataagccatcccctccctttgtcgccgtcaattgcggcgcgattaccgagtcgttgctggaagcggaactgtttggttatgaagagggtgcgtttaccggttcacgacgaggaggccgggcggggctgtttgaaatcgcacacggcggcacgctgcttctggatgaaatcggcgaaatgcccttgccgttacaaacccgacttttgcgcgtactggaggaaaaagccgtcactcgcgtcggcggacaccagccgatcccggtggatgtccgggtgatcagcgctacgcattgcgatctggatcgggagataatgcaaggacgttttcgccccgatctcttttatcgcctgagtattctgcgtctgacgcttcctcctttgcgcgagcggcaggctgatattttaccgctggcggaaagctttttaaaacagtcgctggcggcaatggaaattccgtttaccgaatcgatacgtcatggattgacacagtgtcagccgcttttgctggcctggcgctggcccggtaatattcgcgaactgcgtaatatgatggagcgcctggcgctttttttaagcgtcgatcccgcgccaacgctggacaggcaatttatgcggcagttattacctgagcttatggtgaacacagcagaactgacgccttcaaccatggatgcgcacacgttacaggatgtactggcgcgctttaagggcgataagaccgcggcggcgcgttatctggggattagccgcaccactctgtggcgtcgtttaaaagcaggtgccaaagaccagtcggataattaa

SEQ ID NO: 370681 - DNA, 888 bp, Salmonella enterica
atgtctttacattcgccggggcaggcatttcgcgccgcgctctctaaagagaatccattacaaattgtcggcgcgatcaatgccaaccatgctctgttggcccaacgggccgggtatcaggctatctatctttctggcggcggcgtagcggcgggctcgctcggactgccggatctggggatttctacgctggatgatgtgttaaccgatatccggcgcatcacggatgtttgcccgctgccgctgttggtggatgcggatattggctttggctcctccgcctttaatgtcgcgcggacggtaaagtccatagccaaagcgggcgccgccgcgctgcatattgaagaccaggttggcgctaagcgctgtggacaccgtccaaacaaagcgatcgtctcgaaagaggagatggtagaccgaattcgggcggcagtggatgcgcgcaccgatccgaactttgtgatcatggcgcgtaccgatgcgctggcggtggaagggctggaggcggctctcgatcgtgcgcaggcttacgtggacgcgggggctgacatgctgttcccggaggcgatcaccgaactgtcgatgtaccgccggttcgccgacgtggcgcaggtgccgatcctcgccaacatcactgagtttggcgcgacgccgctgtttacgaccgacgagttgcgcagcgcaaacgtggcgatggcgctctatccgctgtcggcgtttcgcgccatgaaccgcgccgcagaaaaagtctataccgtgctgcgccaggaagggacgcaaaagaacgtgatcgacatcatgcagacccgcaacgagctgtacgaaagcatcaattactaccagttcgaagagaagctggacgcgctgtacaggaataaaaaatcgtag

SEQ ID NO: 370682 - DNA, 1170 bp, Salmonella enterica
atgacagacacgacgatcctgcaaaacaacacgcatgtcattaagcctaaaaaatcggtcgcgctttccggcgtacctgccggaaataccgctctgtgtaccgtgggaaaaagcggtaacgatctgcactatcgcggttacgacattctcgatctggcggagcactgcgaatttgaagaagtcgcgcatttactgatccacggaaaattaccgacccgcgacgagctgaacgcgtataaaagcaagttaaaagcgctgcgcggattacccgccaatgtccgtaccgttctggaagcgttaccggcggcctcgcacccgatggatgtgatgcgtaccggcgtttccgcgctgggctgcaccctgccggaaaaagagggacataccgtctccggcgcgcgcgatattgccgataagctgttggcctcgctcagctctatccttctttactggtatcactacagccacaacggcgaacgtattcagccggaaaccgacgatgattccatcggcggccatttcctgcatctgctgcacggtgaaaagccaacccaaagctgggaaaaggcgatgcatatttcgctggtgctgtatgccgagcatgagttcaacgcctcgacgtttaccagccgggtgattgccgggaccggctcggatgtctactccgcgattatcggcgcgattggcgcgctgcgcggcccgaaacacggcggggcgaatgaggtgtcgctggaaattcaacagcgttatgaaacgccggacgaggcagaggcggatatccgtaaacgcgtggaaaacaaagaggtggtgattggctttggacatccggtttacaccatcgccgacccgcgccatcaggtgatcaaacgggtggcgaaacagctttcagaagaaggcggctcgctgaagatgtaccacatcgccgaccgtctggaaacggtgatgtgggagaccaaaaagatgttcccgaatctcgactggttttcggcggtctcctacaacatgatgggcgtccctaccgaaatgttcaccccgctgtttgtcatcgcccgcgttaccggctgggcggcgcacattattgaacagcgtcaggacaacaaaattattcgtccttccgccaattataccggcccggacgatcgccagtttgtgccgatcgaaaagcgttgctaa

SEQ ID NO: 370683 - DNA, 1452 bp, Salmonella enterica
atgtccgcacatatttcgaacatccgcccagactttgaccgtgaaatcgttgatatcgttgattacgtgatgaattacgagatcacctcaaaggtggcgtacgacaccgcgcattattgcctgctcgacacgctcggctgtggtctggaagcgctggaatacccggcctgtaaaaaattgcttgggccgatcgtgccaggcacggtggtgcccaacggcgcacgcgtgccgggcacccagttccagctcgatccggtacaggcagcctttaacattggcgcgatgatccgctggctcgattttaatgatacctggcttgccgccgagtggggccatccttctgataacctgggcggtattctggcgattgcggattggctgtcacgcaacgccgtcgccgccggcaaagcgccgctgaccatgaaacaggtattgagcgggatgatcaaagcccatgaaattcagggttgcatcgcgctggaaaacgccttcaaccgtgtcggacttgaccatgtgttgctggtgaaagtggcctcgacggcggtggtcgctgaaatgctggggctgacgcgcgatgagatccttaacgcggtatcgctggcgtgggtggatgggcagtcgttgcgcacttatcgtcatgcgccgaataccggtacgcgcaaatcctgggcggcgggcgacgctacctcacgcgcggtacgtctggcgctgatggcgaaaaccggcgagatgggctatccctcggcgctcaccgccaaaacctggggcttctacgacgtttcattcaaaggtgaaacgttccgtttccagcgcccttacggctcctacgtgatggaaaacgtgctatttaaaatttctttcccggcagaattccactcgcaaaccgccgtcgaagcggtgatgacgctgtatgagcagatgcaggccgcgggtaaaacggcagcggatatcgagaaagtgaccatccgtacccacgaagcctgtcttcgcattatcgataaaaaaggcccgctcaataacccggcggaccgcgatcactgtatccagtatatggtcgccgtgccgctgctgttcggacggttaaccgcggcggattatgaagacgaggtggcgcaggacaagcgtattgacgccctgcgcgagaaaatcgtgtgttatgaggacccggcttttaccgccgactatcacgacccggaaaaacgagctatcggcaatgcgatcaccgtggagtttactgatggctcacgctttggcgaggttgtcgtggagtatccgattggtcatgcgcgtcgccgcgccgacggtattccgaagcttatcgaaaaatttaaaattaacctggctcgtcagttcccgactcgccagcagcaacgcattctggatgtctccctggacagagcccgcctggagcagatgccggttaacgaatacctcgatttatatgtcatctga

SEQ ID NO: 370684 - DNA, 1887 bp, Salmonella enterica
atgtcttttagcgaattttatcagcgttccattaacgaaccggaggcgttctgggccgagcaggcccgacgtatcgactggcgacagccgtttacgcagacgctggatcatagccgtccaccgtttgcccgctggttttgcggcggcaccactaacttatgtcataacgccgttgaccgctggctggataaacagccggaggcgctggcgctgattgccgtctcatcagagaccgatgaagagcgcacatttaccttcagccagttgcatgatgaagtcaacgctgtggccgctatgctgctgtcgctgggcgtgcagcgtggcgatcgcgtattggtctatatgccgatgattgccgaagcgcagataaccctgctggcctgtgcgcgcattggcgcgatccattcggtggtctttggcggttttgcctcgcacagcgtggcggcgcggattgacgatgccagaccggcgctgattgtgtcggcggatgccggagcgcggggcggtaaaatcctgccgtataaaaagctgcttgatgacgctattgcgcaggcgcagcatcagccgaaacacgttctgctggtggacagagggctggcgaaaatggcgtgggtggatgggcgcgatctggattttgccacgttgcgccagcagcatctcggcgcgagcgtgccggtggcgtggctggaatccaatgaaacctcgtgcattctttacacctccggcactaccggcaaaccgaaaggcgtccagcgcgacgtcggcggttatgcggtggcgctggcaacctcgatggacaccatttttggcggcaaggcgggcggcgtattcttttgcgcatcggatatcggctgggtcgtcggccactcctatatcgtttacgcgccgctgctggcaggcatggcgactattgtttacgaaggactgccgacgtacccggactgcggggtctggtggaaaattgtcgagaaataccaggttaaccggatgttttccgccccgaccgcgattcgcgtgctgaaaaaattcccgacggcgcaaatccgcaatcacgatctctcctcgctggaggcgctttatctggccggtgagccgctggacgagccgacggccagttgggtgacggagacgctgggcgtaccggtcatcgacaattattggcagacggagtccggctggccgatcatggcgctggcccgcgcgctggacgacaggccgtcgcgtctgggaagtcccggcgtgccgatgtacggttataacgtccagctactcaatgaagtcaccggcgagccctgcggcataaatgaaaaaggcatgctggtgatcgaagggccgctgccgccgggctgtattcagactatttggggcgacgatgcgcgttttgtgaagacttactggtcgctgtttacccgtcaggtttatgccaccttcgactggggaatccgcgacgccgaggggtattactttattctgggccgtaccgatgatgtgattaatattgcgggtcatcggctggggacgcgagaaatagaagaaagtatctccagctacccgaacgtagcggaagtggcggtagtggggataaaagacgctctgaaagggcaggtggcggtggcgtttgtcattccgaagcagagcgatacgctggcggatcgcgaggcggcgcgcgacgaggaaaacgcgattatggcgctggtagacaatcagattggtcactttggtcgtccggcgcatgtctggtttgtctcgcagctccccaaaacgcgttccggaaagatgcttcgccgcacgatccaggcgatctgcgaaggccgcgatccgggcgatctgacaaccattgacgatcccgcgtcgttgcagcaaattcgccaggcgatcgaggaatag

SEQ ID NO: 370685 - DNA, 975 bp, Salmonella enterica
atgacagaccttatccatcgccctcgccgcctgcgcaaatccgctgcgctgcgcgctatgtttgaagagacaacacttagcctgaacgacctggtgttgccgatctttgttgaagaagaactcgacgattacaaagctattgatgccatgcccggcgtaatgcgtatcccggaaaagcaactggcgcgagagattgaacgtatcgcaaatgctggcattcgttccgttatgaccttcggcatttctcaccatactgatgacaccggcagcgatacctggaaagaagacggactggtggcaagaatgtcccgcatctgtaagcaaaccgtgccggagatgatcgtcatgtccgacacctgcttctgcgaatacacctcgcacggccactgcggcgtgttgtgcgaacacggagtggataacgatgcgacgctggccaacctcggcaagcaggccgttatcgcggcggcggctggagcagattttattgcgccctccgcagccatggatggacaagtccaggctatccgccaggcgctggatgccgccggttttaccgatacggcaataatgtcctactccactaagttcgcctcttctttctacggccccttccgtgaagcagcgggtaccgcgttaaaaggcgaccgcaagacgtatcaaatgaatccgatgaaccgccgtgaagcgattcgcgaatcactgctcgacgaagcccagggcgcggattgcttaatggtgaaaccggccggcgcgtatctggacgtgctgcgtgaaatccgcgaacgcacagagttgccgcttggcgcttaccaggtgagcggtgaatatgccatgattaaatttgctgctatggctggcgccatcgatgaagaaaaggtcgtgctggaaagtctgggctcgattaaacgcgccggcgccgatttgattttcagctacttcgcgctggatctggctgagaaaaatattctgcgttaa

SEQ ID NO: 370686 - DNA, 3015 bp, Salmonella enterica
atgcactcctggaaaaagaaacttgtagtctcacaattagcattggcttgcactctggcaatcacttctcaggcgaatgctactactaatgatatttctggtaccacttacaatacgtttcatcactacaacgatgcgacctacgctgatgacgtttattatgatggctatgtaggttggaacaactacgcaactgatagttactataacggtgacatttatcctgtaatcaataacgcgcgagttaatggcgttatttctacctactatctggatgatggcgttactaccaatactaatgcgaatagcctgacaattaaaaacagtactattcacggtatgattacctccgcgtgtcttgagggtaccgattgcgtaaatcgtgacaccgggtatgtatatgatcgtctggcgttgaccgttgataactctactattgatgacaactacgagcattatacctataacggtacctataccgatggtactgcggatacacatgttgttgatgtttatggcatgggtaccgcgattacactggatcaggaagttgatctgtctattgtaaataattctcatgttgctggtattaccctgactcagggctacgaatgggaagatatcgacgataacaccgttagcactggcgtaaacagtagtgaagtatttaataacacaatcaatgttgttgattctaccgtaacctctggttcattgtctgatgaaggtacttccggctggtttggtaatactaataacgctagcgattacagtggttcttatactgctgatgacattgcgattgcggcaattgcacacccatatgctgataatgcaatgcagacgacggtcaacctcagcaactccacgctgatgagcgatgttgtattctccagcaatttcgatgaaaacttcttcccgaatggagcggatagctatcgtgatactgatgctgaccgcgacacgaacggttgggatggcactgaccgtatggatgttaccctgaataatggtagcaaatgggttggtgcagcaatgtctgtacatatgacagacactggtactgatgccgatggagacggtgtttttgaatatactgtagatactaacggcgacggtattcttgatgccacatctccggatggagtttacgattcttatgctgtaggtaccgaggcaactgcaactctgatcgatatcgcagctaatagtctgtggccattatcaactgtaggtgttgataacatttatactgactacagtgagtataaccatatcgttggtaacgaagtttatcagagcggcctgtttaacgtgaccctgaataccggatcacagtgggacactactaaaacttctctgattgatacgctgagtatcaatagtggttctgttgtcaatgttgctgattctactctggtttctgacactatcggcctgactggtggttctgctctgaacatcaatgaagatggtcatgttgcaactgataccctgtctatcgataacagtaccgttacgattgctgatgatgtttctgctggctggagcgtaaatgatgctgccctgtacgcaaacactatcaacgtaaccaataatggtgtactggatgttggtaatagcgcttctaatgcgctgcaggttgatactctgaacctgaccagctacaccgatgctaacggttatgtgaacgctggtgtcttcaacatcgaaagtaaccgtttcgtactggatgctgacctgactaacgatcgtactaacgacacgactaagtctaactacggttatggcgtgattgcgatgaactctgatggtcatttgaccattaacggtaacggcgatacttacgataccgaccagacggaagcaggtcaggatgaagttgataacgttggtgacaatgttgcagctgccaccggtaactataaagtgcgtatcgacaacgccactggcgcgggttctgttgcggattataaaggtaatgagctgatctatgttaacgataagaacagcaccgcaaccttctctgcagcaaacaaagctgacctgggtgcttacacctatcaggctaagcaggaaggcaacactgtcgtgctggaacagatggaactgaccgactacgctaacatggcgctgagcattccttctgcgaacaccaatatctggaacctggaacaagacaccgttggtactcgtctgaccaatgctcgtcatggcctggcggataacggcggcgcatgggtaagctacttcggcggtaacttcaacggcgacaacggcaccattaactacgatcaggatgttaatggcatcatggtcggtgttgataccaaagttgacggtaacaacgctaagtggatcgttggtgcggcagcaggcttcgcgaaaggcgatctgagcgatcgtaccggtcaggtggatcaggacagccagtctgcctacatctactcttccgctcgtttcgcaaacaacatctttgttgacggtaacttaagctactctcacttcaacaacgatttgtctgctaacatgagcgacggtacttacgttgacggcaacacctcttctgacgcctggggcttcggcttgaaactgggttatgatctgaagctgggtgatgcaggctacgtaacgccttacggcagcgtatccggtctgttccagtccggcgacgactaccagctgagcaacgacatgaaagttgacggtcagtcttacgacagcatgcgttatgaactcggtgtagatgcaggttataccttcacttacagcgaagatcaggcgttgacgccgtacttcaaactggcttacgtttacgacgactccaacaacgatgctgacgtaaacggcgactctatcgacaacggcgtagaaggttctgcggtacgtgttggtctgggtactcagttcagcttcacgaagaacttcagcgcctacaccgatgctaactacctcggcggcggtgatgttgatcaagactggtctgcaaacgttggtgttaaatatacctggtaa

SEQ ID NO: 370687 - DNA, 624 bp, Salmonella enterica
atgttatctttaagcaagccactacaggaattctacagactcgataaatgcctttctaagcatggtacgcgtttcgagtttgttaatgataaagagattatctgttcacctgatgaaagtaatacccatacctttgttattttagagggggttgtttcgttagttcgcggtgataaagttcttattggtattgtgcaggccccctttattttcggtttagccgatggtgtggcgaaaaaagaggcacaatataaattaattgcggagagcggttgcattggttatcgcctctcatcatcacaaactcttgccatcattgagcaaaaccaactgtggcgtgaagccttctgttggatagtatggaaaagtcaggtactggaacttcgtgacaagcagctcattggtaataattcttacgaccaaattcgtgcgacgttaatgacaatgattgagtgggatgaagaacttcgctcacgtattggtgttatgaattatattcatcaacgaacgcgcgtatcgcgatcggtggtggcggaagttctcgcggccctgcgtaagggtaattacattgaaatgaataaaggcaaactgatcagtattaaccgtttgccctccgaatattaa

SEQ ID NO: 370688 - DNA, 1158 bp, Salmonella enterica
ttgaaacgtagtctgctttttactgccatgctgtttgcggcatcacttacttctgtccaggcggctcagccgattgccgatccggtttttgcctctgatatcgttgatcgttatgccgagcatatcttttatggtagcggtgccacgggcatggcgctggtggtgatcgacggcaatcaacgcgtgtttcgtagtttcggtgacaccagaccgggcaataatgttcgtccacagcttgattcggtcattcgtatcgcttctctcaccaagctcatgaccagtgaaatgttggtaaaattgctcgatcagggaacggtaaaattaaacgatcctctcagcaaatatgcgcctcccggcgcgcatgtcccgacgtatcaaggcacgccgattacgttggtcaacttagcgacccacaccagcgcgcttccgcgagaacagcccggcggcgcggcgcatcgtccggtatttgtctggccaacccgcgaacaacgctggaactggctctccacagcaacgttaaaagtcgcgcccggttcacaggcggcctattccaatctggcgttcgacctgttagccgacgcgctggcgaccgcctccggcaaaccttatacgcaactgtttgaagaaaagattacccgcccgctgggaatgaaagacaccacgtttaccccttctcccgatcagtgtaagcgtctgatagtggcagaaaaaggcgcaagcccctgtaataatacgctggctgccattggcagcggtggggtctattctacgccaggagatatgatgcgctggatgcaacagtatctgtcgtcagatttctatcaccgtagccaacaggccgatcgtatgcaaacgttgatttatcagcgcacacagttaaagaaaatcatcgggatggacgtaccgggtaaagccgacgcgctcggtctgggttgggtctatatggcgccaaaagacggacgtcctggcattatccagaaaacaggaggaggcggcggttttattacctatatggcgatgatcccgcaatataatattggcgcttttgtggtcgtaacccgttcccctctcacgcgttttaccaatatgagcgacgggattaacgatttggttactgagctaagcggcaataaaccgattgctattcctgcatcctga

SEQ ID NO: 370689 - DNA, 1221 bp, Salmonella enterica
atgtttaaatcttttttcccaaagccagggccgtttttcatgtcggcgtttgtttgggcgctgatcgccgtcattttctggcaggcgggaggaggagattgggtggcgcgacttgtgggggcatccgatgaagtgcctatcagcgcagcgcgcttttggtcgctggactatctgattttttatgcttattacctgatttgcgtgggattatttgcaacgttctggttcatctatagcccgcaccgctggcagtactggtcgatacttggcacctcgctcattatttttgtcacctggtttttggtggaggttggcgtcgcggttaacgcctggtacgcgccgttctatgatttgattcaaacggcgctcagctcgccgcacaaggtcactcttggtcaattttatcatgaagtgggggtgtttctcggtattgcgcttatcgccgtggtgatcggcgtgctgaacaacttctttgtcagccactatgtatttcgctggcgtaccgcaatgaatgagcactatatggcgcactggcagtacctgcgccatatcgaaggggctgcccagcgtgtgcaggaagacaccatgcgttttgcctctacactggagaacatgggcgtgagttttatcaatgccatcatgacgcttatcgcctttctgccggtgttagtcaccctgtcagcgcatgtgccgaatttacccatcgtaggacatatcccttacggcctggtcattgccgccatagtctggtcattaatggggacgggcctgctggcggtcgtcgggatcaaattgccagggctggaatttaaaaatcagcgagtggaagccgcttatcgtaaggagctggtctacggtgaagatgacgccagccgcgccacgccgcccaccgtccgtgaactgtttagcgcggtgcgccataactacttccgtctctactttcactatatgtatttcaacatcgcgcgcattctctatttgcaggtcgataacgttttcggtttgttcctgctgtttccttccattgttgccggtacgattacgctggggctgatgacgcaaatcaccaacgtgtttggccaggtgcgcggttcgttccagtatttgattaactcctggacgacgctggtggagctgatgtctatttataaacgtttacgtagctttgaacgccagttggatggtcagccagttcaggaagtgacccactcttttagctaa

SEQ ID NO: 370690 - DNA, 1095 bp, Salmonella enterica
atgtcggcggcgtcccgtctttatcctctgccttttctggcggttgccatattggctggctgtagtagtcaatccgggcagccggtgagcaagggcgagaagcctgtcgacgtggcaagcgtagtacgtcagaaaatgccagccagtgtcaaagacagagaggcctgggcgaaagatatcgcgacaacgtttaagagccaggggctggcgccgacggtagaaaatatctgttcggtgctggctgtcgcccagcaggagtccggttatcaggcggatcctgtcgtgccggggctaagtaaaatcgcctggcaggagattgatcgccgcgctgaacgactacacattccgctgtttctggtgcacaccgcgctgaaaattaactcccccaacggcaagagctatagcgaacgcctggacacggtaaaaaccgaaaaacagcttagcgctatttttgatgattttatcaatatggttcctatggggcagacgctatttggctcatataacccggtgcatacgggcggcccgatgcaggtcagcattgcctttgccgaacagcacgcgaaaggttatccgtggaagatggcgggtacggtacgtcaggaggtctttacgcgccgtggcgggttgtggtttggaacttaccatttgctgaattacccggcgaactacagcgcgcctgttttccgcttcgccgacttcaacgcgggatggtacgccagccgtaacgctgcgttccagaatgccgtcagtaaagccagtggggtaaaactggcgctggatggcgatctgattcgttataacagcaaggaaccgggcaaaacagagttagcggtacgcaaactggcagggcagttgggaatgagtgagcgtgaaattcgcagccaactggagaaaggcgatagcctggcgtttgaaaaaacggcgctctacaagaaagtctataaactggccgaggccaaaacgggcaagacgcttgcgcgggaaatgttgcccggtattcaactggaaagtccgaagatcacgcgcaagctgacgaccgcctggtttgctaaacgagttgatgagcggcgggcgcggtgtatggggcgataa

SEQ ID NO: 370691 - DNA, 309 bp, Salmonella enterica
atggctgatttcactctctcaaaatcgctgttcagcgggaagcatcgagaaacctcctctacgcccggaaatattgcttacgccatatttgtactgttttgcttctgggccggagcgcaactcttaaacctgctggttcatgcgccgggcatctatgagcatctgatgcaggtacaggatacaggtcgaccgcgggtagagattgggctgggcgtcgggacgatttttggcctggtgcccttcctcacgggctgcctcattttcgccgttatcgccgcgtttttacgctggcgtcaccgtcaccaataa

SEQ ID NO: 370692 - DNA, 216 bp, Salmonella enterica
atgcgtttgcctgtaaaaattcgtcgtgactggcactactatgccttctctattggccttatctttattttgaatggcgtcgtaggattgctgggatttgaggcgaaaggatggcaaacctatggtgttgggctggtaacgtggattattagcttctggctggcggggttcattattcgccggcgcgaagatgatgaggtaaaagacgcccgataa

SEQ ID NO: 370693 - DNA, 1113 bp, Salmonella enterica
atggaatgggtttttaagatggcgaaattgcgggtaggaatagtatttggcggtaagtcggcggaacatgaagtgtctttgcaatcagcgaaaaatatcgttgatgcgatcgataaaacccgcttcgacgtggtgctgttagggatagataaggcgggacaatggcatgttaacgatgcggaaaattatttgcagaatgcagacgatccggcacatatcgcgctacgtccttcggcaatcagtctggcccaggtgcctggcaaacatcaacaccaattgattaacgcccagaacgggcagccgctaccgacggtagatgttatttttcctatcgtccacggtacgctgggcgaagacggctcattgcaggggatgctgcgcgtcgcaaacttaccgtttgtcggttcagacgtgctgagctccgcagcctgcatggataaagacatcgccaaacgactgctacgcgatgcaggactgaatatcgccccgtttattacactcacccgaacgaatcgtcacgcgtttagttttgccgaggttgaatcccgtctgggactgccgctgttcgttaagcccgccaatcagggctcttcggtcggcgttagtaaagtcgctaacgaagcgcaatatcagcaggcggtcgcgctggctttcgaattcgatcataaagtggtggtggagcaagggatcaaagggcgcgagatcgaatgcgccgtattaggtaacgataacccacaggccagtacctgcggcgaaatcgtactgaacagcgaattttacgcctacgatactaagtatattgatgataatggcgcacaagttgtcgtgcctgcgcagcttccttccggggtgaatgacaagatccgcgcgatcgcgatccaggcttatcagacgctgggatgcgcgggtatggcgcgtgtcgatgtcttcttaacggcagacaatgaggtcgtgattaacgagattaatacgctgccaggttttaccaatatcagtatgtatccaaaactctggcaggcgagcggattgggctataccgatttgatcagccgcctgattgagctggcgctggaacgccatacggcgaataacgccttaaaaaccacgatgtaa

SEQ ID NO: 370694 - DNA, 684 bp, Salmonella enterica
gtgagaggtaagggttttctgattattgtgctgttgggcggtattggcgggctgggatatcgttatcttccctcttattataatccttttgctccgctacaacttgccgatccgccaggctggatcactaccttcaaactacagcgcctgatgccgtcgcagtgccgggagctgttgacggcggccaatcaacagggattaatttcatcacaacctgttgcggatagcgctggtgaatgtcccttgtcccatgttgtgcgcgtcagagattttggccaggtcaaactgagcagcagttttttagcctcctgcccgttggcgctgcgctccgcgctgtttgtcgaacagcaggcaaaacctttaacagaaacgtggatgaagcgccgcctgacccgcatcgaacatctgggtagctatgcctgccgtaatatttatcaccgcccggatgcgcgtcgcagtgaacatgccagcgcagaagcgctggatatcagcgggtttcagctatcagatggccgaaaaatcactgttctgcgcggctgggggcgtcaggagacggggccctggttacgcgctatgttaaacgccagttgccattattatggcaatgggctcgggcctgactataacgctgctcatgctaaccattttcatcttggaatgcggggctacggcgtgtgtcgttaa

SEQ ID NO: 370695 - DNA, 1212 bp, Salmonella enterica
atggaatcctggaaagttaatctaatttccgtttggtttggatgtttttttaccgggctggcaatcagccaaatcctgccattcttacccctttatatttcccagcttggcgtctcttcccatgaagcgttatcaatgtggtccgggttaacgtttagcatcacgtttcttatttccgccattgtgtcgccgatgtggggcagtctcgccgatcgcaaagggcgtaaactgatgctattgcgcgcgtcgctcgggatggcgatagctattctactgcaggcattcgcgacccatgtctggcaacttttcctgctgcgcggaatcatggggttaacgtcaggttatatccccaatgctatggcgctggtagcctctcaggtaccgcgcgaacgtagcggctgggcgctcagtacgctttctaccgcgcagatcagcggcgttatcggcgggccgttaatgggcggctttgtcgcggatcatatcgggctgcgggcggtatttctgattactgccatgctgttggtggtgagctttctggtcacgctatttttaattaaagaaggcgtgcgtccggtcatcaggaaaagcgaacgcctgagcggtaaagccgtttttgcgtcgttaccttatcctgcgctggtgatcagtttgttttttaccacgatggtcattcaactctgtaatggttccatcagtccaatcctggcgctgtttatcaaatcaatgatgccggacagtaataacatcgcctttcttagcggggtaatcgcctcggtgcccggtatctctgcgcttatctccgcgcctcgcctgggaaaacttggcgacagaatcggcacggaaagaattctgatggccacgcttatctgcgcagtgctgcttttcttcgcgatgtcctgggtcaccacgccgttccagctggggctgttacgtttcttgttaggctttgccgatggcgcgatgttacccgccgtacaaacgttattggtgaaatactccagcgatcaaattaccggacgtatttttggctacaaccagtcatttatgtacctgggcaacgtggttgggccgttgatgggcgcgacggtatcggcgatggccggtttccgctgggtttttatcgctacggcggcgatcgtgttgatcaatatcgggcaactgaccctggcgttacgtcgtcggcgtaacgcgcaaaaagcgaaaggccaatag

SEQ ID NO: 370696 - DNA, 261 bp, Salmonella enterica
atgaaaaatctcatagcagagttgttgcttaagctagcccaaaaagaagaagagtcgaaagaactggttgctcaggtagaagcgttagagattatcgtcacagcaatgttacgtaacatggcgcaaaacgagcaggagatgttgatacgtcaggtagagggggcacttgaaggcgtaaagccggatgccagcgttcctgatcacgatacggaattgctgcgccaatatgtaaaaaagttgctgagacacccccggcactaa

SEQ ID NO: 370697 - DNA, 321 bp, Salmonella enterica
atgaaaataacattactggtgactttactttttggcctggtctttttaaccgccgtcggcgcaaccgaaaaaccgttaacaccgcaacagcagcgcatgacgacctgtaatcagcaggcgacagcgcaagcgttgaaaggcgatgcacgtaaaacttaccttagcgactgtctaaaaaacagccagtcaggccctggcgagaaaagcctgacgccgcaacagcagaaaatgcgtgaatgcaatgttcaggcgacggaacaatccctgaaaggcgatgaccgtagcaagtttatgagcgcctgcctgaaaaaagcggcgtag

SEQ ID NO: 370698 - DNA, 1113 bp, Salmonella enterica
atgttcccaaaaataatgaatgatgaaaatttttaccgaaaagcggttgaacaggcggtagcgccgcctgaccctcctgatgatcgtcagcgctccgggttgcgcttcgcccggcgcatcaggctaccgcgtgcggtggggttaggggggatgtttttaccggtggccgccgtgttagtgtcgcaacctgtctttggcggctggtggctattgctggtcggctggtcttttgtctggccgcatctggcgtggcagtgggcggcgaaagcccttgatccgctacgccaggaaatttacaacctgaaagtggatgcgatcctctccggcatgtggatcgcgttgatgggcgtcaatatgttgcctgccgccgcgctgtttatgatgatgagcatgaatctgatgggcgctggcgggcggcggctattcactgtcggaatgggccttttgctggcgtcatgtctggtgacgttgcagcttaccgggctacctgtcgcgatgcgaagctcgtcgctggaagtcacgctctctttgcccgtcattatgttgtatccgctgctgttcgcctgggtaagttaccaaacggccattaaattagcggaacataagcgacgcttgcaggcgatgagctcgcgggatggcatgaccggcgtctataaccgacgccactgggaaattttattacgtaatgaattcgatcacagccgacgccaccatcgggaggcgacattgttgattatcgacatcgatcattttaagagcattaacgacacctggggacatgatgttggggatgaggctattatcgccctgacgcgtcaattacagataacgctacgcgggagtgatattatcgggcgctttggcggcgacgaatttgcggtgattatgtgcggaacgccggcagacagcgcgattaccgccatgtcgcgagtgcatgaacggctaaataccttacgcttgccgggcgcgccgcaggtcatgttacgtatcagcgtgggcgtggcgccgttaacgccacaaatcggtcattatcgggaatggttaaagtctgcggatatggcgctttacaaagcaaagaatgccggacgtaaccgcaccgaagtggcggcatga

SEQ ID NO: 370699 - DNA, 810 bp, Salmonella enterica
atggagaagaaaatcggttttattggctgcggtaatatgggcaaggctattcttggcggactgattgccagcggtcaggtacttcccggccagatctgggtctacaccccctcccccgataaagttgccgccctgcatgaccagtacggcattaatgcggcgcaaagcgcgcaggaggtcgctcaggtcgcggatatcgttttcggcgcggtaaaaccgggcattatggtgaaagtgctcagtgaaatctcctccagcctgaacaaagactcgctggtggtctctatcgccgcaggcgtaacgcttgatcagcttgcgcgcgcgctgggacacgaccgtaaaatcattcgcgctatgccgaatacgccgtcgctggtcaacgcaggaatgacctccgtcacacccaacgcgctggtcacaccggaagatacggctgatgtgctgaatattttccgctgctttggcgaggcggaggtgattgctgagccgatgatccatccggtggttggcgtgagcggatcttcgccggcctatgtgtttatgtttatcgaggcgatggcggacgctgccgttctgggcggtatgcctcgcgctcaggcttataaattcgccgcgcaggccgtcatggggtcggcgaaaatggtactcgaaaccggaaagcatcccggcgaactgaaagatatggtgtgctcgcctggcggaacgacgattgaagccgtacgcgttctggaagaacgtggcttccgcgctgcggtaatagaagcgatgacgaagtgtatggaaaaatcagaggcgatcagtaaatcctga

SEQ ID NO: 370700 - DNA, 456 bp, Salmonella enterica
atgaccatctgggtggatgcggatgcgtgtccgaatgtcattaaagaaattttgtaccgcgccgccgagcggatgcagttgccgcttattctggttgccaatcaggccttgcgcgtgccgccttcgcgttttatccgcacgctccgcgtggccgccgggtttgacgtggcggacaatgaaatcgtgcgtcaatgcaaagcgggcgatctggtgattaccgcggatattccgctggcggctgaagtgctggaaaaaggcgctgcggttcttaatccccggggagaacgctatagcgacgccacgattcgtgaacgtctgacgatgcgtgactttatggacacgctacgcgccagcggcgtacaaacgggggggccaaacactctctcgccgcgcgatcgtcagcattttgccgccgagctggataagtggtggctggaaagccagcgtaaaaaataa

SEQ ID NO: 370701 - DNA, 546 bp, Salmonella enterica
atgatgcaacctctttatcttgttggcccgcggggctgtgggaaaaccaccatcggtatggcgctggcgcaggcaaccggttttcggtttgcagataccgaccgctggctgcaatcgcacgtgcagatgagcgtcgctgatatcgttgaaaaagaaggctggggagggttccgcgcccgggaaaccgcggccctggaggcggtaagcgcgccttcgactgtcgtggcgacgggaggcggtattattctcacggagtataaccgacgttatatgcaccgtgttggcgtagtgatttatctgtgcgcgccggtatccacgctggttaaccggcttgaggctgaacctgaagcggatctgcgcccgaccctcaccggcaagccgttgagcgaagaggttcgggaagtgcttgagcagcgtgacgcgttgtatcgcgaaacggcgcattacattattgacgcgacgaaagcgccggcccaggtcgtttctgaaattattgcggcgctgccgccgtcgacgcaacggttacagggagatgtctatacttaa

SEQ ID NO: 370702 - DNA, 192 bp, Salmonella enterica
atgccaaccagaccaccttatccgcgggaagcttatatcgtcaccattgaaaaaggcacgccgggccagacggtgacgtggtatcagctacgggctgaccatccgaaacctgattcgctcatcagcgagcatccgaccgcagaagaagcgatggatgcgaaaaaacgttacgaagatccggataaatcatag

SEQ ID NO: 370703 - DNA, 678 bp, Salmonella enterica
atgagtgcgtcgttggcaatcctcacaatcggcgttgtgccaatgagcgaagtgttaccgcttctgacggaatacatcgacgaacaacacatcacccatcatagcctgctgggaaaaatgagccgggaagacgttatggcggattacgctgtagagcctggcgacgatccgcttttgacgttgctgaatgataaccagatagcccatgtttcccgccagaaagtggagcgagatttacagagcgttgtcgaggtgctggataatcagggttacgatgtcattatactgatgagcaccgcggcgattaaaagtatggcagcccgtaattctattttgcttgaaccgctgcgtattattccaccgcttgtcgcctctattgtggatggacatcaggttggcgtgattgtgcctgttgcagaacttctggcggcccaggagaaaaaatggcaggtattgcaaatgccgccggtgtattcgctggcgaatccggttcacggttctgagcaacagttaattgatgccgggcaggcgctactggatcaaggcgcggacgtcattatgctggattgtctgggttttcatcagcgtcatcgggatattttacagcaggcgctggatgtgccggttttactctctaatgttttgattgcgcggttagcttcagaactgcttgtctaa

SEQ ID NO: 370704 - DNA, 285 bp, Salmonella enterica
atgctacaaagcaatgaatacttttccgggaaagtgaagtctattggatttaccagcagtagcaccggccgggccagcgttggtgtgatggcggaaggggagtatacatttggcaccgccgaacccgaagagatgacggttgtgagcggcgcgttgaaggtactgttgccgggaactgtcgaatggaaagtgtatacagccggtgaggtgtttaacgtgcctggccacagcgagtttcatctccaggttgctgagcccacctcgtatctgtgccgctatttgtaa

SEQ ID NO: 370705 - DNA, 912 bp, Salmonella enterica
atgctgtggttcaaaaatttaatggtttaccgtcttagccgcgatattacattacgcgccgaagagatggagaaacagctcgcctcaatgacgtttaccccatgcggtagccaggatatggccaaaatgggctgggttccgccgatgggctctcacagcgatgcgttaacgcacaccgccaatggccagattattatttgcgcgcgcaaagaagagaaaatcctgccatcgccagtgatcaaacaggctctggaggcgaaaatccagaaactggaagccgatcagggacgcaagctgaagaagacggaaaaagattccctgaaggatgaagtgttgcattcgttgctgccgcgcgcgtttagccgcttcagtcagacaatgatgtggattgataccgttaacggcctgattatggttgactgcgccagcgcgaaaaaagcggaagatactttggcgctactgcgtaaaagtcttggctcgctgccggtcgtcccgctggcgctggaaaatccgattgagctgacgctcaccgagtgggtgcgctccggtacggtcgctcagggtttccagttgctggacgaagccgaattgaaagcgatgctggaagatggcggcgtgatccgcgcgaaaaagcaggatctggtcagcgacgagatcgccgttcatattgaagcgggtaaagtggtcacgaagctggcgctcgactggcagcagcgcattcaattcgtcatgtgcgatgacggctccattaagcgtctgaaattctgcgatgagctgcgcgaccagaacgaagatatcgaccgggaagattttgcccaacgttttgacgcggactttatcctgatgaccggcgagctggcggcgctgattcaaagcctggtggaaggattaggcggcgaagcgcagcgctaa

SEQ ID NO: 370706 - DNA, 909 bp, Salmonella enterica
gtgcgtattggtatcgatttaggcggcacaaaaacggaagtcattgcgcttgatgatgcaggagagcagcggtttcgccatcgtctgcctacgccgcgggaggattatcagcaaacgatagaaaccatcgctacgctggtcgacatggcggaacaggcgaccggccagaccggtagcgttggcattggcattcccggttctctctcgccttacaccggcgtggtgaaaaacgctaactctacgtggcttaacggccagccgttcgatagcgatgtgagccgtcgtctgaagcgtgaagtgcggttagccaacgatgccaattgcctggcggtatcagaggcggtagatggcgcggcggcgggggcgcaaacggtatttgcggtgattatcggtaccgggtgcggcgcgggcgtagcgctaaatggccgggcgcacatcggcggcaacggtacggcaggcgaatggggccacaatccgttgccgtggatggatgacgatgagttgcgttaccgcgaagaaattccctgttattgcggtaaacaaggctgtatcgaaacctttatttccggtacgggattcgccacggattaccagcgtttgagcggtaaaacgctaaaaggcgatgagattattcgtctggtcgacgcgcaggacgccgtggcggaactggcgataagccgttatgagctacggctggcgaaggcattatctcatgtcgtgaatattctggatccggatgtcattgtgctgggcggcggtatgagcaatgttgagcgcctgtacaaaacggttccgtcgctgatgaaatcgtttgtttttggcggcgagtgcgagacgccggtacgtaaggcgcggcatggcgattcgagcggcgtgcgcggcgcggcctggctgtggccgctggcgtaa

SEQ ID NO: 370707 - DNA, 1173 bp, Salmonella enterica
atgaaaaaagttattttttctttggcgctgggtacgttcggcctggggatggccgagtttggcattatgggcgtgctgacggagctggcacgcgatgtcggaataacgattcccgccgccgggcatatgatctcgttttacgccttcggcgtcgtgctgggcgcgcctgttatggcgctcttttccagccgcttttcgcttaaacatatactgctgtttctggtcacgctgtgcgtgatgggcaatgccatatttaccttttcctcgtcatatctgatgctcgccgtcggcagactggtttccggctttccgcacggcgccttttttggcgtcggcgccattgtcctgtcaaagattatccgccccgggaaagtcaccgccgccgtcgcgggtatggtttcagggatgacggtggcgaatctggtgggcattccgttcggcacttacctgagccaggaatttagctggcgctacacctttttattgatcgcggttttcaacatcgccgtgctcaccgcaattttcttctgggtgccggatatccgtgacaaagcccaaggcagcctgcgcgaacagtttcacttcttgcgtagccccgcgccgtggctcattttcgccgccacgatgttcggcaatgcgggcgtttttgcctggttcagctatatcaagccatttatgatgtacatctccggtttttcggagacgagcatgacgtttattatgatgctggtcgggctggggatggtgttaggcaatctgttaagcggcaaactctccggcagatatactccgctgcgcatcgcggtagtgactgacctcgttatcgtgctctctctcatggcgctctttttcttcagcggatacaaaacggcatcgctgactttcgcgtttatctgctgtgctggtctgtttgcgctctctgcgccgctgcaaatcctgctgctgcaaaacgccaaaggcggcgaactgctgggcgcggcgggagggcaaatcgcgtttaatctcggtagcgcgattggcgcctggtgcggcgggctgatgctgacgctaggttttgcgtaccactatgtggcgcttcccgccgccctgctctcgttttccgccatgtcgtcgttgctggtatacggacgtctaaaacacaagcagccatcggtcacgccggttgccggatga

SEQ ID NO: 370708 - DNA, 3141 bp, Salmonella enterica
atgaaaattctcagtttgcgtctgaaaaacctgaactcgctgaaaggagaatggaaggtcgattttaccgccgaaccgtttgccagtaacgggttattcgccattaccggcccgaccggcgcgggaaaaaccaccttgcttgacgccatctgcctggcgttgtaccacgaaacgccgcgcctgaatacggtatcgcaatcgcaaaacgatttgatgacgcgcgatacggcggaatgtctggccgaagtggagtttgaggtaaaaggcgaagcctggcgcgcgttctggagccagaaccgagcccgaaatcagcctgacggcaatctccaggccccacgcgtggagctggcgcggtgttcagacggaaagatctttgccgataaggtaaaggataaactggagatgatcgccacgttgaccgggctggactacgggcgcttcacccgttcgatgttgttatcacaggggcagttcgccgcctttcttaacgccaaagcgaaagagcgcgcagagcttctggaggagctcaccggcactgagatttacgggcagatctccgcacaggtatttgaaaaacataaatcagcccgtctcgaactggaaaagttacaagcgcaggccagcggcgtcgccctattggcggacgaacagttacagcaactggaagctagtttgcaggcgcttactgacgaagagaaacgcctgctggccgaccagcaggtacagcagcagcaccttcactggctgacccgaaaaaacgagctccacactgaattacacgcccggcagcaggcgctgtacgcggcacaagaggcgcgagaaaaagcgcagccgcagctcgcggcgttgactctggcgcaacccgctcgccagttgcgcccgcattgggagcgcattcaggaacaaacccgcgccgttgagcgtgttcgccagcacagtgatgaagtgaatgctcgcttacaaagcgcgtatcgcctgcgccggcgtatccgcgcctgcgcgcatcgacaattcacgcaactgaacaccacagggcagcggttgaagacatggctggcggaacacgacggcatccgcatctggcgcagcgaactggcggggtggcgagcattattaacacaacaatcccacgatcgggcgcaactgagccaatggcaacagcagttgctgagcgatacgcgtcagcgtgatgcgctaccgccgctcacgctcgacctcacgccacaggcgctggcggaagccagggcattgcatactcggcagcgtccgctacgccatcgtctcgccgcgcttcaggggcaaattctcccgaaacaaaagcgtcaggcgcagctacaggcagctatcgcgcgtcatcatcaggaacaggcgcaatacacccaacgtctggcggataagcgcctgagttataagactaaagcgcaggagcttgcggacgttcgcactatttgcgagcaggaggcgcgcatcaaagatctggaaagccagcgggcgcacttacagtccggccagccgtgcccgctttgcggctcgacgacacaccccgccatcgccgcctatcaggcgctggagctgagcgcgaatcaaacccgccgcgacgcgctggaaaaagaggtcaaaacgctggcggaagaaggcgctgcgctgcgaggacagttagatgccttaacgcaacaattacagcgggatgaaagcgaggcgcagtcgttgttgcaggaggagcaagcgcttactgaggaatggcaaacgctgtgcgctacgctgggcgttcagctccagccgcaagaagacctcgcgggctggctgaccgccgcggaagagcatgagcaacagttggatcagctcagccagcgtcatgctctacaaacgcaaatcgcggcgcatactgaacaggtagcgcgctttaccgcgcagattgcgcagcgtcaggcgtcgctgacggctgatttggcgcagtatacgctttcccttccagcgccagaagacgaggcttcgtggctgaatgagcgcgccgacgaagcgaaaatatggcaacagcgtcagaccgagttcgcggatttgcaaatgcagatcgacaggcttgccccgttgctggagacgctaccgcaaacggataccgcggattccgacgacgacgtgccgctggataactggcggcaggcgcatgatgagtgcgtgtcattacaaagccagttgcaaaccctgcaggaacagacgacgcaggagcagcagcgcgccgccgaggcgatagcgcactttgatgcggcgttaaaaaatagcccgtttgacagccaggcaacgttcctggcggcgttgctggatgaagagaccgtgacccgtctggaaaaacaacaacaaacgctggaaagtcagctacaacaagcgaaggcgttaagcgcgcagtccgcgcaggcgctggctgaccatcagcaacagccgcccgctggtctggacccaacgtgtacggcggagcagctcgcgcagcggctgacgcagttggcgcaacaactgcgcgaaaacacgacacgccagggggaaatccgccagcaaattaaacaggatgcagataatcggcagcgccaacgcgcgctgatggcggaaatgaagcaagcctctcagcaagtggaagactggggctatctcaatgcgctgatcggctctaaagaaggtgataagttccgcaaattcgcccagggactgacgctggataatctggtctggctggcgaatcatcagctcacccgcctgcatggccgctatttattgcagcgcaaagccagcgacgcgctggaactggaggttgtcgatacctggcaggccgacgccgtgcgcgatacgcgaacgttatcaggcggcgaaagtttcctggtcagcctggcgctggcgctggcgttatcagatttggtcagccataaaacgcgcattgattctttgttcctcgacgaaggcttcggcacgcttgatagcgaaacgctggacgccgcgctggatgcgctcgacgcgctgaatgccagcgggaagaccatcggtgtgattagccacgtggaagccatgaaagaacgtatccctgtgcagataaaagtgaaaaaaatcaatgggcttggttatagcaaactggacaaagcgtttgccgtggagtaa

SEQ ID NO: 370709 - DNA, 1203 bp, Salmonella enterica
atgcgcatcctccacacctctgactggcatctgggacaaaatttctacagtaaaagccgcgccgcggagcatcaggcttttctggactggctgctggagaccgcgcaggcccatcaggtggatgccattattgtcgctggcgatatttttgataccggttcgccgccaagctatgcccgagaactttataaccgtttcgtcgttaatttacagcaaacgggctgtcatctggtggtgctggccggtaatcatgattccgtcgccacgctaaacgagtcgcgcgacattctggcgtttctcaatacaaccgtgatcgccagcgcgggctatgcgccgcggctacttcatcgtcgcgacggttctccgggcgccgtactgtgccccattccctttttgcgcccgcgcgacattattaccagtcaggcggggttatccggcagcgagaaacagcagcaacttcttcatgcgattgccgattattatcaacagcagtatcaggaagcgtgccagctacgcggcgaacgaaagctgccggttatcgcgacgggacatttaaccaccgtcggcgccagcaaaagcgatgcggttcgcgacatttatatcggtacgctggatgcctttccggcgcagcatttcccccccgcagattatatcgcattaggacacattcaccgcgcgcaatgtgtcggcggcacggagcatatccgctattgcggctcgcccatcgccctcagctttgatgagtgcggcaaaagcaaatgcgtgcatctggtgaccttcgaccaggggaaatggcaaagcaccgaaagtctggctgtccccgtgactcaaccgttggcggttttaaaaggcgacctggcatcaattaccgaacagcttgagcagtggcgcggcgttgagcaatcgccccccgtctggctggatattgaaatcacaaccgatgactatctgcacgatatccaacgcagaatacagacattaacggagtcactccccgtagaggtattactggtgcgccgtagccgcgaacagcgcgagcgctcgctggcgaacgagcggcgggaaacattaagcgagcttagcgtggaagaggtttttgcgcggcgtctggcgctggaagcgttagataccccgcagcgcgagcgcctgaatcagctcttttccagcacgctctacgcgttgaatgaggagcatgaggcatga

SEQ ID NO: 370710 - DNA, 690 bp, Salmonella enterica
atggcgagacgtattctggtcgtagaagatgaggcgccgatccgtgaaatggtgtgcttcgtgctcgaacaaaatggctttcagcccgtagaagccgaagattatgacagtgcggtgaataaacttaatgaaccctggccggatctcatccttcttgactggatgttgcccggcgggtcagggttacagtttattaaacatctcaaacgtgaagccatgacccgggatattcctgtggttatgctgaccgcaagaggtgaggaagaagatcgtgtgcgcgggctggaaaccggcgctgacgattacattaccaagccgttttcccccaaggagttggtggcgcgcattaaagccgttatgcggcgcatctcgccgatggcggtcgaagaggtgatcgagatgcagggactgagccttgatcccggctctcaccgcgtgatgaccggcgacagcccgctggatatggggccgaccgaatttaaattactccatttctttatgacgcacccggaacgggtttacagtcgcgagcagctactcaatcatgtctggggcaccaatgtgtacgttgaagaccggacggtcgacgtgcatattcgccgtttgcgtaaggcgctggagcacagcggccacgaccggatggtgcaaacggtacgcgggacagggtatcgtttttcgacccgcttttaa

SEQ ID NO: 370711 - DNA, 1296 bp, Salmonella enterica
gtgctggaacggctgtcatggaaaaggctggtgctggagctggtgctctgttgcatccccgcgcttatccttagcgctttttttggttatctgccgtggtttttactggcggcggtgacgggactgcttgtctggcatttctggaatttgttacgcctctcctggtggctttgggtcgacagaagtatgacgccgccgccgggacggggaagttgggaaccgctgttatacggtttacaccagatgcagttgcgaaataagaagcgtcgccgcgagctggggaacctgattaaacgttttcgcagtggcgcggagtcgctgcctgatgccgtggtactgaccacagaagagggcggcattttttggtgtaacggtttggcgcaacagatactggggctacgctggccggatgacaacgggcagaatattctcaatctactgcgttatccggagtttacccagtatttaaaaacgcgtgatttcacccgtccgcttcatttggtgctcaataccgggcggcacctggagatccgcgtcatgccttataccgataaacaactcctgatggtggcgcgcgatgtgacgcaaatgcatcagcttgaaggcgccagacgtaactttttcgccaacgttagccatgagttgcgtacgcccttgacggtattgcaaggctatctggaaatgatgcaggaacaggcgctggaaggggcgacgcgagagaaagcgctgcatacgatgcgcgagcaaacgtatcgtatggaagggctggtaaaacaactgcttacgctgtctaaaattgaggcggccccggcgctgttattaaatgaaaaagtggatgtaccgatgatgctgcgggtcgtggagcgtgaagcgcagacgctcagccagcagaaacatacctttacgtttgaggtcgacgatagtcttagcgttctgggcaacgaagagcagctacgtagcgcgatctcaaacctggtgtataacgcggtaaaccatacgccggcgggaacgcatattacggtgagctggcgacgtgtcgtgcatggcgctgaattttgcattcaagataacggtccggggattgctgccgagcatattcctcgtctgaccgaacgcttctaccgcgtcgataaagcgcgttcgcggcaaacgggcggcagcggcctgggattggcgattgtgaaacatgcgttgaatcaccatgaaagccgccttgaaatcgacagttcgcctggcaaaggaacgcgatttagctttgtgctgccggaacgtttaattgccaaaaatagcgattaa

SEQ ID NO: 370712 - DNA, 1320 bp, Salmonella enterica
atgacccatcagttaaaatcgcgcgatatcatcgccctgggctttatgacatttgcgctgttcgttggcgcaggcaatattatctttcctcctatggtcggtttgcaggcgggtgaacacgtctggacagccgctattggctttctgattaccgccgtagggctaccggttcttactgttgtggcgctggcgaaagtcggcggcggcgtagacagcctcagtacgccgattggtaaagtggcgggactcctgctggcgaccgtttgctatctggccgtcgggccgttatttgcgacgccgcgtaccgcgacggtgtcgtttgaggtcggtatcgctccgttgaccggcgattctgcaatgccgttgctgatttacagcgtggtctatttcgctattgttattctggtttccctctatccgggtaagctgctggatacggtagggaatttcctggcgccgttgaaaattattgcgctggtcatcctttccgtcgcggctatcgtttggcctgccggtccaatcagcaacgccctggacgcttatcagaatgcggccttttctaacggatttgtgaacggctatctgacgatggatacgctgggcgcgatggtgtttggtatcgttattgtgaacgcggcgcgttctcgcggcgtgaccgaagcgcgcctgttgacgcgttacacggtctgggccggcctgatggcgggcgtggggctgacgctgctttaccttgccttgttccgcttaggttctgatagcgcgacgctggtcgatcagtcagcgaacggcgcggcgattcttcatgcctacgttcagcatacctttggcggcgcgggaagcttcctgctggcggcgctgatctttatcgcgtgtctggtgacggcggtggggctgacctgcgcctgcgctgagtttttcgcgcagtatattccgctgtcttaccgcacgctggtctttattctcggcggcttctctatggtggtgtcaaacctcggactgagccatctgattcaaatttccattccggtgctgacggctatctatccgccgtgtatcgcactggttgtattaagttttacccgctcatggtggcataattccacccgcatcatcgcgccggccatgtttatcagtctgctttttggtatccttgacggcatcaaagcatctgcctttggcgatatgctgccagcctggagtcagcgtttgccgctggcggaacagggactggcgtggttgatgccaacggtggtgatggtgatcctggcgattatctgggatcgcgcggcgggtcggcaggtgacctccagcgctcactaa

SEQ ID NO: 370713 - DNA, 1371 bp, Salmonella enterica
atggaaagcaataataagctaaagcgtgggctgagcacccggcacattcgctttatggcattaggttcggcaatcggcaccggcctgttttacggctcggcggacgccatcaaaatggcggggccgagcgtgctgttggcctatattattggcggggtcgcggcatatatcattatgcgcgcattgggggaaatgtccgttcacaaccctgccgccagctcattttcgcgctatgcgcaggaaaacctcggcccgcttgcgggctacattaccggctggacctactgttttgagatcctgatcgtcgccattgccgacgtgaccgcgttcggcatttacatgggagtctggttccccgccgtgccgcactggatttgggtacttagcgtggtgctgatcatttgcgccatcaacctgatgagcgtcaaggtgttcggcgagctggagttttggttctccttcttcaaagtcgccaccattattatcatgattgtcgcgggtatcggcatcattgtgtggggaattggcaacggcgggcagccgaccggcattcataacctgtggagcaacggcggcttcttcagcaatggctggctgggaatgatcatgtcgctgcaaatggtgatgttcgcttacggcgggattgagattatcggtatcaccgccggggaagcgaaagacccggagaaatccattccgcgcgccattaactcagtaccgatgcgtatcctggtattttatgtcggcacgctgttcgtcattatgtctatctatccgtggaatcaggtcggcacaaacggcagcccatttgtgctgacgttccagcatatggggattacctttgccgccagcattctgaactttgtggtattgaccgcctcgctttccgctatcaactccgatgtgtttggcgtaggccgtatgctgcatggtatggcggagcaggggagcgcgccgaaagtctttgccaaaacgtcacgccgtggtattccgtgggttactgtgctggtgatgacgattgcgctgctgtttgcggtttacctgaactacatcatgccggaaaacgtcttcctggtgattgcctcgctggcgacgtttgcgacggtatgggtatggatcatgatcctgctgtcacaaatcgccttccgccgtcgtttaccgccggaagaggtaaaagcgctgaagtttaaggtgccgggcggtgtcgtaacgacgatagcgggtctgattttcctggtcttcattattgcgcttatcggctaccatccggatacccgcatctcactgtatgtgggcttcgcctggatagttctgctgttgattggctggatgtttaaacgccgtcgcgaccgtcaattggcgcaggcgtag

SEQ ID NO: 370714 - DNA, 1818 bp, Salmonella enterica
atgttgaatgcctggcacttaccggttgccccatttgtgaagcaacataacgataaattaaccattacgctgtggctgagcggagaaaatccgccgtctcgcgtgacgttgcgctcagaattcgataatgaagaaatctcactggcgatgcgcaaacagcgccgccagccgcagccgggcgtgacggcgtggcgagcgacgctcaatatcgcgttagggcagccccgtcgccgttacagctttaaattgctttggcacgaccgccagctttggtttacgccgcagggatttagctgctttccgcccgcgcgtctggaacaatttgcggttgatgtgccggatagcggcccgcagtgggtcgccgatcaaattttttatcagatcttcccggatcgttttgcccgcagccagtctcgtgaagccgggcaggataaggtgtattaccaccatgctgccggtcacgacatcgtgcgtaaagagtgggatgaaccgctcactccccaggcgggcggttccaccttttacggcggctgtctgaatggcatttgtgagaagctgccgtatctgaaaaaactgggtgtcacagcgctatatctgaatccggtatttaccgcgccgagcgtccataagtacgacacggaagattatcgccatgtcgatccgcaatttggcggcgatcgggcgctgctacgcctgcggcgtgaaacgcaagcacagggcatgaggctggtgctggatggcgtgtttaaccatagcggcgactcgcatgcgtggtttgacaggcataaccgcagcactggcggcgcgtgccatcacccggactcgccgtggcgtgactggtactccttttcaccacaaggcgtggcgctggactggctgggttatccgagcctgccgaaactcgattatcaatcagaaacgctggtcgatgagatctatcgcggtgaggacagtatcgttcgtcactggctaaaggctccgtggaatatggacggctggcggctggatgtcgtacatatgctgggcgaggcgggcggggcgcgtcataatttgcagcacgtcgccggtattacccgggcggcaaaagaggcgcagcccgaagcctatattgtgggggaacatttcggcgatgcgcggcagtggctacaggccgatgcggaagatgccgccatgaattatcgcggcttcaccttcccgctatggggatttctcgccaatactgatatcgcttacgaaccacagcatattgatgcccggacctgtatcgcgtggatggataactaccgcgccgggctgtcacatcagcaacaactgcgcatgtttaatcaactcgacagccatgatactgcgcgctttaaaaccctgctgggtaaagacgcggcgcgcctgccgctggcggtggtctggctgtttacctggcccggcgtgccatgtatttattacggcgatgaagtcggcgtggacggcgcaaatgaccctatgtgccgcaaaccattcccgtgggatgaacgcaagcaggacggcaacttgctggcgctgtaccagcgtatggcgaaactgcgccagagcagtctggcgctgcgtcgtggcggatgccaggcgctgtatgccgaaggtgacgtagtggtattcgtgcgagtttatcagcagcagcgggcgctggtggcgattaaccggggcgaggcctgtgaagtggcgctggaagcgttgccgttgctgaacgtggccggatggcaatgtaaaacgggaagcggtgacatccgcgagggaagacttagtttacccgcgatttccgcgacggtatggatgaatcgttga

SEQ ID NO: 370715 - DNA, 603 bp, Salmonella enterica
atggtactggttactcgtcaggccccggatttcaccgctgcggcggtactgggtagcggtgagattgttgataaattcaacttcaaacaacacaccaatggtaaaacgaccgttctgttcttctggccgatggacttcacttttgtttgcccgtctgagctgatcgcctttgataaacgttatgaagaattccagaagcgcggcgttgaagtggtcggcgtttctttcgactctgagttcgttcacaacgcatggcgtaacacccctgtcgataaaggcggcattggcccggtgaaatacgcaatggtcgccgacgtgaagcgtgaaattcagaaagcttacggtatcgaacacccggacgaaggcgttgcgctgcgcggctctttcctgattgacgctaacggtattgttcgccaccaggtcgtaaacgatctgccgctgggtcgtaatatcgacgaaatgctgcgtatggtcgacgcgctgcagttccacgaagagcacggtgatgtctgcccggcgcagtgggaaaaaggcaaagaaggcatgaacgcctctccggacggcgtggctaaatacctggctgagaacatttccagcctgtaa

SEQ ID NO: 370716 - DNA, 582 bp, Salmonella enterica
atgaattttcttgctcacctgcatctggcgcaccttgccgacagctcgctttccggtaatcttctggccgattttgtccgcggtaacccggcaacgcattatcctcctgacgtggtagagggtatttatatgcatcggcgtattgacgtcatgaccgacaacctgccggaagttcgtgaggcgcgagagtggttccgccatgaaacgcggcgcgtggcgcccattacgctggacgtcatgtgggatcattttttatcgcgtcactggacgcaaatctctcccgattttccacttcaggcgtttgtcggctacgcccatgcgcaggtcgcgacgattctgcccgactccccgccgcgctttgtcaacctgaatgattatctttggtcagaaaaatggttagagcggtatcgcgatatggatttcattcaaaacgtgctgaatggcatggcgaatcgccgtccccggctggatgccttgcgtgattcctggtacgatctggacgcgcactacgacgcgttagaagagcgcttctggcatttttatccgcgtatgatggcacaggccgcccgcaaagcgctgtga

SEQ ID NO: 370717 - DNA, 1065 bp, Salmonella enterica
atgcgcgttaccgatttttcctttgaactacccgaatccctgattgcccactacccacagccggaacgcagtcgctgccgtttgctgtcattagaggggccgacgggcgcgctgacgcacggtactttcaccgatctgctcgataagctcaaccctggcgatttgctggtcttcaataatacccgcgtgatcccggcgcggctctttggccgtaaagccagcggcggcaagatagaagtgctggtcgaacgtatgctcgatgataaacgcatcctggcgcatattcgcgcttctaaagcgccaaaaccgggcacggaactgctactgggcgacgacgaaagtatccacgcgaccatgaccgcgcgtcacggcgctctgtttgaagttgagtttaatgacccgcgtccggtgctggatattcttaacgccatcggccatatgccgttgccgccgtacatcgaccgcccggacgaggacgccgaccgcgaactgtaccagacggtctacagtgaaaaaccgggcgccgtcgccgcgccgaccgcggggctgcactttgatgagccgctgctggcggcgcttcgtgagaaaggtatcgaaatggcgtttgttacgctacacgtaggcgcgggcactttccagccagtgcgtgtcgataccattgaagatcacatcatgcactccgaatatgctgaggtgccgcaggaggtggtcgacgcggtgctggcggcgaaagcgcgtggcaaccgggttatcgctgtcggcaccacctcggtacgctcactggagagcgcggcacaggcggcaaaaaacgatttgatagagccgttcttcggcgatacgcaaatctttatttatccaggttatcaatacaaagtgattgatgcgctgatcaccaactttcatctgccggaatcgacgttgattatgctggtttccgcatttgccggttatcaacacaccatgaatgcctataagactgcggtagaacaaaaatatcgcttttttagctacggggacgcgatgtttatcacgtacaatccgcaggctatttctgagcgtccgtaa

SEQ ID NO: 370718 - DNA, 1128 bp, Salmonella enterica
atgaaatttgagttagataccaccgatggtcgcgcgcgtcgcggtcgtctggtgtttgatcgtggcatagtggaaacgcctgcttttatgcctgtgggtacttacggtaccgtgaaaggcatgacgccggaagaagtggaagcgaccggcgcgcagattattctcggcaacactttccacctgtggctgcgcccgggtcaggagatcatgaagctgcatggcgatctgcacgattttatgcagtggaaagggccgattctcaccgattccggcggcttccaggtcttcagcctcggcgatattcgtaagattaccgagcaaggcgtgcacttccgtaacccgatcaacggtgatccgattttcctcgatccggaaaagtcgatggagatccagtacgatctcggttccgatatcgtgatgatctttgatgaatgtacgccgtacccggcagactgggactatgcgaaacgctcgatggagatgtcgttgcgttgggcgaagcgtagccgcgaccgttttgatagccttggcaataagaatgcgctttttggcatcattcagggcagcgtttacgaagatttacgcgatatctcggtgaaaggtctggtagagattggctttgatggctacgctgtcggcggtttggctgtcggtgagccgaaagcagatatgcaccgcattctggagcacgtttgcccgcagatcccggctgacaaaccgcgttacctgatgggcgtgggtaaaccggaagatctggtggaaggagtgcgtcgcggtattgatatgtttgactgtgtcatgccaacgcgaaatgcccgtaatggtcatctgtttgtgaccgacggcgtggtgaagattcgtaatgcaaagcataaaagcgacaccagcccgcttgacgccgagtgcgattgctacacctgtcgcaattattcacgcgcttacttgcatcatctcgaccgttgcaacgaaatattaggtgcgcgtctcaataccattcataacttgcgttactaccagcgtttgatggcgggtttacgcaaggctattgaagagggtaaattagagagcttcgtaaccgagttttaccaacgtcaggggcgacccgttccacctttgaacgttgattaa

SEQ ID NO: 370719 - DNA, 333 bp, Salmonella enterica
atgagcttttttatttctgatgcggtagcggcaacaggtgctccagcgcagggcagcccgatgtctctgattttaatgctggtggtgtttggtctgattttctatttcatgatcctgcgcccgcagcagaagcgcaccaaagagcacaaaaagctgatggactccattgcgaaaggtgatgaagttctgacgaatggcggtctggtcggtcgagtgaccaaagtagcggaagccggctacattgccatcgcgctgaatgacaccacggaagtggttatcaaacgtgacttcgtagctgccgttctgccgaaaggcaccatgaaggcgctgtaa

SEQ ID NO: 370720 - DNA, 1815 bp, Salmonella enterica
atgctggtcgtcgtgattatcgtcggcctgctttacgcacttcccaacctgtatggtgaggatccggctgttcaaatcactggcgtgcgcggcgtcgccgccagtgagcaaacgctgatccaggtccagaaaacgttacaagaagaaaaaattcccgctaagtctgtggcactggaagagggcgctattcttgcgcgcttcgacaccaccgatacccagctacgcgcccgtgaagcgctgatgagcgtgctgggggataaatatgtcgtggcgcttaaccttgcgccggctacgccgcgctggttggcggctattcacgccgatccgatgaagctcggtcttgatctgcgcggcggcgttcacttcctgatggaagtggatatggataccgcgttaggtaaactccaggaacaaaatatcgatagcctgcgcagcgatctgcgtgaaaaaggcattccttataccaccgttcgtaaagaaaataattatgggttgagcatcacgttccgtgacagcaaagcgcgtgatgaggcgatcgcctatctgacgccgcgtcatcgtgacctggtgatttccagccagagcggcaatcaacttcgcgcggtaatgaccgatgcgcgcctgagcgaagcgcgtgaatacgccgttcagcagaacattaatattctgcgtaaccgtgttaaccaactgggcgtcgcggagcctgtcgtacaacgccagggcgcagaccgtattgtggttgagctgccgggtatccaggataccgctcgcgcgaaagaaattctcggcgcgaccgcgacgctggaattccgtctggtgaataccaacgttgaccaggccgccgctgctgccgggcgcgtaccgggtgattccgaagtgaaacagacccgcgaaggtcagccggtggtattgtacaaacgcgtgatcctcaccggcgaccatatcaccgactcgacgtccagccaggatgaatataaccaaccgcaggttaacatctcgctggatagcgcaggcggcaatatcatgtctaacttcactaaggacaatatcggcaaaccgatggcgaccctgtttgtggagtataaagacagcggtaagaaagacgctaacggtcgcgccgtactggtgaaacaggaagaagtgattaacattgccaacatccagtcccggctgggtaacagcttccgtattactggtatcagcaacccgaacgaagcgcgtcagctctcgttgttgttgcgtgcgggcgccctgattgcgccgattcagatcgttgaagagcgcaccattggcccgactctgggtatgcagaacatcaagcagggcctggaagcctgtctggccggtctggtggtctccatcctgttcatgatcttcttctataagaagtttggtctgattgcgaccagcgcgttagtggctaacctggtgttgattgtcggtatcatgtcgctgttgccgggggcaacgctcagtatgccggggattgcgggtatcgtgttaacccttgcggtggcggtcgacgccaacgttctgattaacgaacgtatcaaagaagagttgagtaatggccgcacggtacagcaggcgataaacgaaggctatgccggcgcgttcagttccatcttcgatgcgaacatcacgacgctgattaaagtcatcattctgtatgccgttggtaccggggcaattaaagggttcgcgattacgaccggtatcggtgtggcgacgtcgatgtttaccgcgattatcggtacgcgtgctatcgtaaacctgctatatggcggcaagcgcgtcactaagctgtcaatctga

SEQ ID NO: 370721 - DNA, 972 bp, Salmonella enterica
gtggcacaggaatacactgttgaacaactaaaccacggccgtaaagtctatgactttatgcgctgggacttctgggcattcggcatctccgggctgttgctgatcgcggccattgtcattatgggcgtacgcgggtttaactgggggctggatttcaccggtggtacggtaattgaaatcacgctggaaaaaccggctgaaatggacgtgatgcgcgaagcgctgcaaaaagcgggctatgaagagccgcagttgcagaactttggcagcagtcacgacattatggtgcgtatgccgccaaccgaaggtgaaaccggcggtcaggtactgggtagcaaagtggtgacgatcattaatgaagccaccaaccagaacgcggccgtgaagcgtattgaattcgtggggccaagcgtgggcgccgatctggcgcaaaccggcgctatggcgctgctggtggcgttgatctctatcctcgtttatgtcggtttccgctttgagtggcgactggcggcaggggtggtcatcgcgctggcgcacgacgtgatcattacgctggggatactgtcgcttttccatatcgagattgacctgaccattgtggcatcgttgatgtcggtgatcggttactcgctgaacgacagtatcgtggtctccgaccgtattcgtgaaaacttccgcaaaatccgtcgcgggacgccttacgaaatctttaacgtgtcgctgacccagacgctacaccgtacgttgattacctccggtacgacgttagtggtaattctgatgctgtacctcttcggcggtccggtactggaaggcttctcgctgacgatgctgatcggtgtctctattggtacggcatcttctatctatgtcgcatcggcgctggcgctgaaactcggtatgaagcgcgagcatatgctgcagcagaaagtcgaaaaagaaggggcggatcagccgtccattctgccgtaa

SEQ ID NO: 370722 - DNA, 366 bp, Salmonella enterica
atgaaaaacttgattaactggtttgaaattccagttactgatatggcgcgtgcaatcgccttttatgagcaagtgatgcagatatcgttacgtcgggaaaccatggatggggcggacctggccgtattcccgtatgctgaacccggacccggcggagcgctgataaagcaggatgatgtcgctccagttgcgcagggagtcgttatttatctgcataccgccgatttgttagcctcgattgaacgtgtcgtccttgctggtggcaagtgtgttctggaacccatggttcccggagatgacattggaaccatcgcgttgtttattgacagcgaaggtaaccgaataggtttacatcaacctgcgtga

SEQ ID NO: 370723 - DNA, 693 bp, Salmonella enterica
atgaccagacgcgctgaccgtttgtttcagatcgtgcaaattttgcggggtagacgactgacgacggcagcgctgttggcacagcggcttgcggtttctgaacggacgatttatcgcgatattcgcgatctgtcgttatccggtgtgcctgtcgaaggtgaagcggggagcggataccgtttaatggcgggttttgatctgccgcccttgatgcttacccatcgtgaatcggaagcactgatggtggctatacggttattgaaaacctggggcggcgattcgctatcgcgcgagcttgaatccgcccaggaaaaagtgttggctattttaccggaagagagccgtcgtaaagcggagcagacacggatttacgctccggatttgggtacatctccacattcgcgcagcgcgtttgatcttatccatcaggccgtttcggcgcagcaggtgttggcgctacattatcgtgatgaagcggggcatctctcttcgcgggatatacaacctctgggattgtttttctggggagagcactggctactggttgcctggtgtgagagacgggaagactatcggtgttttcgcctcgatcgctgtttacaaattactccgcttaaccggcgatttcgtgaaacaatcgaccgttctttgcgtgattttttgcgtaaagttgagcacgaaaaaatgccgtaa

SEQ ID NO: 370724 - DNA, 348 bp, Salmonella enterica
atggctatcatccccaaaaactatgcgcgcctggaaagcggctatcgtgaaaaagcgctgaagctgtttccgtgggtatgcggacgttgttcccgtgagtttgtgtattcaaatctgcgtgagctgacggtgcatcatatcgatcatgaccacaccaataatccggaagacggcagcaactgggagctattgtgcctctactgccacgatcatgagcattctaaatataccgaagccgatcagtacggttcgacggtcattgccggggaagatgcgcaaaaagatgtcggcgaggcgacttataacccgtttgccgatctgaaagcgatgatgaacaaaaagaaataa

SEQ ID NO: 370725 - DNA, 264 bp, Salmonella enterica
atgttgcgggggcttgatccccggtggccttgtcgctggaaagagaaaacccccgcacattgttcggtattcaccggcaacattacgggggctaacttgaccctagacaagttgaggatagccgcgaaccgttgccattgcaacaaaggcggcaatatgacgctcacagagttgagcattactatctggcacgatctggcggcaccaacgctggtcgggattgcgacaggtctgtttttaggctggtggcatcgccggaagtaa

SEQ ID NO: 370726 - DNA, 864 bp, Salmonella enterica
atgaaaaaaactttactcgcagtcagcgcagcgctggcgctcacctcatcttttactgctaacgcagcagaaaatgatcagccgcagtatttgtccgactggtggcaccagagcgtaaacgtggtaggcagctaccatacccgtttctcgccgaaattgaacaacgacgtctatctggaatatgaagcatttgccaaaaaagactggtttgatttctacggctatatcgatattcccaaaacctttgattggggtaacggcaacgataaaggtatctggtccgacggttctccgctgttcatggaaatcgaaccgcgtttctcgattgataagctgaccggcgcagacctgagcttcggcccgtttaaagagtggtatttcgccaacaactacatctacgatatgggcgataacaaagccagccgccagagcacatggtatatgggtctggggaccgatatcgacacaggcctgccgatgggtctgtcgctgaacgtgtatgcgaaatatcagtggcaaaactacggcgcgtccaatgaaaacgaatgggacggctaccgtttcaaagtgaaatacttcgtccccatcaccgatctgtggggcggtaaactgagctatatcggctttaccaactttgactggggatctgatttaggcgacgatccgaaccgtaccagcaactccatcgcttccagccatatcctggcgctgaactacgatcactggcactactcggtcgttgcgcgttacttccataacggcggacagtggcagaatggcgcaaaactgaactggggcgacggcgatttcagcgcgaaatctaccggctggggcggctacctggtcgtgggttacaacttctaa

SEQ ID NO: 370727 - DNA, 540 bp, Salmonella enterica
atgacaagacgttacctaagaattctcctggtgggaagtctcttgagcctgaccgcctgcgcgccgcagagcgaagttcgccagatgcatcaaagcattagcaccctgaataaagagatgacccaactgaatcaggaaacggtaaaaattacccaacaaaataagctgaatgcggagtcaacccgcggcgtctatttgttgcctggcgccaatacgcctgcccggctggagagccagatcggtacgctacgtatgacattgctggaaattacgcctgtcgcagacggcgctcacgcaacgttacacattcagggcgagtcccgcgatccgctgccggcattcagcgctaccgtagagtacgggcaacttcagggcactacggagaactatcaggaggtgaatgcacagagccttctggtaaatgcccctgccagcttgctggcgcccagtgatgtcaatatttcgttaccgttgaaggggatcacaccggcgcagttaggcttcattcgcatccatgatattcagcctgttaatcaataa

SEQ ID NO: 370728 - DNA, 450 bp, Salmonella enterica
atgcattgcccattttgtttcgccgtagataccaaagtcattgactctcgtcttgtaggcgagggctcgtccgtgcgccgccgtcggcagtgtctggtgtgtaatgaacgctttacgacctttgaagtggctgaactggtcatgccgcgcgtgataaaaagcaacgatgtgcgcgaaccctttaatgaggataagctgcgtagcggcatgttgagagcgctggaaaaaagacccgtcagcgcagatgatgttgaaatggcattgaaccatattaagtcacaattacgtgccactggggagcgtgaagttcccagcaagatgattggcaacctggtcatggagcagctgaaaaaactcgataaagtcgcgtatattcgctttgcctccgtctatcgcagtttcgaagatatcaaagactttggcgaagaaatcgctcgcctacaggactaa

SEQ ID NO: 370729 - DNA, 1104 bp, Salmonella enterica
atgcaggatgagttttacatggcgcgagcgctcaaactggcgcagcgtggacgtttcaccactcacccgaaccctaatgtcggctgtgtcattgttaacaatggcgacatcgtcggcgaaggttatcaccagcgcgccggagagccgcacgccgaggtccatgcgctgcggatggcgggcgcaaaagccaaaggcgcaaccgcctatgtcacgcttgaaccctgtagccatcatgggcgaacgccgccatgttgcgatgcgctgattgcggctggcgtcgcgcgcgtggtcgccgcgatgcaggacccgaacccacaggtcgccgggcgcggactgtatcgcctgcaacaggcgggtattgcggtcagccacgggttaatgatgagtgaagcggaggcgctcaataaaggcttcctcaaacggatgcgtaccggattcccttatcttcagcttaaactgggcgcctccgtcgacggacggacggcgatggccagcggcgaaagccagtggatcacctcgccgcaggcccggcgcgacgttcagcgcttgcgtgcgcaaagtcacgctatcttaaccagtagcgcgacggtattggctgacgatccggccttgacggtgcgttgggcggagttagacgcctctacgcaggcgtcttacccgcaggaaaatctgcgccagccggtgcgaattgttatcgacagccaaaaccgggtaacgcctgcgcatcgtattgtgcagcagcctggcgaaacgtggattgcgcgtacccaggaagatagccgcgcgtggcccgattcggttcgtactatcagcgtgccggcgcacaacggacatttggatctggttgtgctgatgatgcagttaggcaggcagcagattaatagcatatgggttgaagccggaccgggactggcgggcgcgttgctgcaagccgggctggtggatgaactgattgtctatgtcgcgcctaaattgttgggaacccaggcgcggggattatgcgaattgccggggcttgagaagctcgccgacgcgccgcaatttaccttcagcgaaatacgtcatgtcggcccggatgtttgcctgcatatggtgagcgcatga

SEQ ID NO: 370730 - DNA, 471 bp, Salmonella enterica
atgaacattattaaagctaacgttgcagcccctgacgctcgtgtcgccatcactattgcgcgtttcaatcagtttatcaacgacagcctgctggatggcgcggttgatgccctgacgcgtattggtcaggtaaaagatgataatattaccgtagtgtgggtgcctggcgcctatgaactgccgctggcgaccgaagcgctggcgaaaagcggtaaatacgacgccgtggttgcgctgggaaccgtgattcgcggggggactgcgcactttgaatatgtggcaggcggcgccagcaatggcctggcaagcgttgcccaggacagcggcgtgccggtagcctttggtgttctgaccaccgagagtattgaacaagccatcgaacgtgctggtacaaaagccggtaataaaggcgcagaagctgcgctgaccgcgcttgaaatgattaatgtattgaaagccattaaggcctga

SEQ ID NO: 370731 - DNA, 420 bp, Salmonella enterica
gtgaaacctgctgctcgtcgccgcgcccgtgagtgtgccgtccaggcgctttactcctggcagttgtcccagaacgacatcgctgatgttgaataccagttcctggcggaacaggacgtaaaagacgtcgacgttctctatttccgtgaactgctatccggggtggcgactaacagcgcgtacctggatggtttaatgaaaccgtatctgtcccgcctgcttgaagagctgggacaggttgaaaaagccgtgctgcgtattgcgttgtttgagctgtcaaaacgcagcgatgtgccttataaagtggccatcaacgaagcgattgaactggcgaaaacctttggcgctgaagacagccacaaattcgtcaacggcgtactggataaagcagctccggtgattcgtcccaacaaaaagtga

SEQ ID NO: 370732 - DNA, 981 bp, Salmonella enterica
atggcatgtggcgagttttccctgattgcccgttattttgaccgtgtaaaaagctctcgtcttgatgttgaaaccggtattggcgacgattgcgcgctcctgaatattcctgaaaaacagaccctggcgatcagtaccgatacgctggtggcgggcatccatttcttacccgatatcgatcctgccgatctggcgtataaagcgctggcggtgaatttaagcgatctggcggcgatgggcgccgatccggcatggttaacgctggcgctcacgcttcctgacgtcgatgaggcgtggcttgccgcgttcagcgacagcctgtttgaacaactggattactacgacatgcagctcattggcggcgataccacgcgcggcccgctgtcgatgacgctaggtattcatggccttgtgccagtcggtcgggcgttgaaacgttctggcgcaaaaccgggcgactggatttatgttactggcacgttgggcgatagcgctgccgggctggcgattctacggggtgattttcgcgtgggaagctggggggatgccgactatctggtcaaacgccatctgcgcccgacgccgcgtattttacaagggcaggcgctacgcgatctcgccagttcagcgatcgatctttccgacggtttgatctccgatcttggtcacattctgcaagccagcaactgcggcgcgcgaatcgatttggaggcgctgcctgactccgaagaactgtggggacatgccaatgatcccgaacaaaagcttcgctggatgttatccggcggcgaagattatgaactgtgctttaccgtcccggagctgaaccgtggcgcgctggatgtcgcgcttggtcatctgggcgtgccgtttacctgtatcgggcaaatgacggcggatatcgaagggatcgcctttgtgcgtgacggagaacctgtcacttttgactggaaaggatatgaccattttgccacgccataa

SEQ ID NO: 370733 - DNA, 516 bp, Salmonella enterica
atgaccattttgccacgccataaagatgttgcgaaaagtcgcctgaatttgcgcaatccgtggcacctgctcgctaccggctttggcagcgggctgagccccgtggtgccgggcacgatgggctcgctggcggcgatccccttctggtatttgatgacgtttctgccgtggcagctttattcgctggtcgtgatgtttgggatctgcattggcgtttatctttgccatcagacggcgaaagatatgggcgtacacgaccacggcagtattgtctgggatgaatttatcggtatgtggataacgctgatggcgttgccgacgacggactggcagtgggtggctgccgggttcgttattttccgcattctggatatgtggaaaccctggccgatccgttggtttgatcgcaacgtgcacggcggcatgggaattatgatcgatgatatcgtcgccggcgtgatatccgccggcatactgtattttatcggtcatcactggccgctcggtattatttaa

SEQ ID NO: 370734 - DNA, 975 bp, Salmonella enterica
atgcaatacaacacgttaggaaataccgatcttcgggtgtcccgcctttgtctgggctgtatgacattcggcgagccgagtcgcggcaatcacgcctggacgcttcccgaagagagcagccgtcccatcatcaagcgcgcccttgagggcggcattaacttttttgataccgccaacagctactccgacggcagcagcgaagagattgtcggccgcgcgctgcgtgatttcgcccggcgcgacgaggtggtggtagcgacgaaagtcttccatcgcgtcggcgatctgccggaaggattgtcccgcgcgcaaatcctgcgctctattgacgatagcctcacccgtctgggaatggagtatgtcgatatcctgcaaatccaccgctgggattacaccacgccgatagaagagactctggaagcgctaaacgacgtggtgaaggcgggtaaagcccgctatatcggcgcttcctcaatgcacgcctcacaatttgcccaagcgctggcgctacaaaaacaacacggctgggcgccgtttgtcaccatgcaggatcactataacctgatctaccgcgaggaagagcgtgagatgctaccgctgtgctggcaggaaggcgtcgccgtgattccgtggagtccgctggcgcgcgggcgcttaactcgcccctggggagaaaccacggcccggctggtctcggatgacgtgggcaaaaatttatacgctgaaagcgataaaaatgatgcgcaaatagcggaacggctggctggcgtcagcaaggcgcttggcgcaacgcgagcgcaggtcgcgctggcctggctactcagtaaacgaggcgtcgccgcgccgattatcggcgcttcgcgtgaagagcagttagatgagttgctgaatgccgttgatttaacgctcaaaccggagcagattgctgaactcgaaacgccgtacaaacagcatccggtggtgggatttaaataa

SEQ ID NO: 370735 - DNA, 1863 bp, Salmonella enterica
atgagttttgatatagccaaataccctaccctggcattggtcgactccacccaggagttacgactgttaccgaaagagagtctgccgaaactctgcgacgagctacgccgctacttactcgacagcgtaagccgttccagcgggcacttcgcttccgggctgggcacggtagaacttaccgtggcgctgcattatgtctacaacaccccgtttgaccagctaatctgggatgttggtcaccaggcttatccacataaaatccttaccggtcgtcgcgacaaaatcggcaccattcgccagaaaggcggtctgcatccgttcccgtggcgcggagaaagcgaatacgatgtgctgagcgttgggcattcctccacctccatcagcgccggtatcggtattgccgtggcggcggagaaagaaggcaaagatcgccgcaccgtctgtgtgattggcgacggcgccatcaccgccggtatggcgtttgaagcaatgaatcacgcaggcgatatccgacccgacatgctggtcattctgaacgacaatgaaatgtcgatttcggaaaacgtcggcgcgctcaacaaccatctggcgcagctactttccggtaaactttactcttctctgcgcgaaggcggaaaaaaggtcttctccggcgtaccgccaattaaagaactgctcaagcgtaccgaagaacatattaaaggcatggttgtgccgggcacactgttcgaagagctgggctttaactacatcgggccggtcgatggtcacgatgtcatggggcttatcagcacattgaagaacatgcgcgacctgaaaggcccgcagttcctgcatatcatgaccaagaaaggccgcggctatgagcccgcggaaaaagatccgatcactttccatgcggtgcctaaatttgatccttccagcggatgtttgccgaaaagcagcggcggtctgccaggctattcaaaaatcttcggtgactggctgtgtgaaactgccgccaaagacagcaagctgatggcgatcaccccggcaatgcgcgaaggttccggcatggtggaattttcacgtaaattcccggatcgctattttgacgtcgccatcgccgagcagcatgccgtcaccttcgccgcaggtctggcgattggcggctataagcccgtcgtggcgatctactctactttcctgcaacgcgcctacgatcaggtcatccatgacgtcgctatccagaaactgccggtcatgttcgccatcgatcgcgccggtatcgttggcgcggatgggcaaacacaccagggcgcgttcgatctctcctatctgcgctgcatcccggatatggtgatcatgacgccaagcgacgaaaacgaatgtcgccagatgttatttaccgggtatcactataacgacggcccgacggcagtacgttatccacgcggtaatgcgcagggcgtggcgctaaccccgctggaaaaactgcctattggtaaaggccttgtgaagcgtcatggcgaaaaactggcgattctgaactttggcaccttaatgcctgaggcggcgaaagtcgccgaagcgctgaacgccacgctggtcgacatgcgctttgttaagccgctggacgacacgctaattctggagatggccgcgcagcatgacgcgctggtgacgctggaagagaacgccattatgggcggcgctggcagcggcgtaaacgaagtgctaatggcccatcgtaaacctgtacctgtgctgaatatcggtcttccggatttctttatcccgcaaggaacgcaggaagaagcccgcgcggaactggggcttgacgccgcaggcattgaagccaaaatcaaggcctggctggcataa

SEQ ID NO: 370736 - DNA, 900 bp, Salmonella enterica
atggactttacgcagcagctacaggcttgcgtaacgcaagcgaatcaggcgctgagccgttttatcgcgccactgccctttcagaacactcccgtggtcgaagccatgcagtatggcgcattattaggcggtaaacgcctgcggccatttctggtttacgccaccggtcaaatgtttggcgtcagtacggcaacgctggatgcgccagctgcggcggtcgaatgcattcatgcctattcgctgatccatgacgacctgccagcaatggacgatgacgatttgcgtcgcggcctgccgacttgccatattaaatttggcgaagccaacgcaatcctggcgggagacgcgttgcaaacgctggcgtttgccattctcagcgacgcgccgatgccggaagtcaccgatcgcgatcgtatcgcgatgatcgccgaactggcgaacgccagcggcatcgccggtatgtgcggcggtcaggcattggatctggcggcagaaggccagcggatcactctggacgcgctggaacgtattcatcgccataagaccggcgcgctcattcgcgccgccgttagacttggcgcgttgagcgcgggcgataaaggacggaatactctgccgatacttgaccgctatgcagagagtatcggccttgccttccaggttcaggatgacattctggatgtggtgggcgatactgcaacgttaggtaaacgtcagggcgcagaccagcagcttggcaaaagtacctaccctgcacttctgggtcttgagcaagcccggaataaagcccgggacctgatagaggacgcccgtcagtcgttacatcagctggccgcgcaatcactggacacctcggcactggaagcgctagcgaactacataatccagcgtgataaataa

SEQ ID NO: 370737 - DNA, 243 bp, Salmonella enterica
atgccgaagaaaaatgaggcgcccgccagctttgaaactgcgctgagcgagctggaacatattgttacccgcctggaaagcggcgatttgccgctggaagacgcgctgaatgaattcgagcgcggcgtacaactggcgcgtcaggggcaggcaaaactgcagcaggcggaacagcgcgtgcaaattttgctgtctgataatgaagaggcttcacctgagccttttatcgcggataatgagtaa

SEQ ID NO: 370738 - DNA, 1449 bp, Salmonella enterica
atgaagtttatcattaaattgttcccggaaatcactatcaaaagccaatctgtgcgtttgcgctttataaaaattttaaccgggaacatccgtaacgttttaaagcactacgatgagaccctcgcggttgtccgtcactgggataacattgaagttcgcgccaaagatgaaaaccagcgtctggcgattcgcgacgcgctgacccgcatcccggggattcaccatattcttgaagtcgaagatgtgccgttcaccgatatgcacgacattttcgagaaagcgttggcgcagtatcgcgaacagcttgaaggcaaaaccttctgcgtgcgggtaaaacgtcgcggtaagcatgagtttagctccattgaagtggagcgctatgttggcggcggattaaatcagcatattgaatcggcgcgcgtgaagctcactaacccggatgtgacggtgcatctggaagtggaagatgatcgcctgctgctgatcaaagggcgttatgaaggtattggcggtttcccgattggcacccaggaagatgtgctgtcgctgatctccggcggttttgactccggcgtctccagctatatgctgatgcgtcgcggctgtcgcgtacactactgcttctttaaccttggcggcgcggcgcatgaaatcggcgttcgccaggtggcgcattacctgtggaaccgctttggcagctcccatcgcgtgcgttttgtggcgattaacttcgaaccggtggtcggcgagattctggagaaagttgacgacggccagatgggcgtggtgctcaaacgtatgatggtacgcgcggcgtcgaaagtggcggaacgttacggcgtacaggcgctggtgaccggcgaagcgctgggccaggtatccagccagacgctaaccaacttgcgcttgatcgataacgtgtctgacacgctgatcctgcgcccgctgatctcttacgataaagagcacattatcaacctggcgcgccagattggtacggaagattttgcccgtacgatgccggaatactgtggcgtgatttcaaaaagtccgacggtgaaagccattaaagcgaaaattgaagccgaagaagaaaatttcgacttcagtattctcgataaggtggtagaagaagcgaacaacgtcgatattcgtgaaatcgcccagcagacccagcaggaggtggtggaagtagaaaccgtgagcggtttcggcccgaacgacgtgattctggatatccgttctgtggatgagcaggatgacaagccgctgaaagtggaaggtgtggacgtcgtttcgctgccgttctacaagctgagcactaaatttggcgacctcgatcagagcaaaacctggctgctgtggtgcgaacgcggggtaatgagccgcctgcaggcgctctatctgcgcgagcagggctttgaaaacgtgaaagtgtatcgtccgtaa

SEQ ID NO: 370739 - DNA, 798 bp, Salmonella enterica
atgctaatttggtcacctaaaggacgcgcagcggcgggcgttgtggctagcgtactgtttatcgtgttctttttcctgccgctggcggtgattctaatgtccagccttagccagcagtggaacggtattctgccgagtggcttcacgctgaaccactttgttaacgctctgcacggtgcggcatgggatgccctacttgccagcctcacgattggcttttgcgccagcctgtttgcgctgctttgcggcgtttgggcggcgctggcgctgcgtcaatatggggtgaaaacgcagaaatggttaagtatggtgttctatctgccgagtgcgattccgtcagtgtccgtgggtctgggcattctggttgctttcagccaggtgccattgcaaatgaacggcaccctatggattgtgctgacagcgcactttgtgctgatttccgcctttaccttcagtaacgtgtcgaccggactggcgcgcatttccgccgatattgaaaacgtcgcgtcgagtctgggggcatcgccctggtatcgtctgcgtcacgtgacgttgccgttattgatgccgtggatggtgtcagcgctggcgctgagtttatcgctctccatgggggagttgggcgcgacgatgatgatttatccgccgggctggacgacgctgccggtagctatctttagcctgaccgaccgtggaaatattgccgacggcgcggcgctgactattgtgctggtggccattacgctgctgctgatgatgaagctggagcgcattgcaaaacggttggggcagaaataa

SEQ ID NO: 370740 - DNA, 870 bp, Salmonella enterica
atgtcactcattttacctctggaaaaaccggcgcttaacctacgcccactgctgtggctgctgctcccgttgctggtgctggcgacgctgtttttctggcctctgtcgctcatcgttgaacaggcgctacgcggtgctaatggcgagatcgggctcgagaccttccgccaggtggtcgactcgaaacgctttgtcggcgcgttgctgaacacgttgcaaatcgcctttttcgccaccgccggttgcctgctgctgggcagcgtgatgtcgctgattctggtgtttattcctttccccggcagcgagttgattggtcgggtcgtcgatacttttattgcgctgccgaccttcctgattacggtggcgttcacctttatttatgggtcagcgggtctgctcaacggtacgctgatgagcctgtttgcctttgagctaccgccggtggattttctctactcgatgcagggcgtcattctggcggagatcacggtgttcactccgctggtgatgcggccactgatggccgcgctgcggcaaattgataaaagccagctagaggcagccagcattctgggggcgcacccgttacgggtgattgggcaggtgattttcccggcggcgctaccggcgctgatggctggtggcagcctgtgcctgctgttgaccactaacgagtttggcatcgtactgtttattggcgcgaaaggggttaacaccctgccgatgatggtttacagcaaagcgattctggagtccgactatacggtcgcctgcatgattgcgttgattaacattgtcttgtcgctggggctgttctccctctatcgcctggcggcatcgcgtaccggcgtaaggagccagccatgctaa

SEQ ID NO: 370741 - DNA, 1110 bp, Salmonella enterica
atgctgatgaaaacgactgccgttcacgtccctgcatcgcaggggacatcggggatagtcctcgactcgctgcgcgttgcgtatcacggcaacgtggtgcttaaaccgctctctttgacgattgaacttggcgaagtgctggcgctgattggcccatcaggatctggaaaaacgacggtgctgcgtgcggttgcgggctttgtgcaacctgcaggcggtcgtattctgattggcgatacggacgtcacccatctgccaccctataaacgcgggttggcgatggtggtgcagaactacgccttgttcccgcatctgaaagtggaagacaacgtcgcttttggcctgcgtgcgcagaagcagccaaaggcgctaattaatgagcgtgtaacgcaggcgctgaaaacggttggcatgagtgattacgccgcccgttatccgcatcaactttccggcggccagcagcaacgcgtggccatcgcccgcgcgattgccgtgcgcccgcgcgtgctgttgctggatgaaccactgtcagcgctggacgcacagattcgtcataatatggtggaagaaatcgcctgtcttcaccgtgagctgccggagctcactattctctacgtcacccacgatcaaacggaagcgctcaccctggccgataaaatcggcattatgaaggatggctcgctgattgctcacggcgaaacccgcgcgctatatcagcatccgcccaatcgttttgccgccgaattcttaggtcgcgccaatattctctccgccatcgcgctggggataacggaggctccggggctggtggacgtcagctgcggcggtgcggtgattcgcgcgttcagccggggcagccaccacggttacaacaaactgctgtgcattcgtcctcagcacctcagcctgacgccgcgttcggcctacagcaaccgcttcaacgccacactgcaatcggtgcactggcagggcgatttaacccatctgctgtgtgacgttgctggcgaaacggtgcgaatggtgttgacgcatgtcaatccgctgccgcgcgtgggcgacaagctggcgctgtggttcgaaccggatgatgcggtcctgattgaggtataa

SEQ ID NO: 370742 - DNA, 1014 bp, Salmonella enterica
atgaaactttcccgacttgctctgctgtctgtcttcgctctcgccagcgccccgtcatgggcggaatcggtggtcacggtgtactccatcgacgggctgcacgatggcgataacagctggtaccaggtgcagtttgacgcattcaccaaagcgaccggcattaccgtacgctatgttgaaggcggtggtggcgtggtagtggaacgtctggcaaaagagcgcacgaatccacaggccgacgtgctggtaaccgcgccgccattcattcagcgcgccgccgccgaaaagctgctggcgaactttaacaccgacgccgcatcggctatccccgatgccaacaacctttattcgccgctggtaaagaactatctgagctttatctacaacagcaagctgctgaaaactgccccggcgagctggcaggatctgcttgacggtaaattcaaaaataaactccagtattccacgccaggtcaggccgctgacggcacggcggtgatgctgcaggctttccacagcttcggcagtaaagatgccggttttgcgtatctcggcaagctgcaggccaataacgtcgggccatctgcctctaccggcaagctaaccgcgctggttaataaaggtgaaatctacgtcgctaacggcgacctgcaaatgaacctcgcgcagatggaacgtaacccgaacgtgaaaatcttctggccggccaacgacaaaggcgagcgcagcgcgctggccatcccttatgtcattggcctggtccagggggcgccgcagagtgaaaatggtaaaaagctgattaacttcctgctgagtaaagaagcgcagactcgcgtcagcgaactctcctggggaatgccagtacgcagcgacgtgacgccgagcgacgaacattacaaggccgccactgccgcgttagaaggcgtgcagagctggcagccaaattgggatgacgtagccgtttcgctgtcggcagatattagccgttggcacaaagtgaccgaaagcgagtaa

SEQ ID NO: 370743 - DNA, 720 bp, Salmonella enterica
atgaaatctatcccgggcgatatcccgcagtacctgttgatcaaggcacagcttcaggcacgtattcagagcggtgcgttgaaaagcggtgataaactgccgtctgaacgcgaactgtgcgcgatcttcaacaccacgcgcattactattcgcgaaagtctggcacagctggagtccagtgggcttatctggcgcgccgatcgtcgcggttggttcgttacgccggaacgcctgtggctggatccgacccagaacaccaacttccataagctttgccgcgagcaggggcgggagccaaaaaccgcgctactgagcggcgtgttaaccaccgtgcctgtcgaggtcatggagcccctccagctccagccgtttgatcaaatctatctgctgacccgtctgcgttacgccgatggccgcgccgtgtgctactgcgaaaaccattgtttgcccgcccgcgtgcctgagctgctgcagtacgatctcaacggcagcctgaccgaggtatacgagtcgcactacaacctcgtctataccagcatgcatctgtcgttctaccccaccgccatgcctgcgcaggccgcacaggcgctgggagttatggaaggacgcccggcgctgttactgcgccgcctgaactacgatcaacacgggcgagtgctggatctggatatcgaatactggcgtcacgacagcctgcgtattgaggtagatacccactag

SEQ ID NO: 370744 - DNA, 1104 bp, Salmonella enterica
atgacttcgcgtaactatctgttgctgactcctggcccgctcaccacctctcgtaccgtgaaagaagcgatgttgttcgatagctgtacctgggatgatgattacaatatcggcgtggtggaacagatccgccagcagctgaccgaactggcaacggcctccgaaggctacacctccgtactactgcaaggcagcggcagctatgctgtggaagccgtactgggcagcgcattgggtccgcaggataaggtgctgatcgtcagcaacggtgcatacggcgcacgaatggtcgagatggccggccttatgggtatcgcccatcacgcttacgactgcggcgaagttgcgcgcccggacgtgcaggcgatcgacgcgatcctcaacgccgacccgacgatcagccatatcgccatggtgcatagcgaaacgaccaccgggatgctcaaccccattgatgaggtgggcactctggcgcatcgctatggcaaaacctacatcgttgacgccatgagtagcttcggcggcatccccatggatattgcagcattacacatcgactatctgatcagctccgccaataaatgcattcagggcgtgccgggttttgccttcgtgattgcccgcgagcaaaaactggccgcgtgcaaagggcgttcccgctcgctgtcgttagatctctacgcccagtggcgttgcatggaggataaccacggcaaatggcgttttacttcgcccacacataccgtcctggcgtttgcacaggcgctgaaagagctggcgaaagaaggtggcgtggcggcacgtcatcaacgctatcagcaaaatcagcgcagcctggtggccggaatgcgggcgctgggctttaacacgctgctggatgacgagcttcattcgcccattatcaccgccttttattcaccggaagacccgcagtatcgctttagcgaattttatcgccgcctcaaagagcagggctttgttatctatcctggcaaagtgtcgcaaagcgactgcttccgcatcggcaacattggcgaagtatatgccgccgatatcactgccctgctgaccgccattcgtaccgccatgtactggacgaaataa

SEQ ID NO: 370745 - DNA, 810 bp, Salmonella enterica
atgaaccgtattcacgctgttattctcgactgggcgggcaccaccgtcgattttggctccttcgcgccgacgcaaattttcgtcgaggcgttccgtcaggcatttgatgtggagatcaccctcgccgaagcacgcgtgccaatggggctgggtaaatggcaacacattgaagcgctgggaaaattacctgctgttgacgcgcgctggcaggcaaagtttggtcgctccatgagcgcagcagatattgatgccatctacgccgctttcatgccgttacagattgctaaagttgtcgatttttcttctcctattgccggagttatcgacacgatcgcggcgctacgagccgagggcatcaagataggctcctgctccggttacccacgagcggtgatggagcgcctggttcccgccgccgccgagcatggctatcgtccggatcattgggtagcaacggacgacctggccgcgggtggtcgcccggggccgtggatggcgctgcaaaacgtgattgcgctgggcattgatgcggtcgcgcactgcgtgaaggtagatgatgccgcgccgggcattagcgaggggcttaacgcggggatgtggacggtggggctggcggtatcgggtaacgaattcggcgcaacatgggacgcctatcagacaatgtcgaaagaggacgttgcggtccgccgcgagcacgcggccagcaagctgtacgccgccggggcgcattacgtggtggattcactggcggatttatctggggtgattgcgcatattaatgcgcgtctggcgcagggcgaacgcccgtaa

SEQ ID NO: 370746 - DNA, 591 bp, Salmonella enterica
atgagcgctcaggcactggtatgcctcgcccctggtagtgaagagaccgaagcggtcaccactatcgatctgctggttcgcggcggaatccacgtcactaccgccagcgtcgccagcgatggcaacctgacgattgtctgctcgcgcggcgtgaagctgctggcggatgcgccgctggttgaagttgccgacggcgattatgacatcatcgtgttgcccggcggaattaaaggcgccgagtgctttcgcgacagcccgctgctggtcgaaaccgtaaaacagtttcaccgctccgggcgtattgtcgcagccatttgcgccgcagccgctacagtgctcgtgccgcacgatatcttccctatcggcaatatgaccggttttccggcgctgaaagataagatccccgccgaacagtggcaggataagcgtgtggtgtgggatgcgcgggtaaaattattaaccagccagggaccgggtaccgctatcgattttggcttgaaaatcatcgacctgttggttggtcgtgaaaaagcgcatgaagtggcttcgcaactggtgatggcggcggggatttataactactacgaataa

SEQ ID NO: 370747 - DNA, 912 bp, Salmonella enterica
atgaaaattactgtactgggatgcggagccttaggacaactttggctttcggcactgtgcaaacatggacatgacgtacagggctggctacgggtgccacaaccttattgcagcgtaaatctgatcgataccgatggttcctttttcaacgaatcactgacggcaaacgatccggattttttggcgaagagcgaactgttgttagtcacgctgaaagcgtggcaggtttccgacgcagtacgaaccctggcgtcaaccctaccggtgacgtcgcctattctgctcattcataatggaatgggaaccatagaagaactgcaaaatatccaacagccgatgttgatggggactatcacccatgctgcgcgccgcgacggtaatatcattattcatgtcgctaacggtactacgcatattggcccggcacgcgagcaagacggcgattacagttatctcgccgatatcctgcagggggtactgcccgatgtcgcctggcataacaatatccgcgcagagatgtggcgcaaactggcggtcaactgtgttatcaacccgctcaccgcgctttggaactgcccgaacggcgagctgcgccatcatactgatgaaatcaacgcgatttgcgaagaggtcgccgccgtgattgaacgtgaaggctaccacacatcggcagacgatttacgctattatgttgagcaagtgattgacagtacggcagaaaacatctcatccatgttgcaggacgtgcgcgccatgcgccataccgaaattgactacatcaccggttatttactcaagcgcgcccgcgtgcacggtctcgccgttccggaaaatagccgcctgtttgaaatggtaaagcgaaaggagagtgagtatgagcgctcaggcactggtatgcctcgcccctggtag

SEQ ID NO: 370748 - DNA, 492 bp, Salmonella enterica
atgccatctttcgatattgtttctgaagttgatctgcaggaagcgcgtaacggcgtggataacgcggttcgcgaggttgagtctcgttttgactttcgtggcgtagaggcgactattgaactgaacgatgccaataaaaccatcaaggtgctgagcgagtccgatttccaggtcaatcagttgctcgatattctgcgcgccaagctgcttaaacgcggtattgaaggcgcttcgctggatgtaccggacgagttcgtgcatagcggtaaaacctggtatgtggaagcgaagctgaagcagggcattgaaagcgccgtgcagaagaaaatcgtcaagctgattaaagacagcaaactgaaggtgcaggcgcaaattcagggggaagagattcgcgtgacgggcaaatcacgtgacgatctgcaatcggtaatggcgctggttcgcggcggtgatttgggccagccgttccagttcaaaaacttccgcgattaa

SEQ ID NO: 370749 - DNA, 1365 bp, Salmonella enterica
atgaacgattataaaatgacgccaggggagctgcgcgccacatggggtttagggaccgtcttttcgttgcgtatgctgggcatgtttatggttctaccagtactgaccacatacggtatggcgctacagggcgccagcgaagcattaattggcattgcgatcggcatttacgggctggcgcaggctatctttcaaattccctttgggctgctgtccgaccgcattggccgcaaaccgctgattgtcggcggactggcggtatttgtcgcgggcagcgtcattgccgcgctctcccactcaatctggggcattattctggggcgagcgctacaagggtccggcgctattgccgccgccgtcatggcgctcctgtctgacctcacccgcgagcaaaaccgtaccaaagcgatggcgtttatcggcgtcagctttggtatcaccttcgcgattgcgatggtattagggccgatcgttacccatagtctgggattgaacgcgttgttctggatgatcgccgccctcgccaccctgggcattattttgacgatctgggtggttcccaacagtaccaaccatgtgctgaatcgcgaatccgggatggtcaaaggcagcttcagtaaagtgctggcggagccgaggctgctcaaactcaatttaggcattatgtgtctgcatattttattgatgtccacctttgtcgccctgcccggccagcttgccgatgccggtttccctgccgccgaacactggaaggtgtatctggcaaccatggtaatcgcctttgccgccgtcgtgccttttattatctatgctgaagtcaaacggcggatgaagcaggtattcctgttctgcgtgggactcattgtcgtcgcagaaatcgtgttgtggggagcgggccaacatttctgggagctggtgattggcgtacaactctttttcctcgcctttaatctgatggaggcgctgctgccttcgcttattagcaaagaatcgcccgcggggtataaaggaacggcgatgggcgtctattctaccagtcagtttcttggcgtggcgcttggcggctcgctgggcggctggatagacggcacgtttgatgggcaaaccgttttccttgccggggccgtactggcgatggtatggctggcggtggcaagtaccatgaaagagccgccctatgtcagcagcctgcgtgtggaaattccagcggatatcgttgctgacgacagactaaaacagcgactgttggaaatgaaaggcgtaagcgaagcgctgatcgtggcggaagagcattccgcttacgtcaaaatcgacagcaaagtgaccaatcgctttgaagttgaacagcttatcagcaaaggataa

SEQ ID NO: 370750 - DNA, 1512 bp, Salmonella enterica
atggaaattaaatttttatcattatgtattttagcgggtgttttatttgttagccaggtgaatgcttcagcgaacaacggtaaagatgatgtaaaatatgctgcgcttacccagaaggatcttgatgctttgcctgtggaaaaaagagcttcgtttctggatgaactggggtttatccatgaatacggccttaatgtaccgatgaatcgcgaacaggcgttgcagtattacaagcaggcctgtgagcttggcggtaactacggctgttataatgtgaagtatgcttatcagtatggcgacggagtggccaaagatagcgctcaggccaataagtatgctaagaaaatgaatctggataatttattgattgagcaagaatatattgataagttttcgcaagaaattttcacggcaaaagtattggccgatacggataaatcgcagcgaccagaatttattaatgcactatttaattttctaaataataggccagagagcgatgcgcttttttttagtcgtatcggatttaatcaggaaaaaacgttccgccttgctacgctatgggtgcaggacggcgatccacaaatggattatcaactggggttactcacccttaatgatttctctggtcattatgtggatgagccttataaagccaggccggcctcgttgaaatggtttcgcgccgccgcggaaaaaggcgtcgttgaggcccaatctctcttggggggtatttattcggggggagagggcgatgagtgggggattaagccagacattcaggaagcacaaaaatggtatggacaggcggctaagcagggggacagcgatgcacagattgcgttaggtaaaatctattattctggcgcaacagggcgcactgattacgctaaagcgctggcattatttacgcaggttgaaaatgatggtactaattcgcgctcaacgatgccgttgagttggatgtattataacggtttaggtactgcacctgattgtgataaagcctggtcgtattacaagaaagcatctcgatatgtaggtaagaaagttgaggaaaaaatatttttaagtaaatgcgcagcggatattcagagtcgaaaaaacaacgcggatgctttacctaaagtaactctgaaaaaagagagaattttctctcgcgggataacggctaaaccgaaagaatgcgcactaatttttcagattggcacagataaaattcgtaacatggcgaatttgcatattacgcttgaactgaagaatgctgatggaatggcaactgaggaaacgttgatgattccgccattcggtttgaatactctggggatagatatgcaaaatcatgatgttgatcctctcgttaccccatacgatctcccgctgtatacgcaagatttttgtcacgggattgacgatatccattttacgctgaaatccgctacggcaacgattaacggtaagaatgtcgatttactgaaagctgatagtgtgcgctttttagataaagaataa

SEQ ID NO: 370751 - DNA, 618 bp, Salmonella enterica
atgataaaacggaaatggagtattttgtttctgcttgggctttctttcgcatcggtatgtcaggcaggtggtgatattgacgcgttgtatagccgtattgcgcagaaagatattcaggcgctaaatgagctaaaagcgttagccaaagataataatgctcaagcgctggcggagttggggtttatttatgagtacggtgtttcagtatctgtggatattccgcaagcaataaagtactacgagcaggcttgtgatttggacggtgattatggttgctttaatgcagcttatttctatgaatatggcatcggtacccaaaaggacattacgcaagcgaaaacattagcaaaacagcttagagaaaaaattaatctatccaatatcaatctcgataaaaaggtgagtgaacgtataattgggagtgtttatagtaataaacttgaggcatatagagacctttcatttcgtcctcattttattcaaggcttaagtttctatttttatgccccgcaatcagatgagcgaaaactgctgagtcgaataggttttgactcatcacatcttgcgcggatagcgatactctgggcgagagagggtgatcctgaggtcgcgtattag

SEQ ID NO: 370752 - DNA, 684 bp, Salmonella enterica
atggcggcgcagcaaggtaatggagaagcattgtatacgttaggtcgtatgtactattctggcgtaatggttaacgttgattacgataaagcgctgtatttttttaaaaaagcttatgagaaagaattacaggcggccgctgattatttagcacagatgtattttaatggccagagtgtagatgtcgattgccaacaatcctggcactattacgataacagctatataaaaaagatgacacaacgcgattatcttgattattgtgaaaaagatcgaaagcgccgtaatgattttagtcagcaacttcctgagctgacattagaaaaatatgcgggattatttggcaggattgataatattcctctgtgtcagattggatttgttgtcaatacgaataagttaattcatgttgcgaacttacgtgtggaattgatattaaaaaatgatgctggagttagtgacgaaagaatagtcgcttttcctcctttgggtctcaatactctgggtgctgaacagggtatgggggattcttttaagtcgatgggatatctcttgatgaaaaacggtgacttgtgtgattaccataaacttactttcaccgtgaagtcagcgacggcaacaatcaatggtaaaaaagttgatttactgaaaacggataatttacatattattcagaatcgataa

SEQ ID NO: 370753 - DNA, 891 bp, Salmonella enterica
atgatgtttaagcaatacctgcaagtaacgaaaccaggcatcatctttggcaacctgatctcggtgatcgggggatttctgctggcctcaaagggcagcattgactatcccctgttcatttatacgctggtcggggtgtcactggttgtggcgtcgggttgtgtatttaacaactacatcgacagggatatcgacaggaagatggaaaggaccaagaatcgggtgctggtcaaaggcctgatttctcctggcgtctcgctggtatacgccaccctgctgggtattgctggctttatgctgctgtggtttggcgctaatcctctggcctgctggctgggggtgatgggcttcgtggtctacgttggcgtgtacagcttgtacatgaagcgtcactccgtttacggcacgctgattggttctctctccggcgcagcgccgccggtgattggctactgcgccgtaacgggcgactttgacagcggcgcggcgattctgttggctattttcagcctctggcagatgccgcactcttacgccatcgccattttccgctttaaggactatcaggcggccaatatcccggttctgccggtggtaaaaggaatctcagtcgctaaaaaccacatcacgctgtacatcattgcgtttgccgttgcaacgctaatgctcacgttgggcggttatgccggttacaaatacctggtggtcgccgcggcggtcagcgtttggtggctcggcatggcgctacgcggttacaaagtggaagatgataaggtctgggcgcgtaagctgttcggcttctctatcattgcgattaccgcgctgagtatcatgatgtccgttgattttatggtgccgaattcgcagaatctgctgacttacgtctggtaa

SEQ ID NO: 370754 - DNA, 330 bp, Salmonella enterica
atgagtcattctaccgagagcggcggcgcatcccacggcagcgtaaaaacgtacatgaccggctttatcctgtcggtcatcctgacggttattccattctggatggtgatgaccggcgctgcctctccggccgttattctgggatctatcctggcaatggcagtggtgcagattttggtgcatctggtgtgtttcctgcacatgaacaccaaatctgatgaaggctggaacatgacggccttcatctttaccgtgctgatcatcgccatcctggttgtgggctccatctggattatgtggaacctcaactacaacatgatgatgcactaa

SEQ ID NO: 370755 - DNA, 615 bp, Salmonella enterica
atggcaactgatactttaacgcacgcgactgcccacgcgcacgaacacgggcaccatgacgcaggccagaacaaaatcttcggattttgggtctacctgatgagcgactgcattctgttctctattctgtttgctacctatgccgttctggtgaacggcaccgctggcggcccgacaggtaaggacattttcgaactgccgttcgttctggttgaaaccttcctgctgttatttagctccattacctacggcatggcggcgatcgccatgcacaagaacaacaagagccaggttatctcctggctggcgttgaccttcttgttcggtgccggatttatcgggatggaactctatgaattccatcacctgattgttaacggtatgggcccggatcgcagcggcttcctgtctgcgttcttcgcgctggtcggcacgcacggtctgcacgtcacttccggtttgatctggatggcggtgctgatggtgcaagttgcccgtcgcggtctgaccagcactaaccgtacccgcatcatgtgcctgagcctgttctggcacttcctggatgtgatttggatttgcgtattcactgttgtttatctgatgggggcgatgtaa

SEQ ID NO: 370756 - DNA, 1992 bp, Salmonella enterica
atgttcggaaaattatcactggatgcagtaccgttccatgaacctatcgtcatggtaacgatcgctgcaattatcgtcgggggactggcgatactggcagcgattacttacttcggtaagtggacctacctatggaaagagtggttaacgtcagttgaccataaacgcctcggcatcatgtatatcatcgtcgcgattgtgatgctgttacgtggtttcgccgatgccatcatgatgcgtagccagcaggcacttgcctccgcaggcgaagcgggttttctaccgccgcaccactacgatcagatctttaccgctcacggcgtaatcatgatcttcttcgtggcgatgcccttcgttatcggtctgatgaacctggtggttccgctgcagatcggcgcgcgcgacgttgcgttccctttcctgaacaacctgagcttctggttcaccgttgtcggcgttatcctggttaacctctcgctgggcgtgggtgaattcgcgcagacagggtggctggcttatccgccgctatcgggaatagagtacagtcccagcgtcggggtcgattactggatatgggcgttgcaactctcgggtattggtacgacgttaaccggtatcaacttcttcgtgacgatcctgaagatgcgtgcgccgggtatgacgatgttcaagatgccggtctttacctgggcctctttgtgcgccaacgtactgatcatcgcctctttcccgattctgacggttaccgtcgcgttgctgaccctggatcgctatctgggcacccatttctttaccaacgatatgggcggcaacatgatgatgtacatcaacctgatttgggcctggggccatccggaagtgtacattctgattctgccggtcttcggggtattctccgaaatcgcagcgaccttctcgcgtaaacgtctgttcggctatacctcgctggtttgggcgaccgtctgtattaccgtactgtcgtttatcgtttggctgcaccacttcttcacgatgggcgcaggcgcgaacgttaacgccttcttcggtatcaccaccatgattatcgccatcccgaccggggtgaagatcttcaactggttgttcaccatgtatcagggccgtatcgtcttccattccgcaatgatgtggaccatcggctttatcgtgaccttctcggtcggcggtatgaccggcgtgctgctggcggtaccgggcgcggacttcgtcctgcacaacagtctgttcctgattgcgcacttccataacgtgatcatcggcggcgtagtgtttggctgcttcgcgggtatgacctactggtggccgaaggcgtttggcttcaagctgaacgaaacctggggtaaacgcgccttctggttctggattatcggtttctttgtagcctttatgccgctgtatgtactgggcttcatgggcatgacccgtcgcctcagccagcaaattgatccgcagttccatacgatgctgatggttgccgccgccggcgccgcgctgattgcgctgggtatcctgtgtcaactgattcagatcttcgtttctattcgcgaccgcgatcagaaccgcgatctgaccggcgacccatggggtggccgtacgctggagtggtcaacctcgtctccgccgccgttctataactttgccgttgtgccgcacgttcacgaacgtgacgccttctgggaaatgaaagaaaaaggcgaagcgtaccaacagcctggacaatatgaagagattcatatgccgaaaaatagcggtgccggtattgttatcgccgccttcgcaacggtatttggcttcgccatgatctggcatatctggtggctggcgatagtgggtttcgcaggcatgatcatcagctggattgtaaaaagctttgatgaagatgtggattactacgtgccggtcccggaagtcgaaaaactggaaaaccagcatttcgatgagattactaaggcagggctgaaaaatggcaactga

SEQ ID NO: 370757 - DNA, 768 bp, Salmonella enterica
atgatttttaccaaaatcattaggggattcatcagtgcgaagtatagcccgaactggtcacactccaataaagtggaagccgtggtctggacggtgcctatcttaatcatcattttccttgccgtactgacctggaaaaccacgcacgcgcttgaaccaagcaagccgctggcgcatgacgaaaaaccgatcaccatcgaagtggtttccatggactggaaatggttcttcatctatccggagcagggtatcgccaccgtcaacgagatcgccttcccggcgaacacgccggtttatttcaaagtgacctccaactccgtgatgaactccttctttatcccgcgtctgggtagccagatttatgccatggccggtatgcaaacacgtttgcatctgatcgccaacgaacccggaacctacgatggcatctccgccagctatagtggcccgggcttctctggtatgaagtttaaagctatcgccaccaaagaccgcgcagaattcgaccaatgggtcgcaaaagcgaagcagtctccgaacaccatgaatgatatggcggcgttcgagaaagtggctatgccaagcgagtacaacaaggtggaatatttctccagcgtgaaaccagatttgttcaaggacgttattaacaaattcatggaccacggtaagagcatggacatgacccaacctgaaggtgagcacagctcgcatgaaggaatggaaggtatggacatgagccacgcggaatccgccaactccaagggttga

SEQ ID NO: 370758 - DNA, 720 bp, Salmonella enterica
atgctgttagccagcctctccgttcacgccgcttccgtttccgccagaacattacattttggcacctccgccacctatgcgccctatgagtttgtcgatgccgataataaaattgttggtttcgatattgatgtcgccaacgcggtctgcaaagagatgcaagcggagtgctcattcactaaccagagctttgatagtctgatccccagcctacgcttcaaaaagtttgatgcggtgatcgccggtatggatatgacgcccaaacgtgagcagcaggtctcctttagccaaccctattacgaaggtctatcggcggtagtcgtcacgcgtaaaggggcttatcacacttttgccgatctgaaaggcaaaaaagtcggtctggaaaacggtacaacgcatcagcgctatttgcaggataaacaacaagccatcacgcctgtcgcctatgacagctatctaaacgcttttaccgatctgaaaaataaccgtcttgagggcgtgtttggcgatgtcgccgcgattggtaagtggctaaaaaacaatccggattacgccatcatggatgaacgcgccagcgatcctgactactacggaaaagggttaggcattgcggtacgcaaaggcaacgacgcgctattgcaagaaattaatgccgcgctcgacaaggtgaaagcgtcgccggaatatgcgcagatgcaggagaaatggtttacgcagtaa

SEQ ID NO: 370759 - DNA, 546 bp, Salmonella enterica
atgagtgccgatgaaaacaacctgatttggatcgatctggagatgacaggtctggaccccgagcgcgatcgcattattgagatagccacgctggtaacggatgccagcctgaatattctggcggaagggccgacgattgcggtacatcaatccgatgcgcaactggcgttaatggatgactggaacgtgcgcacccataccggcagcggcctggtagatcgcgttaaggcaagtacgatgggcgaacgagacgctgaactggcgacgattgaatttctgaaaacgtgggtgcctgcgggtaagtcgccgatttgcggtaacagcatcggtcaggatcgtcgttttctgtttaaatatatgccggaactggaggcctacttccactatcgctatctggatgtcagtacgctcaaggaactggcgcgccgctggaagccggagattctggccggctttaccaagcagggcacgcaccaagcgatggatgatattcgcgagtcggtggcggagctggcttactaccgcgagcatttcattaagctgtga

SEQ ID NO: 370760 - DNA, 1053 bp, Salmonella enterica
ttgagcaaaaataaactctccaaaggccagcagcgccgtgtgaacgccaatcaccagcgtcgtttaaaaacgtccgcggagaaagccgactacgatgacaacctgtttggcgagcctgcagaaggtatcgtcattagccgtcttggtatgcatgccgatgtggagtctgctgacggcgaggttcaccgttgcaatatccgccgcactatccgttcgctggtgacgggcgatcgcgtcgtctggcgtccgggcaaagccgccgcagagggcgtcaacgtaaaaggcatcgttgaagcggtgcatgagcgcacctcggtattgacgcgcccggacttctacgacggcgtgaagcctattgccgccaacattgaccaaatcgttatcgtctccgcgattttgccggagctgtcgctgaatatcatcgatcgctatctggtcggctgtgaaaccctacaggttgagccgcttatcgtactcaataaaattgatctgctggacgacgaaggtatggacttcgttaatgagcagatggatatctaccgcaatatcggctatcgcgtgctgatggtctccagccatacgcaggatggtctgaaaccgctggaagaagcgttaaccggtcgcatcagtatttttgccgggcagtccggcgtcggaaaatccagtctgctaaacgctctgctcggcttacagaacgagattctgacgaacgatgtgtcgaatgtctccggtctgggtcaacataccactaccgctgctcgtctgtatcatttcccgcatggcggcgatgtcattgattcccccggcgtgcgcgagttcggcttatggcatctggagccggaacaaatcacccagggctttgtcgaatttcatgactatttgggacattgtaaataccgggactgcaagcatgacgccgatccaggctgcgccattcgcgaggcggtagagaacggcgctattgcggaaacccgtttcgaaaattatcaccgaattcttgaaagtatggcgcaggtaaaaacgcgtaaaaacttttctgatacggacgactga

SEQ ID NO: 370761 - DNA, 969 bp, Salmonella enterica
ttgttaaactcatttaaactttcgctacaatacattctgccgaaactatggctcactcgcctggcgggctggggcgcaagcaaacgagcaggatggctgacaaaactggttatcgatctcttcgtaaagtattacaaagtcgatatgaccgaggcgcaaaaaccggataccgccagctatcgtacgttcaatgatttctttgttcgtccgctgcgtgatgacgtgcgtccgctcaataccgatcctaacatcctggttatgcctgccgacggcgtgataagccagttgggtcgtatcgaagaagataaaattttgcaggccaaaggccataattacagccttgaagcgttgctggcgggtaactacctgatggcggataagttccgcaacggcacgtttgtgaccacttacctctcccctcgcgactaccatcgcgtgcatatgccatgcaacggcatcctgcgcgaaatgatctacgtaccgggcgatctgttctccgttaaccatctgaccgcgcaaaacgtccccaacctgtttgcccgcaacgagcgcgttatctgtctgtttgataccgagttcggccctatggcgcagattctggtcggcgcaactattgtcggcagtatcgaaaccgtctgggcggggaccattaccccgccgcgcgaaggcatcatcaagcgctggacctggccagaaggcgaacatgaagggtctgtcgccttgttgaaaggccaggagatggggcgctttaaactgggttccacggttatcaacttatttgcgccggggaaagtgaatctgatcgcgtcgctggcaagcctgtccgttaccaaaattggccaaccgctggcgacgtcgaccgaaacattcgtcgcgccggaggtagaacctgctccgctgccggcagaagaaattaaagccgaacacgacgccagcccgctggttgacaataaaaaagacgacacctaa

SEQ ID NO: 370762 - DNA, 3327 bp, Salmonella enterica
gtgcgcctgattatcgcttttctgatggcctggtgcctcagcacgggggcgtttgccgcaacggcccccgacgccaaacaaatcacgcaggaactggagcaggcaaaagcggcgaagcccgctcagccggaagccgttgaggcgctccagactgcgttaaacgcgcttgaagagcgaaaaggctcgcttgagcgcgcgaaacaatatcaacacgttattgataatttccctaagctatccgccaccttgcgcgcccagttgaataatctgcgcgatgaacctcgcagcgtaccgccagagatgtccaccgaagcgttaaatcaggagatcttgcaggttagcagccagctactggataaaacccgcgaggcgcaacaggagcaggagcgcgtcagggagatcgccgactcgctcagccagcttccccaacagcaaaacgacgcccgccgccagcttaatgagattgagcgacgactcggcgccgcaggcggaagtgccgcgcttagccaggcgcaaagtctcagtatgcaggcggagtccgccaaactaaaagcgttagtcgacgaactggagttggcgcaactgtccgccaacaaccggcaggaactggctcgtctgcgttccgagctggcggaaaaacagagtcagcaattggatgcgtatcttcaggcgctgcgcaatcagctcaacagcctgcgtcaacgtgaagcggaacgcgcgctggaaagcactgagctgctggcggaaaacagcgccggtttgccggaaggtatcgtcgaacaatttaaagtcaaccgcgagctgtcacaggcgcttaatcaacaagcgcagcggatggatctggtcgcctcgcagcagcgacaggccaccagccaaacgttacaggtgcgtcaggcgctcaatacgctgcgggagcagtcgcaatggcttggcgtgtccaacatgcttggcgaagcgctgcgcgcgcaggtcgcccgtctgccagagatgcctaaaccgcagcagcttgatacggaaatggcgcagctacgcgttcaccgtatgcgctatgaagaattactcaataaacagccgcagctacggcaaatacgtcaggccaatggacagccgctgaccgccgagcaaaaccagattcttgacgcccagcttcgcactcagcgcgagctgctcaactctttgttacagggcggcgatacgctgatcctggagctgaccaaactgaaagtctccaacagccaactggaggatgcgcttaaagaggttaatgaagcgacccaccgttatctgttctggaccgctgacgttagcccgctatcgctctcctggcctgttgatttggttcaggatttacgccggcttatctcattagatacgtttaatcagttaggtaaagccagcatcatgatgctgaccagcaaagagacgctactgccgttattcggcgcgctggcgctggtcgggtttagcctctattcacgtcaacacttcaaccggttccttgagcgctcggcctcgcgcgtcgggaaagtcacccaggatcacttctcgctgacgctgcgaacggtgttctggtcgattctggtcgcctcgccgctgccggtcttgtgggcgacgctcggctatggtctacaggaagcctggccgtatccgctggccgtcgccatcggtgatggcgtgacggcgacagtaccgctgttgtgggtagtcatgatttgcgccgcttttgcccgtcctaatggtctgtttgtggcgcatttcggctggccgcgaaaccgggtagcgaaagcgatgcgctactacctgatgagcattgggctgatcgtgccgctcatcatggcagtgatcatgtttgataatcttaacgatcgggagttttccggctcgttgggccgcctttgcttcatcctgatatgcggcgcgctggcgctggtcacgctgagtctgaaaaaagcgggcatcccgctctatcttgataaagaaggcaacggcgacaacatggtcaacagcctgctgtggaatatgctgatgggcgcgccgcttatcgcgattctggcggcggcggtgggttatctggccacggcgcaggcgctactggcgagactggaaacctcggtcgccatctggttcctgttgctggtcatctatcacgtcattcgccgctggatgctgatccaacgacgccgactggcttttgaccgcgccaaacatcgtcgggcggaaatgctggcgcagcgcgcgcgcggcgaagaagaaccggcgcactcctccagcctggaaggcgcggtcgacatcgatgaaagtgaaatcgatcttgacgctattagcgctcagtcgctgcgtctggtccgctcaattctgatgcttatcgccctgctatcggtaattgtactgtggtcggaaatccactcggcattcggcttcctggagaatatttcgctgtgggatgtcacctctacggtgcaaggcgtggaaagcctggagccgattactctgggggcggtgctcattgcgattctggtctttatcatcaccacgcagttggtgcgtaatctgcctgcgctgctggaactggcgttattacagcatctcgatttaacgcctggtaccggttacgccatcacgaccatcaccaaatatctgttaatgctgattggcgggctggtcggtttctcgatgatcggcattgagtggtcgaagctacaatggctggtggccgcgctcggcgttgggcttggttttggcctgcaagaaattttcgctaactttatctccggcctgattattttgtttgaaaagccgattcgtatcggcgatacggtgaccattcgcgatctcaccggcagcgtgaccaaaatcaatacccgcgccaccactatcagtgactgggatcgtaaagagattatcgtgccgaataaagcctttatcaccgaacagtttatcaactggtcgctgtctgactccgttacgcgcgtggtgttaaccatcccggcgccagcggatgccaatagcgaagaggtgacgcaaattctgctgacggcggcgcagcgctgttctttggtgcttgataacccgccgcctgaaatctttctggtggatctccagcagggtattcagattttcgaactgcgtatctatgccgcggaaatgggacaccgtatgccattacgccatgagatccaccaattgattctggcgggcttccgcgagcacggtattgatatgccgttcccgccgttccagatgcgtctggagagcctcggcggtaaacaaacggggagaacgttaacgtcagcgggtaaaaccagccgcccggcggggagtttgtaa

SEQ ID NO: 370763 - DNA, 315 bp, Salmonella enterica
atgagtccgaaaatgtttgcattgtgcgctatctggcttttactggctatcccactcatcgctgtattttcagtcctggataaagagtggatgattggcgagagtgggataaacaacatttgtgatgtgatgagaactgtcgaaaatgatgattccagaggttttggcgcgatgatgacgctgcccctgtttttcccgtttttttacgttactgtgtataagaaaatacgtagttggtttttgtactgtgtcgcgttggtgatatttgcttactggtcctggcaattcttcctgcgctatcagttttgtgtgtga

SEQ ID NO: 370764 - DNA, 1503 bp, Salmonella enterica
atgacccacacgataaaaaagatgagccttattgggcttatcctgatgatttttacttctgtttttggttttgcgaatagcccgtcggcgttttatttaatggggtatagcgcaatcccgtggtatatattttctgccttgctgttttttattccattcgccttaatgatggctgaaatgggttccgcttatcgcaaagaagagggcgggatctattcgtggatgaataatagcgtggggccacgttacgcgtttattggcacgtttatgtggttttcatcgtatgtcatatggatggtaagtacggcggcaaaaatttgggtaccgttttctacttttgtttttggcgccgatatgacgcagcactggcgtattgcagggcttgagcctacgcaggttgtcgggctgctcgccgtcggctggatgattctggtgacgtgtgtcgccgccagagggatcaataaaattgcgcgaattacggcggtcggaggtattgccgtaatgtgtcttaatttagttttattgttagtgagtgtcgctattttgttattaaatggtgggcattttgcacaagaaattaattttacctcgtcaccgaatccgggttatcactccggcctggcaatgttgtcatttgtggtatttgctatttttgcgtacggcggtattgaggctgtcggcggactggtggataaaaccgagaaaccggaaaagaattttgcgaaaggtattgttttcgcggctattgtgatttcaattggttattctttggcgatctttttatggggcgtcagcactaactggcaacagatattaagtaatagcgccgttaacttagggaatattacctacattttgatgtcgagtttaggcacgacattaggtaacgcgttaaacctttctccggacgcagcgatgacggtgggcgtctggtttgcgcgtatcaccggcctttctatgtttctggcttataccggcgcgttttttacgttgagctattcaccgctgaaagccattattcaggggacgccaaaagcgttgtggcccgcgccgatgacgacactgaacgctaacggtatgccggcgaccgctatgtggctacagtgcgtgctggtgagtctgtttattttgctggtctcttttggcggtgacaccgcatcggcgttttataacaaactcacgctgatggcgaacgtctcaatgaccttgccatacctgttccttgcgctggcatttcccttctttaaagcgcgtcaggatctggagcggccatttgttctctttaaaaccaaagcctctaccctggtcgcgacgggtgttgtggtgctggtggtgacgtttgccaacgtctttaccatcatccagccggtgattgaagctggggattgggacagcgccttgtggatgatcggtgggccgatcttcttctcgctgctggcgatggcgatttatcagaattacagcagccgcatgagcgctgatccggagtgggcggcggagtaa

SEQ ID NO: 370765 - DNA, 978 bp, Salmonella enterica
atgagcgaaacggcaacctggcagccgagcgcgtccatccccaatttattaaaacgtgcggcgattatggcggaaatccgtcgtttctttgccgatcgtggagtgcttgaggttgagacgccctgcatgagtcaggcgacggtcacagacattcatctgttcccgttcgaaacgcgtttcgtcggacctggccattcccaggggatcaacctctatttaatgaccagtccggaataccatatgaaacgcctgctggcggcagggtgcggcccggttttccagctatgccgcagtttccgtaatgaagagatgggacgacatcataatccggaattcactatgctggagtggtatcgcccgcattacgatatgtaccgcctgatgaatgaagtggatgatttgcttcagcaagtgctggattgtcaacctgcggaaagtctctcctatcaacaggcgtttcagcgccatctggagattgacccgttatcagcagataaaacgcaactgcgtgaggcggcggcaaagcttgatttaagcaatatcgccgatacggaagaagaccgtgatacgttgctgcaactgttgttcacgatgggggttgagccgcatataggtaaagaaaagccgacctttatttatcactttccggcaagtcaggcatcgctggcacaaatcagtaccgaggatcatcgcgtcgccgagcgctttgaggtgtactacaaaggtattgagctggcgaatggtttccacgaactgacggacgcacgtgagcaacaacagcgctttgaacaggacaatcgtaagcgcgccgctcgcggtctgccgcagcagccgattgaccaaaatctactggatgcgctggccgccggtctaccggattgttccggcgtggcgctgggtgttgatcgtctggtgatgctggcgctgggagcagaaagcctggcggacgtgattgcttttacggtcgatcgggcgtaa

SEQ ID NO: 370766 - DNA, 1791 bp, Salmonella enterica
gtgcaaacctttcaagccgatcttgccattataggcgccggtggcgcgggattacgtgctgcaattgctgccgcacaggcgaatcccaatgctaaaatcgcactgatctcaaaagtgtacccgatgcgcagccacaccgtcgctgccgaagggggttcagccgctgtcgcccaggatcatgacagctttgactaccattttcacgatacggtagcaggcggagactggctgtgtgagcaggatgtcgtggattactttgtccaccattgtcccactgagatgacgcagctggagcaatggggctgcccgtggagccgccgtccggacggtagcgttaacgtgcgtcgcttcggtggtatgaaaatcgagcgtacctggttcgccgcggataaaaccggcttccatatgctgcataccctgttccagacttccctgcagttcccacaaatccagcgctttgacgaacatttcgtgctggatattctggttgatgacaaccatgcgcgcggcctggtggcaatgaacatgatggaaggcacgctggtgcaaatccgcgccaacgccgtggtcatggcgacaggcggcgcaggccgcgtataccgctataacaccaacggcggcatcgtcaccggcgacgggatgggcatggcgctgagccacggcgttccgctgcgtgatatggaattcgttcagtatcacccgaccggcctgccaggttccggtatcctgatgactgaaggttgccgcggcgaaggcggtattctggtcaataaaaatggctaccgttacctgcaagactacggcatgggccccgaaacgccgctgggcgagccgaaaaacaaatatatggaactggggccgcgcgacaaagtatcccaggctttctggcacgaatggcgtaaaggcaacaccatctccacgccgcgcggcgatgtggttcacctcgatctgcgtcatctcggcgagaagaaactgcatgaacgtctgccgttcatttgcgaactggcgaaagcctatgtcggcgtcgatccggttaaagaaccgattccagtacgtccgaccgcgcactacaccatgggcggcattgaaaccgaccagaactgtgaaagccgtgtcaaagggctgtttgccgttggcgaatgctcctctgttggcctgcatggcgcgaaccgcctcggttccaactcgctggcggaactggtggtgtttggtcgtctggctggcgaacaagcaatggaacgcgctgctacggcaggcgccgcaaatagcgccgcgctcgacgcccaggttgccgatattgaacagcgtctgaaaaatctggtgaaccaggaaggcaacgaaaactggtcgaagatccgcgatgagatgggtctgtctatggaagaaggttgcggtatttaccgtaccccggaactgatgcagaaaaccgttgataaactggccgagcttcaggaacgtttcaagcgcgtacgtatctccgatacttccagcgtgttcaacactgacctgctgtataccatcgaactgggtcatggtctgaacgtggcggaatgtatggcgcactctgcgctggcgcgtaaagagtcccgcggcgcgcatcagcgtctggatgaaggctgtaccgagcgcgacgatgtgaacttcctcaagcacaccctcgccttccgcgatgctgatggcacgacccgtctggaatacagcgacgtgaaaatcaccaccctgccgccagccaaacgtgtttacggcggtgaagcggaagcagccgataagaaggagaaggcgaatggctga

SEQ ID NO: 370767 - DNA, 735 bp, Salmonella enterica
atggctgagatgaaaaacctgaaagttgaggtggtgcgctataacccggaaaccgataccgcgccgcacagtgctttctatgaagttccttatgatgaaacaacatcgctactggacgcgttgggctacatcaaagataacctgtcgccagacctgagctaccgctggtcctgccgtatggcgatctgcggctcttgcggcatgatggtcaacaacgtccctaaactggcgtgtaaaaccttcctgcgcgattacaccaacggtatgaaggtggaagcgctggcgaacttcccgattgagcgcgatctggttgtcgatatgacgcactttatcgaaagcctggaagcgatcaaaccgtacattattggcaactctcgcacgccagatcaggggccgaatgtccagaccccggcgcaaatggcgaagtatcaccagttctccggttgcatcaactgtggtctgtgctacgccgcgtgcccgcagttcggtctgaatcctgagtttatcggaccggctgcgattacgctggcgcatcgctataacgaagatagccgcgatcacggtaagaaggagcgtatggcgcagttgaacagtccgaacggcgtatggacctgtactttcgtgggctactgctccgaagtctgtccaaaacatgtcgatccggctgcggccattcagcagggtaaagtggaaagctcgaaagactttcttatcgccaccctgaaaccacgctaa

SEQ ID NO: 370768 - DNA, 396 bp, Salmonella enterica
atgacgactaaacgcaaaccctatgtgcggccgatgacgtccacctggtggaaaaaactgccgttttatcgcttttatatgctgcgcgaaggcacagcggtgccggcagtctggttcagtattgaactgattttcggtctgtttgcgctcaaacacggcgcggaatcctggatgggattcgtcggctttttacaaaacccggtggtagtgatcttaaacctgatcaccctggcggccgcgctgctgcacaccaaaacctggtttgaactggcgccgaaggcggccaatatcattgtaaaagacgaaaaaatggggccagagccaatcatcaaagggctttgggtggtcactgcggtagtcaccgtagtcattctgtatgttgccctgttctggtaa

SEQ ID NO: 370769 - DNA, 360 bp, Salmonella enterica
atgattaatccaaacccaaaacgttctgatgaacccgtattctggggactgtttggcgcaggcggtatgtggggcgcgatcatcgcgccggtgatcgtgctactggttggcatcatgctgccgctggggctatttccgggcgatgccctgagttttgagcgcgtactgacgttcgcccaaagctttattggtcgcgtttttctgttcctgatgatcgtgctgccgctatggtgtggcctacaccgtatgcaccacgcgatgcatgacctgaaaatccacgtgcccgcgggcaaatgggtcttttacggtctggcggcaatcctgaccgttgtgacggcaattggcgttatcactctctaa

SEQ ID NO: 370770 - DNA, 534 bp, Salmonella enterica
atgcgcattctgcccgtcgttgctgcagttacggctgcatttctggttgtcgcctgtagttcgcctactccgcctaaaggcgttaccgtggtaaataactttgatgccaaacgttacctcggcacctggtatgagatcgcacgcctcgatcatcgatttgaacgtggactggaacaagtcacggccacctatagtctgcgtgacgatggcgggattaatgtcatcaataaaggctataacccggatcggggaatgtggcaaaaaacagaaggcaaagcgtattttaccggtagtccaaaccgcgccgcgctcaaggtctcttttttcggcccgttctacggcggctataacgtgattgcgcttgaccgggaataccgtcatgcgctggtgtgcggcccggatcgcgactatctgtggatactctctcgcacgccaacgctttctgaggaaataaaacagcaaatgctggccgtcgcgacccgggaggggtttgacgtcaataaattaatttgggtaaaacaatcaggttcgtag

SEQ ID NO: 370771 - DNA, 318 bp, Salmonella enterica
atgtcctggagcattctattaatcgctggtttacttgaagtggtatgggctgtcggcctgaagtatacccacggtttttctcgtctgacccccagtattatcaccattacggccatggttatcagtatggcgttactttcctgggcaatgaaaacgctgcctgttggaacggcgtacgccatctggaccggcatcggcgccgttggggcggcaatcaccggtatccttctgctgggcgagtctgcctcaccggcgcgtttgctcagtcttggcttgatcgtcgcgggtatcattgggctaaaactcagtgcgcattaa

SEQ ID NO: 370772 - DNA, 588 bp, Salmonella enterica
atgttgaaaattttagtgatagaccgatgccactttacccgtacgggcatggaggcctggcttaatcacactgatgtgctcagttcttcactgctggtatccgggatgaataaccttatactggcgaaagaacatattctgcaatggaagccccacctggttatcgctgatttatatggttttctcaacgatgccttacccgaacagcctatcaatgcattttttgccgcctgcaggatgacgccgttggtattattacagtcagggaatatgccgtacagaccgcaatatgccagtcatgcggtgttatctaaacacacgcctttacatgagcttgcacaacgaattaaaggagcgctacatactcatccactgcaggaagcgccggaaagcgccacgccattgctctctccgcaggaggaaaaagtgctcgcgatgtggacggaaggcaccagcaataaagagattgcgtatgcgcttggcattcacgggaaaacggtttacacctataagcgtaatatccgtatgaaacttcatatggataatcggtattctccctttcttatgcttccggagaaaatcgattaa

SEQ ID NO: 370773 - DNA, 174 bp, Salmonella enterica
gtgcagcgtatgctgcgccatcctttttttcgcgcctcaatgatgaaacgctttatcagccttgtcgcgctggttcttcttaccagcacattattaacggcatgtaataccgcccgcggcttcggcgaagatattcagcatcttggccacgccatctcccgcgcagccagctaa

SEQ ID NO: 370774 - DNA, 567 bp, Salmonella enterica
atggcgacttactatagcaacgattttcgttccggtcttaaaatcatgttggatggcgaaccttatgcggttgaatccagtgaattcgtgaaaccgggtaaaggccaggcgtttgcccgcgttaagctgcgccgtctgctgaccggcacgcgcgttgagaaaaccttcaaatcgaccgattccgctgaaggcgcggatgtagtcgatatgaacctgacttacctgtacaacgacggtgagttctggcatttcatgaacaacgaaaccttcgagcagctgtctgcagatgccaaggctatcggcgacaacgcaaaatggctgttggatcaggcggaatgcatcgtaaccctgtggaacggtcagcctatctctgtcactccgccgaactttgttgaactggaaattgttgataccgacccaggtctgaagggcgataccgcaggtactggcggcaaaccagccacgctgtctactggcgcagtggttaaagttccgctgttcgtgcagattggcgaagtgatcaaagtcgatacccgttccggcgaatacgtatcccgcgtaaaataa

SEQ ID NO: 370775 - DNA, 1029 bp, Salmonella enterica
atggcgcatattgtaaccctaaataccccattgcgagaagattggttagcgcaacttgccgatgttgtgaccaatcccgacgaactgctgcatcttttacagattgaagctgatgaaaacctccgggcaggacaggacgccaggcgcttgtttgccctccgcgtgccgcgcgcttttattgcgcgcatggagaagggcaaccctgacgatcctcttttacgtcaagtactgacgtcccgggatgaatttattgtcgcccccggtttctccaccgacccgctggaagagcaacacagcgtggtgccaggattattgcataaataccaaaaccgggcgctattgctggtaaaaggcggatgtgcggtaaattgccgctactgtttccgtcgtcacttcccgtatgcggagaatcaaggcaataagcgcaactggacagtcgcgctggagtatatcgccgcacacccggaactggatgagatcatcttttccggcggcgatccgctgatggcgaaagatcatgagctggactggctgctcacgcaactggaagccattaagcacgtcaagcggctacgcatccacagtcggttgcctatcgtcatcccggcacgcattactgacgaactggtcgcccgctttgaccagtcacgtctgcaaattttgttggtgaaccatatcaaccacgctaatgaagtggacgaggcgttctgcctggcgatgaagaaactgcgccacgtgggcgtcacgcttctcaaccagagtgtcctgctgcgtggcgtgaatgataacgcgcgaacgctggcgaatctgagcaacgcgctatttgacgctggcgtgatgccctattacctgcatgtgctggataaagtgcagggcgccgcgcattttatggtcaccgatgacgaagcccggcaaatcatgcgcgaactgctcacgctggtatccggctatatggtgccaagactggcgcgtgaaatcggcggcgaaccgagcaaaacaccgctggatttacagcttcggcagtgctaa

SEQ ID NO: 370776 - DNA, 858 bp, Salmonella enterica
atggccttaacgattaagggactaaataccggcgttattcgtcacaatgataagtttatcgcgctggcgcttaaggtgaagtcactgagaaataaagaaacactgcttttctttcctgtactcgcgctgcgagacttgttgatcggccttgaacaccggctttatttacaacactcgcttccggaacaagagcaggaaaaacgccagaaagccaaaagcagtcatgtgcttaaaatgcatgagaatattccggcaatactccgtgaagagctggaaaacgccgatgttaatcagcgtgttgaatctttagcgttgagcgataatacagaaaaagtattaacttttacgttaaagctgcacaatggtagccatcttgatttacaggtcggtgagtggcaggttgaagttctggtgatggctattattcacgccattaataatgccgaaatgcgtgagctcgcattgcgtatttcttcaatgctggactttttaccattatacgatgctgactgcctggaaaacggtaatatcgaattcgatacctataaccagcctgactggaaacataatctgtataaccattatttagcgctcgtttatcgttatacggatgaggcaggacaatcgcatgattgcggcaccatcattaagacccgtagtcagtcaggctctaaagaagctgaagcaatatcacgccgcttgctgaatttcagcccgcgtcttaaaaagctggaaggaaaaccgtgtaaggtttttgtcagaacgcttggaaccggtaaagcagcgcgtctgacgcaagatcaatgcatgcgcgcgttgcataatctacgcatggcatcatcgcagggaaaacgctaa

SEQ ID NO: 370777 - DNA, 354 bp, Salmonella enterica
atgcacgtgaaatatttagcagggatcgttggcgccgcgctgctgatggcgggttgtagctccagcaacgaactcaccgctgccggccaaaatgtacgctttgtcgaagataagccaggcgcggaatgccagctaattggtacggcaaccggtaaacagagtaactggttttcaggccagcacggcgaagagggtggctcaatgcgtggcgcagcgaacgatctgcgtaatcaggcagccgcgatgggtggaaacgtgctgtatggcgtaagtagtccgtcacagggcatgttgtccagttttgtcccgacggccagcgagatgaacggccaggtttataaatgtccgaattga

SEQ ID NO: 370778 - DNA, 1647 bp, Salmonella enterica
atggcagctaaagacgtaaaattcggtaacgacgctcgtgtgaaaatgctgcgcggcgtaaacgtactggcagatgcagtgaaagtaaccctgggtccgaaaggccgtaacgtggttctggataaatctttcggtgcgccgactatcactaaagatggtgtttccgtagcgcgtgaaatcgaactggaagacaagtttgaaaacatgggcgcgcagatggtgaaagaagttgcctctaaagcgaacgacgctgcaggcgacggtaccaccaccgcgaccgtactggcgcagtccatcattaccgaaggcctgaaagccgttgctgcgggcatgaacccgatggacctgaaacgtggtatcgacaaagcggttgctgctgcggttgaagagctgaaggcgctgtccgtaccgtgctccgactctaaagcgattgctcaggtaggtactatctccgctaactccgacgaaaccgtaggtaaactgatcgcggaagcgatggataaagtcggtaaagaaggcgtcatcaccgttgaagacggtaccggtctgcaggatgaactggacgtggttgaaggtatgcagtttgaccgcggctacctgtctccttacttcatcaacaagccggaaactggcgcagtagagctggaaagcccgttcatcctgctggctgataagaaaatctccaacatccgcgaaatgctgccggttctggaagccgttgcaaaagcaggcaaaccgctgctgatcatcgctgaagatgttgaaggcgaagcgctggctaccctggttgttaacaccatgcgtggcatcgtgaaagtggctgctgttaaggcaccgggcttcggcgatcgtcgtaaggcgatgctgcaggatatcgctaccctgaccggcggtaccgtaatctctgaagagatcggtatggagctggaaaaagcaaccctggaagacctgggtcaggcgaaacgcgttgtgatcaacaaagacaccaccaccatcattgatggcgtgggtgaagaagctgccatccagggccgtgttgctcagattcgtcagcagattgaagaagcgacctccgactacgatcgtgaaaaactgcaggagcgcgtagcgaaactggcaggcggcgttgcggttatcaaagttggcgctgcgaccgaagttgaaatgaaagagaagaaagcccgcgttgaagatgccctgcacgcgacccgtgctgcggtagaagaaggcgtggttgctggtggtggcgttgcgctgatccgcgttgcttctaaaattgctgacctgaaaggccagaacgaagaccagaacgtgggtatcaaagttgcgctgcgcgcaatggaagctccgctgcgtcagatcgtgctgaactgcggcgaagagccgtctgttgtcgctaacaccgttaaaggcggcgacggtaactacggttacaacgcagcaactgaagaatacggcaacatgatcgatatgggtatcctggacccaaccaaagttacccgttctgcgctgcagtacgcggcttctgtggctggtctgatgatcactaccgagtgcatggtgaccgacctgccgaaaagcgatgctcctgatttaggcgctgctggtggcatgggtggtatgggtggtatgggcggcatgatgtaa

SEQ ID NO: 370779 - DNA, 294 bp, Salmonella enterica
atgagtattcgtccgttacatgatcgtgtgatcgtcaaacgtaaagaagttgagtccaaatctgctggcggcatcgtactgaccggttccgcagcgggtaaatcaactcgtggcgaaatcatcgctgtcggtaagggtcgcatcctggacaacggtactgtacagccgctggacgtgaaagttggcgacatcgttatttttaacgatggctacggtgtgaaatctgaaaagatcgacaatgaagaagtgttgatcatgtctgaaagcgacattctggcaattgttgaagcgtaa

SEQ ID NO: 370780 - DNA, 1263 bp, Salmonella enterica
atgccgccggataatgagctgatgaatgaactaaaaaaagagcttgggttggttcagggcgttatcttgttaaccacatcattattagggactggcgtttttgcgcttccggagctggctgcgctggcggcaggcgacatcagcctttgggcatggccgctgctcattattttgattttccctattgcgattgtctttgctgtgctggggcgccattttccacacgctggcggcgtagcgcattttgtcgggatggcatttggcccgcgtctgcaacgggtgatcagttggctgtttttatcagtcattcctgttagttttcccgcagccttgcatattgcggtgggtttcggccaggcgctgtttggctggcaaagcgaacagctcttatttggggagctgggtactctaggtttgctatggtttatgggatcgcgcggcgccagctccagcgccaacctgcaagccattatcgctggattaattatcgcgcttattgccgccattctgtggaaaggcgcgattaaacctgcggatatcaccttcccagccgcaaacgaaatcaccttttcccggctgtgtaccgccctggcgatcatgttctggggatttgtgggaattgaggcgtttacgcatttgtcgtctgaatttaaaaatcctgaacgtgattttccgcgcgcattgatcattggcctgatgctggccggctccatttattggacctgtaccgccgtggtgctgcattttggcgtctatagcgacaagatagcggcaacagcatcgctaccgcttattattgttcatctcttcggtatccaggcgttgtggatagcctgcattattggttatctcacctgctttgccagcctgaatgtgtatgctcagagttttgcgcgtctgatatggacgcaaatgcaatatcagcccgatcactatctggctcaactctctcccgggcgccttcccttgcacgcgttaaacgttattctggcctgttgttgcgtgagttccctggtcgtctacgccctgaagattaacctcaatgcgctgatcgtctatgctaacggtatttttattatgctctatctgctttgtatgctggcgggctgtcgactattgaaagggcgctgctatgcactggcggtgacgggttgtctactgtgcctgttattgctggtaatgctggggtggaaaagcttatatgccattatcatgctggcagcattatggctgtttttaccgaagcgaaaacgcatggcgtaa

SEQ ID NO: 370781 - DNA, 516 bp, Salmonella enterica
atggtcgtcgcagacggccatgacttacaggagagtcctttgcgctggataccctttttagctgtctttctctatgtttacattgagatttctatctttatccaggtcgcccatgtgcttggcgtcctgatgacgttaatcctggtgatttttacgtctgttatcggtatgtcgctggtacgtaaccagggttttaaaaactttttgctgatgcaacaaaaaatggcggccggtgagagcccggcggcagaaatgattaagagtgtatcgctgatcatcgctggcttactgctcctgttgccgggatttttcaccgattttctcggccttctccttttgttaccgccagtgcaaaaacatttgacgctgaagttgctgccgcatttacgtttttcccggatgccgggcggcgggtttagcgcgggtactggcggtggcgaaacatttgacggcgagtatcagcgtaaagatgacgatcgcgatcgtattgaacataaagacgatcgtcgggattaa

SEQ ID NO: 370782 - DNA, 1437 bp, Salmonella enterica
atgtcaaacaacattcgtatcgaagaagatctgttgggtaccagggaagttccagctgaagcctactatggtgttcacactctgagagcgattgaaaacttctacattagcaataacaaaatcagcgacatccctgaatttgtgcgtggcatggttatggtaaaaaaagcggcggcgctggccaacaaagagctgcaaaccattcctaagagtgtggcgaatgccatcattgccgcatgtgatgaagtccttaacaacggtaagtgcatggaccagttcccggtagatgtctaccagggcggcgcgggcacttccgtcaacatgaataccaacgaagtgctggccaacatcgggctggaactgatgggtcatcagaaaggtgaatatcagtacctgaacccgaacgaccacgtgaataaatgtcaatccactaacgacgcctatccgacaggcttccgtgtagcggtttacgcctctatcgtcaaactgatcgatgccatcaaccagttgcgtgaaggtttcgaacgtaaagcggttgaattccaggacatcctgaaaatgggtcgtacccagttgcaggacgccgtaccgatgacgcttggtcaagaattccgtgcgttcagcatcctgctgaaagaagaagtgaaaagcatcgagcgtactgctgagctgctgctggaagtcaaccttggcgcaacggcaatcggtactggtctgaacacgccgaaagaatactctccgctggcggtgaaaaaactggctgaagtcactggtttcgcctgtgttccggctgaagatctgattgaggcgacatctgactgtggcgcgtatgttatggttcacagcgcgctgaaacgtctggcagtgaagatgtccaaaatctgtaacgacctgcgcttgctctcttctggtcctcgtgccggcctgaacgagatcaacctgccggaactgcaggcgggctcttccatcatgccagccaaagtgaacccggttgtaccggaagtcgtaaaccaggtatgctttaaagtcatcggtaacgacaccaccgttacgatggcggcggaagccggtcagttgcagttgaacgttatggagccggttatcggtcaggcgatgttcgaatccatccacattctgagcaacgcgtgctacaacctgctggaaaaatgcgttaacggcattaccgcgaataaagaagtgtgcgaagggtacgtttataactccatcggtatcgtcacttacctcaacccgttcatcggccaccacaacggcgacatcgtcggtaaaatctgtgctgaaaccggtaagagcgtacgtgaagttgtgctggagcgcggcctgttaacggaagccgagctggacgatattttctccgtacagaacttgatgcacccggcttataaagctaaacgttatactgatgaaagcgaacagtaa

SEQ ID NO: 370783 - DNA, 1302 bp, Salmonella enterica
atgatagttgtcgaacttatcattgttttgctggcaatctttttgggcgccagacttgggggcatcggtattggattcgcaggtgggctgggtgttctggtacttgccgccatcggcgtgaagccagggacaattccattcgatgtcatttccatcatcatggcggttatcgccgcgatctctgctatgcaggtcgcgggcggtctggattatttggtaaaccagacggaaaaactgctgcgtaagaacccgaaatacatcactatcctcgcaccgattgtgacctatttcctgactatttttgctggtaccgggaacatttccctggcaacgctgccggttattgctgaagtcgcgaaggagcagggaatcaaaccttgccgtccgctctcgaccgccgtggtatccgcgcagattgcgattaccgcctcgccgatttctgcggccgtggtgtatatgtcttctgttatggaaggtcatggcattagctacattcacctgctgtccgtggttatcccctctacgctgctggcggtgctggtgatgtccttcctggtcacgatgctgttcaactccaaactgtcggacgacccgatttaccgcaagcgtctggaagaagggctgattgaactgcgtggtgaaaagcagattgaaatcaaaccgatggcaaaaaattccgtctggctgttcctgctgggcgttatttgcgtggttgtttatgcgattgttaacagtccgagcctcggcctggttgagaaaccgctgatgaacaccaccaacgctattttgatcatcatgttgagcgtcgcaacgctgaccaccatcctgtgtaaagtggaaactgacgccatcctcaactccagtacctttaaagcagggatgagcgcctgtatctgtattctgggcgtggcgtggctgggcgatactttcgtatccgctaacatcgactggatcaaagacactgcgggtagcgtcatccaggggcatccgtggctgctggccgtcatcttcttctttgcttccgcgctgctctactctcaggcggcaacggcgaaagcgctgatgccgatggcgctggcgctgaacgtctctccgctgacggcagtcgcttccttcgccgccgtttccggcctgttcattttgccgacctacccgactctggttgcggcggtacagatggatgacaccggtacaacccgtatcggtaaattcgtctttaaccacccgttcttcatcccaggcaccctgggcgtcgttctggctgtctgcttcggcttcctgctgggcagctttatgctgtaa

SEQ ID NO: 370784 - DNA, 348 bp, Salmonella enterica
atgcttgatgttaagagtcaggatatttccatccccgaggccgttgtggtgctttgtaccgccccggatgaagctaccgcccaggatctggccgccaaagtgctggcggaaaaactggccgcctgcgccaccctcctccccggcgcgacatcgctgtactactgggaaggcaaactggagcaggagtatgaagttcaaatgatcttaaaaaccaccgtttcacatcagcaagcgcttatcgactgcctgaagtctcatcacccgtatcaaacgcctgaacttctggttttacctgttactcacggagatactgattacctctcatggctcaacgcatctttacgctga

SEQ ID NO: 370785 - DNA, 1704 bp, Salmonella enterica
atggctcaacgcatctttacgctgatcctgctgctgtgcagcacatccgccttcgccggattattcgacgcgccgggtcgctcgcagttcgtccctgccgaccgggcgtttgtttttgattttcagcaaaatcaacacgatcttaccctctcttggcaggtaaaagagggttactacctttaccgtaaacaaatcagtatcacgccgacgaaagcggatatcgcagcagtccaactcccggcaggcgtctggcatgaagatgagttctacgggaaaagcgaaatctaccgtaagcggctaaacgttccggtaacggttaaccaggcggcggctggcgcgacattaacgataacgtaccaggggtgcgccgatgcgggattctgttatccgccggaaacgaaaacggtgccgctaagtgaagtcgccgcggcaatagacgccacgccgacgcctgctgtcacccagacgagtgagacgtcaaaacccgccgcccagctacctttttccgcgctctgggcactgctgatcggcataggcatcgcctttacgccctgcgttttacccatgtatccgctgatttccggtattgtcctggggggaaggcaacgtttgtcgacggggcgcgcactgctgctggcctttatctatgtacaagggatggcgctgacctataccgcactgggtctggtcgtcgccgcagcgggattacagtttcaggcggcgctgcagcacccttatgtgttaatcggccttgccatcgtgttcaccctgcttgcgttgtcgatgtttggcctgttcacactacagctcccctcctcactgcaaacccggctgacattaatgagtaatcgtcagcaaggcggctcgcccggcggtgtttttgttatgggggcgattgccggattaatttgctcgccctgcactacagcgccgttaagcgcgattctgctttatatcgctcagagcggcaacatgtggctgggcggcggcacgctgtatttgtatgcattaggtatgggtctgccgctaatgctggtcaccgtgtttggcaaccgcctgttaccgaaaagcggcccgtggatggcgcatgttaaaaccgcttttggtttcgtgatcctcgcgttaccggtctttttactggagcggattattggcgaggcttggggtttacgtctgtggtcgctgctgggcgtcgctttctttggttgggcctttatcaccagccttcaggccagacgagcgtggatgcgtatcgtacagattatcctgctggcggcagcgctcattagcgtgcggcctctacaggattgggcgttcggatcgccatccgcgcaagctccagcgcacctcaatttcacggctatttctaccgtggacgaactcaatcaggcgctggcgcaggccaaaggcaaacccgttatgctggatttctacgccgactggtgcgtggcctgtaaagagtttgaaaagtataccttcagcgatccgcgggtccagcaggcgctcggcgacacggtgctcttgcaggctaacgtcaccgctaacaatgcgcaggatgtcgcgctgttaaagcatctgcaagtcctcgggctgcccaccattctgttctttaatgcccaaggccaggaacagccgcaatcgcgagtcaccggctttatggacgccgccacctttagcgcgcatttgcacgatcgccaaccgtga

SEQ ID NO: 370786 - DNA, 576 bp, Salmonella enterica
gtgcaacgtgaagatattctgggagaagccctgaaattactggagacgcaagggatagccgatactacgctggaaatggtggcggagcgcgtaaatcgcccactcgacacattacagcgtttctggccagataaagaagccattttatatgacgcgctacgttatctgagtcagcaggtagatatctggcgacgccagcttcttcttgatgagacgctttctgctgaacaaaagctactggcacgctacagcgcgctttcggaatgtgtcagtaataaccgttatcctggttgcttgttcattgccgcctgtacgttttatcccgacccaacccatcctattcaccaactggccaatcaacaaaaacgcgcggcacatgattttacccatgagctactgaccacgctggaaattgacgatccggcgatggtcgcaaggcagatggagctcgtgctggaaggttgtctcagccgaatgctggtcaaccgcagtcaggctgatgtagataccgctcagcggttggcggaagatattctgcgttttgcacagtgccgtcagggtggcgcgctcacctga

SEQ ID NO: 370787 - DNA, 753 bp, Salmonella enterica
atgaaaagtcgttatttagtattttttctaccactgatcgtagctaaatatacatcagcagaaacagtgcaaccctttcattctcctgaagaatcagtgaacagtcagttctacttaccaccaccgccaggtaatgatgatccggctttccgctatgataaggaggcttattttaagggctatgcgataaagagttccccgcgatggaaacaagctgctgaggatgcagatgtaagcgtggaaaatatagccagaatattctcgccagtagtgggtgctaaaattaatcccaaagatacgccagaaacctggaatatgttacagaatcttctgacaatgggcggctactacgctactgcttcggcaaaaaaatattatatgcgcactcgtccctttgtcttatttaatcattccacctgccgtcctgaagatgagaatactttgcgaaaagatggctcttacccttccgggcatactgcttatggtacacttctggcattagtattatccgaggccagaccggaacgcgcgcaggagctcgccagacgaggatgggagttcgggcaaagcagagtgatatgcggtgctcactggcaaagcgatgttgatgctggtcgttatgtgggagcagtagagtttgcaagactgcaaacaatcccggcatttcagaagtcactggcaaaagtccgtgaggagctgaacgacaaaaataatttattgagtaaagaagatcaccccgaacttaattactga

SEQ ID NO: 370788 - DNA, 492 bp, Salmonella enterica
atgatctccacccctgagccgcttcatgccggacatattcttactccgttttgctgcggtgtggattctatagataactggctgaaacagcgggcgatgaaaaatcagaccactggcgcgtcccgtacctttgtgtgttgtggcagcgattcgaacgtactggcctattactcgctggcgtccagcgcggtcacgacgaatacctcccccggtcgctttcgtcgcaatatgcctgacccgattccggttgtggtattggggcgtctggcggtggataaatcgcttcatgggcagggcgtcgctcgggcgctggtacgcgacgcagggctgcgggttattcaggtggcggagactatcggcattcgtgggatgctggttcacgccctgtcggatgaagcgcgggaattttatcagcgggtggggtttgtaccgtcgccgatggatccgatgatgttgatggtgacgttgggggatttggtggagagtgtttaa

SEQ ID NO: 370789 - DNA, 294 bp, Salmonella enterica
atgccagccgcaaacagtatggcgatgaaacgcgaaaccctgaacctgcgtatcaaacccgccgagcgcgatcttattgatcgagcggcgaaagccagagggaaaaaccgcactgactttgtgctggaagctgcccgtgctgccgccgaggaagcgctgatcgaacaacgcatcattatggccgatccagaggcttatcaggagtttctcgttcgtttggatcaaacaccttcacctaatgccgcactgcgtaaaaccatgcagacccctgcgccgtgggagcaggaaaaatga

SEQ ID NO: 370790 - DNA, 876 bp, Salmonella enterica
atgctaaaagtatttaatccctcacctgtccaggtggggagcattgaatgtttacaatcagcgcaaaactggcagaggaaatccttatcacttcagggattaaatttactgcagtccgtactcatcaagctcaccacgggtaaaatttcaattacgacatcgtccggggagtatattacggcatcagggccaatgttaatatttttagctaaagatcaaactattcatatcactatggaagagactcatgaacagttaaattataatttaattgaattagattctgcgtcaataaaaaatgcttataatttttttctgtatgaacatgcagacttttcggccccattaacaaaaccgacgacaaaacatctgttagcgccaatagaaacaggcgtagcaagagtattcaaccttttacactcttcaaataaaagccagaaattatcccaagataaaaaggaatatttaataagatttctactttcagagttcatctatgaacctgaagcatttgccctctttagagaactatcgcaaaatacattagccgaaaatatctataatattattataagcgacataagtcgaaaatgggcgctcaaggatatttctgactcactctatatgagttgttccacattaaaaaggaaattgaaacaagagaacacctcattcagcgaagtttaccttaatgcgcgaatgaataaagcgacaaaacttctacgcaatagtgaatataatattactcgagtggcttatatgtgtggttatgatagtgcttcttattttacatgcgtttttaaaaaacatttcaaaactacaccatcggaatttttagcgtttttatcttcctctcgtcatcaatatgttaattga

SEQ ID NO: 370791 - DNA, 273 bp, Salmonella enterica
atgcagtataagaacaaagcaaaacatattaatataaaagacgggattctgttgctcgctaaaaaattcgacctaacattgagcgaaaaaaaagttatttattacgtggcagcaggattatctgttaaaagttgctcaaatttattagatcgaaatataaaaacgatttcaacacaaaagagatcagcctataaaaaaatggatattactactgatgttgaattaatccatttgatgctgaatgagttttatatatcagtcgatattacgtaa

SEQ ID NO: 370792 - DNA, 183 bp, Salmonella enterica
atgggtattatcggtacatcaggttcaggtaaatcttctttaatcaaagcactatcaaattccagtcattgctatacgggaacagttaaattaaacaacgtagatatcacaccgatctctgaagatgatatccagagttgccttgcctaccactctaccaacattctaggaaaaattacgtaa

SEQ ID NO: 370793 - DNA, 336 bp, Salmonella enterica
atggataattcttcgctgtctatcggctggctgacgatagactctacaccgccagtacgttccatgaaggataatagtgatattggcgccagaggcgataatatcactaacatcaatacaccgaccttcatcggctcctcagaagctcacgcaacaattaagctgactattgatacacaaccgtccgccgaaccaacgttgggatcgactgttaacagtctggataacaccgtcacccttaagggagtcgtggaggcgcatcaggatattcaggtgaaggtcacggtcaacgatacggactacaccgccagtatcgataacgatatcagtaactga

SEQ ID NO: 370794 - DNA, 861 bp, Salmonella enterica
atgagattactaaaacgcgttattgtggttgtactcttgggcgtgattttatttatggtcagggacgatatacgctatgtttatcaactgatcctcaaatatggtgataaaccctcggcgctagcactgagtagctataaagcggttattcagcaaaaaccagtcgcaggagttaagagtaacctttcaggtttgacctactccgccgaagacaggatgcttttcgccgttattaataatccccctgaactggtctggttaacgacagaagggcagctggtaggacggatgccgctgcagggcatccacgacccggagtctattgcatggagtgggggcaaccagttccagataggcagtgagaaagatggcgcggtctataaaacacaggtggatattcagcgcggcaccatgcagataatctccatggtgaagcttgagggctatgacaaagcaaaaaataaagggctggaaggtacggcatgggatgcgaaaaatgagagattatatgccgcaaaagaaagaaaacccattatgatcaaagaagtagagatgagcaaaaatggtatcaccagagcgttgccttctgccatcactgcgagtgtgagcgatgtctccggacttgaataccatgccccaacggattcgctgctggtgttgtcggacgagtcaaaaatgattcttgaggtcagttccgagtggcgggtgcgcgatcgattgttcctgacggcggagtggtcagggctcagagacgatatcccccagccagaagggattgccatggataatgaaaataatttgtatattgtgagtgaaccaaatctgttttataaattttcgtgtgatatacagaatgactaa

SEQ ID NO: 370795 - DNA, 1401 bp, Salmonella enterica
atgaaactcaaccttattaccgtcagcctggctacgctcgttgccgctggcgcattcccggcccatgccggtcctcaggcgcatgtcgtgtgcggctatcaccacacgctgggcgatgacgcgattatgatgtttggtaaagcgaatcaggcgatgtggcatgacttttttggcaacacccacaccgacgcggtctctacctaccagacgttgcgcgcgcaacccgataccacctgtgataataaagccgacagctccgcttactgggcaccgtccatgaaattacccgatggtgaaatcgtaaatccgacctaccaaaagacctattatcaatccacaaatgtagcgcaatatccgctccatccattcccggccgggctggagttactggcaggcgatcatcacggtactggccccagtaccgcaatcacctttttatgtgccaacggcaaaggttacaccaacaaggtaggcgaaatatgcggcctgcgtaaagcgggcgatgccgtccagtttaatatcgggatcgctttccccaactgttgggatggcgtcaacctgaaaccaacccatagccacaataacgctatctatgccgaccacgggaaatgttccgcagactatccggtcaaaatcccaacggtgaatatgaacatcgcctgggtactcccgcagatctcctcgctggatacgtccaaagtggaattgtcgatggacccggtaatgcatggcgaaacccgggaagagcgctggggaagtctttataccgcccatgccgattttatgaatggctggacggaagatggcgcgcagtttatgacggatctgtgtatgaatcagggactggattgcggcactacggttccttacgcctacagtaaagcggaagaaaatacctgggtaagcagcgaagacgacaagcctcatgccagcgtcgataccttgtacgtacaggatgactggacaaatggcggacgcacgcagcacccggaaacgctcacgctggtgaaatttaagatcccgcccctgcctgccaatatggacacttcgctattcaaataccgtattcgcctttttggcggcaaaacggaaacgaacggcgccgatcaaattttcttttacccgaccagcagtgactggcacgtcagtaccgtgtcctggaacaataaaccggcgatcaactaccgttccgatgccgtgttatatctggaccattcacatgagtatcgcatggttgatgtcgataaagcggtgcgcaaagcgctggcggaagggaaaacggaaatatcctggtatatcggcggcgaccgtcagggaaatcactacgacttcacgccagcggactcaaaacagagcctggtgctgatgctgaccggtttcaaaaagacgccggagctgtaa

SEQ ID NO: 370796 - DNA, 594 bp, Salmonella enterica
atgccttcccgtgctgttttgccgcgtatcctcggcgcactgttttactactcccctgagaggccggaggtgaaagcgttgttcgattgtttgccaacgttgcctgagctttacccctggcgcgatcgcggacctattgaatcactgtgtgcgtcatggtcgctaccggatgatgatgcgcttacatggcaattttccgtgttgtttgaaggccagggaaagatgcccgtcccgccctggggatcggtctatctggaaaaagataatttgctgatgggggaaaccaccgccgattatcgagcttttttacagtcgcagggaatggtattcactgaccgtgaacgcgagccggaagatcagtttggcctgatgctattagcctgtagcgatctgctggcacgaggcgacaacgtggcggccaaccggttactggaggcgcatctgctgccctggggattccgctatctggaattgctgcaacgcaataccgttagcgccttctatgcccggcttgccgtcatagcgacctgttatctgcaggatgttcagcagcaacagggactacagcctgagaataaacggttgtttttctga

SEQ ID NO: 370797 - DNA, 774 bp, Salmonella enterica
atgcatgagttaccgctggtcttttttacggtctttacccagagcgcggtcggcgcgtttattctgctgctgattggcggcgcaatggggctggtcgcgccgcggcgtaaggctatcggtctgttctcggtgatgtgcctgtttgggattggcgtcgttgtcggcaccttccacgtcgggcaaccgctgcgtgcgctgaatatgctgctgcgcgtcggacattcgccgatgagtaacgagattgccttgtcggcggcttttgcggcgctcggcggtctgggggcgctcggtttattcctgaaccgtgcgacgccgctgtgtaacgcgttggtctggttggcggcgatagtcggagtagtcttcttatacgccgttccgcagatttaccaactgccgacggtggcgacctggcgttcatcttacaccacggcaatgatgatattgacgccgttgattggcggcggcgcgttggcggcattgtttggcgtgcgccgtctggggctactggtcagcgtgttggcgattttggtgagcttttgtctgcgcccgggctatatggcgacgctgatgagcgccgatagcgctctgaccgctgcgcagcatagctggtttaccgcccaggcgatattgctggcggcgggcgtggtcggggtggtggtctgcgcgcgcctgaaatcgagcgctgcggtgctggccatgacggctgtggtggttatcgcggcggagttggcgggtaggattgcgttttacaatctgtggacgctgccaatgtag

SEQ ID NO: 370798 - DNA, 627 bp, Salmonella enterica
atgaaacagtatggcttttatgttgactcctcgcgctgttcaggctgtaaaacctgccaggtaagctgcaaggataataaagatctggatgtcggtccgaaactgcgccgcgtctatgaatatggcggcggaagctgggtgaaagagggggaaagctggcatcacgacacctttacctactacctctctattgcttgtaaccattgcgatgagccggtatgtgtctccggctgtccgaccggggcgatgcataaacgcaaagaagatggtctggtcgtggtggatgacagcgtatgcgtcggctgtcgttattgtgaaatgcgctgcccctacggcgcgccgcagtttgatacgcaggcgaacgtgatgcgtaagtgcgacggttgtcttgaccgactggagaacaatctgcgccctatttgtgtggattcttgcccgcagcgagcgctggatttcggccctgtcgatgaattacgggcaaaatatggcacggagaatcaaatcgcgccgctgccttcggcgtcgttcacccatcctaacctcattattaaaccgcatccgaaagcgagacccacgggcgatacggaaggcgcaatcatgaacattcgggaggtgcgccatgcatga

SEQ ID NO: 370799 - DNA, 2205 bp, Salmonella enterica
gtgaaaaatgatcgcattgtgcgtattgaaccggaagacgcgaaagatgacgcggtattcggcgagcatcagattcgtccctgcctgcgcgggcgttccagtcgctggcgcgtctatagcccggatcgcattaagtatccgatgaaaagagtgggaaaacgcggcgaaggaaaatttaaacgtatttcatgggatgaggccacagcctttattgcggcagaattaacgcgcgttagcgaaaaatatggccgggaagctatttattataattatcaatccggcgcgtattatcacacgcagggcagacccgcctggataagattactaaatctcaccggcggttatttaaattatcacaacacctattccacggcgcaaatcgccaccgccacgccttatacccacggtgattatgtcggtagccattttacgcagatcgcgcattccgatctggtggtgctatttggcctgaatctctcagaaacgcggatgtccggcggcggtcaggttgaagagctgcgccgggcgctggagacctcgaaagcccgggtcattattatcgatccgcgctataccgattcggtgattaccgaacacgccgaatggctaccgattcgcccaaccacggacgctgcgttagtcgccggcatagcgcatacgctgattaccgaacagcttctcgacgaggcgctggtaaaccgctattgcgtcggctatgaccgtagcaccttgccggacacggctgcgcctaacgccagctataaagattatgttcttggcacgggcgacgacggtatcgcgaaaaccccggaatgggcggcggatatcaccggtattccggcaacgcgtattcgccaactggcgcgcgaaatcgcctcggcgcgcgcctgctatatttgccaaggctgggggccgcagcgtcatgccaacggcgaacaaaccgtgcgtgctattcagacgctgccagcgttaaccggccacttcgggcggcccggcaccaacaatggcaactggccttacggtacgccgtatggcgtgccattgttgcctgtcggtaagaatccgatcacaacctctattccttgctatctgtggacggacgccattcagcatccggagaaaatgaccgcgacgacaatgggtgtgaaaggcgcggacaggctaaaaaccggaattaagctgtttttcaaccaggccggtaataccttgctgaatcagcacggcgaaacgaaccgcacccgacaaattctcgcggatgaatcgctgtgtgaaaccattatcgtgattgaaaaccatatgacgcccagcgcgatgtatgcggatctgctgttgccggagaccagctatcttgaggcggaagacctggtggacagctcctatgcggcgggatcgcataactatatgattgcgattcagaaaaccgttaaaccgatgtgggaagtgcgcagcacgtatgacatctgcgcggatatcgccgggcatcttggactgcgcgagcaatataccgagggccgaactcaggcgcagtgggcggagatgcactatcagcagatccgtgaaaaacgtccatacctgccggagtggagcgtggcgaaagagatgggtgtgattgaccagcgtatcgctaccgagcagcagagccttgcgtttgccgatttccgcgccgacgccgaggctaatccactctccacaccgtcgggcaaaattgaaatttactcccaggcgctggcggatctggcgcaaacgtggacgttgccagaaggcgagcgaattcccgcattgccggaattttgtccggcgaaagagtcgcaccttaacaaagcgctgacggcgaagtatccgttgcagttaagcggcttccataccaaagggcatacccactcgacctacagcaatgtgctgatgctgcatgaggcggtgccggatgaagtctggattaacccgattgacgccagcgcccgccaactgaagtccggcgatcgggtgcatgtattcaatgaccgcggcgtggtggagcttccctgtaaagtgacccagcgcattttacccggcgtggcggcgatgccgcagggcgcgtggacgcggcttgacggcaacggcgttgatgtcggcggctgtatcaatacgctgaccagccaccacccttcgccgctggcgaaaggcaatccgcagcataccaatctggttgaaattaaacgcgcttaa

SEQ ID NO: 370800 - DNA, 1632 bp, Salmonella enterica
atgaaacactccctgccatgccgggcgttacgcaaacgccccatgaaactcggcactaccgtcattctgatggtcagcgccgttttgttttcggtgctcgttgtggtccatctgatctatttttcgcaaatcagcagcatgacgcgcgacgcgctggcagataaagcgctggcggtggctcgctcgctggcggactctccggcaattcgcgaggggctgaaaaaaccgcctgcggaaagcggcattcagccgctcgccgaagcggtgagccagcataatggctttttgtttattgtggtgaccaatatgcagggcatccgttattcgcacccagaaacgcagcgaatcggccaaccgttcaaaggcgatgatattctgctcgcgctgcagggaaaggaaaacgttgccattaatcgcggctttcttgccaaagcgctgcgcgttttcacaccggtttatgatgaacgccaccggcagatcggcgtggtagcgattggcctggaactcagtcacgttacgcagcagatcaacaatagccgcggcagtattatctggtccattctgttcggcgctctggtggggttattaggcacctatgcgctggtcaaggtgctgaaacgtatcctgtttggcctcgaaccctatgagatctcaaccctgtttgaacaacgccaggcgatgctgcagtcaatcaaagagggcgttatcgccgtggatgatagcggcgaagtcacgttgattaaccatgcggcgcaggcgctgctcgattatcgaaaaacgcaggatgacgccagattatccaccctgagccatgcctggtcgcaggtagtggacattagcgaagtgttgcgtgacggtacgccgcgccgcgatgaagagatcatcgtcaaaggccgcctgctgctggtgaataccgttccggtgcgcagcaacggcgaaattatcggcgcgatatccaccttcagggataaaacagaagttcgccaactgatgcagcggttggacgggatggtgaactacgcggatgcgctccgtgaacgatcccacgaattcatgaacaaattacatgtgattctgggattattgcacctgaagagttataagcagcttgaagcgtatattatcaagacggccaataactatcaggaagagatcggtttgctgctgggtaaaataaagtcgccgattatcgctggctttttgctcagtaagattactcgtgcctctgatttcgggcacagcctggtgataagcagcgacagccagttaccggataataacaatgaagatcaggttacggtgctgattacggcgctgggtaatttgattgaaaacgctctggaagcgttgagccaggaatccggcggcgaaatcagcgtctcgttacactaccgtcatggctggctgcattgcgaagtgagcgatgacggtccgggtatcgaacctgagcgcatcgaggcgatttttgaaaaaggcgtctcgtcgaaaggcgccgaacgcggcgtcggtttagcgctggttaaacagcaggttgaagcacttggcggcgtaatttccgtggagtccgagcctgggatcttcacacaattttttgtacagttaccctgggatggaaaaaggaccagcctatga

SEQ ID NO: 370801 - DNA, 720 bp, Salmonella enterica
atgatcaatgtattaattgtcgatgacgatgcgatggtcgcggagttaaatcgccgctatgtcgcgcaaatctccggttttcattgttgtggaaccgcttcgacgctggaaaaagcgaaagagtttatcttcaacagtgaaaatcacattgacctaatcctgctggatatctatatgcagcaggaaaacgggttggatctgctgcctgtcctgcacagcgcaggctgcaaaagcgacgttattgtcatttcttctgccgctgacgccgccaccattaaagattcgcttcactacggcgtggtggattatctgatcaagccttttcaggccacgcgctttgaagaagcgttgaccggctggctacgtaagaaaacggcgatggaaaaacgccagtattacgaacagtctgagcttgacctgctcattcacggtaattcatccagcgagcaggagcctcgtcggctaccaaaagggctgacgcagcaaacgctacgcaccttatgtcagtggattgatgcgcatcaggagcaggaattttctaccgacgagttggccaacgaagtgaatatctcgcgcgtctcctgccgtaaatatctcatctggctggtgaattgccatatcttgtttaccagtattcattacggcgtgaccggcaggccggtttaccgctaccgcgttcagccggaacattactctttactgaaacaatattgtcagtaa

SEQ ID NO: 370802 - DNA, 267 bp, Salmonella enterica
atggacaatacgtatattggtgagcagatacgcgtctccacacgccatactaataatttaaaaaaatggcgtgacaatgatcacataagtcacattctgttcgatttatctcgtgatttacctgatggcgagacacaaaaattaaataataaacgcctgtttttaaaacagacaaatcataatttactgctctcgctgactccacctgcccatcgccagagggtacgcccctctgaacatcactatcgcaagaaaataattacttaa

SEQ ID NO: 370803 - DNA, 1341 bp, Salmonella enterica
atgttatttagtatacagcttctcataatattaatatgtctgttttatggtgcccgaaagggcgggatcgcgctcgggttgttgggcggtatcggtctggtcattctggtgtttgttttccatctccagccaggtaaaccgcccgttgacgtaatgctggtcattatcgcggtagtcgccgcgtcggcaacgttgcaggcgtcaggcggactggatgtgatgttgcagattgccgaaaagctgctgcgccgcaaccccaaatacgtctctattgtggcgccgttcgtcacctgtaccctgacgattctgtgtgggacaggccacgtggtctacaccattttgccgattatctatgacgtggcgatcaagaataatatccgtccggaacgtccaatggcggccagttctatcggcgcgcaaatgggcatcatcgccagtccggtttccgtcgccgtggtttctctggtagcgatgctgggcaacgtgacatttgacggaaaacatctggagttcctcgatctgctgtcgatcaccatcccgtctaccctgctcggtatcctggcaatcggtatttttagttggttccgcggtaaagatctggataaagacgaagcgtttcagaaatttatttccgtaccggaaaaccgtcagtacgtgtacggcgataccgcgacgctgctggataaaaaactgccgaaaagcaactggctggcgatgtggatcttcctggcggcgattgccgtggtcgctctcctgggcgcggactccgacttacgtccaaccttcggcggcaaaccgttgtcgatggtgctggtcattcagatgttcatgctgctgaccggggcgctcattatcatcctgaccaaaaccaatcctgcgtctatctcaaaaaacgaagtttttcgttccggtatgattgcgattgtcgcggtatacgggatcgcctggatggcggaaaccatgttcggcgcgcatatgtcggaaattcagggcgtgctgggcgaaatggtcaaagagtatccgtgggcctatgccatcgttctgcttctggtctccaagtttgttaactcccaggcggcggcgctggcggcgattgttcccgtcgcgctggctatcggtgtcgatccggcgtatatcgtggcctctgcgccggcatgttatggctactatatcctgccgacctacccaagcgatctggcggcgattcagtttgaccgttccggcacaacccgtattggccgcttcgtcattaaccacagcttcattctgccgggtttgattggcgtgagcgtctcctgcgtctttggctggatctttgccgcaatgtacggattcctgtaa

SEQ ID NO: 370804 - DNA, 1647 bp, Salmonella enterica
atgtcgaaaaaagagtttatctatcaggcgcctttcccgatgggagaggacaaaacagagtattatctgctcacctccgattatgtcagcgtcagtgaattcaatggagaatctatcctcaacgttgagccgcaggcgttaacattgctggctcagcaagccttccatgatgcgtcttttatgctccgtcctgaacaccagcagcaagtcgccgccattctccatgaccccgaagccagcgaaaacgacaaatatgtggcgttgcaattcctgagaaactccgaaatcgccgccaaaggcgttctgccgacctgccaggataccggcacggcgattatcatgggtaaaaaaggccaacgcgtctggacgggcggcggcgatgaagccgcgctctccaaaggcgtgtttaatacctatatcgaagataacctgcgctactcgcagaacgcgccgctggatatgtacaaagaggtcaataccggcagcaacctgccagcgcaaatcgatctctatgccgtcgacggcgacgagtacaagttcctttgcgtggcgaaaggcggcggttcagcaaacaaaacgtatctctatcaggagaccaaagcgctgctcaccccaggcaagctgaaaaacttcctcgttgagaaaatgcgcacgctgggcaccgcggcctgtccgccataccatatcgcctttgtcattggcggcacctcggcggaaagcacgctgaaaaccgttaaactcgccagcacccactattacgacgcgctgccgacggaaggtaacgagcacggccaggcattccgcgatctccacctggaacaggaactgctggaagaagcgcaaaaacttggcctcggcgcccagttcggcgggaaatatttcgcccacgatattcgcgtaattcgcctgccgcgtcacggcgcttcctgtccggtggggatgggcgtctcctgctcggcagaccgtaacatcaaagcgaaaatcaaccgcgaaggcatctggatcgaaaaactggaacacaatccgggccagtatattccgccagcactgcgtcaggcgggcgaaggcgacgcggtaaaagtcgatctcaaccgtccgatgaaagagatcctcgcccagctatcgcagtacccggtctcgactcgcctgtcgctgacgggcaccattatcgtaggtcgcgatatcgcccacgcgaagctaaaagagcgtattgaatccggcgaagacctgccgcagtatattaaagaccatcccatctattacgcaggtccggcaaaaaccccggcaggttatccatctggctcattaggccccaccaccgcaggccgaatggactcttatgtcgatctactgcaatcccacggcggcagtatgatcatgctggcgaaaggcaaccgtagtcagcaggtcacggatgcctgtaaaaaacatggcggcttttatttgggcagtatcggcggcccggcggcggtactggcacagcagagcattaagcatctggagtgtgtcgaatatccggaactcggcatggaagctatctggaaaattgaagtagaagatttcccggcctttatcctggtggatgacaaaggcaacgatttcttccagcagattgtcagcaaacagtgcgctaactgcgcgaaataa

SEQ ID NO: 370805 - DNA, 1431 bp, Salmonella enterica
atgagcatctctctgacaacaaagctgagttacgggttcggtgcgtttggtaaggatttcgccatcggcattgtgtatatgtacctgatgtattactacaccgatgtggtgggactctcggtcggcctcgtcggcaccctctttctggtcgcgcgaatctgggatgcgataaacgatcccatcatgggctggattgtcaacgccacgcgttcgcggtgggggaaatttaagccgtggatattgatcggcaccttaaccaattcgctggtgcttttcctgctgttcagcgctcatctttttgagggaaccgcgcaggttgtgtttgtctgcgtaacctacatcctgtggggcatgacgtataccattatggatatcccattttggtcgctggtgccgaccattacgcttgataagcgagaacgcgaacaactggtgccgttcccgcgtttcttcgccagtctggctggcttcgtcactgccggtataacgctgccgtttgtgaactacgttggcggagcggatcgtgggttcggctttcagatgtttacgctggtgctaattgcgttctttatcgcctcgactatcgtgacattatgcaacgtccatgaggtgtactcctccgacaacggtgtaacggcgggccgcccacatctgacgttaaaaacgatcgttggattgatatacaaaaatgatcagctctcttgcctgttgggaatggcgctggcgtataacattgcctccaatattatcaatggctttgcgatctactacttcacctatgtgattggcgatgccgatctttttccctattacctttcttacgccggcgcggcgaatctgctgacgctgattgtcttcccccggctggtgaaaatgttatcgcggcggatattgtgggcgggcgcctccgtgatgcccgttctgagttgcgcagggctcttcgcgatggcgttggcggatgtccataatgccgctttaatcgtggcggcgggtattttcctgaatatcgggaccgcgctcttttgggtgcttcaggtaatcatggtggcggatacggtcgattatggggaatttaagctcaatattcgctgcgagagtatcgcttattccgtacagacgatggtcgtgaagggcggctcggcgtttgcggcgttctttatcgctttggtgctggggctgattggctacacgccgaacgtggcgcagtctgcgcaaaccctgcaggggatgcagtttattatgattgtcctgccggtactgtttttcatgatgacgttggttctctacttccgctactaccgtttgaatggcgacatgctgcgcaagattcagatccacctgctggataaataccggaaaacgccgccattcgtcgaacagccggatagcccggcgatttctgtggtagcgaccagcgatgtaaaagcgtga

SEQ ID NO: 370806 - DNA, 1353 bp, Salmonella enterica
atgacggcacccaaaattacctttatcggcgcaggttctacgattttcgtcaaaaatatcctcggcgatgtgtttcaccgcgaggcgctaaagtcagcgcatgtcgccctgatggatattgacgaaacccggctggaagagtcgcacattgtggtacggaaactgatggactcagcgggcgcttctggccggattacctgccataccaaccagaaagcggcgctacaggatgcggatttcgtggtggtcgcctttcagattggcggctatgaaccctgcaccgtgaccgattttgaggtttgtaagcgtcatggcctggaacagacgatcgccgatacgctggggccgggcggcatcatgcgcgcgctgcggaccatcccgcatctgtggcggatttgcgaagacatgacggaagtctgtccgaaggccaccatgctcaattacgtcaacccgatggcgatgaatacctgggcgatgtatgcccgttatccgcatatcaaacaggtcggcctgtgccattcggtacagggaacggcggaagaactggcgcgcgacctgaatatcgatcccacctcgctgcgctaccgctgcgccggcattaaccacatggcgttttacctcgaactggagcgcaaaacggctgacgggacttatgtcaatctctatcctgaattgctggcggcctatgacgccggacaggcgccgaagcccaatattcacggcaatgaacgctgccagaacatcgtgcgctatgagatgttcaaaaagttgggctacttcgtcactgagtcatcagagcattttgccgagtacacgccgtggtttattaaaccgggacgcgaggatctgattgcgcgctacaaggtgccgctggatgaatatccgaaacgctgcgtagaacaactggcgaactggcataaagagctggaggagtataaaaccgccgagcgtatcgacatcaaaccgtcccgcgagtacgccagcaccattatgaacgctctgtggaccggcgagccgagcgtgatttacggcaatgtgcgtaacgaggggctgattgataacctgccgcagggaagctgcgtggaagtggcttgtctggtggatgccaacggcattcaaccgacgaaggtggggacgatcccttcccatctggcggcgatgatgcagaccaacatcaacgtgcaaacgctgttgaccgaagccatcctcacggaaaaccgcgatcgcgtgtatcacgcggcgatgatggaccctcataccgcagcggtgctgggtatcgaagaaatctatgcgttggttgacgatctgatcgccgcgcatggcgactggcttccggcctggttacgccgttaa

SEQ ID NO: 370807 - DNA, 933 bp, Salmonella enterica
atgagtacgcaagcaatatccctcctcccgcccgacccgcacatgtgcaacggcgatgaaaagcaaacccgtagcccgctgtcgctctattccgaatatcaacgactggacgttgaactgaggccgccgcacagaatggccagcagtcactggcatggacaagtagaagtgaatgttccgtttgacggcgatgtggagtatttaatcaacaatgaagtcgtgcagataaagcaggggcatatcaccctgttttgggcctgtacgccacaccagcttacccgccccggcaactgccgccagatggcgattttcagtttgccgatgcacctgtttctctcctggccgctggatcgcgatcttatcaaccacgtcacgcacgggatggtggttaaatcactggcgacccagcagcttagcacctttgaagtgttgcgctggcagcaggaaacaagcagcccgaatgagcaaattcgccagttggcgatcgatgaaatcggcctgatgcttaaacgctttagcctttccggctggcagcccattttgctcaataaaacatcacgcacccacaagaatagcgtctcacgccatgcgcagttttacgtaagccagatgctgggatttattgccgataactacgatcaggcgctaaccattaacgacgtcgcggagcatgtcaaactcaatgctaactacgcgatggggatattccagcgggttatgcaattgacgatgaagcagtacatcacggcgatgcgcatcaatcacgtacgtgccttattgagtgatactgacaaaacgatcctcgatgtcgctctgactgccgggttccgatccagcagccgtttttacagtacttttagcaaatttgtcggtatgtcgccgcaacaataccgcaagctaagccagcaacgacgccagacgatgcccggctaa

SEQ ID NO: 370808 - DNA, 2271 bp, Salmonella enterica
atgatgaaagtattaattgttgaaagtgagtttctgcatcaggacacctgggttggcaacgcggttgagcgtctggcggatgccttgagccaacaaaatgttaccgtcattaaatcgacatccttcgatgacggctatgccatcttgtccgcgaacgaagccattgactgtctgatgtttagctaccaaatggaacaaccggatgagcacctgagcgtcaggcaattgatcggtaagcttcacgagcgtcagcaaaacgtgcccgttttcctgttaggcgacagggaaaaagcgacggcatcgctggaccgcgacctgctggagcttgtcgatgaattcgcctggattctggaagacaccgctgactttatcgccggacgcgccgttgccgccatgacccggtatcgccagcaactgttaccgccgctgtttaacgcgttgatgaaatacagcgacattcatgaatattcatgggcggcgccgggacaccagggcggcgtcggtttcactaaaacgcctgccggtcgcttttatcacgattattatggcgaaaacctgttccgcagcgatatggggattgagcgtaccacgctcggttcactcctcgaccataccggcgcgtttggcgaaagcgagaaaaacgccgcccgcgtattcggtgctgaccgctcctggtccgtggttgtcgggacctccggttctaaccgtactattatgcaggcctgtatgacggataatgatgtcgttgtactggatcgtaactgccataaatccatcgagcaggggctgatcctcactggggccaaaccggtatatatggtgccaagccgtaaccgttacggcattatcgggccaatctacccgcaggaaatgcagcctgaaaccttgcagaaaaaaatcagcgccagcccactgaccaaaactaaagccggacagaaaccgtcttacagcgtagtgaccaactgtacctatgacggcgtatgctataacgccaaagaggcgcaggatctgctggcaaaaaccagcgatcgcattcacttcgacgaagcatggtacggctatgcgcgcttcaacccgatttattgcgatcactacgcgatgcgcggcgagccaggcgaccataacggtccgaccgtgtttgccacccactccacgcacaaactactgaatgcgctttcacaagcttcctacattcacgtccgtgaaggccgtggcgcggtgaatttctcccgcttcaaccaggcatatatgatgcatgccaccacctctccgttatatgccatctgcgcatccaacgatgtggcggtatcgatgatggacggtaacagcggcctgtccctgactcaagaggtgattgacgaagcggttgatttccgtcaggcgatggcgcgtctttataaagagtttaccgatgaaggcgactggttctttaaaccgtggaataaagacgtcgtcaccgatccacaaaccggtaaaacatatgacttcgccgacgcgccggcaaaactgctagccaccgaccagaactgctgggtcatgcgccccggggaaacctggcacggctttaaagacctgccggataactggagtatgctggacccgattaaagtcagtatcctggcgccgggtatgggcgacgatggcgaactggaagcatccggcgtacccgctgcgctggtcacagcatggcttggccgccacggtatcgtgccgacccgcaccaccgactttcagattatgttcctgttctctatgggggtaactcgcgggaaatggggaacgctgatcaacacgctgtgctccttcaaacatcattacgacgctaatacgccgctggcgcaggtgatgccggaactggtgcaggattatcctgacacttacgcgaacatgggtattcatgacctgggcgataaaatgtttgcctggctacgtaaaaataacccgggcgcccgtctcaacgccgcctattccaccctgccggttgcggagattaccccgcgcgacgcctacaacgcgattgtgaacaacaatattgaaatggtggcgattgaaaatctaccgggtcgcattgcggcgaactccgttattccttacccgccaggcatcccgatgctgctctccggcgaaaactttggcgatgaaaacagtccgcaggtgggttacttacgctcactgcaatcttgggatcatcacttccctggctttgagcatgaaaccgaaggcacggaaattattgatggcgtatatcacgttatgtgcgtgaaagcctaa

SEQ ID NO: 370809 - DNA, 762 bp, Salmonella enterica
atgaggatttgcagcaacgaaccttgcatagtgttattaaccgaaaaagatacatggttacgagtaaatggtaaggagccaatcagcttaaaagcgaatcatatggccattctggcttgtgaaaataacgttattgacatttcatcattaaatagcgtgctagtaatacaagtgagtcgcaataatattaaagactatttacaattcctgaataaagatctctcacaccttcccgtctggcaacgcaacgccgatcccttattgaccgccaactgtctgacgccggatatcttcagggtcgccgcccgctacagcgcgatggaagcaccggatgaaattgttagtgaacgtacccgtgcgctccttttcaccgttttatcccgctttcttgaccacaaaaaatttatttctttgttaatgcacatgctgcgcagccgcatcagtgacagcgtttaccacatcattcagagcgatattcataaagactggaatctgagcgccgttgccagctgcctgtgcctgagtccaagcttgttaaagaaaaagctcaaaaacgagaataccagttatagccaaataatcacgacctgccgaatgcgttatgccgtaaaccaattattaatggacggaaagaatatctctcaagtctcacagctgtgtgggtataacagcacatcgtactttatttccgtgtttaaagagttttatggtatgacccccctgcattatgttagccaacatcgggaacgatcggctgcctaa

SEQ ID NO: 370810 - DNA, 1338 bp, Salmonella enterica
atgtcttcggatgctgatgctcacaaagtgggcctaatccccgtcaccttaatggtatcggggaatattatgggttcaggggtattcttactccctgccaacctggcggccactggcgggattgcaatctacggatggctggtcactatcatcggcgccctggcgctgtcgatggtttatgccaaaatgtcgtccttagatcccagtcccggcggttcttatgcctacgcacgccgctgcttcgggccgtttttgggctatcaaacgaacgtgctgtactggctggcatgctggatcggtaatatcgcgatggtcgttatcggcgtcggctatctgagctatttcttcccgattctgaaagatccgctggtattaacgcttacctgcgtcgcggtgctgtggatttttgttctgctgaacatcgtcgggccgaaaatgattacccgcgtacaggccgtcgccaccgtactggcgctggtgcctatcgtagggattgcggtcttcggctggttctggtttaaaggcgaaacctatatggcggcctggaacgtgagcggcatgaataccttcggcgcgattcaaagcacgttgaacgttacgctgtggtcattcatcggggtagaaagcgcctccgttgcggccggtgtggtcaaaaacccgaaacgcaatgtgcctatcgccaccatcggcggggtactgatcgccgccgtctgctatgtgctctccacaacggcgattatggggatgatccccaacgcggcgctgcgcgtgtcggcatcgcctttcggtgacgcggcgcgtatggcgctgggcgataccgcaggggctattgtttccttctgtgcggcagcgggttgcctgggctctctcggcggctggacgctgcttgccggtcaaaccgcaaaagcggcggcggacgatggtctcttcccgccgatcttcgcgcgggttaataaagccggtacgccagtggctgggttgcttatcgtcggcgtgctgatgactatcttccagttcagcagtatgtcgccgaacgccgcgaaagagtttggtctggtctcctccgtgtcggttatcttcaccctggtgccttatctttacacctgtgccgcgctgttgctgttaggccacggtcactttggtaaagcgcgcccgctgtatctgctgattaccttcgtcgcgtttgtgtattgcatctgggcggtcatcggttccggcgccaaagaagtgatgtggtcgttcgtcacgttgatggtgatcaccgcgctgtatgcgttgaattacaaccgtattcacaaaaacccgtatccgctggatgcgccggttaaacaggattga

SEQ ID NO: 370811 - DNA, 1644 bp, Salmonella enterica
atgttaaagcgctttcttaaaagacctgttcttgggcaaatcgcctggcttctgcttttttccttttatattgccgtctgcctgaacattgcgttctacaagcaggtactacaagacctaccgttaaactcgctgcgcaatgtactggtgtttatttccatgccggtcgtcgcgtttagcgtggtcaatagtgtgctgacgctggcctcatttatttggctaaaccgaccgctggcctgcgtttttattctggtcggcgctgccgcgcagtattttattttgacttacggcatcatcatcgatcgttccatgatcgccaatatgatggataccacgcccgcggaaacctttgcgctgatgacgccgcaaatggtgctgacgctgggattaagcggcgttctggcagccgtgattgccttctgggtcaaaatccgtccggcgacgccgcgcttacgtagcgggctttaccgcctggtcagcgtcctgatctctattttattagttattctggtcgccgcctttttctataaagattacgcctcgctatttcgaaataataaacagttgatcaaagcgttaagcccatcgaacagtattgtcgccagttggtcatggtattcgcatcaacggctggcgaatttgccgctggtacgcattggcgaggatgcccatcgcaatccattaatgctgaaaagcgatcgcaaaaacctgacgattctcatcgttggcgaaacctcgcgcggcgatgatttctctcttggcggctatccgcgcgacaccaatccgcggctggcgaaagacgatgtgatctatttcccgcataccacctcttgcggtacggcgaccgcgatctccgttccctgcatgttttctgatatgccgcgcaaacattatgacgaagagctggcgcatcaccaggaagggctgctggatattatccagcgcgcggggattaacgtactgtggaatgataatgacggcggctgtaaaggcgcatgcgatcgcgttccgcatcaaaatgtcaccgagctaaacctgcccggacaatgtatcgacggcgagtgctacgatgaagtgttatttcacggtctggaagactatatcgaccatttgaaaggcgatggcgttattgtattacataccatcggcagccacggcccaacctattacaaccgttatccaccgcagtttaaaaaatttaccccaacctgtgacactaacgaaattcagaactgttcccaacagcagttgatcaacacctatgataataccgtgctgtacgtggactatattgtagataaagccattaacctgctgaaatctcatcaggataaattcaccaccagcctggtctatctttccgatcacggcgaatcattgggtgaaaatggcgtttatttacacggtctgccgtattccattgcgccggatacgcaaaaacatgtcccgatgctcatttggctttctaaagattatcaacagcgttatcaggtggatcaggcctgcctgcaaaaacgggcgagcacgctggattattcacaggacaatcttttctcaaccatgctgggattaaccggcgtacaaacgacgtattaccaggccgcagatgatattctgcaaccgtgcaggagactaagcgaatga

SEQ ID NO: 370812 - DNA, 669 bp, Salmonella enterica
atgaagatactgattgttgaagacgacacgctattattacaggggttaatactcgccgcgcaaaccgaaggctatgcgtgtgatggcgtttcgacagcgcgtgccgccgagcatagtctggagtctggtcattacagtctgatggtgctggatttagggctgcccgatgaggatggcctgcatttcctgacgcgaatccgacagaaaaaatataccctgccggtactcattctgaccgcccgcgatacgctcaatgaccgcattaccgggctggatgtcggcgcagatgattatctggttaaacccttcgccctggaggagttgcacgcccgcatccgcgcgctgctgcgccgccataataaccagggtgaaagtgaactgacggttggcaatctgacgctcaatataggccgtcatcaggcatggagggatggacaggaactgaccctgacgcctaaggagtacgcgttgctctcacggttgatgctcaaggcaggcagtccggtgcaccgggaaattctttataacgatatctacaactgggataacgaaccctcgaccaacactctggaagtgcatatacataatttgcgcgacaaagtcggcaagtcgcgcattcgcacggttcgcgggtttggctacatgctggttgccactgaggaaagctaa

SEQ ID NO: 370813 - DNA, 1080 bp, Salmonella enterica
gtgagcctgatgcgttttcagcgaagagcgatgacccttcgccagcgtttaatgctgacaattggtcttattctgctggtgttccagttaatcagtaccttctggttatggcatgaaagcactgagcaaatccaattgttcgagcaggcgctgcgggataatcgcaacaacgatcgccatatcatgcacgaaattcgcgaggcggtcgccagcctgatcgtccccggcgtatttatggttagcctgacgctgctaatttgttaccaggcggtacggcgtattacccgtccgctcgccgaactgcaaaaagagctggaagcgcggacggcggataatctggcgccgatcgccattcacagctccacgcttgagattgagtccgtcgtctcggcgatcaatcaactggttacgcgtttgaccaccacgctcgacaatgaacgcctttttaccgccgatgtggcccatgagctacgcacgccgctgtcgggggtgcgtttgcatctggaattattgtcaaaaacccacaatgttgatgtcgcgccgcttatcgcccgtcttgaccagatgatggatagcgtctcccagcttctgcaactggcgcgcgtgggccagtcattctcttccgggaattatcaggaagtaaaactgctggaagatgtgatcctcccctcctacgatgagctgaacaccatgctggaaacgcgccagcaaactctgttgctgccggaaagtgcggcggacgtggtagtgcgcggtgacgcgacgttactgcgtatgctgctgcgaaatctggtggaaaacgcgcatcgctatagccctgaaggaacccatatcactatccacattagcgccgaccccgacgctattatggcggtcgaagacgaggggccgggtattgatgaaagcaaatgcgggaagctaagcgaagcgttcgtgcggatggacagccgttatggcggaattggcctggggctgagtatcgtcagccgcatcacccagctacatcagggacagtttttcctgcaaaaccgtacggaaagaacaggcacccgtgcctgggtgctgttgaaaaaggcataa

SEQ ID NO: 370814 - DNA, 1503 bp, Salmonella enterica
atgctgaaaaggaaaaaaataaaaccgattacactgggcgatgtgaccatcattgatgacggtaaacttcgcaaagcgattaccgccgcctcgctgggcaacgcgatggagtggtttgattttggtgtttatggatttgttgcctacgcgttgggtaaagtctttttccccggcgccgatcccagcgttcaaatgattgccgcgctggccacgttttccgttcccttcctgattcgtccgctcggcgggttattctttggtatgctcggcgataaatacgggcgccagaagatcctggcgatcacgattgtgattatgtcgatcagtaccttctgtatcgggttaatcccctcttacgcgacgatcggtatctgggcgccaatactgttgttgctgtgtaaaatggcgcagggcttctcggttggcggggaatataccggcgcgtcgatctttgtcgcggaatattcgccggatcgtaaacgcggatttatgggaagctggctggattttggttccatcgccgggttcgtgctgggcgcgggcgtggtggtcttgatctcgacgattgtcggcgaggagaatttccttgagtggggctggcgtattccgttctttatcgccctgccattggggattattggtctctacttacgccatgcgctggaggagacgccagcgtttcagcagcacgtggataaactggagcagggcgaccgcgaagggttgcaggatgggccgaaagtctcctttaaagagattgccaccaaacactggcgtagcctgttgtcatgtatcggtctggtgattgccaccaacgtgacctactacatgctgctcacctacatgccgagctacctgtcgcataacctgcactattctgaagatcacggcgtgttgattatcatcgccattatgatcgggatgctgtttgtgcagccggtgatggggctgctgagcgaccgtttcggtcgacgtccatttgtgattatgggcagcattgcgctgttcgcgctggcgatcccggccttcatcctgattaacagtaacgttattggcctgatttttgccggtttgttgatgctggcggtgattctgaactgctttaccggggtgatggcctcgacattgccggcgatgtttccgacgcatattcgttacagcgcgctggcggcggcttttaatatctctgtattgattgccggtctgacgccaacgctggcggcctggctggtggaaagctcgcaggatctgatgatgccggcgtattatttgatggtcatcgcggtgataggcttgattaccggtatttccatgaaagagacggccaatcgtccgttaaaaggcgcaacgccagcggcgtcggacatccaggaagcgaaggaaattctgggcgagcattacgataatattgagcagaaaatcgacgacatcgatcaggaaattgcggagctgcaggtcaaacgttcgcgtctggtacagcaacatccgcgtatcgatgaataa

SEQ ID NO: 370815 - DNA, 336 bp, Salmonella enterica
atgtcattaccccactgcccgcaatgtaactccgaatatacctacgaagataacggcatgttcatctgcccggaatgcgctcacgaatggaacgatgcggaacccgctcaggagagcgatgagctgattgtcaaagacgccaacggcaacctgctggcagaaggcgatagcgtcaccatcgtgaaagatctgaaagtaaaaggcagctcttccatgctgaaaatcggcaccaaagtgaagaacattcgtctggttgaaggcgaccataacatcgactgcaaaatcgatggttttggcccgatgaaactgaaatcagagttcgtgaaaaagaactga

SEQ ID NO: 370816 - DNA, 444 bp, Salmonella enterica
atgccgttaagtccctatctctcttttgccggcaactgtgccgacgccatcgcgtattatcaacaaacgttaggcgcagaactgctttataaactcagcttcggtgaaatgcccccctcggcggcggataacgaagagggctgcccgtcaggaatgcgctttcccgatactgctatcgcccacgccaacatgcgtattgccggcagcgatatcatgatgagtgatgccagcccgtcgggaacggcgcattattccggctttacgctggtgcttgatacccaggatgtagcagaagggaagcgctggtttgataaccttgccgcacaagggcaaatcgaaatggactggcaggagaccttctgggcgcagggtttcggcaaggtcagcgatcgtttcggtgtgccgtggatgattaacgtggttaaacatcagcctgccacctaa

SEQ ID NO: 370817 - DNA, 435 bp, Salmonella enterica
atgccagtctgtgaattacgccacgcgacaacagaggataccgattctgtttacgcgcttatctgtgagttacttaaaaatgagcttgattatcaggctttcagggatgggttcgccgctaatttactggaccccaactttcattatcgtttagcgctgcgtaacggagaggtagtcggcatgatcagcctgcatatgcagtttcatctccatcatgccaactggattggcgaaattcaggagctggtggtattaccgccgatgcggggacaaaaaattggcagtcagcttctggcctgggcagaagaagaagcacgtcaggcgggcgccgagctaacggagctttccacaaatattaaacgccgcgatgcacaccgtttttatcttcgcgaaggttacaagcaaagtcatttccggtttaccaaagcattgtga

SEQ ID NO: 370818 - DNA, 909 bp, Salmonella enterica
atgttcgcagcaatcattatcggtatttttattatcagcgtcatttatgcgcattcacgcggtgtggaaaaacaaaaactttcccgtcaactctttgaccactcgacgtttatggcgccgatcaatatgttcatgactcgcttctcaacgttaccggcaaagcagccgtactttgataccacggcatttccagagctgcagaagctgacggaaaactggcaggtgattcgtgaagaggcgctacggcttcagcatcacataaaagccgcgcaggccaataacgacgccggattcaacacctttttcaagcgcggctggaaacggttttaccttaaatggtattccgatgcccacccgtcggcggaaacgttatgcccgataacgacaaagctggtcaacagcatcccctctattaaagcggcgatgttcgccgagttgcctcccggggcctatctgggaaaacatcgcgacccctatgccggttcagtacgttaccatcttggattaagcacaccgaatgacgaccgctgttttattgaagttgatcgacagcgccatagctggcgcgacggcaaagccgtcatcttcgacgaaacctacgttcattgggcggaaaataaaactgaacagacgcgtattatcctcttttgcgatattgagcgcccaatgaaatggcgctgggcgcagagcgtaaaccactgggtcggcgcatcgttgatgtccgccgccagttcgccaaacgacgagaacgatcgcaccggtgcgattaatcgcatctttaaatacgttcacgcagcacgcgatgccgggcaacgtctgaaaaagaaaaaccgcactctctattacgcgctgaaatatctcgttattgctgctatttttgccgcgataatccttttcagcctcctctga

SEQ ID NO: 370819 - DNA, 420 bp, Salmonella enterica
atgaaaaaagtcgtcacggtttgcccgtattgcgcatcaggttgcaaaatcaatctggtggtcgataacggcaaaatcgtccgggctgaggcggcgcaggggaaaaccaaccagggtaccctgtgtctgaagggctactacggctgggattttattaatgatacccagatcctgaccccgcgcctgaaaaccccaatgatccgtcgccagcgtggcggcaaactggaatctgtttcctgggatgaagcgctcaattacgtcgctgaacgtttgagcgccatcaaagcgaagtacggtccggatgcaatccagacaaccggctcctctcgcggtaccggaaatgaaaccaactatgtaatgcaaaaattcgcacgcgccgttattggtaccaataacgttgactgctgcgctcgcgtctga

SEQ ID NO: 370820 - DNA, 1680 bp, Salmonella enterica
atgagtaatgcgattaacgaaattgataacactgatttagtgttcgtcttcgggtataacccggcggattcccaccctatcgtggcgaatcatgtaattaacgctaaacgcaacggggcgaaaattatcgtctgcgatccgcgcaaaattgaaaccgcgcgcatcgctgacatgcatatcgcgttgaaaaacggctcgaatatcgcgctgctcaacgccatggggcatgtcattattgaagaaaacctgtacgacaaagcgtttgtcgccagccgtaccgaaggttttgaagagtacagtaagattgtcgaaggctatacgccggagtccgtcgaagagatcactggcgtgagcgcacaggaaattcgtcaggcggcgcggatgtatgccagcgcgaaaagcgcagcgatcttgtggggtatgggcgtcacgcagttctatcagggtgtggaaaccgtgcgttcactgaccagcctcgcgatgctgaccggcaacctcggcaagccaagcgcgggcgttaacccggttcgcggccagaacaacgttcagggcgcgtgcgatatgggcgcgctcccggatacttatccgggctaccagtacgttaagttcccggaaaaccgcgagaagttcgctaaagcctggggcgtagaaagtctgcctgcgcataccggctatcgcatcagcgagctgccgcaccgtgcggcgcatggcgaagtgcgcgcggcgtacattatgggtgaagatccgctgcaaaccgatgcggaactctctgcagtacgtaaagcgtttgaggatctggaactggtcatcgtgcaggatatcttcatgaccaaaaccgcgtcggcggcggatgtgattttaccctccacctcctggggcgagcatgaaggcgtcttctctgcggctgaccgtggcttccagcgcttctttaaagccgttgaaccgaagtgggacctgaaaaccgactggcagattatcagtgaaatcgccacccggatgggctatccgatgcactacaacaatacccaggaaatctgggatgagttgcgtcatctgtgcccggatttctacggcgccacttacgagaagatgggcgaactgggctatatccagtggccatgccgcgacacgtcggatgccgatcagggaacctcgtacctctttaaagagaagttcgatacccccaacggtctggcgcagttcttcacctgcgactgggtagcgcctatcgataaactcaccgaagagtacccgatggtactgtcgacggtgcgcgaagtcggccactactcctgccgctcaatgaccggtaactgtgcggcgctggccgcgctggccgatgaaccgggctatgcgcaaatcaataccgccgacgccgcgcgtctgggcattgaagatgaagcgctggtgtgggttcattcgcgcaaaggcaaaatcatcacccgcgcgcaggtcagcgatcgcccaaacaaaggggcgatttacatgacctaccagtggtggattggcgcctgtaacgagctggtgactgaaaacctcagcccgattaccaaaacgccggagtacaaatactgcgccgtacgcgttgagccgatcgccgatcagcgagccgccgagcagtatgtgattgatgagtacaacaagctgaaaacccgcctgcgcgaaagcgcaatgggttga

SEQ ID NO: 370821 - DNA, 690 bp, Salmonella enterica
atgaaactacttcttgcattgatgttgtttatgacattctttgcccatgccgcagatcctgagccgggtagccagtatttgcaggcagcagaggcaggtgacagacgcgcacaatattttctggccgacagttggttgagctatggcgatttgaacaaagctgaatactgggcgcaaaaagccgccgacagtggcgacgccgacgcctgcgcgctactggcgcaaatcaaaatcactaatccggtaagcctggattatcccgacgcgaaaaagctggctgaaaaggcggctaacgcgggcagtaaagcgggcgaaattacgctggcgcggatcctgatcaacacccaggccgggcgtccggactacccaaaagccatctcgctgctgcaaaaggcctctgaagatctggataacgactccgcggtggatgcgcaaatgttgcttggcctgatttacgccaacggcgtgggcattgccgccgatgatgaaaaagccgcctggtatttcaaacgcagttccgccatttcccgtaccggctattcagaatactgggcgggaatgatgtttttaaacggagaaccgggctttattgaaaagaacaagcagaaggcgttgcactggttgaatctaagctgtctggaagggtttgataccggttgcgaagagttcgaaacgctaacaaatggctga

SEQ ID NO: 370822 - DNA, 1311 bp, Salmonella enterica
atgaaaaatttgaaagtcagcctggcctggcaaattttgctggctatggtgctgggcattctgttgggcagctatctgcattatcacagtgacagtcgtgaatggctgattgccaacctgctgtcgcctgctggcgatatctttatccatctgattaaaatgatcgtcgtgccgatcgtgatctcgactctgattgtcggcatcgccggcgttggcgatgcgaaacagctaggccgtatcggcgccaaaaccattctctattttgaactgatcaccacggtggcgattatcctcggcattacgctggcgaatgtctttcagccaggctcaggcattgatatgtcgcaactggcgaccgtcgatatttcgaaataccagaacaccacggcggaagtacaaagtcatgcgcatgggctgatggggacgatactgtcgctggtgccgaccaatatcatcgcatcgatggccaaaggggatatgctgccaattatctttttctcggtcctgtttgggctggggttgtcgtccctgccggcaacgcaccgcgaaccgctggtgacggtatttcgttccatctctgaaaccatgtttaaagtcacccatatggtgatgcgctatgcgccagtgggcgtttttgcgctgatcgccgtcacggtagcgaattttggtttcgcgtcgctgtggccgctggcgaaactggtgctgctggtacactttgccattatcttctttgcgctggtggtgctgggtatcgtggcgcgcctgtgcgggttaagtatctggattctgattcgcattctgaaagatgaattgattctggcgtactcgaccgccagctccgagagcgtgctgccgcgcattatcgagaagatggaagcttacggcgcaccagcctctatcaccagtttcgtggtaccgaccggttactcatttaacctcgacggctccacgttataccagagcatcgccgccatttttatcgcgcagctatacggtatcgacctgtcgctgtggcaggaaattgtactggtgctgacgctgatggtgacgtcgaaagggattgccggcgtgcctggcgtttccttcgtggtgttactggcgacgctgggcagcgtgggcattccgctggaagggctggcgtttatcgccggtgtcgaccgtatcctcgacatggcgcgtactgcgctaaatgtggtggggaatgcgctggcggtgctggtgatcgccaagtgggaacacaagtttgaccgcaaaaaagcgctggcctacgagcgcgacgtgctgggcaaatttgataagaccgcccaataa

SEQ ID NO: 370823 - DNA, 621 bp, Salmonella enterica
atgagccagtctgaacactccactgtgccgttacgtcccatgcccgtaaagcgtctggcggctgcggcggtgttgatggtggctgcctgtgtcggcggctatctgttgacgccgaaatggcaggctgtgcgtagcgagcaacagcgtctggccgatccgctacgtgactttacgaacccgcaaacgccagaggcgcagctttccaggctgcaagaaaaaatccgcgccaatccgcaggatagcgagcaatgggcgcggctgggcgagtattatctctatcgcaatgcgtatgacaatgcgctgctggcatatcgtcaggcgttgcgtctgcgaggcgataacgcgcagcttttcgccgcgctggcaacggtgctgtattaccaggccgggcaacatatgacgcctgcgacgcgtgaaatgattaataaagcgttagcgctggatgcgacagaagtgaccgcgcagatgctgctggcggcggatgcgtttatgcaggcggattatgcgcaagccgtgtcgctgtggcaaaccttactggatgccaactcgccgcgagtgaaccgcgcgcagctggtagaggccattaatttgactaaattgttacaaaatcggcagaaataa

SEQ ID NO: 370824 - DNA, 510 bp, Salmonella enterica
atgcgtaaattactcacagcgttgccggatggcggcgtaaacgccttatccggcctacaggatgcgcaaaccgtaggccggataagcgtagcgccatccggcagaaagtttttactcttaacgatcgtcctgtttttaatcaccttcgccacccacgcccaggtggtggatacctggcgctttgacaatccacaacagcaggaaaaagcgctatctattgccagtcaactgcgctgtccgcagtgtcagaaccagaatttgctggaatccaatgcgcccgtggcggtcagtatgcgccatcaggtttacagcatggtggccgaaggtaaaagcgaagcggaaatcaccgcctggatgaccgaccgttatggtgatttcgtacgctacaacccgccgttgaatgagcaaacgctgctgttgtgggcgctgccgtacctgctgttattgctggtgggcgtggtggcctggcgggtgagaaagcgtcagcacgcaggagagggggaacaatga

SEQ ID NO: 370825 - DNA, 1737 bp, Salmonella enterica
ttgcataatctggacatcttccttcctgaagccggatttctggcgctgttgttgagtctcggggtcaacgtgctgaccccgctggcgacgtggtgcgggatggggctgcactggcgcggcgtcatgcgcctgacgacctgcggcgcgtggacggcgttcacgctgctgctactggcgtttgcgattctggttagctgttttctgaccagcgatttttcggtcgtttatgttgcgcagcatagccatagtcagttgtcatggggactgaaactggcggcggtatggggcggtcatgaaggctcgctcctgctgtgggcgctgcttctttcggggtggacggcgctattcgcctggcgctcccggcatgaatctgacgcgctttttccgctgaccctgagcatcttgtccctcattatggcttcgctgctgctatttattgtgctgtggtccgatccgttcctgcgtattttccctcccgccatggaagggcgcgaccttaatcccatgctgcaacatctggggctgatcttacatccgccgctgctctatctgggttatggcggcctgatgaccgcggcgagcgtagcgctggcttcgctactgtgcggcggctttaacgccgcaaccgcctgggtttgctggcgctgggcgttacccggctggtgcgctctgacgctggggatcattctcggatcgtggtgggcgtattgcgaactgggctggggcggctggtggttctgggacccggtggaaaatgcctcgttgttgccgtggcttgccgccagcgcgttgctgcacagtctgtatgtcagccgccagcgcgggagcttccgtcactggtcgttgctgctggcgatactgacgctgatcctctcgttgctgggaacgctgattgtgcgttccggcattcttgtttcggtacatgcctttgcgctggataacgtgcgcgcggtgccgctgtttaccctttttgccgcgttaagtctggcatcgcttgttctgtacggctggcgggcgcgggagccgtatccggcgacgcgtttgggcggcggaaagtgcgaaacgctcattctggcgacgctgctgctctttagcgccgtcttgttgatcgtgctggtcgggacgctctaccccatgatttatggtttgatgggctggggaaggctttcggtgggcgcgccctattttaatcgcgtcacgctgccgtttggcctgctgatgctggtagttatcgtgctggcgacaatcagaagccgcaaagtctctgtgcgttgtcagcttccggcattgctggcgcatacgggcgtatttatcttcgccgccgggatcatggtttccagcggcagtcggcatgaaatcagccttaacctcagccccggtcagcaggtggtactggcgggctatacctttcgtttcgagcgtctggatctggaggccaaaggcaactacaccagtgaaaaagcgcggatcacgttgtggcggaatgaaaaacgcattggcagcctgcagcctgaaaggcgcttctatgccgcgcgtcgtcaacagatgatggagccggggattcactggaacctgctacatgactggtacgcggtgatgggcgaaaaaaacggaccggatcgttacgccatgcgcttatacgtgcagaccggcgtgcgctggatctggggtgggggattgttgatggtgtgtggagcgctgctgagcggatggcgggggaggaagcgtgatgcgtaa

SEQ ID NO: 370826 - DNA, 957 bp, Salmonella enterica
atgacatccgcttctccatttcattttgcatcactggtgtgggactggcccatcgccatctatctgtttctgattggcatctccgccggactggtcacgttggcgattctgctgcgtcgcttccatccggaggcgggcggttcggacagcacgctgctgcgcactacgctggtgttagggccgggggcgattatcttcggtctgctgattctggtcttccacctgacgcgcccgtggaccttctggaagctgatgttccactacagctttacctcggtgatgtcgatgggggtgatgctgttccagttgtacatggtagtgctggtgctgtggctggcgaaaatctttgaaaaagaggtgattgccctgcaacagcgttggctgccgcggttagggatcgtgcaaaaagtgttggcgctaataacgccgtttcatcgcgcgctggagacgttaatgctggtactggcggttctgctcggagcgtacaccggctttctgctgtcggcgctgaaatcctatccgttcctgaataacccgatcctgccggcgctgtttctgttctccggcatctcctccggcgcggcggtggcgctgatcgctatggcgttacgccatcgtagcaacccgcacagcaccgaggcgcgctttgtacatcgcattgaaaccccagtggtatggctggagatcttcctgctggcggccttttttatcgggctggcgctgggcgatgacggcaaaatgcgcgcgctggcggcggcgctgggcggcggattctggagctggtggttctggcttggcgtcgtagggctgggattgattatcccgctgctgctgaagccctgggcaaaccgtagcgtcacgtttcacggcgtgctggccgtttgcggcgccagtttgaccggcgtgctgctgctgcgctttttcattctttatgcgggacagctaacggttgcataa

SEQ ID NO: 370827 - DNA, 672 bp, Salmonella enterica
atgagttgcacccgacgtcaatttattacccgcgtcggctcgctggcggcggtcagtgggatggcaggacgcgttgtagcgaacacgttgaatattaatggcgtgcgttatggcatggtacacgatgagtcattatgcatcggctgcacggcctgcatggatgcctgtcgggaagtcaacaacgtgccggaaggcgtatcgcgcctgacgattattcgcagcgagccgcaggggacgtttcctgatgtgaaatatcgcttcttccgccactcgtgccagcattgcgaccatgccccctgcgttgacgtctgcccgacgggggcatcattccgcgatgccgccagtggtattgtcgacgtgaacccggacctttgcgtcggctgtcagtactgcattgccgcgtgtccctaccgcgtgcgctttatccatccggtcagtaagacggcggataagtgcgatttctgccggaaaatcaacctgaaagcgggcaaacagcccgcctgcgttgagtcatgtccaacgaaggcgctgacgtttggtaatctggacgatcccaacagcgatatctcccgtttgttgcggcaaaaaaccacctatcgttacaagctggcgctgggcacaaaaccgaaggtctaccgcgttccctttaactatggggaggtgagccaatga

SEQ ID NO: 370828 - DNA, 567 bp, Salmonella enterica
atgagcgtattacgttcgttattaactgctggggtgctggcgtcaggcctgttctggagcctgagtggaattactgccacgccaacgccgcaggagtcggatcaacgctggacggtcacccagcagcgtaatccggatgctgcctgtctggactgtcacaagccggacaccgaaggtatgcacggtaaacatacgggcgctatcaacccgaacaataaattgccgataacctgtaccaactgccacggtcaaccgtcgcttcaccaccgtgaaggggtgaaagatgtgatgcgttttaacgacccgatgtatacggtagagcagcagaacagcgtctgtatgtcctgccacttgcctgaacaactgcaaaaagcgttctggccgcacgatgttcatgttactaaagtgacctgcgccagttgccattccctgcatccgcagcaagacacgatgcagacgctaagcgagaaagggcggatcaaaatatgcgtggattgccacagcgatcagcgtactaacccgcactttaatccggcgtccgttccgttgcttaaggagcagccatga

SEQ ID NO: 370829 - DNA, 1437 bp, Salmonella enterica
atggcaaggaaaacactacgcgcacgccgtttcttcagccttatatttccttttttcttcattacctctgtttacgctgagcaaacgcctgaatccgcaaaaaccgttactgttgaagcgaaaaatgaaatgttcgcgcctcaacaccccgaccaatatcagtcatggaaagcgacgtcagaacagtctgcccgtgaagatgcgctggcggaagaccctcgtctggtgatcctgtgggcgggctatcccttctcccgtgattacaacaaaccacgcggccacgcgtatgcggtaactgacgtgcgcgaaacactgcgtaccggcgcgccaaaaacggcggaagacggcccgctgccgatggcctgctggagttgtaaaagccccgatgtcgcgcgccttatccaacaagaaggcgaagacggctacttccatggcaaatgggcgcgcggcggcccggaaattgtcaacgatttgggctgtgccgactgtcataacaccgcgtcggacgatttcgcccaggggaagccagcgttaacgttgtcgcgcccctatgccgaacgggcgatggaggctatcggcaaaccgtttgataaagcgggacgatttgatcagcaatcgatggtctgcggtcagtgccacgtggagtactactttgacggtaaaaacaaagccgttaagttcccgtgggatgaaggcatgaaggtcgaaaatatggagcaatactacgacgccatcgccttctctgactggactaactcgctgtcgaaaaccccaatgctcaaagcgcagcacccggaatatgaaacctggagcgcgggcattcacggtaagaacaacgtgacctgtatcgactgccacatgccgaaagtacagaacgccgaaggcaagctctacaccgaccataaaatcggcaacccgttcgacaatttcgcgcaaacctgcgccaactgccacacccaggacaaagcgtccctgcaaaaagtggtcgccgagcgtaaacaggcgattcatgacctgaaaatcaaggttgaagatcagctggtacatgcgcacttcgaagcgaaagccgcatgggatgcgggggcgacagacgcggaaatgaaaccgattctgaacgatattcgccacgcgcagtggcgttgggatctggcgattgcgtcacacggtattcatatgcatgccccggaagaaggtctacggatgttaggcagtgcgatggataaagccgcggatgcccgtactaaactggcgcgactgctggcgaccaaaggcattacccatgaaattccgctgccggatatttcgacgaaagagaaggcgcagaaagcgattggtttgaatatgcaacaaatcaacgcggagaagcaggacttcctgaaaacggtcgtaccgcagtgggaagatcaggcgcgtaaaaacggtctgttaagccaataa

SEQ ID NO: 370830 - DNA, 1959 bp, Salmonella enterica
atgagccaaacacataaacacgccattcccgccaacattgcggatcgttgcctgataaatccagagcagtatgagactaaatataaacagtctattaacgaccccgatacgttttggggcgaacagggaaaaattctcgattggatcacgccgtaccaaaaagtgaaaaacacctcctttgcgccaggcaatgtgtcgattaaatggtacgaggacggcacgctgaatctggcggcgaactgtcttgaccgccatttgcaggaaaatggcgatcgcaccgccattatctgggaaggcgatgacgcgtcgcagagtaaacatatctcttatcgcgaactgcatcgcgatgtctgccgtttcgcgaatacgctgctggatctgggcattaaaaaaggcgatgtggtagcgatttatatgccgatggtgccggaagcggcggtggcaatgttggcctgcgcccgcatcggtgcggtgcattcggtgatcttcgggggcttctcgccggaagccgtcgccggacgcattatcgactccagctcgcggctggtgatcaccgctgacgaaggtgtacgtgccggacgcagtatcccgctgaaaaagaatgtcgatgacgcgctgaaaaacccgaatgtcactagcgttgagcatgtgatcgtcctgaagagcaccgacagcgacattgactggcaagaaggccgcgacctgtggtggcgcgatttgattgaaaaagccagccctgagcaccagcctgaagcgatgaatgccgaagatccgctgtttatcctttatacctccggctccaccggcaagccgaaaggcgtgctgcacaccaccggcggctatctggtctacgccgcgaccacctttaagtatgtctttgattatcaccctggcgatatttactggtgtaccgccgatgtgggttgggtgacggggcacagctatctgttgtatggcccgctggcctgcggcgcgaccaccttaatgtttgaaggcgtgccgaattggccaacgcccgctcgcatgtgccaggtggtcgacaaacaccaggtcaacattctttataccgccccgacggctatccgcgcgctgatggcggaaggcgataaagccattgaaggcaccgaccgttcttcactgcgcattctgggttccgtcggcgagccgatcaatcccgaagcgtgggaatggtactggaagaagatcggcaaggaaaaatgtccggtcgtcgacacctggtggcagactgaaacaggcggttttatgatcacgccgctaccaggcgctatcgaactgaaagccggttccgccacccgtcctttctttggcgtacagcctgcgctggtggataacgaaggccatccgcaagaaggcgcgacggaaggcaatctggtcatcaccgattcctggccgggccaggcgcgcactctgttcggcgatcatgaacgttttgagcagacctatttctctacctttaagaatatgtatttcagcggcgacggcgcgcgtcgcgatgaggacggctattactggatcaccggtcgcgtggatgacgtgttaaacgtctccggccaccgtctgggtacggcggaaatcgagtcagcgctggtggcgcatccgaagatcgccgaagcggcggtggtgggtattccacacgctatcaaaggccaggcgatttacgcttatgtgacgctcaaccacggcgaggagccgtcgccagaactgtacgcggaggtgcgcaactgggtacgtaaagagattggcccactggcgacgccggacgtgctgcactggaccgactcactgccaaaaacccgttccggcaaaattatgcgccgcattttgcgcaaaatcgcggcgggcgataccagcaatctgggcgatacctcgactctcgccgatcctggcgtggtggagaaactgctcgaagagaagcaggccatcgcgatgccgtcataa

SEQ ID NO: 370831 - DNA, 315 bp, Salmonella enterica
atgaatgaccaaatttatcagcggatagaagacagtgcgcgtttcagggaattagttgaaaaacggcaacggtttgccacgattctgtcggttatcatgctgacggtttatatcagctttattttactgatcgccttcgcgcctggctggctgggcacgcctctacatgcgggaaccagcgtcacccgaggaattcccattggcgtcggggtgattgtgatttcttttgtgttgaccggaatttatatctggcgggcgaacggcgaattcgatcgtcttaataacgccgtactgcatgaggtgaaagcattatga

SEQ ID NO: 370832 - DNA, 1650 bp, Salmonella enterica
atgaagagagttctgacggcgcttgccgccgcactccccttcgccgctcatgcggcggatgccattagcggcgcggttgaacgccagcccaccaactggcaggcgattatcatgtttttgattttcgtcgtgtttacgctcggtattacctactgggcctctaaacgcgtacgttcccgtagcgactactacacggctggcggcaatatcaccgggttccagaacgggctggcgattgccggcgactatatgtccgccgcgtcatttctcggcatttccgcgctggtgtttacctccggttatgacgggctgatctattcgctgggctttcttgtcggctggccaatcatcctgtttttgattgccgagcgcctgcgtaatctgggacgttatacttttgctgacgttgcctcttatcgcctgaaacaggggccaatccgtattctttcggcctgtggctccctggtagtggtggcgctttatctcatcgcccaaatggtcggcgccggtaaactgattgaactgctgttcggcctcaactatcacatcgccgtggtgctggtcggcgtgctgatgatgatgtacgtgctgttcggcgggatgctggcgacaacgtgggtgcaaattatcaaagccgtcctgttgctgtttggcgccagttttatggcctttatggtgatgaaacacgtcggctttagcttcaataatctgtttaccgaagccatggcggtacacccgaaaggcacggcgattatgagcccaggaggattggtgcaagatccgatttcggcattgtcgttgggtctgggactgatgttcggcaccgccggcttgccgcatattctgatgcgtttctttacggtcagcgatgcccgcgaagcgcgcaagagcgtgttctatgccaccggttttatgggctatttctacattctgacctttattatcggcttcggcgctatcatgctggtgggggcgaatcccgcctataaagatgcggcgggcgcgctgattggcggcaataacatggcggcggtgcatctggccaacgcggtaggcggcaacctgttcctcggctttatttcggcagtggcgtttgccaccattctggcggtggtcgccggtctgacgctggcgggcgcatcggcggtgtcgcatgacttgtacgccaacgtgttccgcaaaggcgcaaccgaacgtgaagagctgaaggtgtcgaaaatcaccgtcctggtgctgggcgtgatcgccattatcctcggcgtcctgtttgaaaatcagaacatcgcctttatggtgggcctggcgtttgctatcgccgcgagctgcaacttccccatcattctgctttccatgtactggtcaaaactgaccacgcgcggcgctatgctgggcggctggttaggtttactgacagcggtggtgctgatgattcttggccctaccatttgggtgcagatcctcggccacgaaaaagcgatcttcccgtatgagtatccggcgctgttctctatcagtgtggcgttcctggggatctggtttttctcggccaccgataactcggcagaaggcaaccgtgaacgtgagcagttccgcgctcagtttatccgctcccaaacgggattcggcgtagaacaagggcgtgcgcattaa

SEQ ID NO: 370833 - DNA, 690 bp, Salmonella enterica
gtgaataacgttcagttaagcgtactgtgtctggtgattacgctggggatttacttcgccaataagcgtctgtatcgccgttttcgcaaactgccgttgatgccattagtgttgacgccggcactgctggtgttaatgctggtgttcggtcatatctcctggcaaaactatattggtgaatcgcactggctattgtggctgctcggcccggcgactattgcctttgcggtgccggtgtacgataacctcgcgattatcaaacgtcactggatgtcgctcaccgcgggcgtagtgacggcgacggtggtggcagtcaccagttccgtttggctggcgcgtctgttcacgttatcggatgagattcagcgtagtctggcggtacgttccgttactacgccgtttgcgctggcggcggcagaacccctgggcgggcagccagatctggtggcgctgttcgtggtcgtcactggcgtgtttggcatggcggtcggcgacgcgctatttttgcgtctctctatccgggaaggcatggcaaaaggggcaggattcggcgcggcgtcacatggggcgggcacggcgcgttcctatgaacttggtcagcaggagggcgtcgtcgccagtctggtaatgatgctgtccggcgtggtgatggtgctggcagccccgctggtggcgagggtgatgttctga

SEQ ID NO: 370834 - DNA, 411 bp, Salmonella enterica
atggctgtggcgataagccgcgttacgcctgccgttgtgcaacgactccaggtaccggttcaggtactgctctatgcaggtttattcattttttcccaatatcttgtctcctggctgcacctgccgttgcccgcgaatctggtcggcatggtgcttatgttggcgctgatcgtttgccggattattccgcttagctgggtacgcgcaggcgcacgctggctgctggcggagatgctgttattctttgttcccgccgtcgtggcggtagtgaactatgcccatctgttactggtggacggctggcgcatcttctcggtgatagcgatcagtaccttaatggtactcggcgcgacggcgtgggtggtggataaagtgtatcgctatgagatgagtaggctaaaccgtgaataa

SEQ ID NO: 370835 - DNA, 888 bp, Salmonella enterica
atggatatcagaacgctgcgttattttgtcgaggtggtgcgccagcaaagtttcacccgcgcagcggagaagttatttgtcacccagcccaccattagcaagatgctgaaaaatcttgaagatgagcttaactgtacgctactgatccgcgacggacgtaagttattgctgaccgataccggacgcgtggtgtttgaacgcggtctggcgatcctcgctgagtttcgccagttagaggccgagttgagcgatattaaccatctcaataagggcgtgctgcggctgggtattcccccgatggtcggcatgttgatggccgggccaatcagtttgtttcgacaacgctaccctggcgttgaactcaaaatttcggagtttggcggcctgacggtacagcaggcggtaatgaatggcgagctggatgttgcgatgaccgcgctcccggtggaagaagcgagcgggctgacgacgttatcgctgttcagtcatccgctgtgcgtgctggttccccgttccggtcagtggacaacctgcgactccatcgcgcctgaagctctggcggagcatcctcttcttatctataacgaagactttgccctgagccgccagttgatgaccttatttagccagcatgacgtaaaaccacggattgccgtgcgcagcgggcaatgggattttctcgccgccatggtgcaagcgggcgtcggcatcgccattttgccggagccgatttgtcagcgtctggataaggccacgctgcgctggctaccgctggaaagcgatctccgctggcagttgggcatgatttggcgcgagggcgtgtatctgtcgcacagcgcccgggcatggttaacctgttgcgaagggttttggctgaaacaaccgtaa

SEQ ID NO: 370836 - DNA, 1647 bp, Salmonella enterica
atggaaattttcttcacaatactcatcatgacccttgtggtctcgctgtcgggggtatttacgcgtgtattacccttccagcttcctttaccccttatgcagatcgccattggcgcgctgttggcgtggccgacgtttggtttgcatgtggaattcgacccggaactcttcctggtgctgtttattccgccgctgctgtttgcggatggctggaagacgccgacccgtgaatttcttgagcatggacgagagattttcgggctggcgctggcgctggtcctggtaacggtcgtgggaatcggcttcctgatttattggctggtgcccggcattccgctgatccccgcctttgcgctggccgccgtgctgtcaccgaccgatgcggtagcgctctccggaattgtgggcgaggggcgtatcccgaaaaaaatcatgggcattctgcagggagaggcgttaatgaacgacgcctccggtctggtatcgctgaaattcgccgtcgcggtggcgatggggacgatggtctttaccgtcggcggcgcgacgctggaattttttaaggtcgctatcggcggtattctggcgggttttgtggtcagttggctgtatggccgctcgctgcgttttttgagccgctggggcggcgatgaacccgcgacgcaaatcgtcctgctgtttctgctgcccttcgcgtcttacctgattgccgaacatattggcgtctcaggcatcctggccgcggttgccgccgggatgaccatcacccgttctggcgtaatgcgccgcgcgccgctggcaatgcgtttgcgcgcgaacagtacctgggcgatgctggaatttgtctttaacggtatggtctttctgctgttgggactgcaactgccggggattctggaatcttcgctggcggcggcggaagctgacccgaatgtcgaaacctggatgctctttaccgatatcgtgctgatttatgcggcattgatgctggttcgcttcggctggctgtggaccatgaaaaagttcagcctgcgctttttgaagaagaaaccgatggagttcgccagctggacgtcgcgtgaaattctgattgcttccttcgctggcgttcgtggggcgatcaccctggctggtgtgctctctataccgttacttttgccggatggcagcggatttccggcgcgttatgaactggtattcctggcggctggcgtcattctgttctcgttgtttgtcggtgtgatcatgctgccgctgctgttgcaacatctggaagtcgccgatcatgcgcaacagttgaaagaggagcgtatcgcccgtgcggcgacggcggaagtggcgattgttgccattcagaaaatggaagagcgtttggcggcggataccgaagaaaacatcgataatcagttgcttactgaagtaagctcacgtgtcattggtaacttgcgtcgccgtgccgatgggcgaaacgatgtcgaaagctccatacaggaagaaaacctggagcgacgtttccgtctggcggcgctgcgttccgaacgcgccgagttgtatcatctgcgcgccacgcgagaaatcagcaatgaaacattgcaaaagctgctgcacgacctggatttgatggaagcgctactgatagaaaatcagtag

SEQ ID NO: 370837 - DNA, 1350 bp, Salmonella enterica
atgtctacgccttcagcgcgtaccggcggttcactcgacgcctggtttaaaatttcacaacgcgggagcaccgttcgccaggaagtcgttgctggcttaaccacgtttctcgcgatggtttactccgtcatcgtggtgccagggatgctgggtaaagccgggttcccgcctgccgccgtctttgtagcgacctgcctggtcgcaggcgtcggctctattgttatggggctatgggcgaatctgccgctggctatcggttgtgctatatcgttgacagcgtttaccgcgtttagcctggtcctggggcagcatattagcgtcccggtcgcgcttggcgccgtattcctgatgggcgtactgtttaccgttatctccgccaccggcattcgtagctggattttgcgtaacttgccgcagggcgtggcccacggaaccggtatcggtattggcctgtttttgttgctgattgccgccaacggcgtcggcctggtcattaaaaacccgctggatggcctgccggtcgcgctgggcgatttcgataccttcccggtgattatgtcgcttgtgggtctggctgttattctcggtctggaaaagctgaaagtccccggcggcattctgttgaccattattggcatttctattgtgggtttgctcttcgatcctaacgtccatttttccggcattttcgccatgccttcgttgagcgatgaaaacggcaactcgctgatcggcagcctggatattatgggcgcgttaaaccctgtcgttctgccaagcgtgctggcgctggtgatgacggcggtgtttgatgcgaccggcacgattcgtgcggtcgcagggcaggctaatctgctggacaaagacggacaaattatcgatggcggcaaagcgctaaccaccgactcactgagtagcgttttctccggcctggtcggggcggcgccagccgcggtgtatatcgagtctgcggccggtacggcggcgggtggtaaaacgggcctgacggcgattaccgtgggcgtgctgtttttgctgatcctgtttctttcgccgctctcttatctcgttcccgtctacgcaaccgccccggcgctcatgtatgtcggtctgctgatgctgagtaacgtggcgaaaatcgattttgctgatttcgtcgatgcgatggcggggctggtaacggccgtatttattgtactgacctgtaacatcgtcaccgggattatgatcggctttgccacgctggtcgtcgggcgtctggtttccggtgaatggcgtaagctgaatatcggaactgtcgtcattgcggtcgcgctggtcgctttttatgccggcggctgggctatctag

SEQ ID NO: 370838 - DNA, 669 bp, Salmonella enterica
atgctgacggtgcaccatttaaatcagtctcgttcgcagcgcatcctctgggcgctggaagagctggcgttgccttaccagattgtgcgttaccagcgtgaaaagaccatgctggcgccgccggcattgaaaaaagtgcatccgctgggcaagtctccggttatcgaagatcacggtatggttattgcggaatcgggcgccatcctggaatatttgcaggacacttacgacaatatcggacgctttaagcctgcggatgcgcagggaaaacaacactatcgattctggctacattacgctgaaggttcgctcatgcccttgctattgatgagactgctctttacctctctgggtaaaccgccggtcccattgggcctgcgaacgttgggcggcgttatcggtaagggcgcgcaaaaagcgtacctcaatccgcaactggaaacccatgcgcgctttattgacgggcatctggcaaatcacccctggtttgccggagagcagttaagtatggcggatatccagatgagcttcccgctatttgcgctgcttgcccgaggcggaatcgctcatctcgaccatatcaacgcatggaaagcgcgggtagaaatgcgtccagcctggcagcgagcgattcagcagggcggtccgtttaccatttccggcggataa

SEQ ID NO: 370839 - DNA, 459 bp, Salmonella enterica
atggaaaaaaaatctccccgtttaaaagccttactgacgccgggggaagttgcgaaacgtagcggtgttgctgtgtccgccctgcacttctatgaaagcaaagggctaattaccagtatccgtaatagcggtaaccaacggcgatacaagcgtgacgtgttgcgttatgtcgcgattatcaagatcgcccagcgtatcggcatcccgctggcaactatcggcgacgcgtttggtatcttgccggaaggacatacgttaagcgcgaaagagtggaagcagctctcctcgcagtggcgcgaagagttagaccgacgtattcatacgctggtggcgttgcgcgatgagctggacggttgtatcggctgcggctgtttatcgcgtagcgactgtccgctgcgaaatccaggcgacaggcttggcgaacacgggacgggcgcccggctgcttgaagatgattaa

SEQ ID NO: 370840 - DNA, 324 bp, Salmonella enterica
atgtcgcatcagcagataattcagacccttatcgaatggattgatgaacatatcgaccaaccgctaaacattgatgtggtggcaaaaaaatcgggctactccaagtggtatttgcagcggatgtttcgtacggtaacgcatcaaacattaggcgagtatattcgccagcgccgtctcctgttggcggccgttgagctacgaacgaccgagcgcccgatttttgatatcgcgatggacctgggctatgtatcgcagcaaaccttctcgcgtgtattccgccgcgagttcgatcgcactcccagcgattaccgtcaccgcctgtag

SEQ ID NO: 370841 - DNA, 1602 bp, Salmonella enterica
atgagtcaaagcacacgacgcaaggtgttgagatttctcggaacgatcattgtggtgttacttcctatattgctggcgatctggtttgctcatatccgggcagtctctgaaaccagaaatcagttacattcatttgcgcagttggtattagataaaacggagcgggttatcctgcaagcagatttagcccgcgatgccgctgaacaatatcaggggcaagcctgtacgccagcccatcaacagcgaatgctgaatattatccgcggtcgtttgtacattaatgagttgatttatgctaagggccagcgttttctatgctctacggttatgacgccaacaagtccttattttattccccgcgctgactataaacgaaagcctgacatcgctatttattactatcgtgatacgccttttttcaacggttataaaatgacatatatgcagcggggaaactatgtcgcggttatcaatcccttatcttatagcgaggtgatgtcagacgatccggcgttggcctggggaatgtatgatacggtgaccaacacctttttctccctgagtgaacaggcgcaggctgatcagctattacctttggtacgacggagtgaacctgtgttccaacagggtgagcgtttttatactctggttaaatcagcaaaacgaccggttgccacgattgtttcaacctcaaagcaacgcttttaccagaacctctttcatcagcttacgttaacgctaccgttagggatcatctgtagcattatcgtcttatttatgtggtcacgatcccggcaggcatattactcaccgcgtcgattgctgcaacgggccattaccaggcaccagctttgccttcattatcagccgatcattgatatccgaaacgggacatgtgtaggtgccgaagcgctattgcgttggccgggctatcacggtccggtgatgagcccgtgcgaatttattccgctggcggaaaaagaggggatgattgagcagatcaccgattatgtcgtcgaagaggtatttaatgatttaggtggttttctggccgcgcacccgcatctttatgtctctatcaatctctctgccgctgattttctctcttcccggctaattgtgatgattcatgaaaaaacgcgtcagcattcagtgcttgcgcaacagataaaagttgaagtgaccgagcgcggatttattgatgtgcctaaaatgacgccgattattcaggcgtttcgccaggcgggatacgaggtggcaattgatgactttggtaccggctattcgaacttgcataacctgtactcattaaatgtcgaccttttaaaaattgataaatcttttgtcgacacgctaaccactaatagcgccagccatttgattgtggaacatattattgaaatggcgcaaagtttgcggctaaaaatcattgctgagggggttgaaacggctgaacaggttagctggttgctaaaacgcggcgttcagtattgtcagggatggcactttgcgaaggcgttgccaccgcaggaattcatcgcctggttacaacaaacgcccgcgcctctgacgatacgcgggcagaggccctacaggcggtga

SEQ ID NO: 370842 - DNA, 282 bp, Salmonella enterica
atggctgccataaccactggtgtcgttcttctccgctggcaactgctgagcgccgtgctcatgtttttagccagcacgctcaatatccgtttccgtaaatcagattatattggtctggcggtgatcagtagcggtctgggcgtggtatccgcctgctggtttgccaccggtttactcggtattaccatgatggatctcgctgcgatctggcataacattgaagccgtaatggtcgaaacgatgagccagaccccgccagaatggccgatggtgctgacctga

SEQ ID NO: 370843 - DNA, 2067 bp, Salmonella enterica
atggataaaaaactagaaccttattatttaagtgcggaaacggcattatctatagtgtctaaaaaattcaacataaaaattgatatcaaagaggatgatataaatttaagatttaaaaagtacgacagaaataacactgatgactctatacaaatgaagaatttctttttgtcgttagggctttctctacaggatatattatttaataatggtgaggatttactaaatgagcctatgccgattttactattaacaccagaaatgaagtggatggtgtgtgtgagtggcgggcaaaaaataaagttggtaaacgcgcgcggtgaactctgttatgttgaaattgaagatgaatatttaaaagagttatctgcatttagtatactacctttaaataaagttgttgatagtataagagtaaaaaatatcataaaaaactctttatcgatgaacaagattttttatactaaatactttttttcatctctttttatggcaatttttgcgttaactatcccagtatttagtaatctgttctatgataagcttgttccaagcgcttcggtttcatctttatttggcgtggctataattgttgctgtatttattgtttttgagtttatccttcgtacttcgaaagatatttatcagtctatcacagcaaggcaggatgacgtcgatattgatatcgcatttcttgaagcggtactttatagtaaaaagaaaaatggcagatccatgtcatcagcatttgtgctatggaatgagtttcagaaaattaaacccgttttattaaactcgatctttcaacgtatagccgatattccaatatttattatatttctcattgttatatatgtaaatttaggtctggttgttattgtacctattaccatgtttatcgtctctattattatttccctcgttaaccaccattatactaatgagttaatgaacaaacaaaaagaaggacagaagaacaggaatatttttatctcagaagttttcttatctattaaaatgatccataccttaaataatcaaggtttactttttgattgggttaatacgtcaaatgaacagtcgtatcttaacctgaagataaggaaattaaatcttatctatcaatctatattggggagtatgtcatctattacccaaataactattatggtaatagccttttttatggtaatcaagggtgatgttactactggcgcaattgtttcatctgtcattgtctctggccgtatttccgggatcatttcgaatttttcttctacattaatctctattttatcagcagaaaaaaccggtaaggatctgctttctttttttgatgaagatcaggcagaaaaaacaccggcattacagtcaatatcaaagtgcaatggcgatatctctatccggggcgtgagttatcagtatgatgctcaatctccgatgattattaaccgactgtctatagacatacctgcggggcaacgtgtcgcggtggtaggcgaatgcggagcaggaaaaagctcattactgggaatgctatctggctacctttcgccaacagacggtgccattttatatgatggatataacttaggacatttatcgcagaactttttttctcagcatttaagcgtggtgacgacacatgatgttttattcaccggaaccattgaaagtaatttcgcgttaaaaccgcaaaacgacaggggccgggtactcaaggcgcttcagctggcgaactgtggttttatcttgcaacatcctatggggctgaagtttccggtgaattttatggctaaaaacctgtcatccggacagcagcagcagttattattagcacgtagtctgagtagtgacgccagcgtctttttatgggatgaaccaacatcaaatctggatgagaataccgagaagcaaatttttgataacttagatgagtttattcatgggaaaacgttgatcatggtgacgcatcgtcgatatctgataaagtattttgaccgggtcctggtaatgaaaggtggaaaaataatccgtgattgttctccggataaattattaatgtaa

SEQ ID NO: 370844 - DNA, 10908 bp, Salmonella enterica
gtgccgaccctctcgctggacagcgcagatgacagcggcatcgcgggcgataatatcaccaatgttaaaacgccgggctttaccctcaacaatattgataccgatgtcagccgggtgatagtggaggtaatgcacaatggcattaaacaggaggtgccactggttcagaccggcggacagtggcgctttgcgccgaccagcgactgggcggacggcgactatatcctgacggtgaaggtagaagatagggccggaaatgtgaagcagtccgcgccgttgacggtgacagtagatacgcatatcgccattgaccgtattgaactggttaacgacagcggtatccccggcgataatctgaccaatgaagcgcgcccgcactttcaggtgacagtaccggcggatgttaacggtgtaagactgagtattgatggcggcaaaacgtggtttgacgccacgcagagcgcgacgtcgggcgtctgggattacacctggctgacgaatgtggctaacggccctcacaccctgatggtggaagcgtccgacaaggcgggaaacaaaacgacgcagaaactggacttcatcatcgataccctgctgtcagaaccgactattaccctggacagcgcggatgatagcgccgctggcgataacatcaccaacgttaagatgccaggctttaccctcggtaatatcgacgccgacgtgaccaaagtggtggtgacggtggcgcatgatggtaagaaccaacagatagagttgattaagaacggcggtgtgtggcgctttacgccgggcgcagcctggaccgatggcgactatacgttgacggtaaaggtagaagataaggcgggtaatacaaattattctgcgccgctgacggtgactatcgatacgcaaacgtctattgatcgcattgagcttcttaatgacacgggtattgtcggggataacctgaccaatgaagcacgtccacagtttcatattacggtaccgacggacgtgaactctgtgcaactgagtcttgatggcggcatcaactgggttaacgcaacgctgacgtctgacggcgtttgggagtatatatggccgacagatctggtcgaaaatacgtataccctgacagtgaaagcaaccgatgttgcaggcaacacggcgacggaaacgctcaattttatcattgataccacattgtcgacaccgaccatcacgctggatagcgcagatgatagcggcaccgccaacgataataagactaacgttaaaacgccgggttttattatcggcggtattgattctgacgtgactcaggtcgtcgtgcaggtgatgcgcgatggtcacagcgaggaggtggagctgacgcagactaacgggcagtggcgttttgtacccggcagcgcgtggactgatggcgactatacgctgacggtaacggtgaaagatgaggcgggtaatattcgccactcagcgccgttgacggtcaccatcgatacgcaaatcaccattgaccacattgaactggtcaatgacagcggtattcccgacgataatctgactaataacgtgcgtccgcacttccaggtgaaggtaccgacggatgttaacgaggtacgcctgagcattgacggcggcaagacgtggttcaacgctacccagagcgcgacgccgggcgtctgggattatacctggctggctgatgtgggagaggggaagcataccctgacagtggaggcgaccgacaaggcgggaaaccagacgacgcagaaactggacttcatcatcgataccatgctgtcagaaccgactatcgtgctggacagcacggacgacagcggaacaaaaggcgataacctgaccaacgcgaataagccgacgtttatactgggcaatattgacgcagacgcgcggtatgtcacggttgaggtgcagtatggcggcacgaaagaagtgctgacggccaccaaaggcgcgaccggcatctggagcgtgacaccgaccggcacatgggcagatggcgactatacgctgacggtgagggtggaggatgatgcggggaacgtaaaatactcagcgccgctgacggtcacggttgatacccaaatcaccattgatgttattgaactggttaatgataacggtattcccggcgacaacctgaccaatgacgttcgtccacacttccgcgtcacggtgccaggggatgtcaacgaggtacgtctgagtatcgacggcggtaatacgtgggttcgtgcaacacagggcacggcagggatctgggattacacctggccgaaagatgtgaccgacgggctacataccctgacggtagaagcgaccgataaggcgggaaataagacgacgcagacgctcgattttaccattgatacccggctgtcaacgcctaccatcactatggatagcagggacgatacaggtgccattggcgatcatattacgagcgtcaaaagaccgggctttaccattggcaatattgactccgatgcgcaatcggtcattttgcggatcacacagggcggcaatagccaggaagtgacactaacccaggttggaggacagtggcgctttacgccagatgctgactgggcggacggtagctatacactgacggtagaggtaacggataacgcaggaaacgttcgtcagtccacgccgctgatagtgacggtagatacgcaaaccagcattactgatattacattggtcaatgatcatggcgtgcctgatgacaatctaactaacagcacccgtccgcagtttgagatcacggtgccggcggatgtgaattctgtgcaactgagcattgatgggggcgcaaactgggtgagcgcggcgcagggtattgaaggcgtctggggctatacctggccaacggatatgggcgatggaaaacacaccctaaccgtcatggtcaccgacagagcgggcaatacggcgacgcaaacgcttgaatttttcatcgacacccggttgtcgacgccgactattgcgctggatagcacggatgataccggtacgcctggcgatgatatgaccaatcgcacccgaccgacctttattctgcagaatatcgattcggatgttatcaacgttacagtcagcgtcacgcataatggaacgacaacctcgtttaccgcgacacagggggctggaggctggagctttacaccgccagcgccgtggggcgacggtgattatacgctgacggtgacagtggaggatcgggcgggaaatacgcgtccgtctacgccgctgacggtgacagtggatacgcaaatagccattgatcatattgaattagtcaacgatagcggcgtccctggcgataatgtgacaaaacatgtgcgtccgcagttccagatctcggtaccggatgatgtggaaaaggttcttctgagtattgacggcggcacgacctgggttaccgcaatcaagagttcgacggctggcatttgggattacacctggccgacggatatgccagagggacagcataccctgaccgtggaagtgactgacggtgcgggtaataagatgacggagacgctcaatttcactatcgacatcacgttgatgacgccaaccattgagctggcgcccgatcaggataccggacagaataagaacgataatctgaccagcgtcactcagccagtatttgtgttggggagtatcgataaagatgttcgacacgtggaattgagtattgagcataacggcacgtttaaaacggtggtactcaccgaatcagccgacggctggcgctatcgaccggattctgctttggcggacggtagctacacattcaccgtgacggtaacagatgtggcaggcaaccagcaaacatccgcgcctttaaaggtgacgatagacggtacgttgactacgccggtgattgaactggcagctggcgaagatagcggtactgttggcgatcgcctcaccaatcacgatcggcctgtgttcgacatacgccaggttgattctgacgttacgcgcgtgatggtcaaagtaacttacaacggtaaaacgcacgaggaagcggcggtattcaccaatggtcaatggcgctttacgccttctgcgagctgggctgatggctcatatcagttagccgttgtggtggaagatctggcggggaatgtaaaagagtctgcgccgtttgaggtgcgtattgacaccacgacaaccattaacaatatcgtattgcttaatgatactggcgtgcagaatgatcaattaacgaatgttgccaaaccgtcattcagaattgacgttcccggtgatgtcgtccaggtacgcgtaaccctggatggtggcgctaactggaatgtgatacgcaaaaatgccgacggacagtggatttttgacagcccgaatactctggttgacggcacatatacccttcgcgtagaggccacggatgaggcaggtaatattgcgaataaagatttagtatttaatatcgatactaatatacaggttccgactattgctttagacgcaggacaagataccggagcgaatacagccgataatatcactaatatttcacgacccacctttacgattggtaatgttgaccccgatgttatcaaagtcgtggtgacgattgatggtcatgattataacgcgactaaggttggggctggttggcaatttacgccaggcaatgccattccggatggttcttataatattaccgttacggttgaagataaggccggaaataccgcgacatcgaaaccattacctgttgtgatagatacgacggctgaaattgaaagcgtcacgttggttacagatagcggtgatagcgatgtagataacattaccaaagtcgacaagccgcagtttagtattgttaccgctgatgatattactcatgtgcgcgttaaaatcgataacgccgctaattggattgaactcacaaaaggaggggatggccgctggatatttaatgtcggttcggcattacctgatgggcaacacactctcttggttgatgtgactgatatcgccggcaacgttgcgcaagaaacgctgcagtttacgattgatacgactctgcgagagccgacaattgtactcgatcccacccatgatactggtgatgatactaatgataatcttaccaggattaacaaaccggtgtttattatcggtaatgtcgataatgatgtatcacacattgtggttcatattgatggtcgggattacaccattgaaaacacaggggggaatttaacctttacgccggatcaaccgctgtctgacggtcagcatacgatctctgttaccgtaacggatattgctggtaataccaaaacatcggccgaactgaagattgaaatcgacacgcaggttcagattgacagtgttacgttaacaacagatagcggcgtcaacgatcacgataatgtcaccaatgctacccgtccctcttttgaaattgcaacgcctgatgatgtgacatcggtgctggtttctttcgatggcgtaaactggacgcccatcagtaaaaatgcggccgggcagtgggaatttactgcaggtagcgcattgcctgatggtcattatactctccatgtccaggcgacggatcgggcagggaatacggcaaattccacgctgggcttcaccgtggatacgcagattgacggcctgagcgtcgtgatgctggacgacgccggaaaggattctacggatggtattacgaatattacctctccacgttttgaaatttcagccagagaaccgctgcagagcgtgacggtaattttaaacgggaaatccagcacactgactcagggggcaggtaataaatggctgtttacccctgatacaccgttagtggatggaacttacaaaatagaaatagtggctgaagatatcgcaggtaataaaattagcaaagaggtatcattcacaatagacactattgtttctgatcccagtattgatttgctggatgcggatgatactggcgaaagcgctgttgataatattacgagtgtcactaaaccacgtttcgttattggcaatgtacccgccgatattgatactgttgtaatcagaattaacggcgtttcttatccggttacggcaaatggcaataacctctgggaattccaggttcccgttgcgttaaacgatggcgtatatgaagccgttgttgtcttcagagatattgccggaaatacttctgaaactaagctgccctttaccattgataccacgacaagcgtcagtgtcagaatggagccagcgtctgataccggaaattccaatagcgataaccttacgaataagcaaaatcccaaattcgaaggtactgcagagcccaatgcgaaactggtgattaccattgttgacgataagtcaggtcgggaggttttaaaacaaacgattacggttggcgctgatggcaactggagtgtgacgccgaatatactgccggatggcatgtataccatcaacgtcgtcgcaacagatgtcgcgggaaatactgcgcaaacgcaggaaagattcactatcgatacggttacgatcgatcccaccattcgcctttcggatccatctattgatgatcagcatgaagcaaccagcctgcgtcctgagttcaaagggtttgccgaagcgttctcgacgattatgattcagtgggatgggaaagtggtcggctcggcaaacgccaatgcgaatggcgaatggagttggacgccgccatcagtattagcgccaggctcctatgttgtgagcattgttgccaaagataaagcgggtaatgaatcgtcgcaggtcgactttcctgtcgtaatacctgttattgatgtcacgcctccaaccataaagctcagcgaggagagcgatagtggtgccttaggagactttaccacgaataataaaacgccgaccctggttgggaacacgttacctaatgcgattgtgagtatttatgtggatggcgtgaaggtcggcgaggcgacagcggatacagcgggtcgatatactttccagttatcggaaatgaaagatggccattatgtcgtccaggtgggtatagtcaaccctcgcgataatagcgaactgcgttccaccgccgttgatgtcactatcgataccgaggttgctgaactggtatggaatatatctggaatgcatgagggcggatatatcaatacggtgacgccggagattggcggcaccagtgagccaaacagcaaaatcactatctttgtgaatggcgttgaaaaagcgattgcttatacgacaggcgcaggacactggggcgtagtattacctgctttgggtaatgacggtaattatgtattaacgtttaaagttgaagatgttgccggcaatatcagagagtttggtccgcagaatgtgatactggatacggtaatttcgccgttaaccgtggtattacgcgaagctgatgacagtggcaaagttggcgactggatcaccaataaatctcatgtcaccatcgatggtactgccgaagccggaagtactttaaccatcaggagtccgcagggggtggttattgctaccctggtggtaggcaatgatggtcgatggagcgcagaattagatctgcgtgaaggtagtaatgcctttgtcgtggtatcggaagataaagcgggcaacagccaacaaaaagatatcctgatagaacatgatacgcagattgaaatcagcgatatttcattaagtcgggatactaatagcggtgataaatatgatctgattaccaataataagtctccggtactggttgccatgaccgatcccggcgcgacggtacaggtttatattaatggtgtgttacaaggcacagtagaggcgagttcgtcaggtaatattagctataccatgccggcaaatagcgccgacggcgagtatcaggtgcaatttgttgctacggatactgctggtaaccgggttgagtctgcgattacaaccgtgacaatcgattctcaaattgctgtctttgacattgatgaagattcattaccggccctctctaataaccgggcgttgtcagtctcaggtgtcggggaggctggttctcaggtcagcatctttgtcgatggtaaattagtcaacgttgttatggttgaggctgatggcacatggcgcgcgccgatactgctgcaagatgatggtacgtttaatattcatttcagcattactgacgttgctggcaacactgaagtgagcaaggattatagcgtggatgtcgattcatcaaccgacttcccaacgctcaaccttgaagatgcaagcaactctggttcacttgacgatctgattactaatcacaacaagcctgtgttagttggcaccgcagaagcgggagccacaatccatatttatgtggatgaaaagatcgtggcaaatgtgcttgtgcttgaagatggaacctggtcctaccagtttgataatgtgttaaaagatggtgaatattctatccgtgtggttgccgaagacccggcaggtaatacggcagaatcgcctcgcttactcgtcacgatagataccagtacgtttatcgataatcctgctatggtggcaggttctgataacggtattttcagtaatgatagtataacgagtcagacccggcctacgtttagtatttctggagaaatgaaccagagtgttcagattttcattgatggggtgttagtcgatacgatcacggtgacggacagaaatcaagtttatcgacctgagtcaccgttgggcgatggttcccatagcatttattatgttatcaccgataaagcaggcaacacggctacctcgaaaacgctaaactttactatcgatacctttaatacgacgcctgtcgccattgattctatcggtggacaaacgttagcagagatgaccggtagtgatggcaaaatatatataacggacacgacgcgtaacttattgtttagtggcagtgccgagcccaatagcaaaatagaaatcatcattaatggcttaaatgtgggggaagtttgggttaatgaaaaaggccactggcagatgccggtgaacccgctttatttcacagaaggccaactggatatcactgttaaatctacggaccgtgctggtaacgtaaatcaggaaaagtattccatttgggtcgatacgcatatccaggtatttaccagcgagcttgatgacaataaatcatcatcgaaaacggactggtggagtaatagctccactattaccatgagaggtatgggggaaattggcgctacggtatcattaatcgtggcaggggtcacgttggcaaccgctgtcgttgcggctaatgggcagtgggaattatcgaccgatcagcttccggaaggtaaatacgatatcacgttgagtattgaggataacgcaggcaaccgtaaggaagaggtacatgaaatatttattgatcgaacgccgccaaacgctccggtcgtaacttattcagatattgtcaacgatctaattattatgcaggggacggcggaagccaaatctcagctaataataaccgatagtaatgggaatacttatacgttaaccgttcctgataatggtaaatggagtatggctatcccgtatccatcggaagggaagtttaccattacgagtgtggatgcgattggtaaccggagtgatgatgtctctctcgatatcatgaaagaggttcccgttatttcattatctccagactcagacagtggtacggtgggcgataatattacgcgagataagcaacctacctttattatcgggaatctggaaagcgatgttgtggtcgttcaggtcgatatcaatgggaccgtatataatgctgaaaaaaatgccgatggcgtttggttctttacgccaggtacaccgttagctgatggttcctatacgatatcggtaatcgcaagcgatgccgcgggtaatcagaaaaactcgttacccattaccgttacgatcgacagtacgctgacggtgccggagattgcgttggcagcaggtgaagacaatggcgtttcagacagcgataacgtgacgaatcacacccagcctaagttcacgctgcagcatattgatgctgatgtgaccggggtgaccgtaaacgtgacgcataacggcgtgacagacacctatcaggcgacgcaaggcgcggatggctggaccttcacgccgccagccgcctggaatgatggtacctacacgctgagcgtgacggtggtggatcgcgcggggaactcacagcaatctgcttcgctagcggtgacggttgactcaacggtgacggtaacagcggatagccagcatgacgatgcgagcgatgacgccacggcaacagcggttactccaccggagtctgaaacagtgaatgccgaaagcgctacgcatcttcgtacagtgccgtctgcggcggaagaaagcgtggtgaaggagacagcctatagtattacattgttaaacgctgactctggggatgaaatagatcgttcaattagtcagacaccttcttttgaaatatcagtacctgagaatattgttaatgtcagtattatgtttgaaggagaagagtttactctgccgataactaaccagaaagcaatattcgaagttccgctatctttggaagatggtgaatatactatggacgtgaaattcattgataaagacaatgatttcctgattaaggagaaaacattctcagtcgatcactcctcggcggatattgtgaacgcaatgaatgcaagaggaaagaccgaggatgatattaatgattccccttccacgagttctgtagggcacaacaataacggcgctattgatgttttcgccgttaatgaagttacgctacctgtagataatcaagaagaacacgcataa

SEQ ID NO: 370845 - DNA, 4494 bp, Salmonella enterica
atgggaaataaaagcatacaaaagttttttgccgatcaaaattctgtaattgatttatcttctttgggtaatgccaaaggcgcaaaagtttctctttccgggccagacatgaacattaccacgccgcgtggttcagtgatcattgtcaatggcgctctttattcaagtatcaaaggcaataacctcgctgttaaatttaaagataagactattaccggcgctaaaattctgggcagcgtagatttaaaagatattcaactggagagaattgacagctcattggttgattctgctcaggtagaaaagaaaggtaatggcaaacgacgaaataagaaggaagaagaggaattaaaaaagcagcttgacgatgctgaaaacgcaaagaaagaagctgataaggcgaaggaagaagcagagaaagctaaggaggctgcagaaaaagcgctcaatgaagcgtttgaagtacagaactcgtcaaagcaaattgaagaaatgctgcagaactttttggctgacaatgtagcaaaagacaatctggctcagcaaagcgatgcttcccagcaaaatacacaggctaaagcaacgcaggcttctaaacagaacgatgctgaaaaagttcttcctcaacctattaataaaaataccagtactggcaaaagtaatagcagtaaaaatgaggaaaataagctcgatgccgagtctgttaaagagccgcttaaagtcacattagcgcttgcggccgagagtaacagcggtagcaaagatgatagtataactaattttaccaaacctcagtttgtaggtagcactgctcccaatgccacggttattattaaaattaatggtattgctgtcggtcaggctgtagcggatagtttgggtaacttcacctttacagcgcctgaaacattgactgatggagcatataatctggaggcagaggccaagactgctgatgggagcggtagcgccaaacttgtcattactatcgattccgttaccgataaaccaacatttgaactttcgcctgaaagtagtgtgtccggtcataagggcttaacgccgaccttgacgccttcaattgttggtacggcggaagagaatgctaaggttgacatttatgtagataataaactggttgccagcgttgatgtcgataaagatggaaactggagttatgaatttaaggataatgaattatctgagggcgaaaatagtataaaagtcgttgctgtagataaagcaggtaataaaaacgaaacgacggatagtatcataaccgacaccattcctccggaaaagccgacgattgagctggatgatagtagtgattccggcattaaaaatgacaacattacaaatagcaccctgccaacatttattggtgtggcggaacccggttctacagtctctatttatcttggacttaaacatcttggtgaggtcattgttgctaaagatgggacatggagctatacgcttactacgccgctcaaggatggcgaatacaatataacagcaacagctactgatattgccgggcatacctcagcgacggcaaatctgccttttactattgatacacgtatcagctatttcagcgctgagattgaaacgacgaatgatagcggtattgtcggagataacgttactaacaatactcgcccaacctttacaggtaaaactgagccaaatgctattatcagtgtcataaatagtgagactggcgaagaggttatttttaaagcgaatgacaagggcgaatggacgttcaatttcacttccgactcagtggaagggattaacaatcttacgttcactgttgaagatgtcgctggcaacaaaaaggatttttcctttagttacgttatcgatactattgcccctgtacctccgacggtttctttggaggactttgttgttttaccgaatggtataattttatcagggaatgatttaccggctttagtcggtacggcagagccaaagtctaccatcttattgatgcgagatggtaaattatatgacagcattgaggttgactcaaacgggacctggaattatcagtttagtaataaatttcttcagggcgcctatgatattgaaatcatctctcaggatgccgccggtaataaatcctctactgttaaatattcttttactattcaaactgaagttgtacctccaaaagcggaactcgatgccagtgatgattccggtgcaaaaggcgactggattaccaataaacataatgctctgacattactgggaacagctgataggtttgctaccgtaaatatccttatcgatggtaaaacgataggcgtgacgactgcggatgcagacggtaactggaattttgatatttcccgaaatctgtctgacaatgtttataagattacggttgaatccatcgatcctttaggaagaacgtcatctgtagattatcagcttaccattgatagctttacgccgatccctactgttatgttgcatgatagcgctgattctggcgttaaaggcgatatgattactaaaattaatacgccgttgtttaccgggatggctgaagctaatgctaaggtttccatctatgttgacggtgtgttaagtggtgaggctattgctggcgatgatggtgtatggaattttcaatttaccacagcgttatccgatggctcgcatgacgtaacggtaaaagtagaagatattgccggtaatactgcctcctcatcagcgtataatttccaaatcgtaacgcaaacgcaaaaaccaacaatagagttggtcaacgatacgggggttgataatacagaccatattattaatgaaaagaatcctgcactgacaggaaccgctgcaccctattcaacggttaaactctatattgatggcgcactgatcgctgaggtcagaacaaataaagatggcagatgggagtataccctgaaagccgatcaaggtttggttgatggcgatcatagaataaccgcttcagttgaagatatcgctggcaacattgcccattcggatcctttcttaattagcgtcgatactgctatttcaataccgatagtttcattgagcccggattcagattcgggaattgcagatgataatttaacgaatatcgttaaacctaccttgcacctaaaagatattgatccggacattatcagtgttcaggtatgggatgccatgtctgatacgcagatcggtgttgccacgcaacaacctgatggttcatgggcctatacctttacttcagatttaacggaaggcttgcatcaggtttatgtcaaggttgaggacattgcgggtaataaagcgaacagtgcggtattcgattttactatcgataccacagtatcaacgccggtgatttccctgctttctaaggatgatacgggggttacaggcgataacctgaccaatatcaataagccaggttttgctatttccggtgttgatgccgatgcgcatcgggtcgtcgtacaggtgatgcataatggcgtgagcgaagagatcgaactttcccacctcaatggtagttggttatttacaccagggaatacgtgggcggatggcagctacacgttaacggtgaaagtagaagataaggcaggaaataccagctattcagcgccgctgacggtcgttatcgatacccaaatcgccattgatggggtggaactggtcaacgatagcggtgtgaaaggcgacaatatgaccaacgacgaccgtccccactttcgtgtgacggtacctacggatgtcaatgaagtccgtctgagcattgacggtggtaattcgtgggttcaggcaaccccgggcgtggcaggcagctgggagtatatctggccgacagacctggcagatggtcaatacacgctaacggtggaggcgactgataaagcaggcaataccgtgacgaagaccatcgatttcgcggtggataccacgctgtcagtgccggtcatcgtactgaatagcgcggacgataccggtgtccagggcgataacatgacgaatcgcacccagccgacatttgccctgcagcatattgatgatgatgccgttcgcgttacggtcagcgtggagcatggcggcgtcaccaccacatttgacgccacgaaaggcacaggcggatggacctttacgccgccgacatcatgggcggatggtgattataccctgagtgtgtcagtcgaagataaagcggggaacaccagccattctgcatcgctgacggtgacggtggacacgcaaatcgccattaataacattgaactggtcaatgacagcggtattcccgacgataatctgactaataacgtgcgtccgcacttccaggtgacggtaccgacggatgtcaacgtggtgcgcctgagcattgacggcggcaagacgtggttcaacgctacccagagcgcgacgccgggcgcctgggattatatctggccggatgatgtggccgacggaggcataccctga

SEQ ID NO: 370846 - DNA, 954 bp, Salmonella enterica
atggcttctttagttattgctgaacataacggcaatactcttttaccttcaacactcagtactatcactgcggcaaaagccattaatagtgatatagatatacttatgttaggatatggtatagaaagtattgcagttaaagccagtcatattcaggggatatccactgtatttgttgctgacagcccactattcgaacaccttctggcagagaatgtggaaaaacagatcagctattttttgaatagtgggaaaaatcattatcagtccattctttttcctgcaagctcttttggaaaaaactgtgcgccacgcttagcagcaaaacttgatgtatctcagattagtgatattacgcgtgtcattgatcaacatacctttgaacgtccaatctatgcgggtaacgctattgccacagtacacagtgatgatgaatataaagtgataactgttcgtcctacctcatttgcggctgcggctgcggttgcggaagatgagggaaaagcccccattgaatttacagaggttgttcttggttcagatcaggtaaaatttattagccaacatgttaataaaagtaaccgtccagacttacaatccgccagagttgtagtatcaggtggacgaggagtaggaagtgcacaggcattcaaagaacttgttgataacctggcagataaattaggcgctgccgtgggggcaagccgggctgctgtagatgctggttatgcaccaaatgattatcagattggccagaccggaaaaatcgttgcgcctcaactttatattgctctgggaatttctggcgccatacaacatcttgccgggatgaaagagtcaggcgtcattgtcgctattaataaagatcctgacgctcctatcttttctattgcggattatggtttggtagctgatattttcaaagctgtacctgaacttatcgataaattataa

SEQ ID NO: 370847 - DNA, 750 bp, Salmonella enterica
atgaaagctttagtttgtgtaaaacaagttgtcgatcataacgttagaattagaataaagcgagatcattctgatgttgatatttctgattcaaaactcagtatcaatccatttgatgaaattgcagttgaagaagcagtacgtttaaaagaacggggattaatcagtgaggttgttgtagtgtctataggaaacacaggtgtaggggatgtattgcgtacagcactggcagcaggggcagacagggcaatatacatattaacaaaaaactctcttacaccactaattgtggccaaaactatcaccgctattacccggaatgaaaaacccgatattatattattaggcaagcaagctattgacgatgattgtaatcaggtaggccaaatgctggcagcattactcgatcttccccaagccactaatgttagtgaaattactatttctgataattcattaactgctgttcgtgaggttgatggaggattagaaacgttaaatttatccctgcctgcagtactcactacagatctacgtctgaatacaccgaggaatatcagcttgccgaatgttattaaagccaaaaagaaacctgttaaggagatagatttcgattcacttggtattaacccgtcatccagattgactattattaaagttgatgagccagcaagaaggaaagcaggcataatcgttccagatattaacacgctgctagataaattaaaaaacgaagaaaaagtaatttaa

SEQ ID NO: 370848 - DNA, 516 bp, Salmonella enterica
atgcaaacgttagaacggttttttcttttcgttacgggggaccaacctgaacgatttgaaaaagcaaatagcagttgtgctgatagcgtaatccttgatttagaaaatgcggtgtcatctgagaaaaaaataattgccagagaaaatgctctgaatttcatgagtaatgatgaaaaagtactgattgctgtacgtgcaaaaattgtaataacttcacgcctggctggatcatatccttctgttgacggtatcacaactgaatttatgaaaaacgagttgacaatacaaaatgctattcactcctgtaaaatggggttcagtggcaaggtatgtattcaccctccacaaatttcacatgtaaacagagcattcagctatttaaaacaagaaatcgagtgggttccccagattatgcgactggctcaatatccccatggagcgttcagtcatgaagggcaaatggtggataaaccgttactggaaaaagcaaaaaggattttggctcatagcatttag

SEQ ID NO: 370849 - DNA, 384 bp, Salmonella enterica
atggtcgttgacagactgagaaccgatcttctcaacaagctgataaacgcgcgtatcgatcttgccgcttatctgcaattgcgaaaagcgaaggggtatatgtcagtcagcgaaagtgacactctgcgtgacaatttttttgaactgaatcgcgagctccacgatcacgctttacggcagggactgcatctcgatcaggaagagtggaacgcgctgcgccgtgccgaaggcgcgcttgcagccgccgccgtttgtttaatgagcggacaccatgattgtccgacctttattgccgtcaacgcagataaacttgaaaactgtctgacaactttgacgctgagtattcagagtctgaaagcacattcaccgcttacacaggtctga

SEQ ID NO: 370850 - DNA, 1326 bp, Salmonella enterica
atgagtaatgtaacccaccagccaaagatcggcttcgtttccctgggctgtccgaaaaacctcgttgattcggaacgcatcctgactgagctgcgtaccgaaggctatgacgttgtgccacgctatgacgatgcggatatggttatcgttaatacctgtggctttattgacagcgcggtacaagagtcgctggaagccattggcgaagcgctgaacgaaaacggtaaggtaatcgtcaccggctgcctgggcgcaaaagaagatcagatccgcgaagtgcatccgaaagtactggaaatcaccgggccgcatagctatgagcaagttctgcagcacgtacatcattacgtaccgaagccgaagcacaatccatttttaagcctcgtaccagaacagggtgtaaaactgacgccgcgccattatgcgtatctgaaaatttctgaaggctgtaatcaccgctgcacgttctgcatcatcccgtcgatgcgcggggatctggtcagccgtccgattggcgacgtattaagcgaagcgaaacgtctggttgatgccggggtcaaagagattctggtgatttcgcaagatacctccgcctacggcgtagatgtgaagcaccgcaccggattccataatggcgaaccggtgaaaaccagtatggtgagcctgtgcgagcagttatcaaaactgggcgtctggacacgtctgcactacgtctacccctacccacacgttgatgatgtgattccgctaatggcggaaggcaaaatcctgccttatctggacattccgctgcaacatgccagcccgcggattcttaaactgatgaaacgtcccggttccgttgaccgccagctggcgcgcattaagcagtggcgcgaaatctgcccggaactgaccctacgctccacctttattgtcggcttccccggcgaaacggaagaagacttccagatgctgctcgacttcctgaaagaggcgcgcctcgatcgtgtaggctgcttcaagtacagcccggtggaaggcgcaggcgcgaatgagctgccggatcaggtgccggaagaggtgaaagaagagcgctggaaccgctttatgcaactgcaacagcaaatctccgctgagcgcttgcaggaaaaagtgggccgcgaaattctggtgatcgtcgatgaggttgacgaagaaggcgctatcgggcgtagcatggcggatgcgccggaaattgacggcgcggtctatttgaacggcgaaaccaacgtcaagccgggcgatatcgtgcgcgtgaaagtggaaaacgccgacgaatatgatttgtggggcagtcgggtttaa

SEQ ID NO: 370851 - DNA, 912 bp, Salmonella enterica
atgcgattatttaactggcgccgtcaggcgattttacatgctatgccggtggtaaaacccgaccagatacgcacgccgtggcgggagttctggcgtcgttttcgccgccagcatgtcgcgttggtcgccgggggattcgtactggcgttaattctggtggcgatttttgcccgttggctgacgccctacgatgcggaaaactattttgactacgatagcctgaacaatggcccctctttgcagcactggtttggcgttgactcgctgggaagagacatctttagccgggttctcgttggggcgcagatctcactggcggcgggcgtgttcgcggtatttatcggcgcgataatcggtacggtgttgggattgctggcgggatattatgaaggctggtgggatcgttttattatgcgcatttgcgatgtgctgttcgccttccccggcattttgctggcgattgccgttgtggcggtgttaggcagcggtattgctaatgtgatcgttgcggtggcgattttctctattccggcgtttgctcgtctggtgcgcggaaataccctggtcttaaaacagcagacgtttattgagtctgcccgcagtatcggcgccagcgacacgacgattttgtttagccatatattgccgggaacggtctcgtcaattgtggttttctttacgatgcgtatcggtacgtcaattatttccgcggcaagcctgtcatttctcggattaggcgcgcagccgccaacgccggagtggggagcgatgctcaatgaagcgcgggcggatatggtcatcgcgccgcacgtagcgctcttcccggcggtggcgattttcctgacagtgctggcgtttaacctgttaggcgacgggttgcgcgatgcgctggacccgaagattaaggggtaa

SEQ ID NO: 370852 - DNA, 921 bp, Salmonella enterica
atgcttaactatgttctcaagcgcctgctgggattaattcctactctgttgattgtggcagtgctggtgtttttatttgttcatttgttgcccggcgacccggcgcggctgatagccggaccggaagccgacgcgcaagtgatcgcgctggttcgtcagcagctggggcttgatcagccgcttcatgtccagttttggcgttacatcacccatgttttacaaggcgatttcgggacgtcaatggtttcccgccgcccggtttctgaggagatcgccagccgctttttgccgacgctgtggctgacgataaccagtatgatatgggcggttctgtttggcatggcgatcggcatcgccgccgccgtgtggcgtaatcgctggcctgaccggttaggaatgacgcttgccgtgaccggcatttctttcccggcttttgcgctgggaatgttgttaatgcagattttttccgtggatctgggctggctaccgaccgtgggggcggatagctggcaacattatattttaccctccctgacgcttggcgcggcggtggcatcagtcatggcgcgttttacgcgctcctcgtttgtcgatgtcctgagcgaggattacatgaggaccgcgcgggcgaaaggcgtcagtgaaacgtgggtggtgttaaaacatggcctgcgcaatgcgatgatcccggtcgtcaccatgatgggactgcaatttggcttcctgcttggcggatcgatcgtcgttgaaaaagtgtttaactggccggggcttgggcgattactggtcgactccgtcgacatgcgcgactaccccgtgattcaggcggaagtgctgctgttttctctggaatttattcttatcaacttagtggtggatgtcctctatgccgccattaatccggctatcaggtataagtaa

SEQ ID NO: 370853 - DNA, 1539 bp, Salmonella enterica
atgacgcaatttattacgcataaatggctggcggcgctgggactggcctcatccattgcggcttttccggccctggcggccaaagatgtggtggtggcggtagggtctaatttcaccacgctcgatccgtatgacgccaacgatacgctctcgcaggcggtggcgaagtcattttatcaggggctgtttggcctggataaagacatgaaggtaaaaaacgtcctggcggaaggctataccgtttctgatgacggtctgacctacaccattaccctacggcagggggtgaaatttcaggacggcgcggattttgatgcggcggcggtgaaagcgaatctcgatcgcgccagcaatccggataaccacctcaagcgttataacctgtataaaaatatcgcaaaaacggaggtcgtcgatccggcaacggtaaaaattaccctgaaacagccgttctccgctttcattaatattctggcgcacccggcgacggcgatgatctcgccgcaagcgctggaaaaatatggcaaggatattggttttcatccggtcggtaccggtccataccagcttgaaacctggaatcagaccgactttgtcaaagtgaaaaagttcgccggttactggcagcagggcttacccaagctggattctattacctggcgtccggttactgacaacaatacccgcgcggcgatgctgcaaaccggcgaagcgcaatttgcttttcctatcccttatgagcaggccgcgttactggcgaaaaataaaaacctcgaactggtcgccagcccgtccattatgcagcgttatatcagtatgaatgtgacgcagaagccgtttgataatcctaaggtgcgtgaggcgttgaattacgctatcaatcgtcaggcgctggttaaagtggcgtttgccggatacgccacgccggcgacgggcgtggtgccgccgtcgatagcctatgcgcaaagctatcagccgtggccctataatccggctaaagcgcgcgaactgctgaaagaggcggggtatccagacggtttcagtaccacgctgtggtcatcgcataaccatagcaccgcgcaaaaagtgttgcagtttacccaacagcaactggcgcagattggcattaaagcccggataaccgcgatggacgccggccagcgcgctgcggaagtcgagggcaaagggcaaaaagagagcggcgtgcgaatgttctataccggctggtcggcgtcgacgggcgaagctgactgggcgttatcgccgctcttcgcctcacaaaactggccgccgacgcagtttaataccgctttttacagcaacaagcaggtcgacagcgatttggcggcggccttaaagaccaacgatccgcaggagaaaacacgattgtacaaagaggcgcaggatattatctggaaagagtcgccctggataccgttggtggtggagaaattggtttctgcgcacagtaaaaatttgaccggtttctggattatgccggataccggtttcagctttgacgatgcggatttgaagtaa

SEQ ID NO: 370854 - DNA, 1872 bp, Salmonella enterica
gtgccgcacagcgatgaactggatagccgcgatgttctgtccgtcagtggcctgaatatcgcgtttcaccacgaagggcaacaggtagacgccgtgcgtaatgtgtcattacgcctgaagcgtggagagactctggcgattgtcggcgagtcgggctcgggaaaatcggtgacggcgctggcgttaatgcggctgattgagcagtcgggcgcgaacgtgcgctgcggcgaaatgctgttgcgtcggcgtaatcgccaggtgattgagctgtctgagcagagtgacgcgcagatgcggcgtgtgcgcggcgcggatatcgccatgattttccaggagccaatgacctcgctcaacccggtatttaccgttggcgagcaaattgccgaatctattcgtttgcatcagggcgccagccacgaagaggcgctggcggaagcgaaacgtatgctcgatcaggtacggatcccggagtcgcaggcgattttatcgcgttatccgcatcagctttccggcgggatgcgccagcgagtcatgatcgcgatggcgctatcctgccgtccggcggtattgattgccgatgaacccaccacggcgctggatgtcactatccaggcgcaaattctgcaacttatcaaagtgttgcagcaagagatgtcgatgggcgtgatttttatcacccacgacatgggcgtcgtggcggatatcgccgatcgcgtactggtgatgtatcagggcgaggccgtggaaaccggcagcgtagagcagattttccatgcgccgacgcatccttatacccaaacgttactggccgccgtccctcagcttggcgcgatgcgcggccactcgctgccacgccgtttcccgttgatttccgctgacgaaccggccctttatgaatcgcagattgagcaagacacggtggtggaaggcgagcctattctccaggttcgggggctggtgacgcgattcccgctgcgtagcggtctctttaaccgcgttacgcgtgaagttcatgccgttgagaatatcagtttcgatctctggcccggcgaaacgctatcgctggtgggcgagtccggtagcggaaaatcgacgaccggacgcgcgctgctgcggttggttgaatcccggcagggggagattatctttaacggccagcgcattgacacgctgtctgcgggtaaactccagccgttgcgccgcgatattcagtgtattttccaggacccttacgcctcgctcgacccgcgccagaccgtggggtattccattatggaacctttacggattcatggtctggggcagggggacgctgcggcaaagcgcgtggcctggttgcttgagcgtgtcggattacgtcctgaacatgcctggcgttatccgcatgagttttccggcggtcaacgtcagcgcatctgcattgctcgcgcgttggcattgaatcctaaagtgattattgccgatgaggcggtctccgcgctggatgtttccgttcgcgggcagatcattaatttactgctcgatttacaacgggaaatggggatcgcctacctgtttatttcgcatgatatggcggccgtggagcgaattagccatcgcgtggcggtgatgtatcttggtcaaattgttgagatggggccgcggcgcgccgtttttgaaaatccgcagcatccttatacgcgtaaattgatggcggcggtgccggttgccgatccctccagacaccggccgcggcgcgttctgctatcagatgatatacccagcaatattcataaacgtggcgaagagacgcccgccgtttcattacagttggtcgggccgggacattatgttgcgcgacctcagcaggataatgcgctctcgcgcttataa

SEQ ID NO: 370855 - DNA, 942 bp, Salmonella enterica
atgaataaagcagtgattgcgattcacggcggcgcaggcgcgattgctcgcgcgcaaatgagccatgagcaggagctacgctatatccaggcgttgtcagagattgttgaaagcgggcaaaagatgctggaagcgggtgacagcgcgcttgatgtagtgacggaagcggtgcgtctgctggaagcgtgtccgctcttcaatgcgggtatcggcgcggtctatacccgagacgggactcatgaactggatgcctgcgtgatggacggcaataccctgaaagccggagccgtcgcgggcgtgagtcatgttcgccatcctgtgctcgccgccaggctggtgatggagcgcagcccgcatgtactcatggtgggggaaggggcggaaaactttgccttttcacaggggatggcgcgcgtttcgccggatatcttttccaccccggcgcgttacgagcaattgctggcggcgcgtgcggcgggcgaaatggcgctcgatcacagcggcgcgccgctggacgaaacgaaaaaaatgggtacagtcggcgcggtggcgcgggataaattcggcaatctggcggcggcaacgtctaccggcgggatgaccaataaattgcccgggcgcgtcggcgacagcccgctggtcggcgccgggtgttatgccaacaacgccagcgtcgccgtttcctgtaccggaacgggagaggtctttattcgcacgctcgcggcttacgatatcgccgcattgatggaatatggcggactcagccttgccgacgcctgtgagcgcgtggtgatggaaaaattaccggcgctgggcggcagcggtggattaatcgccgttgatcacgaaggtaatgtcgcgttgccgtttaacagcgaagggatgtatcgcgcctggggatatgccggggatacgcctaccacaggaatttaccgggaataa

SEQ ID NO: 370856 - DNA, 1236 bp, Salmonella enterica
atggaattttccgccggattgatgccgcttgaaacggcgctgacacagatgctttcacgtattaccccgctcaccgccgtagaaacgttgccgctggtgaactgctttggccgcatcctggcgaccgatatcgtttctcccctcgatgttcccggctttgataattcagctatggatggttatgcggtacgtatggcggatttgtccgccgataagccgctgcccgtcgccggcaaagcatttgccggtcagccttaccagggagagtggcctgcgggcacctgcattcgcattatgaccggcgccccggtgccgacaggttgcgaggcggtagttatgcaagagcagacggaacaaaccgatgacggcgtgcgttttaccgccgatgttcgttgcggacaaaacatccgccgccgcggcgaggatattcgccaggatgcggtggtctttccggccggtacgcgcctgactactgccgaactgccagtgctggcgtcgctgggaattgccgatgcacaggttgtacgtaaagtgcgcgtagcgctgttctcgaccggcgacgagctccagcttccgggccagccgctggaggcgggacaaatttatgacactaaccgtctaactatacatttgatgctgcaacagcttggctgcgaagtgatcaatttaggcattattcctgacgatcccggtaagcttcgcgccgcgtttgtcgacgccgacagccaggccgatgtagtgataagctccggcggcgtctcggttggtgaagcggactataccaaaaccatccttgaggagctgggcgaaatcgccttctggaagctggctatcaagccaggcaaaccgtttgccttcggcaagctcagtaatagctggttctgtggcctgccggggaatccagtctctgcggcgctcactttttatcaactggttcagcccttactggcgaagcttggcggcaacacggcaagcgcagtgccgccgcgccagcgtgtacgcacagcatctcgcctgaagaaaacgccggggcgtctcgatttccagcgcggcattctgcaacgtagcgccaacggcgaactggaggtcacgaccaccggacaccagggttcacatattttcagctcgtttagtctgggcaactgctttattgtgctggagcgtgaacgcggcaatgttgagccgggagaatgggtggaagtcgagccgtttaatgctctgttcggaggcctgtaa

SEQ ID NO: 370857 - DNA, 750 bp, Salmonella enterica
atggcggaacttagcgaccaggagatgctgcgctataaccgacaaattattctgcgcggcttcgattttgaagggcaggaaacgttaaaagatgcgcgggtattagtggtcgggctgggcggactcggctgcgcggcaacgcagtatctggccggcgctggcgtcgggcaactgacgctactcgattttgataccgtttccgtttccaatctccagcgtcaaaccttgcacagcgacgccacggtcgggcagccaaaggttgagtccgcccgcgacgcgctggcgcgaatcaacccgcatattaccattacgcccgttaacgcgcggctggacgacgacgctatgaccagcctgattgccgggcattcgctggtactggactgtactgataacgttagcgtacgtaatcaacttaacgccgggtgctataccgcgaaagtgccgctaatctccggcgcggcaattcgtatggaaggacaagttaccgtctttacgtatcgggaaaacgaaccctgttaccgctgcctgagccgtctgtttggcgaaaacgctctgacctgcgtagaggcaggggtgatggcgccactgattggcgtgatcggttcgctacaggcaatggaggccattaagctgctggcgcattacggtcagcccgctagcggaaaaatcgtcatgtacgatgcgatgacctgtcagttccgcgaaatgaagttaatgcgcaaccccggctgtgaagtctgcggacagtag

SEQ ID NO: 370858 - DNA, 900 bp, Salmonella enterica
atgatcttcaatattcagcgctattctacccacgatggccccggtatccgtaccgtagtatttctcaaaggctgttcgttgggctgtcgctggtgccagaacccggaaagccgcgcccgcgctcaggatctgttatacgacgcgcggctgtgtctcgaaggatgcgacctgtgcgcgcaagccgcgccggacgtcattgagcgcgcgctaaacggcctgctcatccatcgcgagaaactgaccgacgcccatttttcagtcctggcgcattgctgccccacacaggcgttaaccgtgtgcggcgaaataaaaagcgtggatgagatcatggcgacggtactgcgcgataaacctttttacgatcgcagcggcggcggtctgacgctttccggcggcgaaccgtttatgcagccggagctggcggcagagctgtttaaagccagccatgacgccggtattcatacggcggttgagacctgtctgcatgttccatggaaatacattgcgccctcactgccttatatcgatctgtttctggctgatttgaagcatgtcgccgacgggccgtttaagcagtggaccgatggcagcgcctcgcgggtgttggaaaatctcaggaaactcgccgccgcgggcaaaaaaatggtgattcgcgtcccgctgattcagggatttaatgccgatgaggaggccattaaagccattaccgactttgccgccgacgaactgcacgtcggggaaattcattttctgccctaccacacgctgggcattaataaataccacttactcagtcagccctatcatgccccggataaaccactggatgcgccggcgttacttgattttgcccagaagtacgcctgccaaaaaggtttaaccgcgaccctacgaggataa

SEQ ID NO: 370859 - DNA, 2433 bp, Salmonella enterica
atgacccaactgaaactggacacgctcagtgaccgcattaaggcgcacaaaaccgcgctggtacatatcgtgaaaccgccggtctgtaccgagcgcgcgcaacattataccgaaatgtatcagcaacatctggataaaccgattccggtacgccgcgcgctggcgctggcccatcacctggcggaacgcactatctggataaaacacgatgaactgatcgtcggcaaccaggcaagtgaagtccgcgccgcgccgattttcccggaatataccgtctcgtggattgaaaaagagatcgacgacctggcagaccggcccggcgcaggtttttccgtaagtgaagaaaacaaacgtattctgcacgacgtctgtccgtggtggcgcggtcaaaccgtccaggatcgctgctacggcatgtttaccgatgaacaaaaagggcttctggcgactggcattatcaaagccgaaggcaatatgacctccggtgacgcgcacctggcggtgaacttcccgctgctgctggaaaaagggcttgatggcctgcgcgataaagtcgccgagcgccgctcacgcatcaacctgaccgtgctggaagatctgcatggcgagcagttcctgaaggcgattgatattgtgctcgacgcggtaagccagcacatcacgcgctttgccgcgctggcgcgccagatggcgggcgaagagtcccgtgaaagccgtcgtaaagagctacttaccatcgccgaaaactgcgaggtgatcgcccaccaaccgccgcagaccttctggcaagcactgcaattgtgctacttcatccagctgattctacaaattgagtctaacggtcactcggtgtcatttggtcgtatggaccagtatctttacccctattatcgtcgcgatgtagaactaaaccagacgctggatcgtgagcacgccattgaactgctgcacagctgctggctgaaactgctggaagtaaacaagatccgctccggttcgcactctaaagcttccgcaggcagcccgctgtatcaaaacgtcaccattggcggtcagaatctcatcaacggtcagccaatggacgcagtgaatccgctgtcttacgccattctggagtcctgtggacgtctgcgttctacccagcccaacctcagtgtgcgttatcacgccggaatgagtaacgatttccttgacgcctgcgtccaggtcatccgctgcggctttgggatgccggcgtttaacaatgatgaaatcgtcatcccggaatttatcaagttggggatcgaaccacaggacgcttacgattacgcggcgatcggctgtatcgaaaccgccgtcggcgggaaatggggttatcgctgcaccggcatgagctttattaacttcgcccgcgtcatgctggcggcgctggaaggcggtcgcgacgccaccagcggcaaggtatttctgccgcaggaaaaggcgctctccgcaggcaactttaacaattttgacgaagtgatggccgcctgggatacccaaattcgctactacacgcgcaaatcgatcgaaattgagtatgtggtcgacaccatgctggaagagaacgtccacgatattctgtgctcagcgctggtagatgactgtattgaacgcgcgaagagtatcaagcaaggcggcgctaaatatgactgggtatccggtctccaggtcggtatcgccaacctgggcaacagcctcgccgccgtgaaaaaactggtcttcgaacagggcgttatcggtcaacagcagcttgccgccgcgctggccgatgactttgacgggctgacccatgagcagctgcgccagcgtctgattaacggcgcgccgaagtacggtaacgacgatgacagtgtcgataccctgctggcgcgcgcttatcagacctatattgatgagctgaagcaataccataacccgcgctacggtcgtggccctgtgggcggcaactattacgccggtacgtcctctatctcagcaaacgtgccatttggcgccgcgactatggctaccccggatggtcgcaaagcgcatacaccgctggcggaaggcgcaagccctgcatcaggtacggatcatctcggcccgacggcggtgattggttccgtaggcaaattacctaccggttccattctcggcggcgtgctgctcaaccagaaactgaacccaacgacgctggaaaacgaatccgacaaacagaaactgatggttctgctacggacgttctttgaggtgcataaaggctggcatattcagtacaacatcgtgtcacgcgaaacgctgttggatgcgaaaaaacatccagaccagtaccgcgatctggtcgtgcgtgtggcaggctactccgccttcttcaccgcgctgtcgccggatgcgcaggacgatatcatcgcccgtaccgaacatatgctgtaa

SEQ ID NO: 370860 - DNA, 810 bp, Salmonella enterica
atgaccgttaacgttgtcgttaccgatatggacggcacttttctcgacgatgccaagcagtacgatcgtgtacgcttcatggcgcaataccaggaactgaaaaaacgtaatatcgaatttgtagtcgccagcggtaatcagtactaccagttgatctccttcttccccgagctgaaagacgaaatttcctttgtcgcagaaaatggcgcgctggtgtatgaacatggcaagcagttgtttcacggggagctaacccaacatgaatcgcgtattgtgattggcgaactgctgaaggataagcaacttaattttgtcgcctgcggtctgaaaagcgcttatgtcagcaaaaacgctcccgagactttcgtggcgctgatggccaaacattatcaccgcctgcagccggtaaacgattatcacgacattgacgatatcctgtttaagttctccctgaatttgcccgatgaacaaattccgctggttatcgacaaactgcacgtatctctggatggcatcatgaagcccgtcaccagcggcttcggttttatcgacctgattatcccgggactgcataaagcgaatggcatcagtcgtctgttaaagcgctggaacaggtcgccacagaatgtcgtcgccattggcgacagcggtaatgatgcggaaatgttgaaaatggcgcattactcttttgccatgggcaatgccgcagacaatatcaaagcgctttcacgttatcacactgatgataataaccatcaaggcgcgctcaacgtcattcaggccgtgcttgacggcaccgatcccttctga

SEQ ID NO: 370861 - DNA, 1266 bp, Salmonella enterica
atgacgactccttttacccacgaaacgctacccgccgacccaaaagcggccattcgtcagatgaagcaggcgctacgcgcgcaaatcggcgacgtacaggcggtgttcgaccgtttgagcgccaccatagcagcccgggtggcggaaattaacgatctgaaggcgcaggggcagccggtatggccaattatcccttttagcgaactggcgatgggcaacattagcgatgccacccgcgccgaggttaagcgccgcgggtgcgcggtgattaaaggtcattttccacgcgaacaggcgctggcatgggaccagtcgatgctcgactatctggacaagaaccattttgacgaggtgtataaaggaccgggggataattttttcggtacgctgagcgcctcccggcctgaaatctatcctgtctactggtcgcaggcgcaaatgcaggcccgccaaagtgaagagatggcgctggcgcagtcgttcctcaaccgtctatggcaggtagagcacgacggcaagcgatggtttaatccggatatcagcatcatttacccggatcgcatccgccgccgcccgccgggcaccacatccaaaggactgggggcgcataccgactccggtgcgctggagcgctggctgctgccagcctatcagcgggtattcgccagcgtgtttaacggcaacgtcgagcagtacgatccgtggaatgcggcacaccgtaccgaagttgaagagtatacggtggataacaccaccaaatgctcggtatttcgcaccttccagggctggaccgcgctctccgatatgctgcccggtcaggggttgcttcatgtcgtccctatcccggaggcgatggcatatattctgctgcgcccgctgctggatgatgtcccggaagatgaattatgcggcgtcgcgccgggccgggtgctgccgatttctgaacagtggcatcctttactgatggcggcgttaaccagcattccgccgctggaagccggggattccgtgtggtggcattgcgatgtcatccactccgtcgcctccgtcgaaaatcagcagggctggggcaatgtgatgtacattcctgccgcgccaatgtgtgagaaaaatctggcctatgcgcgtaaggtgaaagcggcgctggagacaggcgcatcaccgggcgatttcccgcgcgaggactatgaaaccacctgggaagggcgcttcacgctgcgcgatctgaatattcacggcaagcgggcattaggtatggacgtttga

SEQ ID NO: 370862 - DNA, 450 bp, Salmonella enterica
gtgattggcgagttgctgaaagataagcaacttaattttgtcgcctgcggtctgcaaagtgcatatgtcagcgaaaatgcgccagaagcattcgttaccctgatggcaaaacactaccatcgcctgaaacctgtaaaagattatcaggagattgatgacgtacagttcaagttttcgctcaacctaccggatgaacaaatcccgttagtgatcgacaaactacacgttacgctcgatggcattatgaagcccgccacaagtggttttgactttatcgatctgattattcccggcctgcataaagcaaacggtatttcgcggttactgaaacgctgggatctgtcgccacagaatgtcgtcgccattggcgacagcggcaatgacgcagagatgcttaaaatggcgcgttattcctttgcgatggacaatgccgcagaaaacattaaataa

SEQ ID NO: 370863 - DNA, 261 bp, Salmonella enterica
atgctcattgagaaatcggggcaattgccccgactctcgttaaagtgtaaacggcactttattttccagcacagcctgaatcacattcagtgcgccttcatgattattattatcggtagcgtaacgggcgatttatttaatgttttctgcggcattgtccatcgcaaaggaataacgcgccattttaagcatctctgcgtcattgccgctgtcgccaatggcgacgacattctgtggcgacagatcccagcgtttcagtaa

SEQ ID NO: 370864 - DNA, 897 bp, Salmonella enterica
atgagcattttggaacgcttttttggccgtaaagaaaaaaactcatctaatatacaaggtgttttagtagcgaatgctgaaattgataacccactaagtttagttgttgtatttgatactctcccggaaaataattcaaaagaactcacccgcttgttgcgtaattatcattccagtatgaaacaggcaacgtgtgaacttgtccctgaactggatttttttggtttagcaggatggggtaagcatgtaatatcgatggttggatttaaaacgccttaccctcaggaatcaatcgaacaatgcgtcgcgccagctcattatccccaggaagtaaaagagcaagtacgggcaaccagtgcaaatattattttatattataaggggtatgatacttcacctttagagcaatatgttgcgttggctgtggttgcaggtgcattaagtagcatgggggctgtcgctgtattaaatgaatcggctcacacttcattacctgcgggggtatttaagtctcaggagttgggtaagcatagtctggaaatattgcgtgaaggtttcccgctgacctctctattttgtggatttgtgaaatatgaagttgaggatatcgaaggcgtatggatgcgtacctatggtgctgattgctttgggctaccagatttcgcagcacacgcacaaggtcatcacgaagggcaaaaatattctgatattttcaataatgttctgcgttacctgcttgaaagtggagcagaaatggctgccgggcataccatgcaagtcggtaaaacgacatttatgaaactgcgcgatccccttgacgatgaatattacttacaggggcctggaaccacattagtggttgaactgattgaagaagatgagtgtaatgctcattga

SEQ ID NO: 370865 - DNA, 1593 bp, Salmonella enterica
gtgttagtttccagcaacgttaccatgcagttcggcagtaagccgctgttcgaaaacatttccgtcaaatttggcggcggcaaccgttacggcctgatcggcgccaacggtagcggaaagtccacttttatgaaaatcctcggcggcgacctggagccgacgctgggcaatgtttccctcgatccgaatgagcgcatcggtaagctgcgtcaggaccagttcgcttttgaaacattcaccgtacttgatactgtcattatggggcatggcgaactgtgggaagtcaagcaggagcgcgaccgtatctacgccttgccggaaatgagcgaagaagacggctataaagtcgccgatctggaagtaaaatacggcgagatggacggttattccgctgaggcgcgcgcgggcgaactgctgttgggggtgggcatcccgctggagcagcattacggtctgatgagtgaagtcgcgccaggctggaaattacgtgtgctgctggcgcaggcgttattctctaatccggacatcctgttgctcgacgaaccgaccaacaacctggatattgatactatccgttggctggagcaggtgctgaacgagcgcgacagcacgatgatcatcatttcgcacgaccgtcacttcctgaacatggtttgtacgcatatggcggatctggattatggcgacttgcgcgtctatccgggtaactatgatgagtatatgacggcggcgacccaggcgcgtgaacgtctgttggccgataatgcgaagaaaaaagcgcaaattgccgagctgcaatcttttgttagccgttttagcgccaatgcctctaaatcgcgtcaggcaacgtcgcgcgcgcggcagattgataaaatcaagctggaagaggtgaaagcctccagccgtcagaacccgttcatccgttttgagcaggataaaaaactgttccgtaacgctctggaagtggaagcgttgacgaaaggttttgataacggtccgctgtttaaaaatgtcaatttgctgctcgaagtcggggagaagctggcggtactcggcaccaatggcgtgggtaaatctacgctgctgaagacgctggttggcgatctggacgccgatcacggcaccgttaaatggtcggaaaacgcgcgtattggttactacgcgcaggaccacgaatatgaattcgaaaatgacctgacggtgtttgaatggatgagtcagtggaagcaggaaggcgacgacgagcaggcagtgcgcagtattctgggccgcctgttatttagccaggatgatatcaaaaagcctgcgaaagtcctctccggtggcgagaagggccgtatgctgttcggcaaactgatgatgcaaaagccgaatatcctgatcatggacgaaccgactaaccacctggatatggagtcgatcgaatcgctgaatatggcgctggagctgtatcagggcacgctgatctttgtttcgcacgaccgtgagttcgtcagctcgctggcaacccgcgtcattgaaattacgccggagcgcgtggtggacttcagcggcaactacgacgattatttgcgtagtaaagggatcgagtaa

SEQ ID NO: 370866 - DNA, 921 bp, Salmonella enterica
atgaatatgaaattaacaacgcttttcgcggcggctttcgctgtagttggtttttgtaaaacagcctcagcagtcacttacccgctgcctaccgatggtagccgtttaattgggcaaaatcaggtcatcaccgttcctgagggcaatacccagccgctggagtattttgccgcggagtatcagatggggctgtccaacatgctggaagccaacccgggcgtggataccttcctgccgaagggcggtaccgtgctgaatattccgcagcagctgatcctgccggataccgtacacgaaggcattatcatcaatagcgcggaaatgcgcctctattactacccgaaaggcacaaacaccgttatcgtcctgccgattgggatcggtcagttaggtaaagacacgcctatcaactggacgaccaaagttgaacgtaaaaaagccggtccgacctggacgcctacggcaaaaatgcacgctgaatatcgcgccgccggcgagccgctgcctgccgtcgtacctgcgggcccggataacccgatgggcctgtacgcgctgtacatcggtcgcctgtatgctattcacggcaccaacgccaacttcggcatcgggcttcgcgtgagccacggctgcgtacgtctgcgcaacgacgatatcaaattcctgtttgaaaatgtgccggtcggtacccgcgtgcagtttatcgatgaaccggtaaaagccaccaccgagccggacggtagccgttacattgaggtgcataacccgctgtcaacgacggaagcgcagtttgaaggtaaggaagcggtgccgatcacgcttaataagagtatcctggccgtcaccaacgagcctgacgttgatcagaccgtcgtacaacaggcagttcaggatcgttccgggatgccggttcgtctgaactga

SEQ ID NO: 370867 - DNA, 1113 bp, Salmonella enterica
atgaatctggcctttttacgggcgctgcggcgtgaccgtttttttcagttgttgatcattgtggggatggcgttaagcctgtttgttccttttgcgccccgcgcctggcctggcgcgattgactggcacaccattattaccctcagtgggttaatgttgctcactaaaggcgttgagctgagcggctattttgatgtgctgggacgcaagatgacgcgccgatttcataccgagcggcaactggcgatgttcctggtgctggctgcggcggcgctgtcgacctttctgacaaacgatgtcgcgctgtttatcgttgtgccgctgacgataacgttaaaaaaactgtgcgcgattccggtcaaccgattgattatttttgaagcgttggcggtgaacgccggttcgctgctgacgcctgtcggtaatccgcaaaatattctgttgtggggacgctccggcttaacctttgctgaatttagcgggcaaatggcgccgcttgccgtcatgatgatgctgacgttactgctcctgtgctggttttgttttccgggtagggcgttacagtatcataccggtacgcgttcgccgcagtggcagccccgtctggtgtggagttgcctggcattatatgtcgtttttcttaccgcgctggagctcaggcaagagttatggggactggtgttggtggcggctgggtttattgtgctggcgcgcagggtgatagtcagcgtggactggacgctgctgctggtatttatggcgatgtttattgatgtccatctgctaacgcaattgccggcgttgcagggcgttttcaaccaggttggcgcactgtctcacctggggctttggctaaccgctatcggcctgtcgcaggttatcagtaatgtgcccagtaccattctcctgctgaactatgtaccggcctcgacgttgctggcgtgggcggtgaatatcggcgggtttggtctgctgccggggtcgctggcaaatcttattgctttacggatggcgaacgatcgccgaatctggtggcgatttcatttctattcgctgccgatgctggcatgggcggcgctggtgggatatggattattgcaactgatgccgtaa

SEQ ID NO: 370868 - DNA, 474 bp, Salmonella enterica
atgggtcgtcgcgcaggtacgccaacaacaaaaaaagtgacgcaattggtgaacgtagaagaacacgttgaaggatttcgtcaggtcagagaggcgcatcgccgtgagttgatagacgattacgttgagctgatttccgatttaattattgaggtaggggaagcgcgtcaggtggatatggcggctcggctcggcgtctcccagccaactgtggccaaaatgcttaagcgcctggcatcgttaggatttattcaaatgatcccctggcgcggcgtttttctgacgccggaaggggagaagctggcgcaggaaagccgcgagcggcaccaaattgtcgaaaattttttactggtgttaggcgtaagtccggagatcgcgcgtcgtgatgcggaagggatggaacaccatgtcagccaggagacattggatgcctttttggccttcacgcaacagcatggaacatctgcagaatga

SEQ ID NO: 370869 - DNA, 129 bp, Salmonella enterica
atgaacgaatttaagaggtgtatacgcgtgttcagtcactctccctttaaagtccggttaatgctgctctctatgttgtgcgatatgctcaacggcaaaccggagcaggataacccttccacgaaataa

SEQ ID NO: 370870 - DNA, 1581 bp, Salmonella enterica
atgaattcaacccttatcgattcacttctggcccgtcgtcgggctgtaagcccgtgggcgggcctctactttttacagtcgctgctgattaacctcgcgctcggctacccctttagcctgctttataccgcggcgtttacctgcctgttgctgttgctctggcgctacctgccccgcggacaaaaagcgctgctcggcatctgttcgctggtagccgcttgctattttccctttggccaggcttacggcgcgccgaactttaatacgctgctggcgctgcactccaccaatatggaagagtcgagcgaaatcctgaccatcttcccgtggtatagctacctgaccggactttttatttttgcgctgggtattattgcgcttcgccgccgaaaagaagaggtcaggccgcgctggaatagcctcgacagcctgtgcctgctgatcagcgtcgcggcatttttcgtcgcgccgatacaaaatctggcctggggcggcgtttttaaggttattgataccggctatccggtttttcgcttcgccaaagacgttatcgtcaataacaacgaagtcattgaagagcagcaccgtatggcgcagctatccggcataaaagatagctggacggttactgcggtgaaacccagatatcacatctatgtcgtggtgattggtgaaagcgcgcgacgggatgccatgggcgctttcggcggccactgggataatacccccttcgccagccatgtgaatggcgacttctttatggattacatcgccgccagcggctcaacgcaaaaatcgctcggtttaacgctcaatcgcgtggtggttaacaaaccgcagtatcaggataatttcgtcacgctggctaaccgcgccggttttcagacatggtggttttccaatcaggggcaaatcggcgaatacgacacggccatcgccagtatcgccaaacgcgccgatgaagcgcatttcctgaaaaacggcgattttgaagcggataaaaatactcgcgacgacgcgctgttaaccatgacggcgcaggtattggcgacagaacgcacgcaaccgcagttgattgtgttgcatttaatgggatcgcatccccaggcctgcgaccgtactcagggaaaatacgcgacgtttgtccagtcgaaagagacgtcttgttatttatacaccatgacgcaaaccgacaatttgctccgtcagctctatactcagcttcgtcatagcggcgacagtttttcgctcgtctatttctccgatcacgggctggcgtttaaagaacgcggcaaagcggtacagtacctggcgcatgacgacaaattccagcaaaacttccaggtgccgtttatggtgctatccagcgacagtaaagcgcatcggatcattaaagctcgccgttccgcgaacgatttcctgagttttttctcgcaatggacaggaattagcgctaaagagatcaaaaatcgctatcgatttatttcggaacagaaagccgggcccgtttatatcaccaatttcaaattacagaaagtggactataaccatctgggcagcgatattttttcactaaaataa

SEQ ID NO: 370871 - DNA, 516 bp, Salmonella enterica
atgaaaaaaattgcatgtctttcagcactggccgctgttctggctttttccgcaggtactgcagtagctgctacttctaccgttaccggtggttacgctcagagcgacgcgcagggcgtagcgaataaaatgagcggtttcaacctgaagtatcgttacgagcaggacgacaacccgctgggcgtaatcggttccttcacctacaccgaaaaagatcgtactaacggtgcgggcgattacaacaaaggtcagtactacggcatcactgccggcccggcttaccgtctgaacgattgggcgagcatctacggtgtagtcggtgtgggttacggtaaattccagacgaccgattacccaacctacaaacatgacaccagcgattatggcttctcctatggcgctggtctgcaattcaacccgatggaaaatgttgctctggacttctcttacgagcagagccgtattcgtagcgttgacgttggcacctggattgctggcgtaggttaccgcttctaa

SEQ ID NO: 370872 - DNA, 888 bp, Salmonella enterica
atgccggggtcaacacgtaaactaccagtctggttgcccattttggttttgctcattgccatgtcctctattcagagtggcgcttcactggcaaaatcgttatttcctcttgtcggcgcgccgggcgtaacggcgcttcgtctggcgttgggaacgcttatccttatcgcctttttcaaaccctggcgtttgcgttttgccaaagagcagcggctgcctttactgttttatggtctgtcgctgggcgggatgaactatctattctatctgtcgattcagacggtgccgttgggtattgcggtcgcgctggaatttaccggtcctctggcggtcgcgctgttttcatcccggcggccggtagattttatttgggtcgtactggctgtgcttgggctctggttcctgctgccattagggcaagatatgtctcacgtcgatcttaccggggccgcgttggcgctcggcgctggcgcctgttgggctgtctatattcttaccggccagcgagcaggcgcggaacatggtccggccacggtggcggtaggctcgctgattgccgccatcattttcgtgccgattggcgcagttcaggctggcgacgcgctatggcactggtcgattcttcccttagggttagcggtcgctgtgctttctacggcgctgccttattcactggaaatgattgcactgacgcgcctgccaacccgcaccttcggtacgctgatgagcatggaacccgcgctggccgccgtttccgggatgatttttctgggcgaaacgcttacgggcatacaaatcctggccctgtgcgccatcattgccgcctcaatgggttctaccctaacgattcgacgcgaaccgcaaattaaacaagttgacgtaaaatag

SEQ ID NO: 370873 - DNA, 504 bp, Salmonella enterica
atgagtaccgctaaactggtaaaaacaaaagcgtctaatctgctttatacccgtaacgatgtatcagagagcgataaaaaagcgacggttgagttgcttaatcgtcaggtgatccagttcattgacctgtcgctgatcacgaaacaggcccactggaacatgcgcggtgctaactttattgccgttcatgagatgctggatggcttccgtaccgcactgaccgatcatctggatactatggccgagcgtgccgtacagcttggcggtgtggcgttaggcaccacgcaagttatcaacagcaaaactccactgaaaagctatccgctcgacatccataacgtgcaggatcacttaaaagaactggccgatcgctacgctgttgtcgctaatgatgttcgcaaagctattggtgaagccaaagatgaagacactgccgatatctttaccgccgcatcacgcgacctcgataaattcctgtggtttatcgaatccaacatcgaataa

SEQ ID NO: 370874 - DNA, 747 bp, Salmonella enterica
atgaagtctctattaaaagtttcactggctgcacttaccctggcttttgcggtgtcttcgcacgccgcggataagaaactcgttgtggcaaccgatacggcgttcgttccgtttgaatttaaacagggcgacaaatacgtcggttttgatgttgatctgtgggacgctatcgcgaaagaactgaagctggactacaccctgaaaccgatggatttcagcggcattattccggcattacaaaccaaaaatatcgatctggcgctggcgggtattacgattacggacgagcgtaaaaaagcgatcgacttttccgatggctattacaaaagcggtctgctcgtgatggtgaaagccaacaataacgatattaaaagcgttaaagacctcgatggcaaagtcgttgccgtgaagagcggaaccgggtcggtggattacgcgaaagcgaatatcaaaaccaaagacctgcgtcagttcccgaacattgataacgcgtacatggaattaggcaccaaccgcgcagacgccgttctgcacgatacgccgaacatcctgtactttatcaaaaccgcaggcaacggccagttcaaggcggtaggcgaatcgctggaagcacagcaatacggagttgccttcccgaaaggcagcgatgaactgcgcgagaaagtcaacggcgcgctgaaaacgctgcgtgagaatggcacctataacgaaatctacaaaaaatggttcggtacagaacctaaataa

SEQ ID NO: 370875 - DNA, 660 bp, Salmonella enterica
atgcagtttgactggagcgccatctggcccgccattccgcttttgcttgagggcgctaaaatgaccctgtggatctcggtcctcggtctggctggcggcctggttattggactggcggcaggttttgcccgtacgtttggcggctggttcgccaaccacatcgccctggttttcattgaaattattcgcggcacgcccatcgttgtccaggtcatgtttatctactttgccctgccgatggcatttaatgatttgcgtattgatccgttcagcgcagcggtcgtgacaattatgattaactccggcgcttatatcgcggaaattactcgtggcgcagtactatccattcacaaaggttttcgcgaagcgggtctggcgctgggcctttctcgccgggaaaccatccgccatgttattttaccgcttgctctgcgccgtatgctgccgccgctgggcaatcagtggatcattagcatcaaagacacctcgttgtttattgttatcggcgtagccgagctgacccgtcagggccaggaaattattgccggtaactttcgcgccctggaaatctggagcgccgtggccgtcttctatttgatcattacgctggtgctgagctttattttgcgtcgtcttgaaagaaggatgaaaatcctgtga

SEQ ID NO: 370876 - DNA, 723 bp, Salmonella enterica
gtgattgaatttaaaaacgtctccaagcactttggccccacccaggtgctacataacattgatttaaacatccgtcagggcgaagtggttgtgattatcggcccttccggttcgggtaaatccacgttattacgctgtatcaataaactggaagagatcacctccggtgatctgattgtcgatggtctgaaagtcaacgatcctaaagtagacgaacggctgattcgccaggaagccggcatggtgtttcaacagttttatctgttcccgcatctgaccgcgctcgaaaacgtaatgttcggtcctctgcgcgtgcgcggcgtaaagaaagaagaagcggaaaaacaggcgaaagctctgttagcgaaagttggactggcggaacgggcgcatcactacccctccgagctttccggcggtcaacaacagcgcgtcgccattgcccgagcgctggcagtgaagccgaaaatgatgctctttgacgagccaacctccgctctggaccctgaactgcgccatgaagtgctgaaagtcatgcaggatctggcggaagaaggcatgaccatggtcattgtcactcacgaaatcggctttgccgaaaaagtcgcctcacggctgattttcatcgataaaggccgtattgccgaagatggcagtccgcaggcgttgatcgaaaacccgccaagcccacgtttacaggaatttttacagcacgtctcctga

SEQ ID NO: 370877 - DNA, 2223 bp, Salmonella enterica
atgcggtggaccctgttcatccttttttgtctactgggcgcacctgcccatgcggtcgccatacccggcgtgaccacggggacatcaaccagccagcaagcagcgccagagcccagtcctgaacaaaaaaaagcggcctatgcggccctggctgacgtactggagaacgaggcttcacgtaacgaattgatagcgcaactccgcgaagcctcaaccacgccgccgaccgagccagcgccagcgcttgcgccgcctgcggccaaagatgagaaaacggtactggagaacgtcaccaccgttacccgtcagtacggcgatgctttcgctacccgtttcgcccagctttatcgcaacatcaccgatgcgccgcacaagccgtttaactcgcaaaccttcaccaacgcgttaacccactttttatttctggccgtcgcggtatttggtttttatagcgtgatacggctttgcgccctgccgttatatcgaaaaatgggcctgtgggcacgcaagaaaaaccgtgaacgcagcaactggttacagctcccggcgatgatcgtcggcgcgtttattatcgacctcctgctactggcgctcaccttatttatcggtcagatgctcagtgataatttccatgcgggaagtcgaactatcgcttttcagcaaagcctgttcctgaatgccttcgcgctaatagagttctttaaagcgattctgcggcttattttttgccctaatgtaccggagttacgcccattcgcgattcaggatgcgacagcgcgttactggaatcgccgtatgagttcccttagcagcttgattggctacgggctgattgttgccgttccgattatttccaaccaggtgaatgttcaggttggcgcgatggctaatgtggcgatcatgctctgcatcaccatctgggcgctgtacctgatctttaaaaacaaagcggagattacgcaacatttattaagtctggcggaacgatcattagccttttttagcctgtttatccgcgcctttgcgctggtgtggcactggctggccagcgcttactttatcgtgctgtttttcttctcgttattcgacccaggcaatagcctgaagtttatgatgggcgcgaccgtgcgcagtctggcgattattggcatcgccgcgtttatctccggtatgtttacccgctggatagcgaaaaccatcaccctgtcgccccatacgcagcgcaactacccggaattacaaaagcggcttaacggctggctctcctcagcgctaaaagtcgcacgctttttgaccgtctgcgtcgccgttatgctgttgctcaacgcctgggggctattcgatttctggcactggctacattatggcgcgggggaaaagatggtcgatatccttatccgtatcgcgttaatcttattcttctccgccgtgggatggacgatcctcgccagtctgattgagaatcgtctggcctccgatattcatggccgcccgctacccagcgcccgcacgcgcacgctgctgacgctgttccgcaatgcgctggcagtgattatcagtaccataaccatcatgatcgtgttatcggaaatcggcgtcaatatcgcgccattgctggctggcgcgggggcgttaggtctggctatctctttcggttcgcaaaccttggtgaaagatattattaccggcgtctttattcagtttgaaaacgggatgaataccggcgacttagtcaccataggcccgctgacggggacggtcgaaagaatgtcgattcgttccgtcggcgtgcggcaggataccggggcataccatattatcccgtggtcctcgatcaccactttcgccaactttgtgcgcggtatcggctcagttgtcgccaactatgacgtggatcgccatgaggatgcggataaagcgaatcaggcgctgaaagacgcggtaacggcgctgatggagacggaggatattcgcgggctgattatcggcgaacccacgttcgccggtattgtcggtttaacgaacacggcgtttactttacgcgtatcgttcaccaccctaccgctcaagcagtggacggtgcgttttgcccttgatagccaggtgaaaaagcattttgatctggctaatgtgcgcgcgccggtgcaaacgtatcaggttctgcccgcccccgccggcggcccgccgcctgattcactgccgccgcgcgaaccgacgatttag

SEQ ID NO: 370878 - DNA, 927 bp, Salmonella enterica
atgtccgcccagaaaccggggttacacccgcgcaaccgccaccaacaccgttatgatctcgccgcactgtgtcagaccacgccggaattgacgtcctttcttatccgcacgcccgccggtgaacagagcgttgattttgctaatccgcaagcggtaaaagcgctcaataaggcgttgctggcgcatttttatgccgttacacactgggacattccgccagggtttttatgtccgccggtgcctggtcgtgcggattatatccatcatctggcggatctgcttggcgaaacgacagggagtattccggcgcaggcaactattctggacgtgggggtgggcgccaattgtatttatccgcttatcggcgtacatgaatatggctggcgatttaccggtagtgaagtcagcgacgcagcgatgtccagcgcgcaggctatcattcaggctaatacggggttaagccgcgccattcgtctgcgtcggcaaaaagatccggcggccatttttaccggtattattcataaaaatgaattttatgacgcaacgctttgtaacccgccttttcacgactccgccgccgcagcccgcgcgggcagcgagcgtaagcgccgcaatttggggcagaataaagatgatgcgctgaactttggcggtcaacagcaggagctatggtgtgaaggcggcgaagtcgcctttattaaaaaaatgattgctgaaagccaatccttccgccgtcaggtgttgtggtttacgacgttggtgtcgcgcggcgagaatttaccaccgctttaccgggcgttgacggaggctggcgcggtgaaagtggtgaaaaaagagatggcccaggggcaaaagcaaagccgctttatcgcctggacctttatggatgacgaccagcgtcgccgttttatcacccgtaaacgctaa

SEQ ID NO: 370879 - DNA, 267 bp, Salmonella enterica
atggcatccggctgggcaaatgacgacgcagtgaatgaacaaatcaacaataccattgaagatgccgttgcccgcgctcgcggcgaacttccccacggcgaaagtcgcgatgaatgcgaatcgtgcggcgaccctatccctgaagcgcggcgtaaagccgtaccgggcgttcggttatgcatatcctgccagcaggagaaagatttacataacgcaacattttcaggatataatcgcagaggttcaaaagacagccagttacgctga

SEQ ID NO: 370880 - DNA, 261 bp, Salmonella enterica
atgaaaaccattaaatatgctgttgcagccatcgcgctttccaccctttcttttggcgcttttgccgcagaaccggttagcgcgtctcagacgcaaaacctgcataaaatcggcgtagtgtctgccgatggcgccaccacgctggatggcctggaagctaaactggctgaaaaagccgccgctgctggcgcaagcgcttataacatcacctccgccgtgggtaatgacaaaatgagcggcactgcggtgatttataaataa

SEQ ID NO: 370881 - DNA, 975 bp, Salmonella enterica
atggattatcgcaagatcatcaaagagatcgggcgaggtaaaaatcacgcccgcgatctggatctggataccgcgcgcggtttgtatacccgaatgctgaatggcgacatccccgacctggaaatgggcagtatattgatggcgctgcgtattaaaggcgaaggcgaagccgaaatgctgggcttttatgaggccatgcagaatcataccatcaaactgacaccgcccgcagataggccgttgccggtcgttattcccagctataacggcgcgcgtaaacaggcgaatttaacgccgctgctggctatcctgctgcataaattgggcttcccagtcgtagtacacggcgtcagtgaagatccgacccgcgtactgacggaaactatatttgagctgatggggattatccccaccctacacggtggacaagcgcaggccaaactggacgggcgccagccggtgtttatcccggtgagcgcgctctgcccgccgctggaaaaacagctggcgatgcgctggcggatgggcgtgcgtaacagcgcgcattcactggccaagctggcgacgccatttgctgaggatgccgcgctgcgtttatcaagcgtttctcatcctgaatatgttccgcgtgtggcgaccttttttagccgcattggcgggcgggctttgctgatgcatggtaccgaaggcgaagtctatgccaacccgcaacgctgtccgcaaatcagcctgattgatagccgcggcgtgcaggtactgcatgagcgtcagagcgacacgcacgacgagccgctttcactgcctgcgactaaagatcctgaaatcaccgcgcgctggattgagcgctgccttgccggccatgagccggtgccgcaatcattaaaaacgcaaatggcctgttgtctggttgcgacgagagaggcggcgacgttagaagacgggcttgcgcgcgtcgaacaggcttttagcgaataa

SEQ ID NO: 370882 - DNA, 2145 bp, Salmonella enterica
atggcattgaccgctgcgctgaaagcgcaaatcgccgcctggtataaggcgcttcaggaccagattcccgactttattccccgtgcgccgcagcggcagatgattgctgacgtcgccagaacgctggccggggaagaagggagacatctggctattgaagcgccgaccggcgtcgggaaaaccctctcctatcttattcccggtatcgccattgcccgggaagagcaaaaaacactggtggtcagtaccgctaacgtggcgttacaggatcagatctttagcaaagatttgccgctgctacgaaaaatcatccccgatctgcgctttaccgccgcctttggccgcgggcgttacgtgtgtccgcgaaacctggcggcgctcgccagtagcgagcctacgcagcaggatctgctcgcctttcttgatgacgaactgacgcctaacaaccaggaagagcaaaagcgctgcgccaggctgaaaggggatcttgacggttacaaatgggatggtctgcgggatcataccgacattgctattgacgacgatctgtggcggcgattaagtaccgataaagccagttgtctgaaccgcaactgtcactattaccgcgagtgtccattctttgtcgcccgacgtgaaatacaggaagcggaagtcgtggtggcgaatcacgcgctggtaatggcggcgatggaaagtgaagccgtactgccggaaccaaagcatctgctgttggtactggatgaaggtcatcatctgcccgatgtcgctcgcgatgcgctggagatgagcgcggaaattaccgcctcctggtatcgcttgcaactggatctgttcagcaaactggtggcgacctgcatggagcagtttcgccctaaaaccacgccgccgttagcgaaccctgagcgacttaacgcccattgcgaggaggtgtacgaactgatcgcctcgctcaatgccattcttaatctgtatatgcccgcagcgcaggaggcggagcaccgttttgcaatgggcgagttgcctgatgaggtcatggaaatctgccagcgactggcgaagctgaccgagacgctgcgtgggctggcggagtcctttctcaacgatctcagcgaaaaaaccgggtcgcacgatattgtgcgtttgcatcgggtgattttacagatgaaccgggcgctgggaatgttcgaggcgcaaagtaaattatggcggctggcttcgatggcgcagtcttcaggcgcgccggtgtccaaatgggcgacgcgtgaaatacgcgaagggcaactccacgtctggttccattgtgtcggtatccgcgtcagcgagcagctggaaagattgttatggcgcagcgtaccgcacattattgtcacctcggcgacactgcgctcgctcaatagcttttcgcgcctgcaggaaatgagcggcttaaaagaaaaagccggcgaccgctttgtggcgctggattcgccgtttaatcatgtggaacaggggaaactggtgattcctcaaatgcgctacgaacccaccattgataacgaagagcagcatattgccgaaatggcggcctattttcgtgagcaactggagagcaaaaaacatcatggtatgctggtactgttcgccagcgggcgggcgatgcagcgttttctggagcatgtcgctgatgtgcgcttactcctcctggtccagggcgaccagccgcgttaccggctggtggagctacaccgtaaacgggtggagagcggcgaacgcagcgtgctggttgggcttcagtcttttgccgaagggctggatcttaaaggcgagctgctgacgcaggtccatatccataaaattgccttcccgccgatcgacagcccggtcgtgatcaccgaaggcgaatggctaaaaagcctgaatcgttatccgtttgaggtacaaagtttaccaagcgcgtcttttaatttaattcagcaggtagggcgattgatccgtagccatgcctgtcggggagaagtggtcatttatgataagcgtttgttgaccaaaaactacggacagcgtttactgaatgccttacctgtttttccgatagagcagcctgccgtgccagacgttatagtaaaaccaaaagcaaaacctgcacgccgccgacggcgttaa

SEQ ID NO: 370883 - DNA, 1362 bp, Salmonella enterica
atgtcttttgattccctgggattaaaccctgatatcctgcgcgccattgccgagcagggttaccgtgaacctacccctattcagcaacaggcgattcccgccgtgctggaaggccgcgatctgatggccagcgcccagaccggaaccggtaaaacggcgggttttaccctgccattattgcagcatctgattacccatcagccgcacgctaaaggtcgtcgcccggtgcgcgcgttgatcctcacgccaacccgcgagctggcggcgcaaattggcgaaaacgtcagagattacagtaaatatctcaacattcgctcgctggtggtatttggcggcgtaagcatcaatccgcagatgatgaaactgcgcggcggcgtggatgtgctggtggcgacgccgggacgtctgctcgacctggaacatcaaaatgccgtgaagctggatcagattgagattctggtactggatgaagccgaccgtatgctggatatgggcttcattcacgacattcgtcgcgtgctggcgaaactgccggcgaagcgtcagaatctgctgttctccgccacgttctctgacgacatcaaagcgctcgccgaaaagctgttgcgcaacccgctggaaatcgaagtggcgcgccgcaacacggcctcagagcaggtaacgcagcacgtgcactttgtcgataaaaaacgcaaacgtgaactgttgtcgcagatgattggccagggcaactggcagcaggtgttggtcttcacccgcaccaagcatggcgcgaaccatctggcggaacagcttaataaagacggtattcgcagcgcggcgatccacggtaataaatcgcagggcgcacgtacccgcgcgctggccgattttaaatccggcgatattcgcgtgctggtggcgacggatattgcggcgcgtggtctggatattgaagaactgccgcacgtggtcaactatgaactgccgaacgtaccggaagattatgtacaccgtattggccgtaccggtcgcgcggcggcaactggcgaggcgctgtcgctggtctgtgttgacgagcataaattgttgcgtgatatcgaaaagttgctgaaaaaagagatcccacgcattacgacgccgggctatgagccggacccgtcgattaaagcggagccgattcagaacggtcgtcagcagcgcggcggcggcggtcgtggacgcggacaaaatcaggggggagcggggcgcagtcagcagccgcgacgccaggatagcggggcggcgaaggcgaaaccaaaaccgcgcacaggcgaggggaaacccgcgggcgacaaagcacgtccgccgcgtcgcccgcgcagaatcacgcctgcccagtaa

SEQ ID NO: 370884 - DNA, 675 bp, Salmonella enterica
atgaatattcccactacgaccaccaagggcgagcaggcgaaaagtcagctcattgccgccgcgctggcgcagtttggcgagtatggcctccatgctaccacgcgcgatatcgctgcgctggcggggcaaaatattgccgccattacttactatttcggctcaaaagaggatttatacctcgcctgcgcccagtggattgccgattttcttggcgaaaaatttcgcccccatgctgaaaaagcggagcgtctgtttagccagcctgcccctgaccgggacgccatacgcgagctcattctgctcgcctgcaagaacatgattatgctgctgacgcaggaagacaccgttaacctgagcaaatttatttcacgcgagcagctctctcccacgtcggcctatcaattggtccatgaacaggttatcgatccgttgcacacccatctgacaagattggttgccgcttataccggctgcgacgccaatgatacgcgcatgattttgcatacccatgccttactgggagaagtactggcgtttcgtctcggcaaagaaactattctgttacgtaccggctggccgcagtttgatgaagaaaaagcggagctgatttaccagacggtaacctgccacatcgatcttattctgcacggtttaacgcaaaggagtctggactga

SEQ ID NO: 370885 - DNA, 996 bp, Salmonella enterica
atgaaaaaacctgtcgttatcggactggcaatcgcagcgatcgtcgctgtgattgccggtggaacctggtggtatcaaagtcggcaggacgatgggctgacgctatacggtaatgtcgatatccgtaccgtcaatatcagctttcgcgtcggcggcaggctggcgtcgctgaatgttgatgaaggcgatactatcaaagccggacaggtgctcggcgaactggatcacgcgccatacgaaaacgcgctaatgcaggcgaaagctggcgtgtcggtcgcgcaggcgcaatatgatttgatgctggcaggctatcgcgatgaagagatagcccaggccgccgccgccgtcagacaggcgcaagccgcctatgactacgcgcaaaacttttataaccgtcagcaaggtttgtggaaaagccgcaccatttccgctaacgatctggaaaacgcccgctcatcgcgcgatcaggcgcaggcgacgctgaagtccgcgcaggataaactgagccagtaccgtaccggtaatcgtgaacaggatatcgcccaggcgaaagccagcctggaacaggcaaaggcccaactggcgcaggcgcagcttgatttgcaggacaccacgcttatcgcgcctgccaacggaaccttgctcacccgcgcggtcgagcctggcagtatgctgaacgccggcagcacggtattaacgctctcgctgacccgccccgtctgggtgcgcgcctatgtcgatgaacgcaacctcagtcagacgcaaccggggcgcgacattctgttgtataccgacggtcgtcctgacaaaccttaccacggcaagattggtttcgtttcgcccaccgcggaatttacgccgaaaaccgtcgaaacgccggatctgcgtaccgatctcgtctatcgcctgcgcattatcgtcaccgatgcggacgatgcgttacgccaggggatgccagtcacggtgaaatttaatgacgaggcacggcatgagtga

SEQ ID NO: 370886 - DNA, 1737 bp, Salmonella enterica
atgagtgaggccgttattacgctgcacggtctgacgaagcgctttgcgggaatggataaacccgccgtcgcgccgctcgactgtaccattcattccggttatgtcaccgggctggtagggccggacggcgcaggaaaaaccacgctgatgcgtatgctggcgggcctgctcaaagccgatggcggcaacgcgtcagtattgggcttcgacccgatacaaaacgacagcgagctgcacgcggttctgggctatatgccgcagaaattcggtctgtatgaagatcttaccgtcatggagaaccttaatctctatgccgatttacgcagcgttaccggcgagatacgggaaaagacctttgcccgtttgttggagtttaccgccctcggccctttcactggccgtctggcaggaaaattgtccggcgggatgaagcaaaaactggggctggcctgtacgctggtcggcgaaccgaaagtgctgctgttggatgaaccgggcgttggcgttgacccgatttcacggcgcgagttgtggcaaatggtccacgaactggcgggcgacgggatgctgattttatggagcacctcctatctggatgaagccgaacagtgccgcgatgtgctgctgatgaatgaaggcgagctgctctatcagggcgaacctaaagcgctgacgcaaacgatggccggtcgtagctttctgatgagcagtccacaggaaaacaaccgtaagttactacagagagcgctcagactgccgcaggtgagcgacggcatgattcaggggcgttcggtacgcctgatcctgaaaaaagaggcgaccgcagcagatattcgtcaggccgaaggaatgccggaaatcaccctcaatgagaccgcgccgcgcttcgaagatgcgtttatcgatctgcttggcggagcgggaacctcggagtctccgctgggttcaatcctgcatacggttgaaggcactgccggcgaaacggtgattgaagcgcaggaactgacgaaaaaatttggcgatttcgcggccacggaccatgttaatttcgtcgtacaacgcggcgagatttttggcctgctcggcccgaacggcgcgggtaaatcaaccacctttaaaatgatgtgcggcctgctggtgccgacgtccggcaaggcgctggtgctggatatggacctgaaagtcagctccggcaaagcccgtcagcatctgggctatatggcgcaaaaattttcgctttacggcaacctgacggttgagcagaacctgcgttttttctccggcgtctacggtttgcggggccgcgcgcaaaatgaaaaaattcagcgcatgagtgaagcgtttggtctgaaaagcatcgcgtcgcatcccaccgatgcgctgccgctgggctttaaacagcgactggcgctggcctgctcgctgatgcacgaaccggatattttattccttgatgaaccaacgtccggggttgatcccctcacccgccgtgaattttggctgcatattaatagcatggtggaaaaaggggtcacggtaatggtgacgacccactttatggatgaggcggaatattgcgatcgcatcggactggtttatcgcgggaagcttatcgccagcggtacgccggacgatctcaaagcgcaggccgccgatgagcaacaggccgatccgacgatggagcaggcctttatcactctcatcaatgactgggataaggagcatacgcatgagtaa

SEQ ID NO: 370887 - DNA, 1131 bp, Salmonella enterica
atgagtaagtctctctcctggcgccgcgtgcgtgcgttgtgcgtcaaagagacgcgccagatcgtgcgcgatcccagtagctggctgattgcggtggtgatcccgctgctgttgctgtttatttttggttacggtattaacctcgactccagcaagctgcgggtggggattctgcttgaacaacaaagccaggaggcgctggatttcactcatgcgatgaccggttcaccctatatcgacgcgaccattagcgataaccgccatgaattaattgaaaaaatgcaggccggacgcattcgcggactggtggtgattccggtggatttcgcgcagcaaatggcgcgcgacggtgacagcgcgccaattcaggtgattaccgacggcagcgagccaaacaccgccaacttcgttcagggttatgtggaaggcatctggcaaatctggcaacagcagcgggcggaagatcgcggcgacacctttgaaccgctcatcgacgtccagacgcgctactggtttaacccggcggcgatcagtcagcattttatcattcccggggcggtgaccattatcatgacggtaattggcgcaatcctcacctcgctggtcgttgcccgcgaatgggagcgcggcacgatggaggcgctgctctcaaccgaagtgacgcgtgttgaactgctgctgtgtaagcttattccctattactttctcggtatgctggcgatgctgctctgtatgctggtatcggtgtttattctcggcgtgccgtatcgcggttcgctggtgattctgtttatcatcaccagtctgtttttactgagtacgctggggatggggctgttgatttccaccatcactcgcaaccagtttaacgccgcgcaggtggcgctgaacgccgcctttttgccctcgattatgctgtccggatttatcttccagatagacagtatgcctgcggtgatccgcgcggtgacctatattattccggcgcgctattttgtcagcaccctgcaaagtctgtttctggccggcaatattccggtcgtgttaggcgttaacgtactgtttttaatcgcctcggcggtgatgtttattggcctgacgtggctaaaaaccaaacgacgactggattaa

SEQ ID NO: 370888 - DNA, 1107 bp, Salmonella enterica
atgtttcatcgcttatggacgttaattcgcaaagaactgcaatcgcttttacgcgaaccgcaaacgcgcgcgatcctgattctgccggtgctgattcaggtcatcctgtttccgttcgccgcgacgcttgaagtcactaacgcgactatcgccatctataacgaagataatggcaaacattcggtagaacttacccagcgctttgcccgcgcgaaagcgtttacccatgtgctattgctgaacagtccgcaggagatccagccgactattgatacgcaaaaagcgctgctgctggtgcgcttcccggcggatttctcgcggaatctggataccttccagcctgcgccgatgcaactcattcttgatggacgtaactccaatagcgcgcaaatcgccgccaattatctgcaacagatcgtcaaggagtatcagcagacattgatggacggcaagccaaagcccaacaatagcgaactggtggtacgcaactggtataacccgaatctggactacaagtggtttgtggtgccctcgctgatcgccatgatcaccactatcggcgtgatgatcgtcacttcgctgtccgtcgcccgcgagcgtgaacaaggcactctggatcagctgctggtctctccgctcaccacctggcagattttcgttggtaaagcggtgccggcgctgattgtcgcgaccttccaggccacgatcgtgctggctatcggcatttgggcataccaaattcccttcgccggttcgttagcgctgttttatttcacgatggtgatttacgggctgtcgctggtaggctttggcttgctgatatcatcgctttgcgccacgcaacagcaggcgtttatcggcgtctttgtctttatgatgccggcgattttgctctcgggttatgtctcgccggtggaaaatatgccagtctggctgcaaaacctgacgtggataaatcctatccgccactttactgatattaccaagcaaatttatcttaaggatgcgagtctggggattgtctggggaagtttgtggccgctactggtgatagcggccaccacgggttcagcggcgtatgcgatgtttagacgcaaagtgatgtag

SEQ ID NO: 370889 - DNA, 411 bp, Salmonella enterica
atgaagtggcaacaacgcgttcgtgtcgcaaccggcctcggttgttggcagattatgttgcatttactggtagtggcgatgctggtaataggctggatgagcggcacattagtgcgcgtcggcctgggattatgcgtgctttatggcgtgacggtactgctgatgctggcgttgcagcgccatcatgagcaacgctggcgcgatgtggcggatgtgctggaagagctgactaccacctggtacttcggcaccgcgctgattgtcctctggctgctatcccgcgtattgcaaaacaatgtcttgctggcgctggcggggctggctatcctggccgggcccgccgtggtctcgctactggcgaaagataaaaagctacatcactttgcgtctaaacatcgcatacgccgctga

SEQ ID NO: 370890 - DNA, 759 bp, Salmonella enterica
atgactcaacacacgcgaaatttttcattcaaagtgctcacaattaatacgcacaaaggttttaccgcctttaataaacgcttcatcctgccggagctacgcgacgccgtcagaacggtcggcgccgatatcgtctgtctgcaagaagtaatgggcgcgcatgaagtacatccgctgcatatcgaaaactggccggacactacccactatgaatttttggccgacaccatgtggagcgatttcgcctatggccgcaatgcggtctatccggaaggccaccacggtaacgcggttctttctcgctatcccattgaacattatgaaaatcgcgacgtctcggtcggcggtagcgaaaaacgcggcgtgctctattgccgcattacgccgcccatgctcaaccgccctatccacgtcatgtgcgtacatctcggcctgcgggagagccaccgccaggcgcagttaaccatgctggcgggatgggtgaatgccttgccggaatcagaaccggtgctggtggccggagactttaatgactggcggcaaaaggccggcccgccgttaaacgcggccgggctggaggagatattcacccgtgcccatggccgaccggcgcgcacattcccggtgagtatgccgctgctgcgactcgatcgtatttacgtcaagaatgcgaacgccagttctcctacggcgctaccgctgcggaactggcgacatttatcagaccatgccccccttagcgcggagatccatctatga

SEQ ID NO: 370891 - DNA, 1242 bp, Salmonella enterica
atgaaatgcggctggcgtgaaggtaatcaaattcagctactggaaaacggcgaccagttctatcctgccgtgtttgaggctatcgctcaggcacagcaaaaaatcattctggaaacctttatcttgtttgaagatgaggtgggtaaaaagctccatgccgctctgctaaaagccgcacagcgcggcgtaaaagccgaagtattactcgacggctacggctctcccgatctcagcgacgcgtttgtcggcgaattgacctcagcgggcgtgatttttcgctattacgacccccgcccgcgtctactggggttgcgaaccaatatcttccgccgaatgcaccgcaaaattgtggtgattgatgatcgtattgcctttgtcggcggcattaactactccgccgaacatatgtcggattacggcccgcaggcgaaacaagactacgcggtacgggtcgaagggcctgtagtggccgatatcctgcaattcgaagtcgagaatctgccggggcaaagccccgcgcgccgctggtggaagcgccatcatcaggccgaagaaaaccgccaccccggcgaagcgcaggcgctgtttgtctggcgagataacgaagagcaccgcgacgatatcgaacgtcattatctgaaaatgctgacccaggcaaagcgtgaggtgattatcgctaacgcctattttttccccggctatcgcttgctccacgcaatgcgtaaagccgcccgccgtggcgtgagcgtaaaactgattgtccagggggaaccagacatgccgatagtcaaagtcggcgcgcggttgctctataactatctggtgaagggcggtgtgcaggtttatgaataccgacgccgtccgctgcatggcaaagtggcgctgatggacgatcactgggccacggtagggtcgagtaatctcgatccgctcagcctgtcgcttaaccttgaagctaacctgatcattcacgatcgtacctttaaccagaccctgcgcgataatttacaaggcatcatcgtgaatgattgtaagcaggtcgatgagtctatgctgccgaaacgcacctggtggaacctgaccaaaagcgtgctggcgttccactttttacgtcatttcccggcgctggtcggctggctacctgcgcataccccgcatctggcgcaggttcccccgcctgcccagccggaaatggaaacccaggatcgcgttgatccagaaaatacaggagtgaagccctaa

SEQ ID NO: 370892 - DNA, 963 bp, Salmonella enterica
atggctaaatcgcatccgcgctggcggctggctaaaaaagtgctgacttggctgttttttattgcggtcgtcgttctgctggtggtttatgctaaaaaggtcgactggggcgatgtctggaccgtcatccgcgactataaccgcacggcgcttttaagcgctgtaggactggtgatcgttagctatcttctgtacggctgctacgacctgcttggacggctttattgcggccataaactggcgaagcgacaggtgatgttggtatcgttcgtctgctatgcctttaacctgacgctcagcacctgggtcggcgggatcgggatgcgttaccgactgtactctcgcctcgggttgcccggcagtactatcacgcgtattttctcactcagcattaccactaactggctgggctatattctgcttggcggcatcatttttaccttcggcattgtccagcttcccgaccactggtatatcgatgaaggcacgctacgaattctcggtatcgttttattgttgattatcgcggtctatctgtggttttgcgcctttgcgaagcggcggcatatgacgattaaaggacagaaactggtgctgccgtcatggaaattcgcgctggcgcagatggcgatctccagcgcgaactggatggcgatgggcgccatcatctggctgctgatgggtcaggatgtgaactatttctttgtgctgggcgtactgctggtgagcagtatcgcgggcgtcatcgtgcatattccggcaggcatcggcgtgctggaggccgtattcctcgcgttgctggcgggcgaacatacgtcgcaaggcacgattatcgccgccctgctcgcgtaccgtgtgctttactattttattcccctgttgctggcgctggtgtgctatctgatcctggagagccgggcgaagaagctgcgggcgaaaaacgagcgggcgatggcgaaatga

SEQ ID NO: 370893 - DNA, 561 bp, Salmonella enterica
atgaacctgatgacgtggctaacaggaaaaacactggcggagctggtgaaaaaagggcagttgatcccgccagaaattaagttacctgtgtatccggccagccactacaaaaaaaactggtatgaacaaggtattcctcacggaggcgttattgggcttacggcgattatgatgaccatgacatggatcgtcagtataaacatggttattgcgcagtttgagctgcacaataaaaagcatctggagctggtcttcttcctggccgtgggctatatcgcttttcttaccccgtcaaatcagctcctgcttaaaggaagaatgagcggggtcattatttaccgctatgcgctattactggccattatttccgttacgttggcaacgttctgtaccctgtcatcagtattcatgggtgagtttaacgaagtgctcctgctgctgtttagctggtcattgctgcttttttcccgcttacagatgaatacgtcttttttctcagcatatgtttatttttaccggataaaacgcgttgtgctggaaagcgaaaacgcgtctgcttaa

SEQ ID NO: 370894 - DNA, 603 bp, Salmonella enterica
atgatgggtataatgagtaaattatgtggcaaacaattttggttagcgttttgtgaagctaaagacgtcactcgcgccattaaaaatggcggcgaggattttaataagaaatgcccgccagcgctgatttctcatttcattaccggattttcatgggaacattcattacctaatcctgcgcctgtttgcgcgtttagttttatgcttcttgtgggaggtgtgtgcagtgcgcattttgtttttgataagtttatcctgtattggccactaaatataattatttattttggcagtgctataggtatgatgctatgtgttatggctgaggtatggcttattgccaaaggttttatcctggggttgcgcctctgcgttttactgtttttattaaatattatgctctgtggtactggattatttgacgtgttgtgccatcaaaatagcgaactaaagagtgatctggttatcgcgattattatggttgtgctttgccgctgggtgatgaatggcgaaacgtttacgatgatgattcgtttctgcctggggcgtcgattagtgcgagtcgcattacaaaaatatctcacctcacagacaaggaaatga

SEQ ID NO: 370895 - DNA, 522 bp, Salmonella enterica
ttgcttggtctggggtatggggccgttacctgtctttcccgctttggcactgttgtcgcaacgttgatatatattgccatcattacgcttaccggcgtgtcattagcttaccttttctcaagtggcgcgaccattttcgtgattgttggaatcatgtttagtcttaatgccttatttattttctacctgaatatcagttctggtctattcaggctgttaatcttcatggcggtaagcgggatcatcgctgcgatagttgtcaatagcctggtggccagtagcactatggtctggatagtcagtatgctgacggtattggtatggacattgattacagcactagaaaaatcgacacttcatggttatgcccgcatgttatatcacagcgagttttcatccctgtctcgttgcgctttatttggcgcgctgacgctttaccttggcattattaatgctgtggttacgctgtgtcgttatatcattttgatgattctggaaatactattatctttcaggccgtag

SEQ ID NO: 370896 - DNA, 705 bp, Salmonella enterica
atggacagatttccacgatctgattcaatagtgcaggcgcggtccggcctgcagacctatatggcgcaagtgtatggctggatgacggtcggactgttactgaccgcgtttatcgcgtggtatgcggctaatacgccagccgtcatgatgtttgtcttttccagtaagatcactttctttggcttaattattgcccagcttgcgctggtgtttgttctgtcgggactggtgcataaacttagcgccggaatggcgacgacgctgtttatgctctattcggcgctaaccggattgacgttatccagtatttttatcgtttacacctactcctctatcgccagcacgtttgtggtgacggggggaatgtttggcgccatgagcctgtacgggtacaccactaaacgcgatcttagcggtttcggcaatatgctgtttatggcgcttattggtatcgttctggcgtcgctggtcaatttctggctgaagagtgaagcgctgatgtgggcggtaacctatatcggggtggtggtgtttgtcggtctgacagcctatgacacgcagaaactgaaaaatatcggcgagcaaatagatacccgcgatagcgctaatctgcgtaaatattcgattctcggcgcgttaacgctgtacctggactttatcaacctgttcctgatgttactgcgtatttttggtaatcgccgctaa

SEQ ID NO: 370897 - DNA, 453 bp, Salmonella enterica
atgcgtgaaacgcgaattgtagtcggccctgcgccgtttagcgtcggggaggaatattcctggctggcggcgcgcgacgaagacggcgcggtcgtcacctttaccggaaaagtgcgcaatcataacctgggcgatagcgttaaggcgctgacgctggagcattatcccggcatgactgagaaagctctggcggagatcgtcgttgaggcacgttcccgctggccgctggggcgggtcacggtgattcatcgcgttggcgaattatggccgggcgatgagattgtgtttgtcggcgtcaccagcgcgcaccgcagtagcgcgttcgacgccggtcagttcattatggattatctgaaaacccgtgcgccgttctggaagcgtgaagccacgccggaaggcgatcgctgggtcgaagcgcgcgacagcgaccagcagttggcgaaacgttggtag

SEQ ID NO: 370898 - DNA, 246 bp, Salmonella enterica
atgattaaggtgcttttcttcgcccaggttcgcgagcttacaggaactgatgcgctggatcttccagcagatttttccaccgttgagtcgctgcgacagcatctggcgacaaagagcgatcgttgggcgctggcgctggaagacggtaagctgttggcggcggtcaaccagacgctggtaagttttgaccatccgctgacggcgggcgatgaagtggcgtttttcccgccagtcacggggggctaa

SEQ ID NO: 370899 - DNA, 444 bp, Salmonella enterica
atggtggacgtttccgcgaaagcggaaaccgttcgtgaagcgcgtgcggaagcattcgttaccatgcgtagtgaaacgctggcgatgattgttgatggcaaacaccacaagggcgatgttttcgccaccgcccgaattgccggtattcaggccgccaaacgcacctgggagctgatcccgctgtgccacccgctactgctaagtaaagtggagattcagcttcaggccgagccggagtataaccgcgtgcgtattgagtctctgtgccgtctgaccggtaaaaccggcgtcgaaatggaagcgttaaccgcggcgtccgtcgcggcgttaaccatctacgacatgtgcaaagcggtacaaaaagatatggtaattggtccggtgcgcctgctggcgaaaagcggcggcaaatcgggggattttaaggtggatgcgcatgattaa

SEQ ID NO: 370900 - DNA, 513 bp, Salmonella enterica
atgagtcaggtcagcgctgaatttatcccgacccgcatcgttattcttactgtttccagccgacgcggcgaagaagacgacacctccggtcattatctgcgtgattcggcgcaggaggccgggcatgaagtggtggcgaaagccatcgttaaagagaaccgttacgcgattcgcgcccaggtttccgcctggatcgccagtgatgaggtgcaggtcgtattgataactggcgggaccggtttgaccgaaggcgatcaggcgccggaagcgctgttgccgctgttcgatcgtgaagtggaaggatttggcgaagtgtttcgcatgctctcgtttgaagagatcggcaccgcaactctgcagtcgcgcgcggtagctggcgtggcgaataacaccttgattttcgccatgccgggctccacaaaagcgtgcagaaccgcatgggagaatatcattgcgccgcagctggatgcccgtacacgcccatgtaattttcaccctcatttaaagaaataa

SEQ ID NO: 370901 - DNA, 1023 bp, Salmonella enterica
atgactccgcctcccgtatttggaaaggtgtacatggcttcacaacttaccgatgctttcgcgcgtaagttttactacttgcgtttgtcgattaccgatgtgtgtaactttcgttgcacctactgtctgccggatggctacaaacctggcggcgtcactaacaacggtttccttaccgtcgatgaaattcgtcgcgttacgcgcgcttttgccagtcttggcacggagaaggtgcgtcttaccggcggcgagccttcattacgccgcgattttaccgacatcattgccgccgtgggtgaaaatgatgctattcgccagatcgcggtgaccactaacggttatcgactggcgcgcgatgccgcgaactggcgcgaagcggggctgacgggcgtcaatgttagcgtggatagtctggatgcgcgtcagttccatgcgattaccggtcaggacaaattccgccaggtgatggcgggcatcgatgccgcctttgacgccggtttcgaaaaggtgaaagtcaacaccgtgctgatgcgcgacgtgaatcaccatcagttggataccttccttgcctggattcagcctcgccccattcagctacgcttcattgaacttatggagacgggcgaggggagcgatctcttccgcaaacatcatatttcgggtcaggtattacgcgacgagctgattaagcgcggttggatccaccagctccgccagcgcagcgatggcccggcgcaggttttttgtcatcccgattacgccggtgagatcggcctcattatgccgtatgaaaaagatttctgcgccacctgtaaccgcctgcgtgtttcgtccgtcggtaagctgcatttatgtctgtttggcgacggcggcgtgagtttacgcgacctgttacaggatgacgcgcagcaatacgcgcttgagaaacgtatttccgacgcgttgcgggagaaaaagcagacccatttccttcaccagagcaatactggtattacgcaaaatttatcttacattggcggttaa

SEQ ID NO: 370902 - DNA, 909 bp, Salmonella enterica
atgcgcaatcgtacgctggctgaccttgatcgtgtcgttgccctcggcggagggcatggattaggacgcgtcctctcctcgctttcttcattaggttcgcgcctgaccggcattgtgactaccacagataacggggggtcaactggccgtattcgccgctcggaaggcgggatcgcctggggcgatatgcgcaactgtctgaatcagttaattaccgaacctagcgtcgcgtccgctatgtttgagtatcgttttggcggtaatggcgaactttctggtcataacctcggaaatttgatgttaaaggcgttagatcacctgagcgtgcggcctctggaagcgattaatttaattcgtaatctgcttaaagtggacgcgcagctgatcccgatgtcggagctaccggtagatctgatggcgattgacgaacaggggcatgagatttacggcgaggtgaatatcgatcagttagcgacgccgccgcaggagatcatgttaacgccgaacgttccggcgacgcgggaagcggtacaggccattaatgacgcggatctgattctgattggccctggcagtttttatactagcctgatgccttgcctgctgctggatgaactggcgcaggcgctgcggcgcaccccagcgccaatggtgtatatcggcaatctgggtcgcgaactgagtctgcccgccgccagtttaacgctggtcgataagctggcaatgatggagcaatatattggcaaaaaagtcattgacgcagtagtggttgggccgcgagttgacgtcagtgcggtgaacgatcggctggtgattcaggaagtgctggaggccagcgatatcccctatcgccacgatcgtcagttattacataatgcgctggaaaaagcgctacaggcgttgggttaa

SEQ ID NO: 370903 - DNA, 585 bp, Salmonella enterica
ttggttcatgatgctgaaagaggcgcctttgatagccacttagcggaactgattatggcggggcgtgaaatctttcggctggagcaaatagaatcgctcgccagagaaaaggtaaaacggctgttttttattgacgaagtcgaagtatttctgggttttcagaatcagttacgagagtcgctgtcgctgacaacaatgacccaggatatgcgattttataacgtttcgggtatcactgagtctgacctggacgaggcggaaataaggataaaaattgctgaaaatagggattttcacaaatggtttgcgctgtgggggccgtggcataaagtgctggagcgtatagcgccagaagagtggcgtgaaatgatggccaaaagggctgagtgtattgaaacggatgagtatcagagccgggtcaatgctgaactggaagcgttaggaatagcaggtgatcctgacgcagagcgcatggctggaatgcggataatggaagagatcaatcagaccctctttactgagatcatggagaatatattgctgaaaaaagaggtgagctcgctcatgagcgcctactggcgatag

SEQ ID NO: 370904 - DNA, 657 bp, Salmonella enterica
ttgaatgtgcagagtaattcgttaaccgctttgcctgaaacattgccgccgggcctgaagactctggaggccggcgaaaatgccttaaccagtctgcccgcatcgttaccaccagaattacaggtcctggatgtaagtaaaaatcagattacggttctgcctgaaacactacctcccacgataacaacgctggatgtttcccgtaacgcattgactaatctaccggaaaacctcccggcggcattacaaataatgcaggcctctcgcaataacctggtccgtctcccggagtcgttaccccattttcgtggtgaaggacctcaacctacaagaataatcgtagaatataatcctttttcagaacgaacaatacagaatatgcagcggctaatgtcctctgtagattatcagggaccccgggtattgtttgccatgggcgacttttcaattgttcgggtaactcgaccactgcatcaagctgtccaggggtggctaaccaatctcgaggaggaagacgtcaaccaatggcgggcgtttgagacggaagtaaacgcggcagccttcagcatgtttctggatcgtcttagcgatacgcagaacacccgacacccggattttaaggaacaagtctccgcctggctgaagatagcgcactaa

SEQ ID NO: 370905 - DNA, 837 bp, Salmonella enterica
atgtttaatattactaatatacaatctacggcaaggcatcaaagtattagcaatgaggcctcaacagaggtgcctttaaaagaagagatatggaataaaataagtgcctttttctcttcagaacatcaggttgaagcacaaagctgcatcgcttatctttgtcatccacctgaaaccgcctcgccagaagagatcaaaagcaagtttgaatgtttaaggatgttagctttcccggcgtatgcggataatattcagtatagtagaggaggggcagaccaatactgtattttgagtgaaaatagtcaggaaattctgtctatagtttttaatacagagggctataccgttgagggagggggaaagtcagtcacctatacccgtgtgacagaaagcgagcaggcgagtagcgcttccggctccaaagatgctgtgaattatgagttaatctggtctgagtgggtaaaagaggcgccagcgaaagaggcagcaaatcgtgaagaagccgtacaacggatgcgtgactgcctgaaaaataataagacggaacttcgtctgaaaatattaggacttaccactatacctgcctatattcctgagcagataactactctgatactcgataacaatgaactgaaaagtttgccggaaaatttacagggaaatataaagaccctgtatgccaacagtaatcagctaaccagtatccctgccacgttaccggataccatacaggaaatggagctgagcattaaccgtattactgaattgccggaacgtttgccttcagcgcttcaatcgctggatcttttccataataaaattagttgcttaccttaa

SEQ ID NO: 370906 - DNA, 2022 bp, Salmonella enterica
atgagtaaaccgttcaaactgaattccgcttttaaaccttctggcgatcagccggacgctatacgtcgtctggaagaggggctggaggacgggctggcgcatcagacgttattgggcgtgaccggctccgggaagacattcaccattgccaacgtcattgcggacttgcagcggccaacgatggtgcttgcgcccaataaaaccctggcggcgcagctctacggcgaaatgaaagagtttttcccggaaaacgcggtggagtatttcgtctcctactatgactactatcagccggaagcgtatgtgccaagttcggatacgtttatcgaaaaagacgcttcggtaaacgaacatattgagcaaatgcggttgtcggcaacgaaagcgttgcttgagcgacgcgatgtcgtggtggtggcttccgtgtccgcgatttacggtctgggcgatccggatctctacctgaaaatgatgctgcatctgacggtgggaatgctgattgaccagcgcgcgattttgcgtcggctggcggaattgcaatacacccgtaacgatcaagcttttcagcgtggtacctttcgcgtgcgcggcgaagtgatcgacatcttcccggctgaatctgacgacatcgcgctacgcgttgagctgtttgatgaagaagtggaacgcctgtcgctgttcgacccgttaaccgggcaggtagagtcaacggtgccacgttatactatctatcccaaaacgcactacgtgacgccgcgcgagcgtattctgcaggcgatggaagagataaaagatgagctggcggacaggcgtaaggtcttgctggcgaataataagctgcttgaagagcagcgattaagccagcgcacgcagttcgatttagagatgatgaacgagctgggctactgctcaggcattgaaaactattcccgctttctgtcgggccgcgggccgggcgaaccgccgccaaccttgttcgattatctgcccgccgacggactgctggtggtggatgagtctcatgtcaccatcccgcagataggcggcatgtaccgcggcgaccgggcgcgcaaagagacgctggtcgagtatggcttccgtctgccttcggcgctggataaccgtccgctgaagtttgaggagtttgaagccttagcgccgcaaactatctatgtttccgccacgcccggcaactatgagctggaaaaatctggtgatgaggtggtggatcaggtcgtgcgaccgaccgggctgctggacccgattattgaagtgcgtccggtggcgacccaggtggacgatctgctgtccgaaattcgtcagcgtgcggccattaatgagcgtgtccttgtcactacgcttaccaaacggatggcggaagatttgaccgaatatctggaagagcacggcgagcgcgtgcgttacctgcactcagatattgataccgtggagcgcatggaaatcatccgcgatttgcgtctgggcgagtttgacgttctggtggggattaacctgctgcgcgaagggctggatatgccggaagtctcgctggtggcgattctggacgccgataaagagggcttcctgcgctccgagcgctccctgattcagaccatagggcgcgcggcgcgtaacgttaacggtaaagcgattctgtatggcgataaaatcacgccgtcgatggcgaaggcgattggcgaaaccgagcgacgtcgcgagaagcagcagaagtacaacgaagagcacggtatcactccgcaggggctgaacaaaaaagtggtcgacatcctggcgctggggcagaacattgcgaaaaccaaagcgaaggggaaaggcaagggccgttctacggcaaaagccggaattgtcgaactggatatgacgccgaaagcgttgcagcagaaaattcatgaactggaagggcaaatgatgcagcacgcgcaaaatctggagtttgaagaagccgcgcaaattcgcgaccagttgcaccagttacgcgagttgtttatcgcggcgtcctga

SEQ ID NO: 370907 - DNA, 687 bp, Salmonella enterica
gtgactaaacgctattttgtgaccggtactgatactgaagtcggtaaaacggtcgccagttgcgccttattgcaggccgcaacgcagttaggttatcaaaccgtaggctataagcccgtcgcttccggcagcgaaatgacaaccgacgggctacgcaatagcgatgccctggccttgcagcgtaacagcagcctgccgcaaccttattccgctatcaatccttatacttttgccgagcctacttctccccacatcgctagcgccgacgaaggccgggcgatagacgcggcggtgttatcacgcggattacgaacgctggaggcgcaggcagactgggtgttgacagaaggggcgggcggctggtttacaccgctctctgccacgctgacgtttgccgactgggtacagacggagcagctgccggtgattctggttgttggcgtcaagctgggctgtattaatcacgccatgctgacggcgctggcggtagaacaggccggattaccgcttgtcggatggatagccaacgacatgcagccgccaggcgcgcgtcatggtgaatatctcgcgacgcttcgccgcgtcataccggccccgctgttaggggaaatcccgtggctgggcgtttctccatcgcaggcggcgacaggacagtatctggaccttagccccctggaacgcgcctga

SEQ ID NO: 370908 - DNA, 756 bp, Salmonella enterica
atggcgcaggtgaataagcaggctattgcggcggcgtttggccgggccgcatcgcaatacgaacagcacgcctctttacagcaacacagcgcggatgcgctgctgacgctgttgacaggccgccagtttgccagtgtgttggacgcaggctgcggccccggacgtatgagtcgttactggcgagagcgggggagcgaagtgaccgccctggatctttcgctgccgatgctgcaacaggctcgcgatcgtcaggcggcgcatcactatttgctggcggatatcgaagcgattccccatgacgccggcgtttttgacctggcctggagcaacctggcggtccagtggtgcggcgatttacgcgatgcgttgagcgagttgtatcgggttgtacggcccggcggcgtggtggcgtttaccaccttgtgccaggggtcgttgccggagctgcgtcaggcatggcaggccgtcgataatcgcgctcacgcgaatagctttttgccggaagaggccattgaccacgcgctacgcggctggcgggcgtctcgtcatactcaggcgatgacattgtggtttgaggatgccctgagcgcgatgcgttcgctcaaaggcattggcgccacccatcttcatgaagggcgggagacggatgtattaacccgcgcccggcttagacagattcaactggcatggccgcagcggcaggggaaatatccgctgacgtaccacctttttatgggagtgattgaacgtgactaa

SEQ ID NO: 370909 - DNA, 1158 bp, Salmonella enterica
atgagttggcaacaacgcgtcgacgatgcgctgacggcgcgtcgggcgacggatacgttgcgccgccgctatgtggtgtcgcagggcgccggacgctggctggtagcgaacgggcgacagtatcttaacttttccagcaatgattacctcggcttaagtcaacatccgcagattattcgcgcctggcaacaggcagcgacgcgttttggcgtcggcagcggcgggtcgggtcatatcagcggttattccgtggcgcaccaggcgttagaggaggaactggcgcaatggttaggatatccacgcgcgctgctgtttatctctggctttgcggcgaatcaggcggtcattaccgccttaatgaaaaaaaatgaccggattgtggccgacaggttgagtcatgcttccctgctggaagccgctaatctgagtccggcgcagcttcgccgctttatccataacgatacgcagcatctgtcgcgtttactgcaatcgccctgcgtgggtcagcaactggtggtgacagaaggtgtatacagcatggacggcgacagcgcgccgctggcggaaatccagcacattgcccgcaggcatcatgcctggctgttggttgatgatgcgcacggcatcggcgtgactggcgatgaggggcggggcacctgctggcagcggggggtgaagcctgagttgctggtggtgactttcggtaaggggtttggcgtcagcggcgcagcggtgctctgctcggaaagcgtcgcagattatctgctgcaattcgcccgtcatctggtttacagcaccagtatgccgcccgcccaggcgcaggcgttaagcgcctcgctggcggtgatccgtagcgatgaaggtcgtgaacggcgcgaaaaactcgccgctctggttcagcgctttcgggccggcgttaacgcgtcccgatttacgctactgaatgcccatagcgccatccagccgttaatcgtgggcgataacagccgtgcattgcgcctggcggaggcgctgcgtcaacaaggatgctgggcgacggcgattcgtccgccgacggtgcctgtcggtacggcgcgcctgcgcttaacgttaacgcaggcgcatgaagcgtgcgatatagaccgtctgctggaggtgctgcatggcgcaggtgaataa

SEQ ID NO: 370910 - DNA, 1041 bp, Salmonella enterica
atggctcgccacccacgctggacactgtcgcaagtaaccgaattatttgaaaaaccactgctggaattgctgtttgaagcgcagcaaattcatcgccagcatttcgatccgcagcaggtacaggttagtacgctgctgtcgatcaaaaccggcgcctgcccggaggattgtaaatactgcccgcagagctcgcgctataaaaccgggttggaagccgagcgtttaatggaggtagagcaggtactggactccgcccgtaaagcgaaaaacgccggttcgacccgcttctgtatgggagcggcctggaagaatccgcatgaacgcgatatgccttatctggagcagattgtacagggcgtcaaagcgatggggctggaaacctgtatgacgctcggcatgttgaacgagagccaggcgcagcgtctggctaacgccgggctggattactacaaccacaacctcgatacctcgccggagttttacggcaatatcatcactacccgtacctatcaggagcgcctcgacacgctggaaaaagtccgtgaagcagggattaaagtgtgctccggcggcattgtgggtctgggcgaaacggttaccgatcgcgccggactgttgttgcagttggcgaacctgccgacgccgccggaaagcgtgccaatcaacatgctggtgaaggtgaaaggcacaccgcttgcggataacgatgacgtggatgcgtttgattttattcgtactatcgccgtggcgcgcatcatgatgccgacctcatacgtgcgtctttccgcagggcgtgaacagatgaacgagcagacccaggcgatgtgctttatggccggggcgaactcgattttctatggctgcaaattgttaactacgccaaatccggcagaggacaaggatctgcagttattccgtaagctgggactgaatccgcagcagaccagggtgctggcgggcgataacgagcagcagcaacgtctggagcagacgctgatgacgcctgacaccgatgattattacaacgcggcagccttatga

SEQ ID NO: 370911 - DNA, 1290 bp, Salmonella enterica
atgacaacggacgatctggccttcgataaacgccatatttggcatccttacacttccatgacctcgccgctgccggtatatcccgttgagcgggccgaaggctgcgagctggttctcgcctcgggcgaacgcctgattgaggggatgtcctcctggtgggcggccattcatggttataaccacccgcaattgaatgcggcgatgaaagcgcaaattgacgccatgtcgcatgtcatgttcggcggcataacccatacacctgcggtgaatctgtgccgtaagctggtcgcgataacgcctgagccgctggagtgtgtctttctggccgactctggttcggtgtcggtagaagtggccatgaagatggcgctgcaatactggcaggcgcgcggcgaatcgcgtcagcgttttctgacgtttcgccacggttatcatggcgacacgttcggcgcgatgtcggtgtgcgatccggataactccatgcacagcttgtggaaaggctatctgccggaaaacctgttcgcgccggcgccgcaaagccggatggatggcgaatgggatgaaagcgacatcgcgccatttgcccgcctgatggccgcgcatcgccatgaaatagccgccgtgattctggaacctatcgttcagggcgcgggcgggatgcgcatatatcatccacaatggctcaggcgtattcgtaacatgtgcgatcgcgaaggcattctgctgattgccgatgaaatagccaccgggtttggccgtaccggcaaactgttcgcctgcgagcacgccgggatcgcgccggatattctgtgtctcggcaaagccttaaccggcggcaccatgaccctctcggcaacgctcacgacacgccaggttgcagagactattagcaacggcgaggcggggtgttttatgcatggcccgacgtttatggggaatccgctggcctgcgccgtcgcttgcgccagcctgacgctgctggaaagcggcgaatggcgtcagcaggtggcgtctatcgagtctcagttacgcgctgagttagcccccgcgcaaagttcgccctgggtggcggatgtgcgggtgttgggcgcgattggggtggttgaaaccacgcacacggtcaatatggcggcgcttcaacgcttcttcgtcgggcaaggcgtctggatcaggccgttcggcaagctaatctacctgatgccgccctacattattcgtccggatcaactgcgccgtttgacccaggcggtcaatgacgcggtacacaatgaaacattttttagccattaa

SEQ ID NO: 370912 - DNA, 477 bp, Salmonella enterica
atgaaacttatcagcaacgatttgcgcgatggagataaacttcctcatcgccacgtttttaacggtatgggctatgatggcgataatatttcgccgcatctggcctgggacgacgtgccgatgggcaccaaaagttttgtcgtgacctgttacgatcccgacgcgccgaccggctccggctggtggcactgggtggtggtgaacctcccggcggatacgcgcgtactgacccaggggttcggctcaggcctggtggccgtaccagacggcgtcattcagacgcgtaccgatttcggtaaagcgggctacggcggcgcggcgccgcctaaaggggaaacgcaccgctatatctttacggttcacgcgctggacgtcgagcgtcttgacgttgatgaagacgccagcggcgcgatggtcggctttaatgtgcatttccattcgctcgccagcgcctcgatcacggcgatgttcagttaa

SEQ ID NO: 370913 - DNA, 1521 bp, Salmonella enterica
atgaacaccatgacactcactccggggcagttaagcctctctcaactgtacgatgtctggcgtcatccggtacagcttcggctggacgccagcgccattgacggcattaacgccagcgtcgcgtgcgtcaatgatatcgttgccgaagggcgtaccgcctacggcatcaacaccggtttcggcctgctggcgcagacgcgcatcgctgatgaagacttgcaaaatctacagcgatcgttggtgctgtctcacgccgcgggcgtaggcgacccactggatgacgcgatggtgcgtctgatcatggtattgaaaatcaatagcctggcgcgcgggttttccggaattcggttgagcgtgatagaagcgctcatcgctctggtgaatgccggcgtgtatccgctgattccggcaaaaggctcggttggcgcgtcgggcgacttagcgccgctggcgcatctgtcgctgacgctgcttggcgaaggaaaagcgcgctggcagggcgaatggcttccggcgcagacggcgctaaaaaaggccggactggagcctgtcgcgctggcggccaaagaggggctggcgctgcttaatggcacccaggcatcaacggccttcgcgctgcgcggtttgtttgaggcacaggagttatttgcctccgccgttgtctgcggcgcgctgactaccgaagccgtactgggatcgcgccgtccttttgatgcgcgcattcatgccgcgcgcggacaacaggggcaaattgacgtcgcgcggttgttccggcacctgctgaccgataccagcgccattgctgaatcacatcaccactgtcataaagttcaggacccgtattcccttcgctgccagccgcaggtaatgggcgcttgtctgacccagttacgtcagacgaaagaggtactgctggctgaggccaacgcggtatccgataatccgctggtctttgccgatgcgggggaggtgatctccggcggtaacttccatgctgaaccggttgccatggcggcggataatctggcgctggcgatagcggaaatcggcgcgctatcggagcggcgcatcgcgctgatgatggataaacatatgtcgcagttaccgccgttcctggtgaaaaatggcggcgttaattccggttttatgattgcccaggtcaccgccgcggcgctcgccagcgagaataaagcgctggcgcacccgcacagcgtggatagcctgccgacctcggcgaatcaggaagatcatgtctcaatggccccggcggcagggcggcgactctgggaaatggcggcgaatacccgcggcatcattgccgtggagtggctggcggcctgtcaggggatagatttacgggaagggttaacctccagcccgttactggaacaggcgcggcagacactgcgcgagcaggtggcgcactatacgcaggatcgttttttcgcgcccgatattgagtgtgcgacggcgctgctggcgcaaggcgcgttacagcgtctggtgccggactttatgtga

SEQ ID NO: 370914 - DNA, 1686 bp, Salmonella enterica
atgcctgaaagcaagtatcgtcagcagactatccgcgcgccccgaggcacggtattaacggcgaaaagctggctgacagaagccccgctgcggatgttaatgaataatctcgatcctgacgtggcggaaaatccgcatgagctggtggtctacggcgggattggtcgcgccgcgcgcaactgggaatgctatgacgctattgttgatgcgctcacccggctggaggcggacgaaacgttgcttattcagtctggcaaaccggtcggcgtatttaaaacgcacgacaacgcgccgcgggtattaatcgccaactccaacctggttccccactgggcgacatgggaacactttaacgaactggatgcgaaagggctggcgatgtacggtcaaatgacggccggaagctggatctatatcggcagtcagggaatcgtgcagggaacatacgaaacctttgtcgaggcggggtgtcagcactataacggcacgctggcgggacgctgggtgctgaccgccggactgggcggcatgggcggcgcgcaaccgctagccgcgacgctggccggagcgtgttcgctgacgattgaatgccagcaaagccgtatcgattttcgtctgcgtactcgttacgtggatgagcaggccgccacgctggatgacgcgctggcccgcattacgcgctacacccgcgaggggaaagccgtgtccgtcgccctgtgcgcgaacgcggcggatatcctgccggaactggttaatcgcggcgtgcgcccggacctggtgaccgatcagaccagcgcccacgatccgctacatggctatttaccctccggctggcgctgggaggagtatcagaaaaacgcgcaatccgatccccacgggacgatgcaggcagcaaaacgttccatggcggcgcatgttcgggcgatgctggcgttcagtaaaatgggcgtgccgacctttgactatggcaacaatattcgtcagatggcgaaagagatgggggtggaaaacgcctttgattttccgggatttgtgccagcctatattcgtccgctgttctgtcgtggtatcgggccgtttcgctgggtggcgctgtccggcgatccgcaggatatctataaaaccgatgccaaagtcaaagagatagtggctgaggataaacatctgcatcactggctggatatggcgcgcgagcgcattcattttcaggggttaccggcgcgtatctgctgggtaggcctggagtggcggcaaaaactggggctggcgttcaacgaaatggtgcgttgcggcgaggtatccgcgcccattgtgattggccgcgatcacctggattccggctctgtcgccagccctaaccgtgaaaccgaagcgatgcgcgacggttccgacgcggtttccgactggccgctgttaaatgcgttgctgaataccgccagcggggcgacatgggtatcgctccatcatggcggcggggtgggaatggggttttcgcaacacgccggtatggtgattgtctgtgatggcactgacgaggccgccgcgcgtattcgccgcgtgttacacaacgatccggcgacgggcgtcatgcgccatgccgatgccggatatgatctcgcggtggaatgcgctgttgagcaaggtctgaatttaccgatggttgcggcgacgcaggggaaaggctga

SEQ ID NO: 370915 - DNA, 726 bp, Salmonella enterica
atgtattcatcccgctcccgttctgcacctgcgcctttttacgaaacggtgaaacaggacatctgtaaaaaaatagccggcggcgtctggcagccgcacgatcgcattccgtcggaagctgaactggtcgctcagtatggctttagccgaatgaccatcaaccgggcgctgcgtgagctgacggatgaagggtggctggtgcgtttacagggcgtggggacgtttgtcgccgaaccgaaaggccagtccgcgctgtttgaagtccgcagtatcgccgaggagattgccgcccgccgtcatcagcatcgttgtgaggtgctcacgctggagcgcgtgcgggcaaacgccatccaggccagcgctctcaacgtcaatgagagcgatgtcattttccattccatcatggtgcattatgaaaacgatctgccggtacaaattgaagatcgctgcgtgaatgcggatattgccgtggattacctgacgcaggattaccgtcagaccacgccgcacgcttatttgtcgcggatcgcgccgctaacggaaggggaacatattgtggaggcggtgcgcgccacggcgcaagagtgcgcgtggttaactatcaaagagcatgagccttgtctgctcattcgtcgtacaacctggtccgcgtcgcggattgtttctcacgcccgcttacttttccccgggtcgcgctatcggctacagggacgatttatctcctga

SEQ ID NO: 370916 - DNA, 942 bp, Salmonella enterica
atgacgcaatggtatccggcttctccggcgctctggcaggggcgcgatgacagtatagaagcgccggatgcgcggcgtctgtttcagaccgtcacgcgcagcgagaccttttcccccgaaaactggcagcaaaagatcgcgttaatgggatttgcctgcgacgagggggtaaaacgcaatgcagggcgtcccggcgcggcaggcgccccggatgcgttgcgtaaagcgctggcgaatatggccagccaccagggacatgaacggctagtggatttaggcaattgggttgcgcctacgcccgatctggaaggcgcgcagcaggccttgcgcgatgcggtaagccgctgtctgcgggccgggatgcgcacgctggtgctgggcggtgggcatgaaaccgcgtttggacacggcgcgggggtgctggacgcgtttgcgcaggaaagcgtaggtatcattaatcttgatgcgcatctggatctccgtcagaccgaccgggcaacatccgggacgccgtttcgtcaactggcgcagctatgcgacgcgcagagccgcgcgtttcattatgcctgtttcggcgtgagccgtgcggcgaatacgcaggcgttgtggcgggaagcgcagtggcggaatgttaccgtggtggaggatcttgactgccatgacgcgctggcgcagatgacgcagtttatcgacaaggtggataaaatttatctgactatcgatctcgacgtattgcctgtctgggaaatgccggccgtctccgctcccgcagcgctgggcgtgccgctgatacaggttctgcgtttaattgagccggtttgccgcagcggaaaattacaggcggcggatctggttgagtttaatccacgctttgatgaagatggcgcagcggcgcgcgtggcggcgcggcttggctggcaaatcgcgcactggtggcgttaa

SEQ ID NO: 370917 - DNA, 1170 bp, Salmonella enterica
atggacccgcagcggcaagccccgtacgggctggtggataaccaggcgctgattgtacgcgaagggcatatttgcgatatcgtgccagagacgcagcttcctgtcagtggggacaatatccatgatatgcagggacgactggtaaccccgggacttatcgattgccacacgcatctggtgtttgccggtaaccgcgccgcagagtgggagcagcggcttaacggcgcgtcataccagcatattagcgctcagggcggcggcattaacgcgacggtatcagcaacccgcgcctgtgcggaggagacgctctacctgctggcgcgcgaacgcatgatgcgccttgccagcgaaggcgttacgctgctggagattaaatccggctatggcctggagctggcgacagaagaaaagctgttgcgcgttgctgcaaaacttgccgccgaaaacgctatcgacattagccccacgctattggccgctcatgctacgccagcggagtatcgtgacgacccggacggctacatcactctggtctgcgagacgatgattccgcagctctggcaaaaagggttatttgatgcggtagacctcttttgcgagagcgtcggctttaatgtggcgcagagtgagcgcgtattgcagacggcgaaggcgttaggtattcccgttaaaggccatgttgagcagctttcgctgttgggcggcgcgcagctggtgagtcgctatcagggtttatcggcggatcatatcgaatatcttgatgaagcgggcgtcgcggcgatgcgtgacggcggtactgtcggcgtgttgttgcctggcgcgttttattttctgcgcgagacgcagcgcccgccggtggaactgctgcgccgctatcaggtgcctgtcgccgtcgccagcgatttcaatcccggcaccagcccgttttgcagtttgcatctggcgatgaatatggcctgcgtacagtttggtctgacgtcggaagaggcatgggcgggcgttacgcgccatgccgctcgtgcgctgggaagacaggcgacgcatgggcagctcagggccgactaccgggcggattttgtggtgtgggatgctgaacagccggtagaggttgtgtatgagccggggcgtaatcctttatatcagcgggtatacagaggacaaatctcatga

SEQ ID NO: 370918 - DNA, 1284 bp, Salmonella enterica
gtgaatacattatcggtttcccgtctggcgctggcactggcttttggcgtgacgctgagcgcctgtagctctacgccacccgatcagatcccttccgatcaaaccgcgcctggcaccgcctcgcgcccaattctgtcggcaaatgaagcgaaaaacttcgttgcggcgcgctattttgcctccctgacgccgaataccgccccgtggtcgccgtcgccgattaccctgcccgcacagcctgactttgtggtggggccggcaggtacgccaggcgttacgcacacctcgattcaggccgcggtcgatgcggcaatggttaaacgcacgaacaaacgccagtacattgctattatgccgggcgactatcaggggaccgtgtatgttcccgccgcgccgggaagtctgaccctgtacgggaccggtgaaaaaccgatcgatgtgaaaattgggatggcgattgatggtgaaatgagcgtcgctgactggcgccgcgcggtgaatcccggcgggaaatatatgcctggtaaacccgcctggtatatgttcgataactgccaaagcaaacacgccgcgacgatcggtgtgatgtgttctgccgcgttctggtcgcagaataacggtctgcagctacaaaatctgaccatcgagaacacgctaggcgacagcgtcgatgccggaaaccatccggcggtggcgttgcgtaccgatggcgacaaagtccagattaacaaggtcaatatccttggccgccagaacaccttctttgtgaccaacagcggcgtgcagaaccgtctgcaaaccgatcgccagccgcgtacgctggtgacgaacagctatattgaaggcgatgtggatatggtttccggacgcggcgccgtggtgttcgataacaccaacttccaggtcgtcaactcccgcacacagcaggaagcctacgtcttcgccccggcgacgctgtccaatatttactatggctttttggcgatcaacagccgctttaacgcctccggcgatggcgttgcgcagcttggccgctcgctggatgtcgacgccaacaccaacggtcaggtcgtgatccgcgacagcgtgattaacgagggcttcaacgttgccaaaccgtgggccgacgcggtcatctcgaaacgtccgtttgctggaaatacggggaccgtggatgacaaagacgaggtgcagcgtaatctgaacgacactaactacaaccgcatgtgggaatacaacaaccgcggtgtaggcagtaaagtagtggcggaacctaagcagtaa

SEQ ID NO: 370919 - DNA, 996 bp, Salmonella enterica
atgaaacaaacagtctataccgccagccctgagagtcagcaaattcacgtctggagcctgaaccacgaagggacgctgacgctggtgcaggtcgtggatgtgcccggtcaggttcagccgatggtggtcagtccggataaacgctacctctatgtcggcgtgcgcccggagtttcgtgtcctggcgtatcgtattgcgccggatgatggcgcgctgacgtttgccgccgaatccgccctgccgggtagcccgacccatatttctaccgatcatcatggtcgttttgtctttgtcggatcgtataacgccggtaatgtcagcgtgacgcgcttacaggatggcctgccggttgagttggtggatgtggtggaggggctggacggctgccactcggcaaatattacgcctgataaccgtaccctgtgggtgcctgcgctaaaacaggatcgcatttgtctgtttacgctaagcgatgacggccatctggtggcccaggagccggcggaagtaaatacagttgaaggggcaggcccgcgtcatatggtcttccacccgaatcgacaatatgcgtattgcgtcaatgaactgaacagttcggtggatgtctggcagcttaaaaatccgcatggcgagatagagtgcgtgcaaacgctggatatgatgcccgccgatttttccgatacccgctgggcggcggatattcatattacgccggatggacggcatctgtatgcctgtgaccgcaccgccagtctgattaccgtctttagtgtctccgaagatggcagcgtactgagcgttgaaggcttccagccgacggaagcccaaccgcgcggctttaatatcgacaatagcggaaaatacctgattgctgcgggtcaaaaatcacatcatatcgcggtctatgaaattacgggcactcaggggttgctgacggaaaaaggccgttatgccgtcggccaggggccaatgtgggttgtggtgaacgcgtactaa

SEQ ID NO: 370920 - DNA, 819 bp, Salmonella enterica
atgactgcacgcgtgattgccctcgatttagacggaacattattaaccccgcataaaaccttactcccctcctcgcttgaagcgctatcacgcgccaaagaggcgggctttcaacttatcattgtcacgggtcgccatcacgttgctattcatcctttttatcaggcgctggcgctggaaacacctgctatttgctgcaacggcacctatttgtatgattatcaagctaaaactgtcctggatgccgatcctatgcccgtggataaggcgttgcagttgattgatttactggatgagcatcagattcacggcctgatgtatgttgatgacgctatgctttacgaacacccaaccggtcacgtcgtgcgtacctcccggtgggcgcagaccttgccgccggagcaacgtccgacctttacacaggtctcttcgttggcgcaggcggcgcgcgacgtgaatgccgtgtggaagtttgcgcttaccgatgaagatattcccaggctacagcggttcggtcagcatgttgaacaggcgcttggcctggagtgcgaatggtcatggcacgatcaggtggatatcgcgcgcaaaggcaacagtaaaggcaagcgccttacccagtggatagaagcgcagggagggtcaatgaaaaatgtgatcgctttcggcgataactacaacgacatcagtatgctggaggcggcaggcaccggcgttgcgatgggcaacgccgatgaggcggtgaaagcgcgcgctgacgttgtgatcggcgataacactaccgatagcatcgccaaatttatttacacccacctactatag

SEQ ID NO: 370921 - DNA, 1059 bp, Salmonella enterica
atgctggagcttaatttttcccagacgctgggaacgcactgtttaaccctcaacgaaacgctgccagccagtgggatcacggctatctttggcgtctccggcgcgggaaaaacctcgctgattaatgccatcagcggtttgactcgcccgcaaaaaggacgcatcgcgctgaatggccgggtgttgcatgacgcggaaaacggtatctgtttaacgccggaaaagcgccgcatcggttatgttttccaggatgcgcgcctgttcccccattacaaagtacgcggcaatttgcgctacggcatggcgaaaagcatgaccggtcagtttgataagctggtgtcgctgctgggaattgaagcgttgcttgatcgcctgccggggagcttgtccggcggagaaaaacagcgcgtagcgataggccgggcattgctcaccgccccggagttgctgctgttggacgaaccgttggcctcgctggatatcccgcgtaaacgcgaattactgccgtacctgcaacggctggcgcgggaaatcaatattcccatgctgtatgtcagccattctctcgatgaaattctccacctggcggataaagtcatggtgctggaggatggacaggttaaagcgtttggcccgctggaagaagtctggggaagcagcgttatgcacccgtggctgccgaaagagcaacagagcagtattctgaaagttagcgtgctggagcatcacccacattatgccatgaccgccctggcgcttggcgaccagcacctgtgggtaaataaactcaatcagccgctgcaatccacactgcgtattcgtatacaggcgtcggatgtctcgctggtactacagccgccgcagcagaccagtatccgcaacgtattgcgggcaaaagtggcgaattgttatgacgataacggacaggtggaagtccagcttgagataggcggcagaacgctgtgggcgcgaataagcccgtgggccagggatgagctgaatatcaagcctggcctgtggctttacgcgcaggtgaaaagcgtttctatcaccgcctga

SEQ ID NO: 370922 - DNA, 690 bp, Salmonella enterica
atgatactgaccgatccagaatggcaggctgtccttcttagcctgaaagtgtcttccctggccgtgctgtttagcctgccgtttgggatcttttttgcctggttactggtacgatgccggtttccgggcaaagccttacttgatagcgtcctgcatctgccgctggtgctgccgccggtggtggtcggctatctgctgctggtgtcgatggggcgacgcgggtttattggccagtggctgtatgactggttcggtctcacgtttgcctttagctggcgcggcgccgtgctggcggcggcggtgatgtccttcccgctgatggtgcgggccattcggctggcgctggagggggtggatatcaagcttgaacaggccgccagaacgctgggcgccgggcgctggcgcgtttttctgactatcaccttaccgcttaccctgccgggcattattgtcggtacggtgctggcgtttgcccgttcgcttggcgaatttggcgcgaccattacctttgtttctaatattccgggcgaaacccgcaccataccttccgccatgtataccttgatccagacgccgggcggggagagcgcggcggcgaggctgtgcgtgatttcgattgtattagcgctgatttcgctgttgatttctgaatggctggcgcggattagccgtgaacggacggggcgctaa

SEQ ID NO: 370923 - DNA, 774 bp, Salmonella enterica
atggcgcattcctggttacgcctggtcgcaggggcaacattatctttcgtcatcgccggtcatgcgctggcggatgaaggcaagatcaccgtatttgccgccgcgtcgctaacgaacgcgatgcaagacattgcggcagaatataaaaaagagaaaaatgtggatgtggtctcctcattcgcctcctcttcaacgctggcgcgccagatagaagcgggcgcgccggcggacctgttcatctctgctgatcagaaatggatggattacgcagccgataaaaaagcggtggataccacgacgcgcgaaacattgcttggcaatagcctggtggtggtggcgccgaaagccagcgagcagaaaccgtttaccatcgacaacaaaacggactggattcgtctgttgaacggcgggcgtctggcagtgggcgatccgcaacacgtaccggcgggaatttatgccaaagaagcgctgcaaaagctgggcgcatggcaaacgcttgaaccgaaactggcgccgggcgaggatgtgcgcggcgcgttggcgctggtcgaacgtaacgaagcgcctttgggcattgtatatggttctgatgcggttgccagcaagggggtcaacgtggtggcgacgttcccggaagattcacataaaaaagtggaataccccatcgctatcgtggaggggcataaaaatgcgaccgtcagcgcgttctatgattacctgaaaggaccgcaggcctcggcaatctttaaacgttatggatttacgacgaagtaa

SEQ ID NO: 370924 - DNA, 150 bp, Salmonella enterica
atgttagagttattaaaaagtctggtattcgccgtcatcatggtaccggtagtgatggccatcatcctcggtctgatttacggtctgggtgaggtgttcaacattttttccggtatcggtcagaaagaccagtccagacagaaccgctga

SEQ ID NO: 370925 - DNA, 789 bp, Salmonella enterica
atgcaggccgaaatccttcttaccctgaaacttcagcaaaagctttttgccgatccccgacgtatctctctgctgaaacacattgcgctttccggctctattagtcagggcgcgaaagacgcgggaatcagctataagagcgcctgggatgcgataaacgacatgaaccagcttagcgaacatatgctggttgagcgcgcaacgggcggcaaaggcggcggcggcgcggtattaacccgctatggtcagcgtctgatccagctttacgatttgctgggccaaattcagcaaaaagcgttcgatgtgttaagtgacgatgacgccctgccgcttgacagtctgctggccgctatttcccgcttttcactgcaaaccagcgcccgaaatcagtggttcggcaccattaccgcccgcgatcgcgatcaggtgcaacagcatgtcgatgtgctgctggccgacggcaaaacgcggcttaaagtcgcgctgacggcgcaaagcggcgagcgtctcggcctggaggaaggtaaagaagtgctgatcctgctaaaagcaccgtgggttggcattacccgggatgcagccgttgcgcgcgccgctgacaatcagttgtcgggaacgatcagccatatcgagcgcggcgcggaacagtgtgaagtgttgatggcgctgccggacggccagacgctgtgcgccacgataccgacttcagatgccgccacgttaaaggaaggcgatgacgtgattgcctggtttaatgcggacagagtgattattgcaacgttgtgctaa

SEQ ID NO: 370926 - DNA, 1476 bp, Salmonella enterica
atgtcatcgttgcaaatttcgcaaggcacgtttcgtctgagcgatacaaaaacacttcatctggattcgctgacgctcaatgcgggcgatagctgggcattcgttggggctaacgggagcgggaagtcggcgctcgcccgcgcgctggcgggcgaactgccgttattaactggcgagcgccagtgtcggtttacccgcattactcgtctgtcctttgaacaattgcaaaagctggtcagcgatgagtggcaacgtaataacaccgatatgctcagtcctggcgaagacgataccgggcgcactaccgcggaaattattcaggatgaagttcaccatcctgcccgctgtgcgatgctggcgcagcagttcggcatttccactttactcaacaggcgttttaaatacctttctaccggcgagacgcgaaaagcgctgctgtgtcaggcgctgatgtctgagccggagttattaatccttgatgaaccgttcgacgggcttgacgtgaccgcccgtcaacaactggcgcaacgcctgacggcgttgaaccaggcgggtatgaccctggcgctggtactcaaccgttttgatgagatcccggacttcgtgcagtttgccggcgtgcttgccgactgtacgctggcggagaccggaacgacggcggagttgctgcaacgggcgttggttgctcaactcgcgcacagcgagcgtctgaccgacgtacaattacccgaaccggacgaaccttccgcccgccatgcgttacccgatggcgaaccacggatcgtacttaacgatggcgtagtctcgtataacgatcgccctatcctccaccacctaagctggcgagtcaatccgggcgaacactggcagatcgtcggtcctaacggagcgggtaagtctacgttgcttagccttattactggcgatcatccgcaaggctacagcaacgatcttacgctgttcgggcggcggcgaggaagcggcgaaacaatctgggatatcaaaaaacatatcggctacgtcagcagcagtttacatctggattaccgcgtcagtaccacggtgcgcaatgtcattctctccggctatttcgattctatcggcatttaccaggccgtttcagacaggcaacgaaaactggcgcaacagtggctggatattctgggaatcgataagcgtacggcggatgcccccttccacagtctctcctggggacagcagcggctggcgctgatcgtgcgcgcgctggttaagcatccgacagtgttgattctggatgagccgctgcaagggttggacccgctgaaccgccaactggtacgccgttttgtagatgtattaattcgccagggagagacccaactgctgttcgtttcccatcatgcagaggatgcgcctgcctgtattacccaccggctggaatttgtaccagatggcgaacgttataagtacgtttccggacgatgcaataattaa

SEQ ID NO: 370927 - DNA, 909 bp, Salmonella enterica
atggcttttcgttttccacaaataatactatttttactggcagccatgttattttgccccagcagttatgctgagcaaaagccgaccgctgcgcaggaagcgcgtaaaaccgccgttgaggtcgctgttgaaggcatgagtcgcgccgccgttgcgggtccgacaaagattagtttaggtgataaagccacgcttaatctgccggaaggatttacctggatacccgcaaaagaagcggcggtatttatgcgtgaaattggtaactatgttgacgatgaatatttttacggcctcgtatttaaaaaggaaatgaatggatttatttctatcgaatatgatgattctggttatgtaaaagatgatgatgcaaaaaactgggatgccgatgaattaatggataacctgcgcaaaggcacaaaagaagcgaataaagatcgtattgcaaaaggcattgagccgatagaaattattggctggatcgagaagcctacctacgatgcaaccaatcatcgtctgatctggtccgccgccatccatgatatcggcaccaacgaaccactgaatgaacaaggcgtgaactacaacacctatctgctgggacgtgaaggctatttttctttaaatctggtgaccgacagaggctctgttgaccacgaaatccctctggcgaaaagaattctcagttccgtcaagttcaacgctggacaacgctacgctgacttcaacgaatcaacggacaaaatagcggagtatgggctcgccgcgctgattggcggtatcgcggccaagaaagtaggactgcttgctatgctcggtatcgcgttgcttaaattctggaaagtgaccgccatcggcgtcgtcgctgtcggggcgctcgccaggaagctactctcgcgtaaaaaagactga

SEQ ID NO: 370928 - DNA, 1017 bp, Salmonella enterica
atgagagtattggttacaggtggtagcggttacattggaagtcatacctgcgtacagttgctgcaaaatggtcatgacgtcgtcatcctcgataacctctgcaacagcaagcgcagcgtgctgcccgtgattgaacgtctgggcggtaagcacccgacctttgtcgaaggtgatattcgcaacgaagcgcttataaccgaaattctgcacgatcacgcgattgataccgtgattcactttgccggcctgaaagccgtcggcgaatcggtcgccaggccgctggagtactatgacaacaacgtcaacggtacgctgcggttggtcagcgccatgcgtgcggccaacgttaaaaaccttatttttagctcctccgccaccgtttatggcgatcagcccaaaattccttacgtcgaaagttttcctaccggcacgccgcaaagcccctacggcaaaagtaaattgatggtagaacagatcctcaccgatctgcaaaaagcccagccggagtggagtattgcgctgctgcgttatttcaacccggtcggcgcgcacccgtcgggcgacatgggagaagatccgcaaggtattccgaataacctgatgccctatatcgcccaggtcgccgtgggtcgtcgcgaatcgctcgccgttttcggcaatgattacccgaccgaggatggcaccggcgtacgcgattacattcacgttatggacttagccgacgggcacgtcgtggcgatggaaaaactggcggacaaatccggcgtacatatttataacctcggcgcgggtgtcggcagtagcgtcctggatgtggtcaacgcctttagtaaagcctgcggtaaacccattaattaccacttcgcgccgcgtcgcgacggcgatctcccggcgtattgggcggatgccagcaaagccgatcgcgagctgaactggcgcgtcacccgcacgcttgacgaaatggcgcaggacacctggcactggcagtcacgccatccgcagggatacccagattaa

SEQ ID NO: 370929 - DNA, 1047 bp, Salmonella enterica
atgaccccatttaatcccatcgatcatccgcatcgccgttataacccgcttaccggccagtgggttctggtttcgccgcatcgcgcaaaacgcccctggcagggggcgcaggaaacgccgtctcagcaaatgctgccggcccatgatccggactgcttcctgtgtgcgggcaatacgcgtgtcaccggcgataaaaatcccgattacaaagggacttacgtctttactaacgatttcgcggcgctgatggccgacacgccggatgcgccggacagccacgatccgctgatgcgctgtcagagcgcgcgcggcaccagccgcgtgatctgcttttctcccgatcacagtaaaacgctgccggagttgagcctgcccgcgctgacggaaatcgtcagaacctggcagacgcagaccgccgagttaggcaaaacctatccgtgggtgcaggtctttgaaaataaaggcgcggcgatgggctgttcgaacccgcatccgcatggacaggtctgggccaacagcttcctgccgaatgaggccgaacgcgaagatcgtttacaaaaagcctatttcgccgagcagcgctcgccaatgctggtggattatgtccagcgggaactggcggacggcagccgcaccgtggtcgaaaccgaacactggctggcggtggtgccttactgggcggcgtggccgttcgaaacgctactgttacccaaaacgcatgtcctgcgcattaccgatttaagcgacgagcagcgcgactctctggcgctggcgttgaaaaagctgaccagtcgttatgacaacctgtttcagtgttccttcccctactcaatgggctggcacggcgcgccgtttaacggtgaagaaaacgcgcactggcagttgcacgcgcacttttatccgccgctgctgcgctctgcgaccgtccgtaaatttatggtcggctatgaaatgctggcggaaacccagcgtgatttaaccgcagaacaagcggctgaacgcctgcgcgcggtcagcgacatccattttcgcgaatccggagtataa

SEQ ID NO: 370930 - DNA, 1149 bp, Salmonella enterica
atgaatctgaaagagaaaacgcgcgcgctgtttgctgaaattttcggctaccctgctacccacacgattcaggcgccaggccgcgtcaatctgatcggcgagcacactgattacaatgatggttttgttctgccctgcgctatcgattaccagaccgtaattagctgtgcgccgcgcgacgatcgtaccgtacgggtgattgccgccgattacgacaatcaggtggacgaattttcactggatgcgccgatcgtgacccacgatagccagcagtggtctaactatgtgcgcggcgtagtgaaacacctgcaacagcgtaacaacgcgtttggcggcgtggatatggtcatcagcggcaatgtgccgcagggcgccgggttaagctcctccgcctcgctggaagtggcggtgggcaccgtcttccagcagctttatcacctaccgctggacggcgcgcaaattgcgctcaacggacaagaggccgagaaccagtttgtcggctgtaactgcggcattatggatcagctcatctctgcgctcggcaaaaaagatcatgcgttgctgattgattgccgtacgctcggcgccaaagcggtttccatgccgaaaggtgtcgccgtggtgatcatcaatagtaactttaagcgcacgctggtgggcagcgagtataatacccgccgtgaacagtgcgaaaccggcgcccgtttcttccagcagccggccctgcgcgatgtcagccttgaggcgttcaatgccgttgccagcgaactggacccggtagtcgcaaaacgcgttcgccatgtattgagcgaaaatgcgcgcaccgttgaagcggcaagcgcgctggagaaaggtgatttgcaacgtatgggccaactgatggcggagtcccatgcctcaatgcgcgatgatttcgaaattaccgtcccgcagatagacacactggtagacatcgtcaaagcgaccatcggcgatcaaggcggcgtgcgcatgaccggcggcggcttcggcgggtgtgttgtcgcgctgatcccggaagatctggttcccgctgtgcagcaggccgttgcgcaacagtacgaagcgaaaaccggaatcaaagaaaccttttatgtatgcaaaccgtcacaaggagcaggacagtgctaa

SEQ ID NO: 370931 - DNA, 1041 bp, Salmonella enterica
gtgctaaatgaaacgcccgcactggcccccgatggtcaaccgtaccgcctgctaaccctgcgcaacagcgcagggatggtggtaacgctgatggactggggagccactcttctttccgcccgtattccgctgtctgacggcagcgttcgggaagcattgctgggctgcgccagcccggaacactaccctgaacagacgtcattcctcggcgcctctattggccgttacgcgaaccgtatcgccaatagccgctatacgtttgccggcgaaaccgtacagttaagcccaagtcagggcgagaaccagctacacggcggaccggaaggctttgacaagcgccgctggcaaattgtgaaccagaacgatcgccaggtattattcgcgctcacctctgatgacggcgaccagggctttcctggccatctttgcgccacggcgcaatatcgtctgaccgatgacaatagaatatccatcacctaccgggcgacggtcaataaaccctgtccggtgaatttgaccaaccacgtctattttaatctggacggcgatcggaccgacgtgcgccaacataagctgcaaattctggcggatgagtatctgccggtagatgaatccggtattccacgccaggggctaaaatcggtagccaatacctcgtttgacttccggatgccaaaagtcattgccagtgaatttctcgccgatgacgatcagcgcaaggttaaaggctacgatcatgctttcctgctacagacgcagggtgatggcaaaaagccggcggcccgtctgtggtcacaggatggaaagctacaaatgatggtttacaccaccgccccggcgttgcagttttattccggcaattatctggcgggtacaccttcccgcgggccggaaccttatgccgactggcaagggctggcgctggaaagcgaactgctgccggacagtccgaatcatcctgaatggccgcagcctgactgtatccttcgccctggcgaggagtacgccagcctgaccgagtatcagtttattccgttctaa

SEQ ID NO: 370932 - DNA, 753 bp, Salmonella enterica
atggctgtaactaagctggttctggtacgtcacggtgaaagtcaatggaacaaagagaaccgtttcaccggctggtatgatgttgacctgtctgaaaaaggcgtaagcgaagcaaaagcagcgggtaaactgctaaaagaagaaggtttcagctttgattttgcctacacttccgtactgaaacgcgctatccatacgctgtggaacgtactggatgaactggatcaagcgtggctgccggtggaaaaatcctggaaactcaatgaacgtcactatggcgcgttgcaggggctgaataaagcggaaacggcagaaaaatatggtgacgagcaggttaaacagtggcgccgcggttttgccgtgacgccgccggaactgaccaaagatgatgagcgttatccgggtcacgatccacgttatgccaaactgagcgagaaagagctgccgttgaccgaaagtctggcgctgaccatcgaccgcgttattccttactggaacgacaccatcctgccgcgtatgaagagcggtgagcgcgtgatcatcgccgctcacggtaactcattgcgtgcgctggtgaaatacctggataacatgagtgaagatgagatccttgagttaaacatcccgaccggcgtgccgctggtgtatgagttcgacgaaaacttcaagccgctcaaacattactatctgggcaacgctgacgaaatcgccgcgaaagcggctgccgtggcgaatcagggtaaagcgaagtaa

SEQ ID NO: 370933 - DNA, 777 bp, Salmonella enterica
atgcgcgggttaatgctccgctcatttagcgccggctattccactcagccggttattgcagatctcaacgttcccttactgccgtgcgggaaaattaccattttgctggggccgaacggctgtggtaaatcgacgttactacgttcgctggccgggctgaataacgccgacggcgaggcgctgcttgatggcgaagatctcatgtcgttatcgtttgccgagcgggcgcagaaagttgtgtttttgccgcagtcattaccgcagggcgtacatctgcatgtactggagtcgattatcgtggtactgcgggcatcaggcggcagagacaatgcgcagggcagagcgcagatactggctatccttgagcaattgggcataacgcatctggcgttgcagtatctcgaccagctttccggcggtcagcggcagttagtgggtctggcgcaatcgctgattcgtcgccctgaacttctgttgctggatgagccgctcagcgcgctggatttaaactatcagtttcacgtaatggatctcgtgcgtcgggatacccaggcgcaaaatagggtaacgatagtcgtggcgcatgacattaatattgcactgcgtcatggtgaccatgtcctgatgctaaaagacggcaggctggtcgccagcggcgcgccggagacggtgattactgcggagcgtctggctgaagtgtaccgggtacgaggacgcgtggagcgctgttcgcaggggaaattgcaggtggtgctggacggcgtgatcgctgtttaa

SEQ ID NO: 370934 - DNA, 1080 bp, Salmonella enterica
atgacctgtcaggacaaatcacttttagcccccgctctcgcttccacgcccgtcattccgcgctatcgccagatcatacgcaaacgggctgtgctcatgttagctattgcgttggcgatgatgacttcactgatggtggatgtaacctgtgggtcttctggtttaccgctcagtgcgctatggcaggcgctttttcaaccggaaaaggtgaatgcgggcatacacgttattgtctgggatattcgtttaccctatgccctgatggccctactggtgggcatggcgttagggttagcgggcgccgaaatgcaaaccattttaaataatccgctggcgacgccgtttaccctcggcgtatcgtccgcggcggcttttggcgctgcgctggcgattgtgttggggatcggtattcccggtattcctgccgcctggtttatcccggccaatgcgttcatctttgcgcttttatccgcgttactcctggacggtattacccgttggacaggcgtcgccgcatccggagtggtgttgttcggtattgcactggtattcacctttaacgcgttggtcgccattatgcagtttgtggctgatgaagatacgctgcaggggctggtattctggacgatggggagcctggtccgcgcgtcgtgggaaaaattgggcgtactggccgtggtgtttattgctgtgcttttttgcgcgttacgaagcgcctggcaactcacggcattacgtctgggcgaagagagggcgatgagctttgggattcatgtccgccgtttacgcctgctgtcattgttgcgtatcagcttgttatcagcgctggcggtagctttcgtcgggccgattggttttattggtctcgttgcaccgcacattgcacgaatacttttgggggaagatcaccgtttctaccttccgggcagcgtgctgataggcgggctggtgttatcgctggcctctattgcggcgaaaaatagtattccgggcgtcatggtgccggtggggattgtcacctcgctggtcggggttccgttctttttaagcattgtattgcgacatcgggggagtctctga

SEQ ID NO: 370935 - DNA, 699 bp, Salmonella enterica
atgaatgaaaccatagcatttcgtccggaaggccgggcatcgataaaagatgtggttgtcaattatacgctggcatcactggacgagcttgaacaactgcacccggcgctgaatctgctggcgcacccgtcaattgtccgtggcagccatgatttctttgtctgttgttataacgcgggcgtacagcatgcgcaggccggggcggctgaaacggtagcggttttgcctgattcactgccacaagaacggcaaaggagcgggctgctgtgtgccgcagcaggtcgtctggatgccctgcgccagccgctgacgcacaatcgtttatgtgacctggccagtcagttctgtgctggcatggcagatgttgacagcgaaacccgcagcggtttttataccgtgcgcagcatatcgctgccggtttaccggcggctgttgcgggatcaacattctcacggtgtctgcctgcagcaggctctactgcacctgctggcctggaagagcgattccccctgggcgcggcagcaggcgcagcggctgctctggcagggcggcgtgctgggcgataaaggtgagtttgcgcttatgacgctggatgatgaactgcgggagcgccagattgagtggcccgggctgtggtcgctgctggccgtcaccgggtttctggcgaaattccctgccggaccgatatttgctgactga

SEQ ID NO: 370936 - DNA, 699 bp, Salmonella enterica
atgattattgaaaaaaagattaaaaactataccgtctttgtcaaaaaagacggtgaaaaatacattgagatattcaaagattttctatcttataatcatcaggttattaaagtcttccgtaatatagaagatacaaaagttgtattgattaatacagactacggaaaatatattctcaaggtatttagtccaaaagtaaaaaatactgaacgatttttcaaatcgttagtaaaaggagattactacgaaaagctttttcatcagacagatcgtgttcggcgagaagggtttacggcgcttaatgatttttacctgctggcggaaattaaaacattacgctatgtaaaaacatacgtgatgataattgagtatattgaaggtattgaacttgttgatatgccagaaatttctgacgaggtgagagggaaaatcaaacagtcgatatattctctgcatcagcatggtatggtttcgggcgatccccataaaggtaactttatcctgcaaggcaatgagatcagaattatcgatttgtccggaaaaagaccttccagacaacgaaaagcaaaggatcgtattgatttagaaagacattatggtatcaaaaataatgtgagagatatcggattttacttattgatttataagaaaaaacttcgaaatttcttgcgtcgtattaagggtaaggaaaagcgctga

SEQ ID NO: 370937 - DNA, 1014 bp, Salmonella enterica
atggattcatttcctgagatagaaatagctgaatataaagtttttgatgaaagtaataataataatgatgataacgtattaaacatttcttatggtgttgatgaaaactatcttgatggtgtgggggtatcaatcgcttcagttgtattaaacaataatatcccgctcgcttttcacattatttgtgattcatactccccgtgttttgtaaaatatatagagcgtttagccgtacagcatcacataaaaatttctctttatcttattaaagtagaaagccttgaggtattgcctcaaactaaagtatggtcgagagcaatgtattttcgtttatttgctttcgattatctcagcaagaaggtaaataccttactttatttggatgccgatgttgtatgcaaaggatctttgcaagatcttctacggcttgatttgacagagaagattgctgcggtcgtaaaagatgttgattccatccagaataaggtaaatgagagattaagcgcttttaatttacaaggtggttattttaactccggcgtggtttttgttaacctgaaattatggaaagagaatgccttaaccaaaaaggcatttttacttttggcaggtaaagaggctgactcttttaaatatcccgatcaggatgttttgaatattctcctacaggataaagtcatttttctaccgcgaccatataataccatttatactatcaaaagtgagttgaaagataagtcacataaaaaatatagcaatataattaatgataatactgttttaattcattatacgggcgctacaaaaccatggcatgcctgggcaaattatccttcagttatctattataaaaatgcacgactgaactcgccctggaaagattctcctgcaaaagatgcgcgtaccatagtcgaatttaagaagcgatataaacatcttctcgtgcagggtcattattttaaaggccttatggctggaagcgcatatctttatcgtaaacttttccacaaataa

SEQ ID NO: 370938 - DNA, 1023 bp, Salmonella enterica
gtgatcactatgagcagaaaatattttgaagaagaagtcattcaacagactttagattataactatgcacaacatagtgatgctgctaaatttaatatagcttatgggattgataaaaactttctttttggctgtggtgtctctattgcatcggttctcctcgctaacccagagaaggcgttagctttccatgtttttaccgatttctttggctctgaagaccagcagcgatttgaggcattagcaaaacagtacgctacgcagattgttgtttacctaatcgactgtgagcgcttaaaatcgctacccagtaccaaaaactggacctatgcaacatactttagattcattatcgccgattatttttcagataaaacagatagagtactttatctggatgcagatattgcatgtaaggggagtattcaggaacttattgatcttaattttgctgaaaatgagattgcggctgtcgttgctgaaggcgagttggaatggtggactaagcgctcggttagcctggcaacgcctgggctggtttctggctattttaatgccggttttattttaattaacatacctctttggaccgcagaaaatatctctaagaaagcgattgaaatgctaaaagatccagaggtagtacagcgcataacgcaccttgatcaggatgtattaaatatattgttagtgaataaagcgcgttttgttgataaaaagtttaatacacaatttagtcttaactatgaattaaaagattcagttattaatccagtcgatgctgagactgtatttgttcattatatcggaccaacgaagccctggcatagttggggggcttaccctgtgtcacaatattttttacaggctaagagcaactcaccgtggtctcattgtgcacttttaaatccagtcactagccatcagttacgttatgcggcaaagcatatgtttaatcagaagcattatacttcgggtataaattactatatagcctactttaaacgtaaacttcttgaataa

SEQ ID NO: 370939 - DNA, 1080 bp, Salmonella enterica
atgaaaatagcatttattggcgaagcggtatctggttttggagggatggaaaccgttattagcaacgttatccatacgtttgaaaatagctctccgaaaatcaactgtgaaatgtttttcttttgtcgtaatgacaaaatggataaagcatggctaaaagagattaaatatgcgcaatcattctcaaatataaaattaagttttcttcgtcgagctaagcatgtttataattttagtcagtggctgaaagaaacgtcaccggatattgtgatatgtattgatatcatctcatgtctttatgccaataaagcacgaaagaaaagtggtaaacagttcactattttctcgtggccgcatttttcgctcgaccataaaaaacatgcagaatgtataacgtacgcggattatcatctggccataagtagtggtattaaagaacagatgatggcacggggtatctcagcgcaaaatattagcgtcgtttataatcctgtctctattaaaacaatcattgtgccgccgcctgagcgcgataaacccgctgtatttctctatgtagggcgtcttaaatttgaaggacagaaaagagttaaagatttatttgatggcttaactcgtacgacaggggaatggcagctacatattattggtgatggctcagattttgaaaagtgccaggcctatagtcgggagcttggtattgagcagcgtgtgatctggtatggttggcaaagcgcgccgtggcaagtcgtacagcaaaaaataaaaaatgtcaccgcgttactacttacctctgcgtttgagggatttcctatgaccctgctggaagcaatgtcatatggaattccgtgtattagttctgattgtatgtctggcccgcgcgatatgattaaacccggtttgaatggtgagctttacactccgggtgctatagatgattttgtaggacaccttaatcgcgttatttctggtgaagtaaaatatcagcatgatattattcccggcacgattgagagattttacgatgtgctatattttaaaaattttaataatgcaatattctcgaaattacaaaagtga

SEQ ID NO: 370940 - DNA, 210 bp, Salmonella enterica
atgtctgacattaaaagttatatttcaaaccaaaaaaacataattcaacatgatgatttttttggaagaggactggacattgctctttgctttgatcatggttttataatgccagcaggtgtggcaatatattccattatcgaaaataataaagatattgaatacgccttaaagcaaaaaaagagatgtcaggtaaaaattactccatag

SEQ ID NO: 370941 - DNA, 798 bp, Salmonella enterica
atggttgagctgaaagcgccgttaaccacactatggcgcggtaaagatgcttttgaggaagtaaaaacgttacagggcgaagtgttcagagagctggagacgcgtcgaacattgcggtttgagctggacggtaaaagctacttcctgaagtggcataaaggtacttcgctgaaagaaattgtgaagaacctgatttcgttacgtatgcctgttctgggcgctgacagagaatggcacgccattcatcgtctacatgagctgggcgttgatacgatgcacggcgttggttttggtgaaaaaggcgtaaacccgctaaccagaacatcatttattatcaccgaagatttaacgcctaccattagccttgaagactactgcgctgactgggctgttaatccaccggacgcgcaggtgaagtggatgatcattaagcgtgttgcgactatggtacgtaaaatgcacgccgggggaattaaccatcgcgactgttatatttgccactttcttctgcatttacctttcactggtcgcgaagaggatttaaaaatctccgtaatcgacctgcatcgcgcgcagatacgccagcgtgttccccttcgctggcgtgacaaagatttaattgggctttatttttcttcaatgaatattggcctgactcagcgagatatattccggtttatgcgtgagtatttctctcttcccctgcgagagattttgcaaaaagaatcggggttgattcaccaggcggatgttaaagccgctcgaattaaagaaagaacaataagaaaaaatctgtaa

SEQ ID NO: 370942 - DNA, 1125 bp, Salmonella enterica
atgagagttgccttttgcttatataaatattttccttttggcggtctgcagcgtgattttatgcgtattgctcaaaccgtggcggcgcgaggtcatcaggttcgtgtttatactcagtcatgggaaggggaatgcccggataactttgaattaatccgcgtgccggttaaatcccggacgaaccacggtcgtaacgcagaatattatgcctgggtgcaacaccatttgcgcgaccaccctgtcgatcgggtggttggattcaataagatgccgggccttgatgtgtattacgccgcagacgtgtgttacgccgaaaaagtcgcacaggaaaaaggatttttctatcgcctgacatcacgctatcggcattatgctgcttttgaacgcgccacgtttgaacacggcaagccgacgcaactattaatgctgacgaataagcagattgctgacttccaaaaacattatcagactgaagcggagcgtttccatattcttcctccggggatttacccggacagaaaatatagccaacagatcccaaacagtcgtcaaatttatcgtcagaaaaatggtatctcagaacagcaaaaattactgttgcaagtagggtctgactttacccgtaaaggtgtggatcgctctattgaagcgctggcatcgctacccgaatctttacggcaaaatacggtgctctatgttgtcgggcaggataagccgaagaagtttgcagcactggctgaaagaagcggcgtcggcacgaatgtgcattttttctccggacgtaatgatatcgcggagttaatggcggcagccgaccttttactgcatccagcctatcaggaagctgctggtattgttttgctggaagccattactgctggtttgccggtgctgacaaccgcggtgtgcggttatgcacattatattgtggatgcaaactgtggcgaagcgatgactgaaccattccgccaggatgcgctaaatgaggttttactcaaagcgctgacacagccttccttacgcaacgcctgggctgaaaatgcgcggtattatgctgatacccaggatttatacagcttaccggagaaggccgcggatattattacaggtgatttagatggttga

SEQ ID NO: 370943 - DNA, 1071 bp, Salmonella enterica
gtggaaaagccatttcgaagaattctgattataaaaatgcgttttcatggagacatgttacttaccacccctgtcatcagcacgctgaagcagaattatcccgatgcaaaaatcgatgtgcttctttaccagaacaccataccgatattgtcggaaaatccggagattaatgcactctacggcatcagtaacaaaggcgcaggaacaaaagagaagatcaaaaacgcgctatcgctaatcaaaaaattgcgtgctaactcgtatgatctggtcgtcaatctcaccgatcagtggagcgtggcgcttattgtgcgttttttaaacgcaaaaataaaaatctcgcaggatttcggtaatcgtcagtctgctttatggaaaaagagctttacgcatttagtaccttatgcgggagaacatgctgttgagcgcacattatccgcgctaaagccgttagcgctaaaacagtatgtcacggaaaccaccatgagctatcgcccggaacattgggaaaacatgcgacaacagctcaaacaacttggtgtgacccgacaatatgttgttattcagcctacggcacggcagctatttaagtgctgggataatgataaattctcgcaggttattgatgccgtgcagcgccgcggttatcaggttgtactgacgtcaggcccggccgcagacgagatggcctgcgtggatgctattgcacgcggctgtgagacaaaaccggttactggtctggcgggtaaaactcgctttcctgaattgggcgcattgattgaccatgcggatctctttatcggcgttgattcggcccccggtcatattgccgcagcagtcaaaacgccggtcatttgtctttttggcgcgacggatcatgtattctggcgtccctggaccgacgacatcattcagttttgggcaggaaattatcagccgatgcctgaacggcatgagcttgatcgtaataaaaaatacctttccgtgattccggctgaagatgttatcgccgcgacggaaaaaatgctgccgcatgaggcacgccccatagatttggacagcctgctatga

SEQ ID NO: 370944 - DNA, 1278 bp, Salmonella enterica
atgctcgaattgctttacaccgctcttctctaccttattcagcctctgatctggatacggctttgggtgcgtggacgtaaagcgccggcctatcgtaaacgctggggtgaacgctacggattctaccgccgtccgttgaaaccgggcggaatcatgctgcattccgtctcggtgggcgaaactctggcggccatcccattggtccgcgctctacgtcatcgctatcccgatctgcctattaccgtaacgaccatgacgccgaccggctcggagcgcgtccagtccgcctttggcaacgatgttcagcacgtttacttgccttatgatttgcccgatgcgctcaatcgtttcctcaataagattgatcctaagctggtattgatcatggagactgagctctggccaaatctgattgctgcgctgcacaaacgtcatattccgctggttatcgctaatgcgcggctttccgcccgctccgccgcgggttatgcgaagcttggcaagtttgtccgtacgctcttgcgccgtatcaccctgattgccgcgcaaaacgaagaagatggcgaacgctttgtggcattgggcgcgaagaacaatcaggtcacggtcaccggcagtctgaaatttgatatttcagttacgccgcagctggcggctaaagccgttacgctacgccgccagtgggcgccgcaccgtccggtctggattgccaccagcacccacgatggcgaagagagtatcgttatcgccgctcaccaggcgttattacatcaattcccgaatttattactgattctggtgccccgccatccggagcgtttcccggatgctatcaatcttgtgcgtcaggcagggttaagctacatcactcgttcttcgggcgaagtaccgtccgccagcacccaggtcgtggtaggcgataccatgggcgaattaatgttgctctatggcattgccgatctcgcctttgttggtggttcgctggttgaacgcggcggtcataacccgctggaggccgccgctcatgcgattccggtactgatgggtccgcatacctttaactttaaagatatttgcgcccgtctggatcaggcgagcggacttatcacgattaccgatgcggctacgctggcaaaagaagtttcctctttactgaccgacgctgattatcgtaatttctacggacgtcacgcagttgaagtgctgtatcaaaatcagggcgcgctccagcgtctgctgcaactgctggaaccttatctgccaccgaaaacgcattga

SEQ ID NO: 370945 - DNA, 480 bp, Salmonella enterica
atgcaaaaacgggcgatttatccaggtacgtttgatccgattactaacggtcatctcgatattgtgacgcgcgcaacgcagatgttcgaccatgtcattctggccatcgccgccagccccggcaagaaacccatgttcaccctggacgaacgtgtggcgctggcgcaaaaagcgaccgcacacctgggtaacgtagaggtggtgggctttagcgacctgatggccaatttcgcccgcgacagacaggcgaatatcctgattcgtggtctgcgcgcggtggcggattttgaatatgaaatgcagttggcgcatatgaatcgccatctgatgccgcaactggaaagcgttttcctgatgccgtccaaagagtggtcgtttatttcatcgtcgctggtcaaagaagtggcgcgccatcagggcgatgtgacccactttctgccggacaatgtgcatcaggcgctaatggataagttgaaataa

SEQ ID NO: 370946 - DNA, 810 bp, Salmonella enterica
atgcctgaattacccgaagttgaaaccagccgccggggtattgaaccccatttagttggcgctactatcctgcacgcccatatccgtaacggccgtctgcgctggccggtttcagacgaaatttatcgtctgagcgatacacccgtccttagcgttcagcgtcgtgctaaatatttactgctggagctgcctgacggctggataattattcacctggggatgtcgggaagcttgcggatattgtcggaagcgctgccggcggaaaagcacgaccatgtcgatttggtgatgagcaacggcaaaattctacgttataccgatcctcgccgctttggcgcctggttatggaccaaagagctggaagggcataacgtactggcgcatctgggaccggagccgctaagcgatgagtttaatggcgaatatttgcagcagaaatgcgcgaagaagaagacggcgattaaaccctggctgatggataacaagctggtggtcggcgtggggaatatctacgccagcgagtcgctgtttgccgctggtattcaccctgaccgcctggcgtcgtcactctcgacagaggagtgcgacctgctggcacgggtgattaaagccgttttgctgcgctctattgaacaaggcgggacaacgctgaaggattttctgcaaagcgatgggaaaccgggctattttgcgcaggagttgcaggtgtacgggcgcaaaggcgagccgtgtcgggtatgcggtacgccgatagtcgcaacgaaacacgcacagcgtgcgacgttctattgccgtcactgtcagaagtaa

SEQ ID NO: 370947 - DNA, 168 bp, Salmonella enterica
atggctaaaggtattcgtgagaaaatcaagctggtttcttctgctggtactggtcacttctataccactacgaagaacaaacgtactaaaccggaaaaactggaactgaaaaaattcgatccagttgtccgtcagcacgtgatctacaaagaagcgaaaatcaaataa

SEQ ID NO: 370948 - DNA, 237 bp, Salmonella enterica
atgtcccgagtctgccaagttactggcaagcgtccggtgaccggtaacaaccgttcccacgcactgaacgcgactaaacgccgtttcctgcctaacctgcactctcaccgtttctgggttgagagcgagaagcgttttgtcaccctgcgtgtatctgctaaaggtatgcgtatcatcgataaaaaaggcatcgaaacagttctgtctgaactgcgtgcccgtggcgaaaagtactaa

SEQ ID NO: 370949 - DNA, 666 bp, Salmonella enterica
atggatacgttggacgaattattaccgcgtgaaaaaatgctcagatccggcattgcttccctcagcgacgtggagctgctggcgctttttttacgtaccggcacgccgggaaaagatgttatgacgttggcaaaagagatattgcagcactttgggtcgctgtatggcctgctgtcggcggactttgcgcagtttcgcggcgtaaacggcatcggcctggcgaaattcgcgcagttgaaaggcattgctgagctggcaaggcgctattacagcgtgcgcatgaatgaggaaagtgcgttgctgagtccggaaatgacgcgggaatttctgcaaagccaactgacgggcgaagagcgtgagatctttctggtgatcttcctagatgcccagcaccgggtgcttcagcacagccgcctgttttccggcacgcttaaccacgtagaggtgcatccgcgtgagattgttcgggaagcgattaaactcaatgcttcagcggtcattctggcgcataaccacccttcaggctgcgcagagccaagtaaagcagataaacttatcactgagcgcgtgataaagtgttgccagtttatggatatccgggtgctcgatcacctgataattgggcgcggagagtacgtttcttttgccgaacgcggctggatttaa

SEQ ID NO: 370950 - DNA, 1224 bp, Salmonella enterica
atgatgagcctggccggtaaaaaaattgttctcggcgttagcggcggtatcgctgcgtataaaacgccggagctggtgcgccgtttacgtgagcgcggcgctgacgtgcgcgtggcaatgaccgaggcggcaaaagcctttattacccccctgagcttacaggcagtgtcgggctatcccgtatccgacagtctgcttgaccctgccgccgaagccgcgatggggcatatcgagttggggaaatgggccgacctggtgattcttgctcccgcgaccgccgatctgatcgcccgtgtagcatcgggtatggctaatgatttagtctccaccatctgcctggcgacgccagccccggtggccgtgcttccggccatgaaccaacagatgtaccgcgctgccgccacgcaacataatctggaggtgctcgcctctcgcggcctgttcatttgggggccggatagcggcagtcaggcgtgcggcgacgtaggcccaggccgaatgctggacccattagttatcgttgataaggccgccgcgcaaatcgctgccgtcaacgatttgcgacatattaatatcatgattacggcaggcccgacgcgcgaaccgctcgacccggtgcgttatatttccaaccacagctccggtaaaatgggcttcgctattgcggcggccgccgcgcgtcgcggcgcaaatgtcacgctggtctccggtcccgtttcgttaccgacgccgccttttgtaaaacgggttgatgtcataaccgcgctggacatggaagccgctgttcaggccgccgttcaacagcagcatattttcattagctgcgccgccgtggctgactatcgcgcagagactattgccagtgaaaaaatcaaaaaacaggcggcgcaaagtgatgaattaataataaaaatggtcaaaaacccggacattgtcgccggggtggccgcactcagtgacaatcgcccctacgttgttgggtttgccgcggaaacgaataatgtggaagaatacgcccggcaaaaacgtatccgtaagaaccttgacctgatttgtgcaaatgatgtttctctttcaaatcagggatttaatagcgataaaaacgctttacaccttttctggcaggatggagataaagtcttaccgcttgagcggaaagaactcctgggccaattattactcgacgagatcgtgacccgttatgatgaaaaaaatcgacgttaa

SEQ ID NO: 370951 - DNA, 459 bp, Salmonella enterica
atgatgaaaaaaatcgacgttaagattctggacccgcgtgttggtcagcagtttccgctgccgacttatgctacttctggttctgccgggcttgacctgcgcgcctgtctcgacgacgccgtagaactggcgcctggcgcaacgacgttggtacctaccggactggccattcatatcgccgatccatcactggcggcagtcatgttgccgcgttcgggcctgggccataaacatggtatcgtgctgggcaacctggtcgggctgattgattccgattatcaggggcaactgatggtttcgatctggaaccgtggtcaggacagttttaccattgaaccgggcgaacgtatcgcgcaaatggtgtttgttccggtcgttcaggccgaatttaatctggtggaagcatttgacgccaccgaacgtggcgagggcggcttcggtcattctggccgtaagtaa

SEQ ID NO: 370952 - DNA, 597 bp, Salmonella enterica
atggcagaaaaacaaactgcgaaaaggaatcgtcgcgaagaaatacttcagtcactggcgctgatgcttgaatccagcgatggaagccaacgcatcacgacggcaaaactggcggcctcggtcggcgtttccgaagcggcgctataccgccattttcccagcaagacccgcatgttcgatagcctgattgagtttatcgaagatagtctgattacccgtatcaatctgattttaaaagatgaaaaaaacaccagcacgcgtttgcgcctgattgtgttgctgattctgggttttggcgaacgcaaccctggcctgacgcgcattcttaccgggcacgcgctgatgtttgaacaggatcgcctgcaggggcgcattaatcagctttttgaacgcatcgaagcgcagctccgccaggtgctacgagaaaaaagaatgcgtgaaggcgaaggctacacgacggatgaaaatctgctggcaagccaactgttagccttctgtgaagggatgctttcacggttcgtacgtagcgaatttaaataccgcccaacggacgatttcgacgcccgctggccgctcattgccgctcagctacagtaa

SEQ ID NO: 370953 - DNA, 642 bp, Salmonella enterica
atgaaaccgtatcagcgccagtttattgagtttgcgcttaacaagcaggtactaaagtttggcgagtttacgctgaaatccgggcgcaaaagcccctatttcttcaacgccgggctgtttaataccgggcgcgacctggcgttgttaggccgtttttatgccgaagcgctggtggattccggtattgaatttgatctgctgtttggccccgcgtacaaaggtattccgatcgcgacgacgacggcggttgcgctggcggaacatcacgataaagacctgccgtactgctttaaccgcaaagaggcaaaagatcatggcgaaggcgggagtctggtgggcagcgcgctacagggccgcgtgatgctggtggatgacgtgattaccgcaggtacggcgattcgcgagtcgatggagattattcaggcgcacggggctacgctggctggcgtactgatttcgctggatcgtcaggaacgtggccgcggcgagatttccgcgattcaggaagtggagcgcgactatggttgtaaggttatctccatcattacgctgaaagacctgattgcctatctggaagaaaaacctgatatggctgagcatctggcggctgtgcgagcataccgggaagaatttggcgtgtaa

SEQ ID NO: 370954 - DNA, 717 bp, Salmonella enterica
atgcgtccagcaggccgtagcgctaatcaggtgcgtcccgtaaccctgacccgtaactatacaaaacacgctgaaggctcggtactggtcgaatttggagataccaaagtgttgtgcaccgcctccattgaagaaggcgtccctcgttttctgaaagggcaaggccaggggtggatcaccgcagagtatggcatgttgcctcgcgctacccatacccgtaatgcgcgtgaagcggcaaagggtaagcagggcggccgtactatggaaattcagcgtttgatcgcgcgtgcgctgcgtgcggcggtcgatctgaaaacgctcggcgaatttaccattacgctggactgcgatgtaatccaggccgatggcggtacgcgtacagcgtctattaccggtgcctgcgtggcgttggcggatgcgctgaataaattggttgccaacggtaagctgaaaaccaacccgatgaaaggcatggtggcggcggtttccgtaggcatcgttaacggcgaagcgatctgcgatctggaatatgttgaagattccgcagcagaaaccgacatgaacgtcgtgatgactgaagacggccgcattattgaagtacagggtaccgcggaaggcgagccgttcagccatgaagaacttctcactttgttggcgctggcccgagggggaattgaatccattgtggcgacgcagaaggcggcgctagaaaattga

SEQ ID NO: 370955 - DNA, 864 bp, Salmonella enterica
atgatccgcagtatgaccgcctacgcccggcgtgaaatcaagggtgaatggggtagcgcgacctgggaaatgcgctcggtaaaccagcgttatctggaaacttactttcgtctgccggaacagttccgtagtcttgaacccgtcgtgcgcgaacgcattcgtacacgcctgacgcgtggcaaagtcgaatgtatgctgcgttttgaacccgatgccagcgcgcaaggcgagcttattctgaatgaaaagctcgcgaaacaattagttagcgccgcaaactgggtcaaaatgcagagcgacgaaggggaaatcaatccggttgatattttgcgctggccaggtgtcatggcggcgcaagagcaggatctggacgcgattgccgcagaaattttagccgcgctggacggtaccctggatgactttatcgtcgcgcgcgaaacggaaggccaggcgctgaaagcactgattgaacaacgtctggaaggcgtcagcgccgaagtagcgaaagtccgcgcgcatatgccggaaatcctgcaatggcagcgtgagcgcctggtcgcgaagctggaagatgctcaggttcagttggaaaacaaccgtctggagcaagagctggtgatgatggcgcagcgcattgatgtggcggaagagctggatcgtctggaagcgcacgtcaaagagacttacaacattctgaagaaaaaagaggcggtaggtcgccgtctggacttcatgatgcaagaatttaaccgtgagtcgaacaccctggcctccaaatccatcaacgctgatgtaactaactccgctattgaattaaaagtgttgatcgagcaaatgcgcgagcaaatccagaatattgaataa

SEQ ID NO: 370956 - DNA, 903 bp, Salmonella enterica
atgaacttgctgcaaatggatatgaacctgttaaaagtactgtatgtgctgctggagacgagctctacggggaaaacggcgcaaaagctggctttatcgccttctgcggtaagtcatgcgttaatgagattgcgcgatgcgctaaacgacccgttgtttcgacgggaagggaaccgccagattgctacgccttatgcgcaggcgctgcgtgacaaattggcgcctgtgtttgtttcgcttaatgaggagctgtttggcgataaagagaacggctcccgttgtttccgggtggtacttcctcccgcattgaacgcgctgcttacgcccgttctcgcagagaaaggtcatcttcatcaggcggtgatcgagtgccttccttttgcccgccgaccctggcgtgatgaactgttggatagctcggttgatttggtgctggcaattggcgaccatcaaaagcaggtcagcgctctgcattacgagcgggtggggactacgcgtttgatcgcggtttatggcgcgccattgcgttcacgtctggagaatgccacagcgttgaattttgctgatctacagcattatcaacacatttactgtttgccgtggacaaaagagaacaacgaactggacaggcagcaggctcgtgccgggtttgaacgcccgctggcgtttgtttgtcatgattacagtcaactggcgcctgctgtccagtcggcgccgctaatggcgattgtaccgcgcccctggtatgaaaatttatccgataagcgcggtctttttgtcctgccgcttgccggggagcaggcggaaggcgctatttttatgcagtatcgggcttcaacggtagagtggaagcggcgccttatcgacgctattcgccggaaattaaaaacgtactaccgataa

SEQ ID NO: 370957 - DNA, 882 bp, Salmonella enterica
atgaatcgctatgcattattctttgtatgtatattttcaacatcagcacttcctgccatggcggcattagatccttcacaaccgttatcacccacgcctccgttatcactgtttaaagcgtgggctaagcctataaagccgtttcaaatcacagaaggcgtgtggtatgtcggcacgaaaaatctctcttctattctgctgaccactccggcagggcatattcttattgatgcggggttggatgaaagcgcaccgcaaattaaagcgaatattgaagcggcaggattccgcctcacagacgtgcgctatctgttgaatagccatgcgcggctggatcaagcggggggcatggcacgtttgaaagcgtggagcggcgcacaattggtcgccagccaacccaacgccgatcagatggcgaggggtggacgacaggattttgcgcttggcgatgcgctccccttcccgcccgtcaccaccgataaaattatccaccaccaggaaagcatcatcctcggagggataaccgtgacagcgctattcacgcctggacatctacccggctcaacctcctggcgcgtaacgctccgcaacggcaagacgctaatttacgctgacagtctcgccacgcccgactatctgctgattaacaacaaaaattaccctgacctggttactgatattcagggtagctttaagacgctggccgcccagcatgttgatatctttattgccaacaaaggtgaccgcttcgggctactggagaaacgacagcaacttcgcaacggcgatacacaggcattctttgattccaatggcttgcaacagtatgtggaacgctcgcgccagcgcttcatcacacaacttaccgcacagcagccataa

SEQ ID NO: 370958 - DNA, 618 bp, Salmonella enterica
atgctgttgcacgttctttatttaattggcatcactgccgaggccatgacgggcgcactcgctgcgggtcgtcgtcgcatggatacattcggcgtaattattattgctaccgccaccgccattggtggaggctcagttcgcgacattctgctcggtcactatccgctgggttgggtgaagcatcccgaatatgtcattattgtggcgactgccgctgtattgaccaccattgttgcccccgtcatgccctatttacgcaagcttttcctggtacttgacgcgctggggttggtggttttctctattattggcgctcagatagcccttgatatgggcgaagggccaattatcgccgtggtagccgccgtcactaccggcgtctttggcggcgtgctccgcgatatgttctgcaaacgcattccactggtgtttcaaaaagagctatatgccggcatttcgttcgcctcggcggtgctctatattgcgctgcaacattacgtcatgaatccggatgtcgtcgttatctctacgttactgtttggctttacagcaaggttattagcgctacgtcttaaacttggcctgccggtattttattaccgccatgaagggcactaa

SEQ ID NO: 370959 - DNA, 1686 bp, Salmonella enterica
atgagattatggaaaagtatggcgtggggaattttattgtggcattcgcagagtggggcgctttgcccggcctggccgccagcaagggccgctgaagaaatcacccgtttacagcaacagctcgctgactggaatgacatctactggaaacaaggtgttagcgcggttgacgatagtgtgtacgaccagctcagcgcaaggctggttcagtggcaacgctgtgttggtcaggatgtttcatctactccggtttcaccgccgttaaacggtacaacaatgcaccctgttgcgcacacgggcgtacgtaaactcgcggaccgacaggcggtagaacagtggatgcgcgggcgcagcgagctttgggtacagccaaaagtggatggtgtagcggtaacgctggtttatcaaaacggtaaactgaccagggctatcagccggggtaacggactacaaggcgaggactggacgccaaaaattcgcctgatcccctctataccgcagacaacacaaggcgcgcttgctaacgcggtgttgcagggcgaaatctttctacagcgcgagggacatatccagcaacggatgggcgggatgaatgcgcgctcgaaagtcgcaggaatgttaatgcgccaggataacgcctccgcgctaaattcgttgggtatttttatttgggcgtggccggacggtccggcaaatatgcccgaaagattaagccaacttgctaaggctggattcagtctgacgaataaatataccctggcggtaaaagatgccagcgaggtcgagcgggcgcgccagtcatggctgacgtcagcattaccctttgtaacggatggcgtagtgatacgcatggctaaagaacctgcgtcacaacactggcgacccgggcagggcgactggctggcagcatggaaatatccgccagtagcgcaggtcgcgcaagtgagcgctattcagttctcggtggggaaaagcggcaaaattaccgtagtagcgtcgcttgtccccgttatattggatgataagcgggttcagcgggtcaatatcgattctgtgaagcgttgggaagcgtgggatatcgcgccgggcgatcagatcctggtgagtctggcggggcaaggcattccccggcttgatgaggtcgtctggcggagtcgtgagcggagtaagcctgtaccgcctgatagccatttcaactcgctgacctgcttttacgcgtcggaaacgtgtcaggaacagtttatctccaggctggtatggctggggtcacggtcggcgttgggtctggacggaatgggcgaagccagctggcgggccttgcatcagacgcatcgctttaagcatatcttctcctggcttgccctgacgtcagcgcaaatagccaacacgccaggctttgctaaaggaaaaagcgagcagatatggcggcaatttaacctggcgcgccggcagtcgtttacccgctggatcatggcgatggatatccccttaacgcaggctgcattacaggccagcggcgatcgttcatgggagcagttattaatgcgaacagagcaacactggcggcagttaccagcgacgggcgagcgtcgtgccgggagagtcatcgactggcggaataatccgcagatcaaaacgctgagcagatggctggctgctcagcatattcccggatttgggtcttag

SEQ ID NO: 370960 - DNA, 624 bp, Salmonella enterica
atggctcaaggtacgctttatattgtttctgcccccagtggcgcgggtaaatccagcctgattcaggctttattaaaaacccaaccgttgtatgacactcaggtttccgtttcacataccacgcgcgcgccgcgtccgggtgaagtgcacggtgagcactatttctttgtaaatcatgatgagtttaaaaccatgattggcagggaggcgtttctggagcacgcggaagtgtttggcaattactacggcacttcgcgcgaaaccattgagcaagtgctggcaaccggcgttgatgtttttctggatatcgactggcagggcgcccagcaaattcgcgaaaagatgccgcaagcacgcagcatttttattttgccgccatcaaagatcgaattggatcgccgtttacgcggccgcgggcaagatagcgaagaagtcattgccaaacgaatggcgcaagcggttgcagaaatgagccattacgccgaatatgattatcttattgtgaatgacgactttgataccgcgttaagcgacttgaaaactatcattcgcgctgaacgtctgcgtatgagccgccaaaagcagcgtcatgacgctttaatcagcaaattgttggcagactga

SEQ ID NO: 370961 - DNA, 276 bp, Salmonella enterica
atggcacgcgtaactgttcaggacgctgtagagaaaattggtaaccgttttgacctggtactggtcgccgcgcgtcgcgctcgtcagatgcaggtaggcggaaaggatccgctggtaccggaagaaaacgataaaactaccgttatcgcgctgcgcgaaatcgaagaaggtctgattaacaaccagatcctcgacgtccgcgagcgccaggaacagcaagagcaggaagccgctgaattacaagccgttaccgctattgctgaaggtcgtcgttaa

SEQ ID NO: 370962 - DNA, 2112 bp, Salmonella enterica
ttgtatctgtttgaaagcctgaatcaactgattcaaacctacctgccggaagaccagattaagcgtcttcggcaggcgtatctcgttgcacgtgacgctcacgagggccagacacgttcaagcggtgaaccctatatcacgcacccggtagcggtggcctgtattctggccgagatgaaactcgactacgaaacgctgatggccgctctgctgcatgacgtgattgaagatacccccgccacctatcaggacatggaacagcttttcggtaaaagcgttgccgagctggtagagggggtgtcgaaacttgataagctcaagttccgcgataagaaagaggcgcaggccgaaaactttcgcaaaatgattatggcgatggtgcaggatatccgcgtcattctcattaagcttgctgaccgtacccataacatgcgcacgctgggctcgttacgcccggataaacgtcgtcgtattgcccgtgaaacgctggaaatctacagtcctctggcgcaccgtttaggtattcatcacattaaaaccgagctggaagagctgggttttgaagcgctgtatcccaatcgttaccgcgtcattaaagaagtggtaaaagcggcgcgcggcaaccgtaaagagatgatccaaaaaatcctctctgaaatcgaaggacgcttgcaagaggcgggaattccgtgtcgcgttagcggtcgcgaaaaacatctttactcgatctactgtaaaatggtgctcaaagagcagcgttttcactcgatcatggacatttacgcgtttcgcgtgatcgttcatgactccgatacctgctatcgcgtactcggccagatgcacagtctctataagccgcgtccgggacgggtgaaagactatatagccattcccaaagcgaacggctatcagtctttgcacacctcgatgatcggcccgcacggcgttcctgttgaagtccagatccgtaccgaagatatggatcagatggcggaaatgggggtcgcggcacactgggcgtataaagaacacggtgagaccagcaccacggcgcagatccgcgcccagcgctggatgcagagcctgctggagctacaacagagcgccggtagttcgtttgaatttatcgaaagcgtaaaatccgatctcttcccggatgagatttacgttttcaccccggaagggcgcattgtcgaactgcccgctggcgctacgccggtggattttgcctatgcagtgcataccgacatcggccacgcctgcgtcggcgcgcgtgtcgaccgccagccttatccgctgtcgcagccgcttagcagcggtcagaccgtcgaaattattaccgcgccgggcgcgcgtcccaacgccgcctggctgaactttgtcgtcagctctaaagcgcgcgctaaaattcgtcagttgctgaaaaacctcaaacgtgatgactccgtaagcctgggccgtcgtctgcttaaccatgctttaggcggcagtcgtaagctggcggaaattccgcaggaaaatattcagcgcgaactggatcgtatgaagctggcaacgcttgacgatctgctggcggaaatcggtctcggcaacgcgatgagcgtagtggtcgcgaaaaatctgcagcaaggcgaagccgtggtgccgaccgttgcgcaatcgaatcacggccacctgccgattaaaggcgcggatggcgtgcttatcacctttgcgaagtgttgtcgtccgatcccaggcgacccgatcatcgctcacgtcagcccaggtaaaggactggtgatccaccacgaatcctgccgtaatatccgtggataccagaaagagccagagaaatttatggcggtcgaatgggacaaagagacggagcaggaattcattaccgaaatcaaggtggaaatgtttaaccatcagggcgcgctggctaacctgacggcggcgattaataccaccacctccaatattcaaagcctgaatactgaagagaaagatggtcgcgtctatagtacctttattcgccttaccgcacgcgatcgcgtacatctggcgaatatcatgcgcaaaatccgcgtgatgccagacgttattaaagtcacccgtaaccgaaactag

SEQ ID NO: 370963 - DNA, 690 bp, Salmonella enterica
atgaatccaaaacgttatgcgcgtatatgcgaaatgctcgccaggcgtcagcctgatctcacggtctgcatggagcaagtccacaaacctcataacgtttctgcaatcattcgtaccgcagatgccgttggcgtccatgaagtccatgctatctggccaggtagccggatgcgcaccatggcttccgcggcggcgggcagcaacagttgggtacaggtgaaaactcaccgtaccattggcgatgcggtagcccatttgaaaggacggggaatgcagattctggcaacccatctttctgataaagccgtagactttcgcgagattgattacacgcgcccgacctgtattctgatgggtcaggagaaaaccggtattactcaggaagcattagacctggcggatcgggatatcatcattccgatgatcggcatggtacagtcgctgaacgtttccgtcgcctccgcgctcattctttatgaagcccagcgccagcgacagaacgcgggcatgtatctgcgtgaaaatagcatgttgccggaagatgaacagcagcgcctgctgtttgagggtggttatccggtgctggcgaaagtcgctaaacgtaaaggtctgccttatcctcgcgtcaatcagcagggcgaaatcgacgccgatgctgactggtgggcgacgatgcaggcggcagggtaa

SEQ ID NO: 370964 - DNA, 2082 bp, Salmonella enterica
atgtcaggccgcttgttagacgctgttccgctcaattccctgacaggcgtcggcgcagcgcaaagcagtaaactggcgaaaattggcctgcacaccgtgcaggacctcctgctccacctccctctgcgttacgaagaccgcacccatctctaccccattggcgaactgctgcctggcatctacgccaccgttgaaggcgaagtgctgaactgcaatatcactttcggcggtcgtcggatgatgacctgccagattagcgacggttccggcattcttaccatgcgctttttcaattttaacgcagcgatgaaaaacagcctggcgacgggacgacgtgtgctggcctacggggaagcgaagcgcggcaagtatggcgcagagatgatccatccggaatatcgcctgcagggcgatctcagcacgccggaacttcaggaaacgctcacccccgtctatccgaccaccgagggcgtgaagcaagcgacactgcgcaagcttaccgatcaggcgctggagttgctcgacacctgcgccattgccgaactactgccgccggaactggcgcagggtatgatgagcctgccggaggcgctacgtaccttgcatcgcccgccgccgacgctccagctcgccgatttagaaaccggcaaacacccggcgcagcggcggcttattcttgaagagctactggcgcataatctcagtatgctggcgcttcgcgcaggcgcgcagcgctatcacgcgcagccgctaagtaccaacaacatattgaaagacaagctgctggcgtcgttgccgtttaaacccaccagcgcgcaggcgcgggtggtggcagagatcgaacgtgatatggcgctcgatgtgccaatgatgcgtctggttcagggcgacgtgggttccggtaaaacgttggttgcggcgcttgccgccttgcgcgctattgcccacggtaagcaggtggcgttgatggcgccgaccgaactgctggctgaacagcacgcaaataatttccgcaactggttcgaaccgttgggcgttgaagtgggttggctggccggtaagcaaaaaggtaaagcacgtcaggcgcagcaagaggctattgccagcggtcaggtgcagatgattgtcggcacccacgctatcttccaggaacaggtgcagtttaacgggctggcgctggtcattatcgatgagcagcaccgctttggcgtccaccagcggctggcattgtgggaaaaaggccagcagcagggctttcatccgcatcagttgattatgaccgcaacgcccattcctcgcaccctggcgatgactgcctacgccgatctcgatacctcggtgattgacgagctaccgccgggccgtacccctgtcactaccgttgctattccggatacccgtcgccatgaaatcattgatcgtgtgcgcaacgcctgcacaaccgaaggccgtcaggcctactgggtctgtacgctgattgaagaatctgacctgctggaagcgcaggcggcggaagccacctgggaggagctcaagctggcgttaccggagttgaatatcggcctggtacacggccgcatgaagcccgccgaaaaacaggcggtgatgcaggcctttaagcagggtgaactgcatctgctggtcgccactacggtgattgaggtgggggtcgatgttcctaacgccagcctgatgattattgaaaacccggagcgactgggcctggcgcaattacaccagctcagaggccgtgttggccgtggcgcggtcgcatcgcactgcgtgctgctctataaatcgccgttgtcgaaaacggcgcagaagcgtttacaggtattgcgcgatagcaacgacggttttgtgattgcgcaaaaagatttagagattcgcggcccgggggaattactgggcacgcgccagacagggaacgccgaatttaaagttgcggatttactgcgcgatcaggccataatccccgaagttcagcgtattgcccgtcatattcacgaacgttatccgcagcaggcacaagcgctgattgagcgctggatgccggaaaccgaacgttattccaacgcctag

SEQ ID NO: 370965 - DNA, 1206 bp, Salmonella enterica
atgtttgaactcgataccttatcgacccttgtcgccgccacgctggtgctgctactgggtcgcaagctggtccagtctgtctccttactgaagaaatatacgattccggaaccggtggcgggggggttactggtcgcggttgctctgctggtgctgaaaaaaagcgtcggttgggaggtcaactttgatatgaccctgcgcgatccgttgatgctggcgtttttcgcgacgatcggccttaacgctaaccttgccagcctgcgcaaggggggacgcgttgttggcgtcttcctggtcgtcgtggtcggattactgctgatgcagaatgccatcggtatcggcatggcgagtctgttggggctggacccgttaatggggctgattgccgggtcaattacgctgtccggcggacacggtaccggcgcggcgtggagtaaactgtttgtcgaacgttatggttttgccaatgccaccgaagttgcgatggcatgtgcaacctttggcctggtgctgggcgggttgattggcggtccggtagcgcgttatctggtgaaacactccaccacgccggatggaatgcctgacgatcaggccgtgccgacagcctttgaaaagccggatgtgggccgtatgatcacctctctggtgctaatcgaaaccatcgccctgattgctatctgtttgaccgtgggcaaaatcgtagcgcagctactggcgggaacggtgcttgaactgccggtcttcgtttgtgtgctatttgttggggtgatcctcagcaatggcctggcgctggtgggtttttatcgcgtatttgagcgtgctgtttcggtactggggaacgtgagtttgtcactgttcctggcaatggcgctgatgagcctgaagctgtgggaactggcgtcgctggcgctgccgatgctggcgattctggtggtacagaccatcttcatggcgctgtacgcgatcttcgtcacctggcgcatgatggggaaaaactacgatgcggcggtgctggcggcgggtcactgcggttttggcctgggcgcaacgccgaccgccattgctaatatgcaggcgattaccgaccgttttggtccctcgcatatggcgttcctggtggtgccgatggtcggcgcgttctttatcgatatcgtcaatgcgttggtgattaagctgtacctgatgttaccgattttcgcgcaataa

SEQ ID NO: 370966 - DNA, 1392 bp, Salmonella enterica
atgtccgttaacgccatcgagtcggcagatgcgcaaccggttgcgcagacgcaaaacagcgaattaatttaccgtcttgaagatcgcccgccgctccctcaaaccctttttgccgcttgtcagcatctgctggccatgtttgtcgcggtaatcacgccagcgctgttaatctgccaggcgttgggtttaccggcgcaggatacgcagcacattatcagcatgtcgctgttcgcctccggcgtagcctctattattcaaatcaaagcgtgggggccggtaggatcggggctgttatccatccagggaaccagttttaactttgtcgccccgctgattatgggcggtaccgcgctgaaaaccggcggcgcggatgtcccgacgatgatggcggcgctgttcggcacgctgatgctggcaagctgcaccgagatggtgctttctcgcattctacatctggcgcgccggattatcacgccgttagtctccggcgtcgtggtgatgattattggcctgtcgctgattcaggtggggctaacctccatcggcggcggctatgccgccatgagcgacaacacctttggcgcaccgaaaaacctgctgctggccggcgtcgtcctggccattattatcctgctgaatcggcagcgtaatccctacctgcgcgtggcttctttggttattgccatggcggcaggctatcttttagcctggtttatgggcatgttgcctgagaataacgcgccggtctcgcaggacatcctgatggtgccgaccccgctgtattatggtctgggcattgactggaacctgttactgccgttgatgctggtctttatgattacgtcgctggagaccatcggagacatcaccgccacctctgatgtctccgagcagccggtatccggccccttgtacatgaaacggctaaagggcggcgtactggctaacggcctgaactcatttgtttcagcggtatttaatacgttcccgaattcctgtttcggtcagaacaacggcgtaattcagttgactggcgtcgccagtcgctatgtgggatttgttgtcgcgctgatgctgattgtactcggcctgttcccggcggtaagcggttttgtgcagcatatcccggaaccggtgctcggcggcgccacgttggtgatgttcggcaccattgccgcctccggggtgcgtattgtctcgcgtgagccgctgaaccgccgcgcgattctgattatcgccctgtcgctggccgtgggtcttggcgtctcgcaacagccgcagatcctgcagttcgcgccggaatgggtgaaaaatctgctctcatccggaattgccgctggcggcatcacggctatcgtgctgaacctgattctcccgccggaaaaaccgtaa

SEQ ID NO: 370967 - DNA, 1710 bp, Salmonella enterica
atgaaattgattgggaggttgcttctctacgtgctgatcgcctgtttagtggtgattttcggcttttattttctgctgcaaacgcgctggggcgcagatcatgtcagcaactgggtatcagagaacagcggttatcacctcacattcgacgtgatggatcatcgtttttccgccccatcccatcttttactggagaatgtgacctttggtcgtgatggtcagcctgctaccctggtcgcgaaaaccgtagatatcggtctgagcattcgccagttaaccgcgccgctgcatgtcgacacgattctgttacaggacggcacgctgaatatttcagtgcaaaccgcccctttcccgtttgaggccgaccgcctgcaacttcgcaatatggcgctcaatagtcccggtagcgaatggcggttgagcgcccagcgcgttaacggcggcgttatgccatggcaccccgaagccggtcgggtattgggcaataaagcccagatccaactgagcgccggttcgctgacgttaaacgacgttcccgccactaatgtgcttattgaaggcagtatcgaccatgatcaggtgatgttaaacaccgtcggcgccgatatggcgcgcggagcgttaaccggcgtcgcccggcgtaacgctgacggtagttgggtcgttgaaaatctgcggctgaatgatattcggttacaaagcgataaatccctgagcgagtttttcgcgccgcttactacggttccatctttgcagattggtcgtcttgaagtgacggactccagcctgcaaggaccagactgggctgtcaccgatcttgacctgagtttgcgcaatctgactctgcgcaaagaagactggcaaagtcaggaaggtaaattatcgatgaacgccagcgagtttatttacggctcgctgcacttgctcgatccaatcctgaacgccgaattttcaccacagggcgttgcgctacgccagttcaccacccgctgggaaggcggtatggtcagaacctccggcgcctggttacgcgaaggcaaagcgcttattctggacgataccgctatcgccgggctggagtatacgctgccggaaaactggaagcagttatggatgaagccgctgcccgactggttgaacagcctgacgctgaaaaaattcagcgccagccgcaatctggtgatcgatatcgacccggccttcccgtggcaaatcaccgccctggacggctacggcgcaaacctggagctggtacaacatcatcaatggggcgtctggagcggcaatgcgaccctcaacgccgcagcggcaacctttaaccgtgtggacgtgcgccgcccgtcgctgtcgttgacggctaatgccagcacggtcaacatcagcgatctgagcgcgtttactggaaaagggatgctggaagccactgccagcgtatcgcaactgccgcagcgtcagacgcaaatcagcctgaacggacgcggcgtaccaatggatgtgctacagcagtggggctggccggcattaccgattgctggcgatggcaatattcagctcacggccagcggcaatattcaggccgatgcgccgttgaaaccgacggtaaacgggcaattacacgcggtcaacgcacaaaagcagcagataacacagacgatgcaagcgggcgtggtgtccggcggtgaagttacgtcaacggagccagcgctgtaa

SEQ ID NO: 370968 - DNA, 2319 bp, Salmonella enterica
atgaaaattagcgacggaaactggctgatccagcctggccttaatttgattcacccggttcaggtgttcgacgttgaacagcacgggaatgagatggtgatctatgccgcgccgcgtgatgtccgcgaacgaacctggcaactggataccccgttgtttaccctgcgctttttctcgccgcaggaaggagtgataggtgtacggatggaacacttccagggcgctttggataacggcccacattatccgctcaatgtcttgcaagatatcaacgtggagatgcagaacaacgccgaatttgccgaactcaagagcggcagcctgagcgtgcgcgtcaccaaaggcgagatctggtctctggattttctgcgcaacggtgtacgtatcaccggtagccagttgaagaataacggctatgtgcaggataccaacagcgggcgcaactacatgttcgagcgtctggatctcggcgtgggcgaaaccgtctacgggctgggcgagcgctttaccgcgctggtgcgtaacggtcagacggtggagacctggaaccgcgacggcggcaccagcaccgagcaatcgtacaagaatatcccgttctatatcaccaaccgtggctacggtgtgctggtgaatcatccgcagtgcgtgtcgtttgaaattggctccgagaaagtctccaaagttcagttcagcgtcgagagcgagtatctggaatacttcgtcatcgacggcccgaccccgaaagacgtgctgaaccgctatacccaatttacgggtcgtccggcgctgccgcccgcctggtcgtttggcctgtggctgaccacctcattcaccaccaactacgacgaagcgaccgttaacagttttatcgacggtatggccgagcgcaatctgccgctgcacgtcttccacttcgactgtttctggatgaaagcttttcagtggtgcgattttgaatgggacccggtgactttccccgatccgaaagggatgattcgccgcctgaaagcgaaagggctgaaagtctgcgtgtggattaacccctacatcggccagaaatccccggtcttccaggagttgaaagagaaaggatatttgctaaaacgcccggacggctccttgtggcagtgggataaatggcagccgggactggcgatttacgacttcaccaacccgcaagcctgcgaatggtatgccgacaagctgaagggcctggtggagatgggagtggactgcttcaaaactgacttcggcgaacgcattccaacggatgtgcagtggtttgatggttcagatccacagaaaatgcacaaccattatgcctacatctacaacgaactggtgtggaacgtgctgaaagagaccgtcggcgttgaagaggcggtgctgttcgcccgttccgcctcggtgggcgcgcaacagttcccggtgcactggggcggcgactgctacgccaactacgaatcgatggcggaaagcctgcgcggcgggctgtccatcggcctgtcagggtttggcttctggagtcatgatattggcggattcgagaataccgcgccggcgcatgtctacaagcggtggtgcgcattcggcttgctctccagccacagccgcctgcacggtagcaaatcctaccgggttccgtgggcctatgacgacgagtcctgtgacgtggtgcgcttcttcactgaacagaagtgccggatgatgccgtatctgtatcgggaagcggcgcgtgccaacgaagccggtacgccaatgatgcgggcgatgatgctggagttcccggacgatccggcgtgtgattatcttgatcgccagtacatgctgggagatgcggtcatggtagcgccggtatttagtgaagcgggcgacgtggagttctacctgccagaaggccgctggacgcacctgtggcgcaacgatgaagtgcagggcagtcgctggcataaacagcagcatgacttcctgagcctgccagtgtatgtgcgtgacaatacactactggcgctgggcaacaatagccagaagcccgattacgcctggcatgagggtacggccttccagttattccatctggatgacggctgcgaagcggtctgcgaagtccctgctacggatggttcgacaatctttacgctgcaggcgaaacgcacaggcaataccattacggtgagcggcgaaggcgaggcgcgcaactggacgctgtgtctgcgtaatattacgcagattagcggtaccaaatgcggctcatatgcgggaagtgaactgggcgtagtggttaccccgctgggaaatgaagtggtgattacgctttaa

SEQ ID NO: 370969 - DNA, 1383 bp, Salmonella enterica
atgaaaagtgagattctctccgttaaggagaagattggctatggtatgggcgatgccgcgagccacatcatctttgataacgtcatgttatatatgatgttcttctataccgatattttcggtattcccgctggttttgtcggcaccatgtttttactggcgcgtgcgcttgatgccatctccgacccttgcatgggcctgctggccgaccgcacccgctctcgctggggcaaattccgaccctgggtgctgtttggcgcgttgccgtttggtatcgtttgtgtgctggcttatagcacgccggatctcagtctgaacggcaaaatgatttatgccgccatcacctacacgttgctcacccttctgtacactgtggtcaacatcccttactgcgcgttggggggtgtaataaccaatgacccaacgcagcgtatctccctgcaatcctggcgctttgtgctggcaacggcgggcggaatgctctctaccgtactgatgatgcctctggtgaaactgattggcggcgagaataaggcgctgggcttccaggggggtatcgcggcgctctcggtggtggcgttcctgatgctggcgttctgtttctttaccaccaaagagcgcgttgaagcgcctgccacccatacctccatgcgtgaagacctgcgtgatatctggcacaacgaccagtggcgcatagtcggcctgctcaccatcctgaatattctggcggtatgcgtgcgcggcggggcgatgatgtattacgtcacctggatattgggcaaaccgggcgtgtttgtcgccttcctcaccacctattgcgtcggcaacctgattggctcggcgctggcaaaaccgttgaccgactggaaatgcaaagtgagcgttttctggtggaccaacgctttactcgcagtaatcagcgtggcgatgttcttcgtaccgatgcacgccacgatcgctatgttcgtctttatcttcgtgattggcgtattgcaccagttagtcacgcctatccagtgggtgatgatgtctgacaccgtcgactacggcgaatggtgtaacggcaaacgcctgacggggatcagttttgccggcacgttgttcgtgctgaaactgggtcttgccctcggcggggcgctgattggctggatgctggcaggcggcggttacgacgcggcggcgaaaacgcaaaacagcgccacgatcagcatcatcatcgctctgttcactatcgttccggccatctgttatctgctgagcgccgcgatcgctaaacgctattacaccctgaaaagcccgttcctgaaaaccattctggaacaactggcgcagggcgcacaccgcaacgaacaagaatttacccataaaaaattgcaaaactaa

SEQ ID NO: 370970 - DNA, 345 bp, Salmonella enterica
atgagttataaatatgttggtaagcatggctgtgatgttgcattgcggatgggctataaagaatgccccgatgaaaatgcttatggtgatgcctattatattaaagatgggttaaaatggatatttaatataacaggcttaaaaaaacggcttggcgtatacagcgacgacgatctccgtaaacagaactatgatgtagatacctattatcgagttgaaaaccaaccggaagaaagtgcagatgatgaaatgcaatcgctgtatcataatttagcggtagaagaaggagaacccgtgtatctggagggaggcatgtatctttatccggatggctctatacgttga

SEQ ID NO: 370971 - DNA, 177 bp, Salmonella enterica
atgagaatcgacaaactttcactgcttcactttcgttgtttcaggcagctcgatattacttttgatgaacacattacgattctggttgcaccaaacggcgcgggcaagacgacagtactggatgcggtacgcctggcgctgttcccctttattcgtggcttgccggcctctatgtaa

SEQ ID NO: 370972 - DNA, 498 bp, Salmonella enterica
gtgatccgtacagaagatgtacgtctggttttccgccctgaagcgctgaacatggaaatgtcatctccggtcatgattacagctaccggagaatgggaaagcggaaagacggcaacctggatgctcgacaagcgaggagaacagccgccgcatgaagataagacggcggcgcagcttacccgttggggtgaacaacttcagacgctggtgcgtgaagagcataatttgctgcaggttgaacttctcctaatgctttatctggggactgctcgcttgtggtatcaggaacgttatgaggcacagcctactgaacagcgtctggataacagcgccttttcacgtttgtctggttatgacgattgcctctcggccacatcaaactataaacagtttgagcagtggtatagctggctatggcatagctaccgtgaacatcaaatcacacaacttgaatcaccttcaacaaagttaaaagaagatgttcgtattcgcggatga

SEQ ID NO: 370973 - DNA, 501 bp, Salmonella enterica
atgaaagaagctattcaggctatccagcaaaccattaactgtctgacaaaagacgtaactggctggcgcgatctggaatacagctccagccataaccagcaactggtaatgaatcatccgcagcacggcaagatccccttagcccagctcagcgacggcctgcgtaatgcggttgcgatggtagcggatatcgcgtttcgctgtgtcaaactcaacccccatttacgcgatgaagccgccttaaaaacacaggggattgtgctgatcgatgaagtcgatatgttcctgcacccagcctggcagcagcaaattatccagtctttgcgcagcgcatttccactaatccagtttattgtcactacccatagcccgcaggttatcagcacggtaaaacgtgagtctgttcgcctacttgaacaggacgagaaaggtaatggtctggcgtcaataccaccggggcgacctacggcgagccaagtaatgatgtactgcacagcgtga

SEQ ID NO: 370974 - DNA, 348 bp, Salmonella enterica
atgggcgtcgatccccaacctccggttaaggaacaggatgttttcgaacgtgggattatcaatgtatttaaggggttaagccaggagtacaaaaccaataatccttgttatttcggcaagaagattatcgtcaacaatctggtgaagcatgaccgatggggctacagcctgaactggggctggcgacgcgaccagctcgccgatctggaacgaatgctctacctgctggatagtaaaaccattcctgacaaccggcatgatgtctctatccggtttatggacttcgtgcgcgataatccgcgtgagcaggtctttgaagacgatatgttcaccatccgctacttttag

SEQ ID NO: 370975 - DNA, 1038 bp, Salmonella enterica
atggcagacaaatacttaacccaatccccggcaggcgaatttgttatgtttgccagcgatgacggtgaagttcgtgtggagtgccgctttgagcaagagacgctatggctccctcaggcaaccatcgccaacctttatcagatcactccccaggcagttacacagcacattaaagcgatctatgaagaaggcgaacttgagcaaaacgcaacctgtaagtcttacttacaagttcaacaggaaggtagccgtcaggtaagccgcaacaggcttcactacagcctgcctgtcatccttgctgtcggctaccgcgttcgttccccgcgcggcacacagttccgccagtgggcaacccagacgctccagaaatacctgatcaaaggttttgtgatggacgatgagcgcctgaaaaatccgcccgtgggttcatcggctgtacccgactattttgatgagatgctggagcgtatccgcgatattcgcgccagcgaacgtcgggtttatttgcgggtacgagagatctttgcgttagccgccgactatcaaccatcgctcaaagaaaccacgcaattttttcaaaccatccagaacaagttgcattttgcctgtaccggacataccgctgctgaactcattcatcagcgtgctgacgccagccagccgcatatggggctgaccagctataaaggtgaagaggtacgtaagggtgacgtgacggtggcaaaaaattatctcactcaggatgaagtcagcgagcttaaccgcgtagttaacatgtggctggattttgccgaggatcaggcccgtcgtcgtcagcagatctttttacgcgactggcaggataagctggatcagttcctgcaatttaacgaccgtgaggttttacaaggcgcaggtaaagtcactaagaaaatggccgatgaaaaagcgcaggcggaatatagtcagtttgctgaacaacaacggcgcttaaaagaagccgaaggtgagaaggatatcgccggtttgctacaatggaaaacagaacctaaaaagtag

SEQ ID NO: 370976 - DNA, 174 bp, Salmonella enterica
atgagcggtaaacgttatcccgaagagtttataattaaagcggtaaaacaggttattgagcgcggccattctgtttccagcgtcgcaacacgtcttgatattactacccacagtctttacgcctggataaaaccgccatattcacgacggtatcatgcaatcacaggagtctaa

SEQ ID NO: 370977 - DNA, 618 bp, Salmonella enterica
atgatgagaaagccttcacaaattgtccattgcattagttgcgatttatcctgtcaattatttcctgacagcgcagtacgggtgcaatactgtcataatgcggcattttccatctggccagatggtaatgctttcctgaaaaaagggtttattgaaaagttattgcttgatagacacaaccatttatccagcggttttatctttgttgatttttctttcccgaatcttcgacgatttaccgatttgcaatgggctgacagtctggcagacagtggcatgcatattgtcctgatttctgacagaagtttaactccgctggccaattactggattttgaaaagcaataaaatacaaggaattatttattccgatgacgatgatattgtgcaacagcaaaagatgcaccgcttgtttaccggtcggcttgccaacagtaaacgtggacgaacgcttaactatacggaatttatattactgaagcgctttgtatcaggaataagtattcagcagattgtaaatattgacaatattgatattaagaaactttatgtgcataagctgcggcttgaaaataagctagggcatagcattcataaaataatatcaaatattttatag

SEQ ID NO: 370978 - DNA, 2868 bp, Salmonella enterica
atgccaactccccaaaattactcattcatcgccatagcggtatcagcagcgttagcctctatggtatttccctcccaggcggcctgggttgacgttgatagtctgccatccagtgggctggtcagccagttgccgccggaattacaggctattattcccgctcaggccagtaccggtttcaccaaagtcggtactatgcccaactacgtttatcagtggaacaccggcaccatcccggtttatggcaatggcctcacgcttaatgggccgggcgcggaggcgtttgaacacactgtcacggttattcagaacagcgggacgggaaatccgggcgtgatttttggcaacgacctgaccattcggacgcagtcggcgaatgccgcgaataatggtagagacgtcgatggcatccgtactcacggcgcaaatactccggataacccggtatttattattaccggtgaccgtaccaacatctacgtggatggtcaggatggtgacggtattaacgccggatataactcactgggccagggttggaccggatcggccaatatttacgtcggcgacgatctgtatatcaaaacgaccggtagccagggacgtggcattacagctaacgccatgcgggatgcgtcacgtgccaaaaatacgattgtcgtcggcaatcgtgcgcatattgttactaccggcgacagttcagaggggctgcgtaccggacaaagcggttcgttgattcgtctgggtgacgatgcaactatcgaaacatccggcgcatcctcaacggggatttacgcagcatcctcctccagaaccgagcttggcaacaacgctactattacggtgaacggtgccagcgcacacgcggtatatgcaactaacgctaccgttaatttgggagagaatgccactattagcgttaacagcgccagtaaggctgcatcctatagtaaagcccctgccggtttatacgccctctcccgaggcgccattaatctggcaggcggtgcggctattactatggcgggcgataacagtagcgaaagttacgccatcagcacggagactggcggcattgttgacggttcttcaggaggtcgtttcgtcatcgacggtgatattcgtgctgctggcgccaccgctgccagcggtacgctaccgcagcagaacagtacgattaagctcaatatgacggacaactcgcgatgggacggggcgtcgtacatcaccagcgctacggcgggcacaggcgttatctctgtacaaatgagcgatgcgacctggaatatgaccagcagctcaacgctcactgacctgacgctgaatagtggcgcaaccattaacttcagccatgaagatggcgaaccatggcaaacgctcaccatcaatgaagattatgtaggcaacggcggtaagctggtctttaatactgtgctcaacgatgatgattccgaaacggacaggctgcaggttctcggcaatacttcaggcaacacatttgttgcagtaaataatattggaggagccggggcgcaaaccattgaaggtattgaaattgttaacgttgctggcaattccaacggtactttcgaaaaagcaagccgtattgttgccggagcctatgactacaacgtggtgcagaaaggtaaaaactggtatctgaccagctacattgagccggacgaaccgattattcctgatccagtagaccctgttatccctgaccctgtcgttcccgatccggtggaccctgatccagtagacccggttatccctgaccctgtgattcccgatccggtggaccctgatccagtagaccctgagccagtagacccggtcatccctgatccgacaattcctgacatagggcaatctgacacaccgccgataacagaacatcagttccgtccggaagtgggcagctatcttgccaacaactatgcggcaaatacgctgttcatgacgcgtctccatgaccgtctgggtgaaacccagtacaccgacatgctgacgggtgagaagaaggtcaccagcctgtggatgcgtaacgtcggcgcccatactcgcttcaacgatggcagcgggcagctaaaaacccgcatcaacagctatgtgttacaactgggaggcgatctggcacagtggagcactgacggtcttgaccgttggcatattggtgcaatggcaggttatgccaacagccagaaccgcacgctgtcgtccgtgagtgactatcattcccgtggtcaagtcaccggttacagcgtcggcctttacggcacctggtatgctaacaatatcgatcggtctggggcttatgtggatacctggatgctgtacaactggtttgataacaaggtcatgggtcaggatcaggccgctgagaaatataaatccaaaggaattaccgcctcggttgaagccggttacagcttcaggttaggtgaaagcgcgcatcaaagctactggttgcagcccaaagcgcaggtggtatggatgggcgtgcaggctgacgacaatcgcgaagccaatggtaccctcgtcaaggatgataccgccggtaatctgctaacccgcatgggcgtaaaagcctatattaacggccacaatgctattgatgacaataaatctcgagagttccagccattcgtggaagcgaactggatccataatacgcagcctgccagcgtgaagatggacgatgtcagcagcgatatgcgtggtacgaagaatattggagaactgaaagtaggtattgaaggacaagttaccccgcgcctgaacgtatggggtaacgtggcgcaacaggtgggtgacacaggttatagtgatacccgaggaatgttggggatgaaatacagtttctga

SEQ ID NO: 370979 - DNA, 465 bp, Salmonella enterica
atgttagcctgcctgacgctactgtttctgggagtagggcttgggcatctttttcatttgtatacggaaaagaaccgggatccagagaaatgtacggcgcctgtgattgtgttttataacaacactcaggctaacctgacgctggactttatgtattcgctgaaaaaacgcactggggtggtttccatcagcggaacgtattacgtcgataataaaatgagcggcgtgatccgccgtgatgtttcctatgtatggagtgaaaataaagacagcacccattttatatcgacggatatcaacaaagtcacgcgtgacgaaacactgtccgatgcggttatcgagacggttttacccgatttttatgtctatccagggaaaagtatcagttacaccatcctgactcagggccatcgtggctttatgttcaccatcgggaaacgcccgatatttttctgtacacattaa

SEQ ID NO: 370980 - DNA, 858 bp, Salmonella enterica
atgtcctgctacgcagccacagcatcagactatactcagtggtgtctattaaccctctccaactacgttatgttttggcatggtaacaatgcgatgttatggataattaacgataatattgaatttaatccagaaatgaatcgcctggcgtcattatcgaggccagatctcaacattattctgacaacgcccgccagccgctgcttgcgccttctgctggaaaacgccccctccgtcgtctcacaacaaacattctttcaaaaagtgtgggaagaagacggcatggtggtgtcggcaaatacgctttatcagaatatctccattattcgccgcggattacgtaccgttggcgaaaatgaagatacgctgataatcacggttccgcgtagaggctttcagattgagcctggtgtgagcctcatgaccatccgcaaagacttcgctcagacaatagaaaaaaagggtgagacgccgccgcgtatgtcagggcgttggtttaaacattatgtacctgtactttggatgaccgggacatttgctgttggtattttgcttggcactataagctggcaaaccgttcccgataaggatttttacgatcgctacacgctggttgaaacaactcagggctgtcattttttctcgcggaatgaagatatcgaaagcggtagccgctttgcaagctataagtcaatgattctaaaaaccggtatggattgtcagaaatacccatgggtctatttcccttccagcagtcgcaccccagcggttacggcattgatttgtcagcaaccttataaaacgcgcggtgatacaggctgcgtgacgctttttttccgcggggtgacacatgggtaa

SEQ ID NO: 370981 - DNA, 681 bp, Salmonella enterica
atgtctacacccgcgaattttaacggtcaacgccctgccattgatgctaacgacgcagtaatgctgctgattgaccaccaaagtggcctgtttcagaccgtcggcgacatgccgatgccggaattacgcgcgcgcgccgcggcgctggctaaaatcgctaccttatgcaatatgccagtcattactaccgcatccgtaccacagggaccaaatggtccgctgattccggaaatccatgcgaatgcaccccacgcgcaatatgtcgcgcgtaaaggggaaattaatgcctgggataatgccgattttgtacaagcggtaaaagcgacaggccgtaaaacgctgatcgtcgccggtactattaccagtgtctgcatggctttcccagccatcagcgccgtcgcggaagggtacaaggtatttgcggtaattgatgcctccggtacgtacagtaaaatggcgcaggaaattacgatggcccgcgtggtacaggcgggcgtagtaccaatggataccgcggcggtagcctctgagctgcaacgtacctggaatagggaagatgccgcagaatgggcggatgtatataccaaaatattcccggcctatcagctactgattgaaagttataccaaagcgcaggaagtagtaaaaaataatgaactgctggattctcaacgcgcataa

SEQ ID NO: 370982 - DNA, 480 bp, Salmonella enterica
atgaataatcgtcgtggtttaaccgccgtcctggcgacgttgattacgttttccctgagcgctacgcctgtgctggcgaatccgggaaatggcaatggcggcggacatggtaataacgcggctaatcagggtaataacggtaacggacataaaggaaatgccgggcaaaaaacggaacaccgtaaaaatggcggtaaaccggatcacgtcgagtcggacattagctacgctgtcgccagacaactggcagtgaatttagggctgacgggttatcagtctttacctccggggattgcgaaaaatctggcgagaggaaaaccgctgccgccgggaatcgctaaaaaaacggtgccggcgtctatgctgggacaattaccttattatccgggctatgagtggaaaatcgttggggataatctggtgctgatcgcgctcagtaccgcggtggtcacggcgattattaatggcgtatttgattaa

SEQ ID NO: 370983 - DNA, 2727 bp, Salmonella enterica
atgactgacatgaacattgaaaaccggaaactcaatcgcccggcgtcagaaaatgataagcagcataaaaaagtatttccgatcgaagcggaagcttttcatagcccggaggagacactggcgcggctgaacagccatcgtcagggcctcacgatagaagaggccagcgaacggttgaaagtgtatgggcgcaatgaagtggcgcatgagcaagttcctccggcgctgattcagcttctgcaggcattcaataacccgtttatttacgttctgatggcattggcaggggttagtttcatcacggattactggctcccgttacgccgtggcgaagagaccgatctcactggcgtgctgattattctgacgatggtcagtttgagcgggttattgcgtttctggcaggagtttcgcactaacagagcagcacaggcgctgaaaaagatggttcgcaccaccgccacggtgttgcgtcgtgggccgggcaatataggcgcggtgcaggaagagattcccattgaagaactggtgccgggcgatgtggtttttctggccgcaggcgatctggtgcccgccgacgttcgactgctggcgtcgcgcgatctctttatcagtcagtcaattcttagtggtgaatcattacccgtagaaaaatacgatgttatggctgatgtggcaggtaaagacagcgagcaattgcctgataaagataaaagcctgctagatttgggcaatatctgtctgatgggaaccaatgtaaccagcggcagagcgcaagcggtcgtggtcgcgacgggaagccgtacctggttcggctcgctggcgaaatccattgtgggtacgcgtacccagacggctttcgatcgcggagtcaacagcgtgagctggctgttgatacgctttatgctgatcatggtgccggttgtcctgctgatcaatggtttcagtaagggagactgggtagaggcttcgctgttcgcgctggcggttgcggtggggttgacgccggaaatgttgcccatgattgtcagttccaacctggcaaaaggcgcgatcgcgatgtcgcggcgcaaagtgatcgtcaagcgcctgaacgctattcaaaacttcggcgcgatggatgtgctgtgtacagataaaactggcaccttaacccaggacaatatttttctggagcatcatctggatgtgagcggtgtaaaaagcagccgggtattgatgctggcctggctgaatagtagcagccagagcggcgcccggaatgtgatggatcgcgccatactgcgttttggcgagggccgcatcgcgccatcgacaaaagcgcgcttcattaaacgcgatgaactgccattcgactttgtacgtcgccgggtatcggtcctggtggaggatgcgcagcatggagacagatgtctgatctgtaaaggcgctgttgaagagatgatgatggtagccacccatcttcgcgaaggcgatcgtgtggtggcgctgacggaaacacgccgcgagctactgctggcgaaaaccgaagattacaatgcgcagggattccgtgtattgctgatagcgacacgtaagctggatggttccgggaacaatccgacattaagtgtggaggatgagaacgaacttaccatcgaagggatgctcacttttctcgatccgccgaaagagagcgccggaaaagctattgccgcgttgcgggataacggcgtggcggtcaaagtcctcaccggcgataatccggtcgtgacggcgcgtatctgtctggaagtgggtattgatacgcacgatatcctgaccggaacccaggttgaggcgatgtcggatgccgaactggcggctgaggtggagaaacgcgcagtattcgcccggctgacgccgttacaaaaaacgcgtattttgcaagcgctacagaaaaatggtcataccgttggttttcttggagatgggatcaacgacgcgcccgcgcttcgtgatgcggatgtgggaatttccgtcgatagcgccgccgatattgctaaagagtcatcagatattattctgctggaaaaagatctcatggtgcttgaggaaggcgttatcaaagggcgggaaacctttggcaatatcattaaatacctgaatatgaccgccagctctaatttcggcaatgttttttcggtactggtagccagcgcgtttattccgtttctgccgatgctggcgattcatctgttgatccagaatttgatgtacgatatttcgcagttgtcgttgccgtgggacaaaatggataaagagttcctgcgtaagccgcggaaatgggacgcgaaaaatattggccgttttatgctatggattggcccaacgtcttctattttcgatatcacaacctttgcgttgatgtggtacgtctttgcagctaataacgtagaggcgcaggcgctctttcagtccggctggtttattgagggtctgctctcgcagacactggtcgtgcatatgctaaggacgcagaaaataccgtttatccaaagtcgggcgacgttgccggtattattgacgaccggcttgattatggcgataggcatttatattccattctcacctctgggcgcgatggttggactggagccgctgccactgagctacttcccatggttggtggcgacattattgagctactgtctggtggcgcaaggcatgaagcgcttttatatcaaacgctttggccagtggttttaa

SEQ ID NO: 370984 - DNA, 684 bp, Salmonella enterica
atgttaatgtttccttatattttgaatttactggccgctatgctgttgggcgcgctgattggcgcggaaagacaatggcgtcaacgtatggcgggattacgcactaatgcgctggtggcgacaggcgccgccgtttttattctgagctccatgacgacatcgccagacagccccgggagaattgcggcgcagattgtctctggtattggctttctgggggcgggcgtcatcatgcgcgaagggatgaatgtgcgcgggctgaacactgcggcaacgctatggtgttcggcgggcatcggcgtgttatgcggcttagggcagttcaaaaatgcgctggcggcgacgatcattattctttgcgccaatattttactgcgtgaagcggcgcagcgtataaatcaactcccggtatccgccgagggagaaaaacgttatatcctgaaagtaacctgtaataaagaagatgaaagcgaggttcgtcagtggttactgaatatcgtaaaagaggccgcgatctgtttacaagggttaggttcggtccccgctcaggaacagggctataaagaaattcgtgccgagctcgtgggtcatgctgattatcgtaaaacgcgagaactgattatatccagaataggtgataacgataatatcaccgcaattcactggagcattgatagtcaataa

SEQ ID NO: 370985 - DNA, 903 bp, Salmonella enterica
atgggttccaccagaaaagggatgctaaacgtcctgattgccgccgtattgtgggggagttcaggtgtttgcgcgcagtacatcatggagcaaagccgtatgtcgtcacagttcctgacgatgatacgtttgttattcgccgggctgatactggtgaccttctcctttatgcacggcgataagatattttcgattcttaaaaaccgcaaagatgccctgagtctgctgattttctccgtggtgggcgcgctcaccgttcagctaaccttcctgcttacgattgaaaaatccaatgccgccaccgcgacagtgctgcaatttttatcgccgaccattattgtagcgtggtttgcattagcgcgaagaacacgaccaggcattctggtcttaaccgccattcttacatcgcttatcggcacctttttactggtgactcacggcaatccaacatcgctgtcgatctcttcaggcgcgctgttctggggtatcgcctccgcatttgccgccgccttttatacgacctggccttccaggctaatcgcccaatacggcacgctgccagtggtcggctggagtatgtcctttggcggccttattctgctgcccttctacgctaaagaaggaacgcactttgcggtgagcggcagcctgattctggcctttttctaccttgtggtgatcggtacgtcgctgacgttcagcctgtatttgaaaggcgcgcaactgattggtggccccaaagccagcattttaagctgcgcggaaccgttaagcagcgccctgctgtcgctactgctgttggggattagttttaccttgccggactggctgggcacgctgctcattctctcgtcagtgattctgatctccctcgattcccgtcgacgcgcgcgggccgcttaa

SEQ ID NO: 370986 - DNA, 942 bp, Salmonella enterica
atgaaaaaaagccccacgtccacgcctcatgatgcggtattcaaaacgtttttacgccatccggataccgcgcgggattttctcaatattcatcttccccattcgctaagaatacgttgcgatctgacgacgttgaaactggcgccggacagttttatcgagaaaaatttacgcgcgttttattccgatgtcctttggtcactaaaaacgtgtgaaggcgacggttatatctatgtcgttatagagcatcagagtacgccggacgcgcatatggcgttccggttaatgcgttacgcgactgccgcgatgcagcgccatctggatgctggccataaaacgttaccgctggtgattcccatgctgttttaccatggcgcgaaaagcccgtatcccttttcgctgtgctggctggatgagtttgacgatcctgcactggcgcgtcagctttatgcgacggcatttccactggtagacattacggtggtgccggataacgagattatgcagcatcgacgtatcgcgatgctggagctggtacaaaagcatatacgtcaacgcgacctgatgggattggtcgagcgcttagcggtacttctgattacgggaaacgctaatgacagtcagctaaaagcgctgtttaattatttgctaatacagcatggcagcacgcctcgttttggcaagtttatccgcgaggtggcgcgtcgtgttccccaacacaaggagagattaatgacgatcgtagacagaatacgtgaatcggggcgcagaaaaggtaagcgtgaaggcgtgcaacaaggcatacagcaaggtatacatcaaggtaagcaggaggaagccttgcgtattgcgcatacgatgctggaacaggggatcgagcgagagatggtgctgatgattaccgggctttctgacgaagagattaaggcaaagcgccattaa

SEQ ID NO: 370987 - DNA, 744 bp, Salmonella enterica
atgcagcagattaatttttatcgtcagcgggtagcgattaacgtactggcaaaggatatcgccaacgcgaaggctatctatgaagccgccgaaggccatgcggtcattggcgtactttccgcgcagttcgctacggtagaagagggcgtgccggaggtgaaacgctggatggcggaggtgccgtctatctcggtgggactgggcgcaggcgacccggcgcagtactacaaagcggcgatgattgccgcccatactcacccggcccacgtcaaccagacttttaccggcagcggcttcgcagcgggcgcactggcggcgacaggcggcgagcaaacacatattaacgccttggtcagcccgacgggaacgcctggcgaggtgttgatttctaccggcgtcagcagcagccagggaacgccagcccgcgtttcctgtgaagcggcggtacgcatgatgcaggatatgggcgcacatgcggcgaagtttttcccgatgggcggcgaaaagtcgttaccggaactctatgcgctggcgacaaccgctgcccgccacggcatgacgcttatcgagccgaccggcggtatctcactggataatttcggtattatcctgcaaacctgcctggaagcaggcgtgccgcgcgttatgccgcatgtttacagctcgattatcgatccgcaaaccggcaatacgcgccccgaagacgtcattcggttgatggagatagtcaaagcgctggtgtga

SEQ ID NO: 370988 - DNA, 1110 bp, Salmonella enterica
atgacgccgaatatctatcaacaactggggttgaaaaaggtcattaacgcctgcggcaaaatgaccattctgggcgtctcaagcgtcgcgccggaggtcatgcaggccaccgcgcgcgcggcttccgctttcgtcgagattgacgcgctggtggaaaaaaccggcgaactggtatcgcgctatacgggtgctgaagatagctatatcacctcgtgcgcctcggcgggtattgccattgccgtcgctgccgccatcacccacggcgagcgggcgcgcgtcgccctgatgccggacagtagcggtatggccaatgaggtagtgatgctgcgcgggcataacgttgactacggcgcgccagtcaccagcgccattcgtcttggcggcgggcgcatagtggaagtggggtcgagcaatctggcggcccgctggcaactggaaagcgccattaacgaaaagaccgccgcgctactgtatgtgaaatcacaccattgcgtacagaaaggcatgttgagcattgacgattttgtacaggtggcgcaggccaaccacctgccgttgattgtcgatgccgcggcggaagaggatttgcgcggctgggtggcgagcggcgcggatatggttatctatagcggcgcgaaagcctttaatgcgccaacctccggctttatcactggtaagaaaacgtggattgccgcctgcaaagcgcagcaccaggggattgccagagcaatgaaaatcggcaaggaaaacatggttgggctggtgtatgcgctggagaattaccaccagggccagacgaccgtgaccgcagcacagttacagccggtcgcagaagcgatttccgctatccatgggctttatgccgatatcgaacaggatgaggccgggcgtgcaatctggcgtattcgtgtgcgggtgaacgcatctgaattggggttgaacgcgcaggacgtcgaagcgcagctgcgcggcggcgagatagcgatttacgcccgcaaatatcagcttcatcagggggtttttagcctcgatccacgcacggtagctgaaggggaaatggcattgattgtggcgcgactcagggagattgcagaacatgcagcagattaa

SEQ ID NO: 370989 - DNA, 858 bp, Salmonella enterica
atgaacagtgacgtaatgcagcatgaactggttgagcgcgcgcgggaaagcggggcgctgaccaaagcagatatcaccaaagcctggtttatctactggctgggcgccgaggtttccagctcctatgagcgcttacaaagcctgattttctgcgcctcgatgacgccgatcatcaaaaaactctacccacaaaaagaggagcaggtagaagcgctaaaacgccaccttaacttttttaactccgagcagaccttcggcgcggtgattcagggcatctctattgccatggaagaacaaaaaacgcgcggcgagccgattaacgactcgtctatcaccggcattaaaactggcctgatggggccgcttgccgggatgggcgactcgattatctgggcggcggtgatgccgctgttgatagcgatctttattccgttcgcggcaaatggcagcgcgatgggcggtattatcccgctgattctctacccggcgatcaccctggcgatcagctacggtatggtccacaagggatatacgctggggcgtgattcgattatcggcctgctgcaaggggggcgaatcaaagaactgatctacggggccaacgtgctgggtttgatcatgatgggcgcgctttccgccagctacgtcaaaatcaccacgccgttaaaaattagcgctttgaaaggatctgaagtggtggttcagcagatcctcgactctatcgcgccgggcttactgccactggcggcggtattcgccatctacttctatctggtaaaaaaagggccgcgctacaccaccattttgctgtcgattgtcgcactgagcatagtctgttcgttgttgggagtgctgtaa

SEQ ID NO: 370990 - DNA, 750 bp, Salmonella enterica
atggataccttactctttgcaagcctgatggggttgtattactggtttgcccgtttacgcctcggctacaccttctccgcgatgctgttacaaccggtggtgatcgcggtatttgtcgggcttttgcttggcaatatgcagaccgcgatgatcatcggcgcagggatgcagctcgtttatttgggcgtgacctcaacgccgggcggcaacgtgccgtcggacccggcgctggcggcctgtatctccattcctatcgcggtgaaggccggtatggacccaaacctggcgatcgcgctggcaatcccgtttggcgtgattggcgtgtttctcgatcagcttaggcgcacgctgaacgccgcctgggtgcatatggcggataaacacgcggaaacggcaaacatggcgggcatcatgcgttgcgcctttctttacccggcattgctggggctggtgctgcgcttcccggtggtctttgccgctaactactttggccaggatgtggtggaaagtttccttaaactgatgccgcactggttaacccactcctttgaaatcatgggcggcattctgccggcgctgggctttgccatcaccattatggtgatcggtaaaaagagcctgttgccgtggtttatcggcgggttcttcgcggtgttgtacctcaaggtcgacatcatggcgatggccatcttcggcacctgtgtcgccttcctgattaaaggcctggcgaaaaatgaaggagcagcatga

SEQ ID NO: 370991 - DNA, 486 bp, Salmonella enterica
atggccaatatcgttttatgccgcatcgacagccgtctcattcatgggcaggttgtcacgaagtgggtcggacaatctcaggcgaaccggatagccgttgtgagtgatgaactggatgccgatccgtttatgaaaaatatctacctgatggccgcgccgccaaatatcaaagtggattgcttcggcaaccagagttttgccgccgcatggaaagaaaatcagcttggcgacggtaacgtgctggtgctttttccctcactggcggcggtgcaggacgccatacaactgggctttgacgttacccgcattcaggttggcggtctcggcggcgggccaaaccgcaaggcggtttttcagaatattacgctggatgaaaaagacgtcggcattcttaacgacctgaaaaaccgtggcgttcaggtatttttccagaccatcccggaagataagccgcagccgctcgacgatatcctgaaaaaattctaa

SEQ ID NO: 370992 - DNA, 426 bp, Salmonella enterica
ttgactaccacacaaccgttgccccacatcctgctgctgacgcatggcggctggggacaaccgctttgcaacagcctgcgtatggtcacgggcgaaattaaaggcgtgacggaaatcgcgctaatgcctgtcgatacgctgggcgagttttatcaacgcgtcgaggccgtggtgaaaacgctgccggaaggctcgctgatcctgacggattttgtcggcggcacaacgtccaacgtcgcggcgcggctaagcgccgattatccggtggcggtgattgccggactgaatgcgtcgctactgctggaggcgctggacaggcgcgaacaagggatgctaaccgcctgcgtggatgagttagttgaggccgggcgcagtagctgcctggatgtggtcgcccatgtacgtcagctacaacaatcactctaa

SEQ ID NO: 370993 - DNA, 2799 bp, Salmonella enterica
atgagacgtattgagatcgtactgggagagctggaacggctgacgcgcgggctatgccttgccgatttggcgcaggagacggcgtttacggcggaggcgataggtttcaatcttgggctggcgcgtaactccgtcagcaaagatctcaatcagttatggaatgacggcctggcaatcaaaagccgtggccgcccggtctattttctgcatcgccaggcgctggaaacgttgctgggacgacagctggaagagtctgaacgcgaagtgcggtcggtggcggatgtgctgccgcatgaagagcattacgcgcccgacgatccgtttaccagcctgattggttacgatcgcagcctgcgcgatgcggtagaaaaaggccgtgcggcggtgctctatccgcacggtttacacgttctgcttaccgggccgtccggcgtcggtaaaaccttttttgcggaactgatgcaccgtttcgcctgtgaacaggcgagcggcgctatcccgccgctggtctactttaactgcgcggaatacgcccataacccggaactgctctcctcgcatctgtttggtcatcggcagggggcgtttaccggcgcgaatgaacataaaacaggcctcgtggagcaggcggacggtggttatctgctgctggacgaggtgcaccgtctgtcttatgaagggcaggaaaagctgttctctattctggataaaggcgagtaccgtccgctcggcgtgagcagccagccgcgatcaatttcggtacgcctgatttgcgccactaccgaaccggtcgggtcggcgctgttacgtactttccagcggcgtattcaggtatgcattgatttgccgggtattcgccagcgctccgttgaagaacagatcgaactgatcgtggggttcttacagcgggaaagccgcaaaatagaacgcacggtcagcattgataaaccgttgttgctctggttgctgaataaacccctggaaggcaatatcggccagctaaaaagcgatattcagtttctctgcgctcaggcgtgggcatcgggaatgaccgagcataacgacacgctacaactggataagcggctggcggagatgtcggttaacccgacgccggaacagcgtctattggtggatactctgtttgacggtaaagcgcggctaaatatagacgcgcgcacgctgcccgcattgaagacgtcgctggcgaccggggcggaaattgaagagagcgacctcttttacagcttcctgacgcgcgaatatgttaatttgcgcaacagtaacgtccccccggcggagacgctggcgatcctgaaaaataaactcagctcgatttttgaatacggtctctacagccgcgacagcgtggcgcatccgccgcgctatggcgaccagattgaagagcgcgtgacgctgctgattggctgcgtagagcaggtgttgggattttcgctgccggaaaatctggttaacccactgcgtaaacacttcctggcgctgataggctacgtgcagcgcggcctgatcccgcagctttactcttccagtttgatcctggatcgctgcaaagacgaatatgacaacgccacgctgctgtgtcggaaaatcaacgaactgctgcatattcagtgtccggcgacggaagtggtctggctatgcctgttcctgaaagagtgccgccattatcgtcagcgcatcgatgccagccccgactgcggggttattttaatcgcccacggcgcgaccaccgccaccagtcaggcgcaatatgtcaaccgcgtgctggagcgcgagttgttcagcgccatcgacatgccgtttgaacagtcggtgcatgacacgctggaaacgctgacccaaatgattcaaacccgccaatatcggcggcttatcctgttggtggacatcggctcattgatccatttcggcagtacgatcagtaagttattccagatagatgttttgctcatgccgaacatcacgctgaccagtctgctggaagtcgggctggatttaagctatgaaaccagcgacttaccacagttgacggcgctcctgcagagtaaaaatatcccctgccagctttgtacgccgcagcaggagaacggcggcaaagtgctggtcatctcctgtattactggcatgggaacggcggaaaaaatcaaaaaggtgctggaggagagctttggcgaactgatgtcgcaggacaccaggatggtgatccttgattataacgaggtacgaagtctggagcgcgttcagcaggcattgaatgccagcgagcggctggcggggattgtcggcactttccagccggggctgccggatattccgtttatttcgctggaagagcttttctccgaacaagggccggaactggtgttgagcctgttaacgcccgatctgtccaatgctgaacgccgtctggagatggagcgcagcgccatgcgctttatcagcgcgctaacgatggagagtatcatcaaccatatttccgtgcttaacccgcagcgtattctgaaagagatggagggcgtttttaaccatctgacgtcttcgctttccctgaaaccaagccgccaggtgacactgcgcttcctgatccactgctgctgtatggtagagcgtattgtgattaaccgaaaaccgttacagatggcgttggaaagtcagccgaatctggacgcgcgcgcgtttagtgtcatcaaatccgcttttctgcccatcgaagacgcctacgccatccgtttatcggatgcggaatatttttatatctacgaactgctctatagctaa

SEQ ID NO: 370994 - DNA, 294 bp, Salmonella enterica
atgaaacgaaaaacgcttctgcttattgccgcgcttgtcgcgctaccgggcgtcacgtatgccgactctccgtttagctcactccagtcggcgcatgaaaaaaatacgattttaaaggatttgcgcaaaatgtgtacgcccaaaggcgcgctaaccgatgaagcctgggagaaaaaaatcatggcaagcgaggggaaccagcagcatattcgggaggcgatgatcgcgatagagcgcaacaatcagcataactactggcaggctctcggcaaggtggaatgcccggagatgtag

SEQ ID NO: 370995 - DNA, 1383 bp, Salmonella enterica
atgcgataccgttttcccgataacttctggtggggcagcgcctgctcagcgttgcaaaccgaaggggatagtctgaatggcggtaaaagccagaccacgtgggatgtgtggttcgagcgccagcctgatcgttttcaccagggcgtcggtccagcggaaacctcaacgttctatcgccactggaagcaagacatcgcgctactgaaacagttaaaacataacagttttcgcacctcgctaagctgggcgcggctcattccagacggcgtaggcgaggtgaatccacaagcggtgagcttctacaatcacgtcatcgacgagctactggcgcagggcatcacgccgtttattacgctgttccattttgatatgccgatggtcatgcaggagaaaggcggctgggaaaatcgcgacgtcgtagaggcgtttggtcggtacgcgcaaacgtgttttaccttgtttggcgaccgcgtgaagcactggtttacctttaatgagccgattgtgccggtggaaggcggctatttgtacgacttccactatcccaatgtggtggattttaaacgtgcggccaccgtggcgtaccataccgtgctggcgcactcgaccgccgtgcgcgcctggcgcgccgggcgctacgacggtgaaatcggcgtagtgctgaatctgacgccgtcctacccacgctcgcagcatcccgccgatgtgcaagccgcgcatcatgcggatctgttattcaaccgcagttttcttgacccggtattaaagggagaatacccggcggacttggtggcgctgctgaaaacctatgaccagctgcctgcctgtcagccaggcgaccgtcagcttattgccgacggcaaaatcgatttactggggattaactattatcagccgcgccgcgtgaaatgccgtgatacggcggtgaatccgcaagcgccgtttatgccggaatggttatttgactattacgacatgccggggcgcaagatgaacccttaccgcggctgggaaatttacgcgccaggaatttacgacatcatcaccaacctgcgggataattacggcaatccgcgctgttttatctccgaaaacgggatgggcgttgagaacgagcagcgttttgtgcaagcgggacagattcacgatgattaccggattgactttatttctgagcatcttaaatggctgcataaaggcattagcgagggctgtcactgccttggctaccacatgtggacctttatcgataactggtcatggctgaacggctataaaaatcgctatggttttgtacaactggatttagccacccaaacgcgcacggtgaaaaaaagcggagaatggtttgccgccaccgcagagcataacggttttgattaa

SEQ ID NO: 370996 - DNA, 1194 bp, Salmonella enterica
atgaatgaaaatatcgcagaaaaattccgcgctgatggggttgccaggcctaactggtcagccgtttttgccgtggcgttttgtgtcgcctgcctgattaccgttgagtttttgcccgttagtctgttgacgccgatggcgcaggatctggggatctccgagggcatcgccggtcagtcggtcaccgttacggcgtttgtcgcgatgttttccagcctgttcattacccagattattcaggcgaccgacaggcgttatatcgttattctgttcgccgttttgctgacggcttcttgtctgatggtctcctttgccaacagctttacgctgctattgctgggccgcgcctgtcttgggttggcgctgggcggattctgggcgatgtcggcgtcgctgaccatgcgactggttcccgcgcgtaccgtgccgaaagcgctgtcggtgatttttggcgcggtctccatcgcgttagtgatcgccgcgccgctgggcagttttttgggcggtattattggctggcgtaatgtctttaacgccgctgcggtgatgggcgtactgtgcgtcatctgggtggtgaaatcactgccgtcgctgccgggcgaaccttctcaccagaaacagaatatgtttagcctgttgcaacgccctggcgtgatggccgggatgatcgccatctttatgtcttttgccgggcagttcgctttctttacctatattcgcccggtctatatgaatctggcgggctttgatgttgatggtctgacgctggtgctgctcagttttggtattgccagcttcgttggcacttctttctcctcttacgtcctgaaacgttcggtaaaactggcgctggccggtgcgccgctgctactggcgctgagcgcgctgacgctcattgtgtggggaagcgacaaaaccgtggcggcggtcatagcgattatctgggggctggcgtttgcgctggtgccggtgggatggtcaacgtggatcactcgttcccttgccgatcaggcggaaaaagccggttccatccaggtcgcggtgattcaactggcaaatacctgtggcgcggcagtgggcggttatgcgctcgacaatttcgggctgctttcgccgctggcgctttccggctgtctgatgctgttgacggcgttagtcgtggcggcgaaagtccgtattacgccaatgagttga

SEQ ID NO: 370997 - DNA, 360 bp, Salmonella enterica
atgcgaaccttcaaaaccaggtggtttaacagagaagcgaagccccacacgataaaagatgacgagttaagcgaggccatcaacgccgtactgcaaggaaaagcagataatcttggcggcggggtttataaaaaacgtctcaatcaaaatcgcgatcgcgcaatcgtgttggcaaagggaggcgaacattggttttacaccttcctgtatgccaaacaggatatggccaacattcgctatcgcgaacttgcgggtttccgtgagttagcaaaacactatgcttgcctgaccgaagatcagataacggcactcattaataacaaagaactggtagaggtgcgccatgtcagcaaaaactaa

SEQ ID NO: 370998 - DNA, 324 bp, Salmonella enterica
atgtcagcaaaaactaaattcaaaagccctgcctttgaagcgattcatagcgcggcatctggattatttagcgtggatgccattccccaggagacaatgcgcagttttgacacggcctgcttaagcagcatcaaagacctgcagccacttgaaataaaagcgttacgagaagaactcaacgttagccagccggttttcgctcggtacctgaataccagcgtatcaacggttcaaaagtgggaaagcggcgccaagcgtcccagcgggatgtcactgaaactacttaatgttgtccaaaaacacgggctaaaggtgctggtatga

SEQ ID NO: 370999 - DNA, 453 bp, Salmonella enterica
atgatttggttgattctggccacgtttgtggtggtgtttattgtgggttttcgggtgctgacatcggatacccgccgggcgattcgccgtctgagcgaacgtctgaatattgatgtagtgccgatagaatcgatgattgatcagatgggtaaaacggcgggcggtgagtttttacagtatctgcatcgccctgatgaatcgcatttgcaaaatgccgctcaggtgttactgatctggcaaatggtgattgtcgatggcggcgatcagaatttgcagcggtggcatcggttgctgcaaaaagcgcgtttagccgcgccgatcaccgatacgcaggtacggctggcgctgggctttttgcgcgaaatggaacccgatatgcaggagatcaacgcgtttcaactgcgctataacgccttttttcagccggaagagggtgtccactggctgcattga

SEQ ID NO: 371000 - DNA, 1392 bp, Salmonella enterica
atgctggccttcttaaaccaggtgcgcaagccgaccctggatctgccgctcgatgtgcggcgtaaaatgtggttcaagccgttcatgcagtcctatctggtggtttttatcggctacctgaccatgtacctgatccgcaaaaactttaacatcgcgcagaacgacatgatttctacctacgggttgagcatgaccgagctggggatgattggcctgggcttctcgatcacctacggcgtggggaaaacgctggtttcctactacgctgacggtaaaaataccaagcagtttctaccgtttatgttgatcctctccgctatctgtatgctcggcttcagcgccagcatgggcgcggggtcaaccagtctgtttctgatgatcgctttctatgccctgagcggtttcttccagagtaccggcggatcgtgcagctactcgaccatcaccaaatggactccgcgtcgtaaacgcggcacctttctcggcttctggaatatctcccacaacctcggcggcgcgggcgcggcaggcgtggcgctgttcggcgccaactacctgttcgacggtcacgtcatcggcatgtttatcttcccgtcgattatcgcgctgattgttggctttatcggtctgcgttttggcagcgactccccggagtcttacggtctgggcaaagctgaagaactgttcggcgaagagatcagcgaagaggataaagagactgaagaaaacgaaatgaccaagtggcagatctttgttgaatatgtgttgaaaaacaaagtgatctggctgctgtgtttctccaatatcttcctgtatgtggtacgtattggtatcgaccagtggtcaaccgtctacgccttccaggaactgaaactttcaaaagaggtggcgattcagggctttaccctgttcgaagtgggcgcgctggtcggcacgttgctgtggggctggctctctgacctggcgaacggtcgtcgcgcgctggtagcctgtgtggcgctggcgttgatcatcgccaccctcggcgtctaccagcacgccagcaaccagtatgtctatctggcctcgctgttcgcgctcggtttcctggtgtttgggccgcagctattaattggcgtggcggcagtcggtttcgtaccgaaaaaagccatcggcgctgcggacggtatcaaaggaaccttcgcttatcttatcggcgatagctttgccaagctgggtctgggcatgattgccgacggcacccccgtttttggtctgaccggctgggcgggcaccttcgccgcgctggacgccgccgcgatcggctgtatctgcctgatggcgatggtcgccgtgatggaagagcgcaaaatccgccgtgagaaaaaaattcagcaagtcaatatcgcttaa

SEQ ID NO: 371001 - DNA, 1329 bp, Salmonella enterica
atgctttcgtttttaaaagccccggccaacgcgccgctcatcaccgataagcacgaggttgacgcccgctatcgctactggcggcggcatatcctgatcaccatttggttgggttacgcgctgttctatttcacccgtaaaagctttaacgccgccgcgccggaaatccttgccagcggcattctgacccgcagcgatatcggcctgctggcgacgctgttttacatcacctacggggtgtcgaaatttgtctccggcatcgttagcgatcgctctaacgctcgctattttatgggcatcgggctgattgcgaccggcgtagtgaatattctgttcggcttctcgacctcgctgtgggcctttgcgctgctatgggcgctgaacgcctttttccaggggtttggatcgccggtttgcgcccgtttgctgactgcctggtactcgcgtaccgagcgcggcggctggtgggcgttatggaacaccgcgcacaatgtcggcggggcgctgatccctctcgttatggccgctgtcgccctgcattatggctggcgcgtcgggatgatggtggccggattgcttgccatcggggtgggcatggtcctctgctggcggctgcgcgaccgtccgcaggcgattggtttaccgccggtaggcgactggcggcacgatgcgctggaggttgcccaacagcaagagggcgcggggctaagccgcaaagaaatcctcgctaaatatgtgctgttgaatccctatatctggctgctttcgctatgttatgtcttagtgtacgtggtgcgcgcggcgatcaacgactggggcaacctgtatatgtccgagacgctgggcgtagatttggtcacggccaacacggcagtatcgatgtttgagctgggtggatttatcggcgcgctggtggcgggctggggctcggacaaactcttcaacggcaaccgcggaccgatgaatttaatcttcgccgccgggattttgctctctgtgggttcgctgtggctgatgccgttcgccagctacgtgatgcaggcggcctgtttcttcaccaccggtttctttgtcttcggcccgcagatgctcattggcatggcggcggcggagtgctcgcataaagaggcggcgggcgcggccaccggctttgtcggcctgttcgcctatctcggcgcgtcgctttccggctggccgttagcgaaagtactggagatctggcactggaccggtttttttgcggtcatcgccatcgcggcggggatctctgcgctattgctgctgccatttctgaacgctcaggccccgcgcgagaccagcgaagcgtga

SEQ ID NO: 371002 - DNA, 1503 bp, Salmonella enterica
atgaacacctttttttcccgtttaatcaccgttgttgcctgcttttttatcttctccgccgcgtggttctgcctgtggagtatcagcctgcatctggtagagcgcccggagctggcggcgctgctctttcccttcggcctgcgcctggggcttatgctgcaatgtccgcgcggatactggccagtattgctgggcgcggagtggctgctggtgtactggttagcgcaggaagttgcgctggcccatctgccgcttttgatgatcggtagtgtgttgacgctactgcccgtggcgctaacctcacgttaccgccatcagcgcgactggcgcacgttattgcttcagggcgcggccctcaccgccgcggcgctactgcaatccctgccctggctggggcagggggaagcggcatggaacgcgctactgctgaccctcacgggtggtctgacgctggcccccatctgcctggttttctggcactatctcaccagcactacctggctgccgctgggaccatcgctggtatcgcagccggtaaactggcgcgggcggcatctgatctggtatctgctgctgtttatcgtcagtctgtggctgcaactgggtttacctgctgaactttcgcgcttcacgccgttctgcctggcgttgccgattatcgcgctcgcctggcattatggctggcagggcgcgctcattgccacactgatgaacgctatcgcgctgatcgccagccagacctggcacgatcatcccgtcgatttattactttcgctgttggcgcaaagcctgaccgggctactgcttggcgcgggcattcagcgcctgcgcgagctgaaccagtcgttgcaaaaggagctggcgcgcaaccatcggctggcggagcgtcttctggagaccgaagagagcgtgcggcgcgatgttgcgcgtgagctgcacgatgacatcggacagaccatcaccgcgattcgaacccaggcgggcattgtgcaacgactggcggcggataacggcggcgtgaagcagagcgggcaacttatcgagcagctttcgctgggcgtgtatgacgccgtgcgtcgcctgctggggcgcttgcgcccgcgccagttagacgacttaacgctggcgcaggccatccgttcgctgctgcgcgaaatggagctggaaagccgcggtattgtcagtcacctcgactggcgaattgacgaaacggcgctgagtgaaagtcagcgcgtgacgctgtttcgcgtctgtcaggaagggctgaataacatcgtaaaacatgccaatgccagcgcggtgacgctccagggctggcagcaggatgagcggctgatgttggtgattgaggatgacggcagcggcctgccgccgggctctcaccagcagggcttcggcctgaccggaatgcgcgaacgcgtgtcggcgctcggcgggacgctaaccatctcttgtacccacggtacgcgggtgagcgtctcgttgccccagcgttacgtttaa

SEQ ID NO: 371003 - DNA, 591 bp, Salmonella enterica
atgatcaccgttgcccttatcgacgaccaccttatcgtccgctccggctttgcacagctactggggctggaacctgatttgcaggtggtcgccgagtttggttccgggcgcgaagcgttggcaggcttaccggggcgcggcgtacaggtgtgtatctgcgatatctcgatgccggatatttccggactggagctgctaagccaactgccaaaagggatggcgacgatcatgctctcggttcacgatagcccggcgctggtggaacaggcgttgaacgccggcgcgcgcggtttcctctctaaacgctgtagtccggatgagctgatcgccgcggtgcatacggtggcgacgggcggctgctatttgacccccgatattgccgtgaaactggcggcgggtcggcaagatccgctgaccaaacgcgagcgtcaggtggcggaaaaactcgcccagggtatggcggtaaaagagattgccgccgaactggggctgtcgccaaaaacggtgcatgtccatcgcgcgaatctactggaaaaattaggcgtcagcaatgacgttgaactggcgcatcgcatgtttgacggttggtaa

SEQ ID NO: 371004 - DNA, 1014 bp, Salmonella enterica
atgacaatacgtattacattatggcgggagctttttagcgagcagccgcgtatcttgctggaaaatgacgattttacggttacggcgtttcgttacgccagcggcgtggaaggattgaaaatacaaaacagccgcggtcatctggtgattctgccctggatggggcagatgatttgggacgcgcagtttgacggtcatgacctgactatgcgcaacatgttccgccagccgaagccggctgcggaagtggtggcaacgtatggttgctttgctttccattccggactattggcgaatggctgcccgtcgccggaagatacacatccgctgcacggcgagatgccctgcgctgctatggacgacgcctggctggagttagagggcgacagtctgcgcgtgaccgggcgctacgagtatgtgatggggttcggtcatcattatcaggcgcaacctgcggtggtaatgcgtaaatcaagcgcgctgtttgatattcagatgaccgtgactaacctggcttcagtcgccatgccgctacagtacatgtgccacatgaactatgcctatgtgccgaacgccacgttccgccagaatatcccggataccgcgctgaagctacgcgagtcggtgccggcgcatgtcaaacccacggcgcagtggctggcgtttaatcaacggcttttgcagggtgaagcctcgctggcaacgcttaacgagcctggcttttatgacccggaaatcgtgttcttcgccgatgaactggacagatacacggataccccggaattcagtatgatcgccccggatggcaccacgttcgtgacacgtttcgccagcgcggagctaaattacgtgacccgctggattctttataacggcgatcagcaggttgccgcctttgccctgcccgcgacctgtcggcctgaaggttttctcgcggcgcagcgaaatggaaccttgcttcaactggaaccgcagcaaacccggacgttcaccgtcacgacaggcattgtctga

SEQ ID NO: 371005 - DNA, 1317 bp, Salmonella enterica
atgaacgataaaaacatcgttcagatgcccgacgggtatctgaataagacacctctgttccagtttattttgttatcctgtttattcccattatggggatgcgcagccgcgttaaatgatattctgattacgcaatttaaaagtgtattttcgctgagcaactttgcttcggcattagtacaaagcgccttttatggcggttattttttaattgctattccggcctcgctggtcattaaaaaaaccagttataaagtggcgatacttatcggcctgacgctatacattgtcggctgtacgctctttttcccggcgtcgcacatggcgacctacaccatgttcctcgcggcgattttcgccattgcgattggcctgagtttcctggaaacggcggcgaatacctacagttcgatgatcgggccgaaagcctacgccacgctgcggctgaatatcagccagaccttttatccgatcggcgcggcggcaggaattttattgggtaaatatctggtcttttccgaaggggaaagcctggaaaaacagatggcgggcatgaatgccgagcaagtccacaacttcaaggtgctgatgctggaaaacactctggaaccctataagtacatgattatggttctggtagtggtgatggtactgttcctgctgacgcgtttcccgacctgtaaagtcgcgcaaaccgcgagtcataaacgcccctcggcgctggatacgttacgctatctcgccagcaacgcccgtttccgtcgcggtattgtggcgcagttcctgtatgtgggaatgcaggtggcggtctggtcgttcactatccgtctggcgctggagttaggcgatatcaatgagcgcgatgcctcaacctttatggtctacagcttcgcctgcttttttatcggcaagtttatcgccaacattctgatgacacgctttaacccggaaaaagtcctgatcctttactctgtgatcggcgcgctgttcctggcctacgtggcgctggcacccagctttagcgcggtatacgtggcggtgctggtcagtgttctgtttggcccctgctgggcgaccatttatgccggaacgctcgataccgtcgataacgagcataccgaaatggcgggggcggtcatcgtgatggcgattgtcggcgcggcggtggttcccgcgattcagggctacgtggcggacatgttccactcgctacagctctcattcctggtttccatgctgtgctttgtttacgttggcgtttacttctggcgcgaaagcaaagtgcgcggcaacctggctgaagtcgccgcgtcctga

SEQ ID NO: 371006 - DNA, 921 bp, Salmonella enterica
atggatatcgcggttattggctctaacatggtggaccttatcacctacaccaaccagatgcccaaagaaggggaaactctggaagcgccggcgtttaaaatcggctgcggcggaaaaggggcgaaccaggccgtggcggccgctaagctcaattcaaaagtattgatgttgaccaaagtgggcgacgatatttttgccgacaacaccattcgtaatctcgaatcctgggggatcaatacgacgtatgtagaaaaagtaccgtgtaccagcagcggcgtagcgccgattttcgtcaacgccaactccagcaacagcattctgatcatcaaaggcgccaacaagtttctctcgccggaagatatcgatcgcgcggcggaagatttaaaaaaatgccagcttattgttctgcaactggaagttcagcttgaaacggtttatcacgcaatagaatttggcaagaaacatgggattgaagtgttattaaaccctgcgccagcattacgggaattagatatgtcttatgcctgtaaatgcgatttctttgtacccaatgaaaccgagctggaaatattaaccggtatgccagtggatacctatgaccatattcgcgcagcggcacgttcgctggtggataaagggctgaacaatattatcgtcaccatgggtgagaaaggcgcgctgtggatgacgcgtgaccaggaagtccatgtcccggcgtttagagtgaacgctgtcgataccagcggcgcgggcgatgcctttatcggctgtttcgcgcattactacgtccagagcggggatgtggaagccgccatgaaaaaagccgtcctctttgccgctttcagcgtcaccgggaaaggcacccaatcctcttatccaagcattgaacaatttaatgagtatctttcgttgaacgaataa

SEQ ID NO: 371007 - DNA, 786 bp, Salmonella enterica
atggagaccaagcaaaaagaacgtatccgacgcttgatggagttactgaaaaagaccgatcgaatccatctgaaagacgccgcgcggatgctggaagtttcggtgatgaccattcgccgcgatctcagccaggatgatgaccctttaccgctgacgctgctcggcggctatatcgtcatggtaaataagcctgcgtcttcaaccaatatgccgctgccggcgaaaaagacgcatcatcgggacgaccttcccgttgcgatcctggccgccggcctggtgcgtgaaaacgatctggttttttttgataacggtccggaaatgccattagttatcagcatgataccggatgatattacctttaccgggatttgctactcgcatcgggtatttatcgcgctgaatgaaaagcctaatgccacggcgattctgtgcggcggcacctatcgggccaagagcgatgccttttatgatgccaataatccttcggcgctggattcgctcaatccgcgcaaagtgtttatttccgccagcggcgtacatgaacattttggcgtgagctggtttaacccggatgatcttgccgccaaacgtaaagcgatggaacgcggtctgcgcaaaattttgctggcgcgtcacgccctgtttgatgaggtcgcgcctgccagcattggtccgctttctgcctttgatgtcctgattagcgatcgcccattaccgacagattatgccgttcactgtcggaatggttccgtcaaagtcatcacgcctgattcggaaagtgaataa

SEQ ID NO: 371008 - DNA, 291 bp, Salmonella enterica
atgcagaaacaatcacatgataacgttattctggagctgaccgttcgcaaccatcctggcgtgatgacccacgtctgcgggctgttcgcccgacgcgctttcaacgttgagggtattctctgtttaccgattcagggtagcgatcagagccgcatctggcttctggtcaatgacgatcagcgacttgaacagatgatcagtcagatcgataaactggaagacgtggcgaaggtggtacgaaaccagtccgatcccaccatgttcaataaaattgccgtcttttttgagtaa

SEQ ID NO: 371009 - DNA, 1689 bp, Salmonella enterica
atggcaagttcgggcacaacatctacacctcagcgctttacgggcgcggaatttattgttcattttctggagcgccaggggattcgtatcgtcaccggcattcccggcggttcgatcctccccgtttacgacgcgttaagccaaagcacgcaaatccgtcatattctggcgcgccatgaacaaggcgcggggtttattgcgcaggggatggcgcggacggagggtaaacctgctgtttgtatggcctgtagcgggccgggcgcgaccaatctggtcacggccattgccgatgcgcgcctggattctattccgttaatctgtattaccgggcaggttccggcgtccatgatcggtactgacgcgtttcaggaagtggatacctacggtatctctatccccatcaccaagcacaactatctggtcagaaatatcaacgagctgcctcaggtgatgagcgatgcttttcgtctggcgcagtcgggacgtcccggcccggtgtggatagacgttcctaaagatgtgcagacggcgacaattgagctggatgcgttgccgtcgccggcggaaaaatcacccccgccggagtttagcgcggagagtatccgcgaggccgccgcaatgattaacgcggcgaagcgtcctgtgctgtatctgggcggcggcgtgatcaatgcgccgacacgcgtgcgcgaactggcggaaaaagcgcaactgccgacgacaatgaccttaatggcgctgggaatgctgcctaaggcgcatccgctgtcgttaggaatgctggggatgcacggcgcgcgcagtaccaattttattctgcaagaggccgatttactgattgtcctgggcgcgcgttttgatgaccgggcgattggcaaaacggagcagttttgtccgaacgccaaaatcatccatgtggatatcgatcgcgccgagttaggcaaaattaagcagccgcatgtggctattcaggcggatgtcgatgatgtactggcacagttaattccccatatcgaggcacagccgcgggaagcatggcatcagttggtggcggacttgcagcaagaattcccttgcagtattccccaggaaaataacccgcttagtcactatgggctgattaacgcggtcgccgcctgtgtggacgacaacgcgattattaccactgacgtaggtcagcatcagatgtggaccgcgcaggcttatccgctcaaccgtccgcgtcagtggctgacttccggcgggctgggcaccatggggtttggtctgcccgcggcgattggcgcggcgctggcgaatccgggcaacaaggtgctgtgtttttccggcgacggtagtttgatgatgaatattcaggagatggctaccgccagtgaaaaccagttggatgtgaaaatcatcctgatgaataacgacgcgctgggactggtacatcagcaacagagtctgttctataaacagggcgtttttgcggcgacctatccgggaagcatcaactttatgcagattgccgccgggtttggtctggacacctgtgatttgaataacgaagccgatccgcaggcggcgttgcaggctatcattcgtcgtcctggaccggcgttgatccatgtgcgcattgatgcagaagaaaaagtgtatccgatggtgccgccgggcgcggcaaatacagagatggtgggggaataa

SEQ ID NO: 371010 - DNA, 834 bp, Salmonella enterica
atgaccctttccgttttctgcattttgctgttcgccgcgctgctacatgccagctggaacgccattgtcaaagcgggaaacgataagctctacgccgcgatcggcgtcagcggttccgcggcggtcatggcattgatccttttgcccttctcgccgcagccagctcacgccagtatcccttttttagcggcctctaccgcgctccaggtggtgtataccgtcctggtggcgaaaacctatcaggtctcggacatgagccagacctatcctcttatgcgcggcaccgcgccgctgctggtggcactcattagcgttctgtttcttggcgacagcctgtcgtcgatggcctgggtcggcatcgcagtgatctgcatggcgatacttgggatggcctgtaatggccgcgccagctctcaacgtggtgtcgtgctggcattaactaacgcctgttttattgccggatatacgctggtggacgggaccggcgtaagactctcagaaacggcgctgggctatacgctatggtcattttttctcaacggcgcctgcctgttaacctgggcgatgattgcgcggcggcgggaagcgtcgcgttatctggcgcaacagtggaaaaaaggcatttttggcgggattggcactatgggatcttatgggctggcgctatgggccatgacccaggcgccgctggcggtggtcgccgcgctgcgtgagacgtcgattttattcggcgcgctgatagcctggctgttgcttaaagagaaagtggccgggctacgtctggtggcggcaggcgggattgccctcggggcgattttactccgtctgtcatga

SEQ ID NO: 371011 - DNA, 1185 bp, Salmonella enterica
atgaaaaggcagagaaacgtcaatttgttgttgatgttggtgttactggtggccgtagggcagatggcgcaaaccatttatattcccgccatcgccgatatggcacaagcgctaaacgtccgggaaggcgccgtccagagcgtaatggctgcttacctcctgacctacggcgtctcgcaactgttttacggcccgctttccgaccgggttgggcgccgccccgtaatcctcgtcggcatgtctatttttatggtagcgaccctgttcgccatgaccacgcatagtttgacggtgttgattgccgccagcgccatgcaagggatgggaaccggcgttggcggagtaatggcgagaacgctcccgcgcgatctgtatgaaggaacgcaacttcgtcacgccaatagcctgttaaatatggggattctggtcagcccgctgttagcgccgctgattggcggtctgctggacaccctgtggaactggcgcgcgtgttacgctttcctgctggtgctttgcgctggcgtcaccttcagcatggcgcgctggatgccggaaacccgccccgccgccgcgccgcgtacgcggctgatcgccagctataaaacgctgtttggcaacggcgcatttaactgttacctgctgatgctaatcggcgggctggctggcattgcggtctttgaagcctgttccggcgtgctgatgggagcagtattaggtctcagcagtatggtggtaagcattctgtttattctgccgattccggcggcgttcttcggcgcctggtttgccggacgcccgaataaacggttctcagccctgatgtggcagtcagttatctgctgtctgctggcaggccttatgatgtggattcccggctggtttggcgtgatgaacgtctggacgctactcatccccgctgcgctgtttttcttcggcgccgggatgttatttccactggccaccagcggcgcgatggagccgtttccgttcctcgcaggcaccgctggcgcgctggtcggcgggctgcaaaatattggttccggcgtactggcgtggctttcggcaatgttgccgcaaaacggtcagggcagtctgggactgttgatgacccttatgggattgctgatcctggcgtgctggctgccgctggcgtcacggatatcgcatcagggacagacggtttaa

SEQ ID NO: 371012 - DNA, 1062 bp, Salmonella enterica
gtgtttaaaccgcttattgcctctctcatgctgaccagcgcggtcgtctatgcgaaaccgatgcctttgacggcggcgcgctatgcgcagcagcttggcgttgggatggatgttgactgggcgcgaacggaacggggtattcgtgagtttgatccgttggtcgtgcgggattttaaggcaaaagggttaacgcatgtccgtattcgtgtggcaggcgcgccgacggaagcgcgcctcatccatttgcgtaagctggtagaagcctgcgaatactatggcgtcatacccattattgcctatcaggcggatgcgtataaaaccgatcccagcgccagccatgaaaaggagctgatcaactggtggagcgtggtcgcgcgctattttggccagacatccccgcttctggggttcgatctcatttatgagcctgccgacaaacttaatcataatatggcgtcgctgaatcgcgtatatgacaaaaccatccgcctgattcacgccattgatccacagcgtatgattttcgttgccccccgcatgcgcgccgcgccggaggatttgtcggcgcttaaactgccggcgcaaagccagaactatgtactggcggagtggcacatcttcccgtggggccccctgaaaagcggcggtaaatatccgtggacatcaggcacggcggcggaaaaagcggcgattcgggcacggattaatgccgcggttcgctggcagcataagaccggccatgcaagctgggtgggcggatgggcgccgggagagtcgataaaaatgacgccggtcgcttcacagttcgcgtttgcccgttttatggcctgcgagctgaaaaaagcgcatatcccgtatgcgataaacgcggatactcagttttatgacggcgaagaaggagcgtggcgtccggcgcaggagcccctgctcaatgcgatgatcgcgccggaatgtgaaacgcccggcaaaaagccgggcgaggggaacgttaaaccgtctgtccctgatgcgatatccgtgacgccagcggcagccagcacgccaggatcagcaatcccataa

SEQ ID NO: 371013 - DNA, 924 bp, Salmonella enterica
atggaaccccttcgcgatacccgaaaccgcttactcaacggctggcagttatccaaactctatacttttgaagtcgcggccagacaccagtcctttgctctggcggcagatgagctgtcgttaagccccagtgcggtaagccatcgtatcaatcaactggaagccgagttgggaatccagctatttgtccgctctcaccgtaaagtggagcttacccatgaaggcaaacgggtattctgggcgctgaaatcgtcgctggatacgttgaatcaggaaatcctcgatatcaaaaatcaggaactgtccggcacgctgaccgtgtattcccgtccctctatcgcccagtgctggctggtgcccgcgctgggggactttacccgtcgctatccgtcaatttctcttactatgctgaccggcaacgataacgttaacctacagcgtgccggcattgacctggctatctattttgacgatgcgccgtcggcgcagctcacgcaccattttttaatggatgaggcgattttgcccgtttgcagcccggattacgcccgtcgtttcgccttgcaggacaacctgaataacctgcggcactgtacgctcttacacgacagacaggcgtggagtaacgattctggcaccgatgagtggcacagttgggcgcagcattttgcggtaaatttgccggattcatccggcattggcttcgatcgttctgatttagcggtgattgccgcgatgaaccacattggcgtggcgatggggcgtaaacggctggtgcaaaagcgtctcgacagcggcgaactgattgcgccttttggtgacatgaggctgaaatgtcatcagcattattatgtcaccactctgcctggcaggcagtggccgaaaatcgaggcatttattcgctggttgcaggaacaggtgtga

SEQ ID NO: 371014 - DNA, 1338 bp, Salmonella enterica
atgcacgctcaaatctgggtagtgagcacgctgctgatcagcatcgtgttaatcgtattgaccatcgtgaagtttaaattccaccccttcctggcgttactgctcgccagtttctttgtcggcgcgatgatgggcatggggccgctggagatggtcacggcgatagaaaacggaataggcggtacgctcggttttctggccgccgttatcggtcttggcaccatcctcggcaaaatgatggaggtttccggcgcggcggaacgcatcgggcttacgctccagcgctgccgctggctctctgctgacgtgatcatggtactggtggggctgatttgcggtatcacgttgttcgtggaagtgggcgtcgtgttgctcatcccactggcgttttctatcgctaaaaagacccatacctcgctgctgaagctggccattccgctgtgtaccgcgctgatggccgtccattgcgtggtaccgccgcatccggctgcgctgtttgtcgcaaataaactgggggcggatatcggctcggtgattgtctacggtctgctggtcggactgatggcctcattggtcggcggcccgctgttcttaaagtttctgggtaatcgtctgccgttcaagcccgtaccgacagagtttgcggatcttgaagtgcgcgccgaaaacaccctgccgtcgctgggcgcaacgctgtttaccgttctgctgccgattggcctgatgctggtgaaaaccgtcgctgaactgaatatggcgaaagacggcacgttgtatacgctgctggagtttatcggtaatccgatcaccgcaatgtttatcgctgtctttgtggcgtattacatactcggtctgcgccagcatatgggtatgaacgcgctacttacccacaccgaaaacggctttggcgccattgcgaacatcctgctgattatcggcgcgggcggcgcgttcaacgccattctcaaaagtagcgggctggcggacacgctggcggtgatcctctcaaatatgcatatgcacccgattctgctggcgtggctggtagcgctgattctgcacgcggcggtcggctctgcgacggtggcgatgatgggcgccaccgcgattgttgcgccaatgctgccgctctatcctgacgtcagcccggagatcatcgctattgccatcggttccggcgccattggctgcacgatcgtgaccgattccctgttctggctggtcaagcagtattgcggcgctacgctgaatgaaacgtttaaatactatacgacggccacgtttatcgcatctgtcgttgcactggctggcacattcctgctttcctttatcatctga

SEQ ID NO: 371015 - DNA, 1323 bp, Salmonella enterica
atggaaaacatacaaaagctcatcgcccggtatcctttggtcgaggatctggtcgccctcaaagaaaccacctggtttaacccgggcgccacctctcttgcacaaggtctaccgtatgtcggcctgacggagcaggacgtaaacgccgcccatgaccgtctggcgcgctttgcgccgtatctggcgaaagcgtttccgcaaaccgctgccgctggcggcatgatcgaatctgacgtggtcgctattccggccatgcaaaagcggctggaaaaagagtatgggcaaacgatcgacggtgaaatgctgttaaaaaaagacagtcacctggcaatctctggttccattaaagcgcgcggcggcatctacgaggtgctaacgcacgcggaaaaactggcgctggaggcgggtctgttaaccaccgacgatgactatagcgtgttgctttcgccggaatttaaacaattcttcagccagtacagtatcgccgtcggttcaaccggcaatctggggctatcgatcggtatcatgagcgcctgcatcggttttaaagtgacggtacatatgtctgccgacgcccgcgcctggaaaaaagcgaagctgcgtagccacggcgtgacggtcgtggaatacgaagatgattacggcgtggcggttgagcagggccgtaaagcagcgcaatccgatccaaactgtttctttatcgatgatgaaaactctcgcacgctatttctgggctatgcggtagcgggtcagcgtctgaaagcgcaattcgctcaacagggacgcgtcgttgacgccagtcacccactgtttgtttatctgccgtgcggcgttggcggcggccctggcggcgtcgcctttggcctgaaactggcgtttggcgacaacgtccactgtttctttgccgaaccgacccattcaccctgcatgttactcggcgtttataccggtctgcacgatgccatctcagtacaagatatcggtattgataacctgacggcggctgacggcctggcggtaggtcgcgcttcgggctttgttgggcgggcaatggagcgtctgcttgacggcctttataccttagacgatcaaacaatgtatgacatgctgggctggctggcgcaggaggaaggaattcgactggagccatcagctctggcggggatggccggaccacagcgcatttgcgccgccgccgcgtatcagcaaaggcatggattcagtcagacgcagctcggcaacgcgacgcatctggtatgggcaaccgggggcggcatggtgccggaagatgaaatggaacaatacctggcaaaaggacgctaa

SEQ ID NO: 371016 - DNA, 531 bp, Salmonella enterica
atgacaggacgtcaggacattgtcgtgagtgatgaccagattcaggtcgtcgtaaatcgccagaatagccagcgccctcagcaactgtaccgtaacttacaacggctcggcattcgcaatgtccattttatcccattgttggaacatgaccggaacggaatgttgaccgaggattcattgtgttcagcagactgggggcggtttttaaatagcgtatttgatatttgggtacgtgaagatattcagcgtatctcggtccgcctttttgatgagacgctacagcagtggtgcggcggcaggaatggcgctgaagcgccggacaaggtgccgctaagcgctgaatgtcagaagtgctctttattacgattttgcggcggcggatgccctgagcatcgggatagccaggggaaaaatcagctttgcgagggctaccagaccttttttaactactcctcgccgcatatgcgggtgatgcgggatttactgaagcagcatcgctcgccggaggagttgatggcgatgctgcgttaa

SEQ ID NO: 371017 - DNA, 363 bp, Salmonella enterica
atgccggatagtcgtaaagcccgtcggcagaacgatccgggactgcaaccggagcgtacgtcgctggcctggtttcgcacgctgctgggatacggggcgttaatggcgttagccgtcaggcaccactggcatcaggcggggttcttgttctgggtgtcaatcagcgttctggcgatagtggcggtgattctttggcgttataccctgagtcgtaatttgatggatgtcgcgcatagcgatttttccgaaactcatgtcatgcgtgacaaatttttgatctccctcgcggtgttgtcgctcgcaatcctgtttgctgttacccatattcgccaacttattgcatttatcgggaattttatatga

SEQ ID NO: 371018 - DNA, 348 bp, Salmonella enterica
atgaagatttcccgcctcggagaagcgccggattatcgcttctcactggcaaatgagcgcacctttctggcgtggattcgcacctcgctgggatttctggcggcaggcgtcggtcttgatcagctcgccccggattttgccacgccggtgatccgtgaactgctggcgctattgttgtgtctgtttgcgggcggcctggcgatttatggctatctacgctggttacgtaatgaaaaagcgatgcgcctgaaagaggatttgccctatacccatagcctgttgatcatcagcgttattttgatgattgtcgcggtgatagtgatggggctggtactgtatgccggatag

SEQ ID NO: 371019 - DNA, 1662 bp, Salmonella enterica
atgagtgatatcgcattgacggtcagcgttctggcgttggtggcggttgtcggtttatggatcggcaacattaaagtgcgcggtgtcggctttggtattggcggcgttctgttcggcggtattatcgtcggccacttcgtcgatcaggctggggtgacgctgagcggcgatatgctgcactttatccaggaattcggcctgatcctttttgtttataccatcggcatacaggtggggccggggtttttcgcctcgctgcgcgtttccgggctgcgtctcaatctgtttgctgttctgattgtgattatgggcgggttggtcaccgcgattctgcataaaattttcgctattccgctgccagtggtgctggggattttctccggcgcagtcaccaatacgcctgcgttaggggcgggtcagcaaatcctgcgcgatctgggaacgccagtggatctggtagatcagatggggatgagctatgcgatggcgtatccgtttggcatctgcggtattttgctcaccatgtggctgatgcggctgatttttcgcgttaacgtcgaggcggaggcgcagaagcacgaatcctctctcgctaacggccattcattaattcagacaatgaatatccgtgtcgagaatccgaacctcaataatatggctatccaggatgtgccgatcctgaacagcgataaaatcatttgctcacgcctgaaacgcgatgacacgctgatggtgccgtcgccggggacgattatccaggcaggcgacctgctgcacctcgtcggccaacctaccgacctgcataacgcgcaactggtgatcggtaaggaagtggacacctcgttgtcgacgcgtggcacggatttacgcgtcgagcgtgtggtcgtcaccaacgaaaaagtgctcggcaaacgtatccgcgatttgcactttaaagagcgttatgacgtggttatctcccgccttaaccgcgcgggcgttgagctggtcgccagtagtgacgctagcctgcagtttggcgacattctcaatctggtggggcgtccagcctcgattgatgcggtagccaatgtggtcggcaacgcgcagcaaaaactccagcaggtgcagatgctgccggtgtttatcggcatcggattaggggttctgcttgggtcaatcccgttgtttgtgccgggattcccggtcgcgttaaaactggggctggctggcgggccgctgatcatggcgctaattttggggcgtatcggcagcatcggtaagctgtactggtttatgccgccgagcgccaacctcgcgctgcgtgaattaggcatcgttttgtttctggcggtcgttgggctgaaatccggcggcgattttgtcgatacgctgacacagggcgaaggattaagctggattggctacggtattttcatcaccgctattccgctgattaccgtcggtttgctggcgcgaatttttgccaaaatgaactacctgacgctgtgcgggatgctggccggttcgatgaccgatccgccagcgctggcatttgccaacaatcttcatgccaccagcggcgcggcggcgctctcttacgcgaccgtctatccgttagtgatgttcctgcgtattatcacgccacaactgctggcggtgattttttggggaatgggttag

SEQ ID NO: 371020 - DNA, 429 bp, Salmonella enterica
atgcgtaactacgatttatccccactgctgcgtcaatggatcggttttgacaagctggccaatgcgctgcaaaacagcggcgaaagccagagcttcccgccctataacatcgaaaaaagcgacgataaccattatcgcattaccttagcgttagccggtttccgtcaggaagatctggatattcaactggaaggcacgcgcctgacggtgaaaggtacgccggaacagccggaaaacgagcccaaatggttacatcagggcctggtcatgcagccttttagcctgagctttacgctggctgagaatatggaagtttccggcgcgacgtttaccaacggcctgctgcatattgatttaacccgtaacgagccggaaaccattgcgccgcagcgtatcgccattaacgaacgctccgcattaaatagctaa

SEQ ID NO: 371021 - DNA, 414 bp, Salmonella enterica
atgcgtaactttgatttatccccgctgtaccgttctgccattggttttgaccgtctgtttaacctgcttgaaaataaccaaagccaaagtaatggcggctaccctccgtacaacgttgagctggtagacgaaaaccactaccgcatcgccattgccgttgccggtttcgcggaaagcgaactggagattactgcccaggataatttactggtggtaaaaggcgctcatgcggacgagcagaaagaacgtacttacctgtatcagggcattgccgagcgtaactttgaacgtaagttccagttagcggagaacattcacgttcgcggcgcaaacctggtcaacgggctgctgtatatcgaactggagcgcgtgattccggaagcgaacaaaccgcgccgtatcgaaattaactga

SEQ ID NO: 371022 - DNA, 291 bp, Salmonella enterica
atgcttttattaggcggttgttcaagcgtcatgtcgcacaccggcggtaaagagggtacttatcctggcacgcgcgccagcgctacgatgatcggtaacgatgagacaaactggggcaccaaatcgttggccatcctggatatgccgtttaccgccgtgatggatacgatccttctgccgtgggacatcttccgcaaagacagttcggtaagatcgcgcgtcgagaaaagcgaggaggagacgaaaatgaccaatgccgtcatccccccggcgaagatgcctcctccctga

SEQ ID NO: 371023 - DNA, 1227 bp, Salmonella enterica
atgaaacaaatcacctttacgccgcgccatcaccagcttaccaacaccaatacctggacacctgacagccagtggctggtctttgatgtgcggccttcaggcgcgtcatttacgggcaagactattgagcgtgtcaatgtgcataccggcgacgtggaggtgatttatcgcgccgtgcagggcgcgcatgtcggcgtggtgacggtgcatcctgccgacaaccactatgtgtttattcatggccctgaaaaccctgatgagacgtggcattacgattttcaccaccgccggggcgttattgcaacgtcggagggtgtgactaacctcgatgcgatggatattactgcgccgtatactcccggcgcgctgcgcggcggcagtcacgtccatgtgtttagcccgaacggcgagctggtgagttttacctataatgaccacgttctgcatgagcgcgatccggcgctggatctgcgtaatgtcggcgtggccgcgccgtatgggccggtaacggtgccggttcagcatccgcgcgaatacagcggtagctactggtgcgtactggttagccgcacgacgcctgcgccgagacctggcagcgatgacattaaccgcgcctatgaagagggctgggtgggcaaccgccagatcgcctttattggcgatacgctgtcgctgacgggcaaaaaagtcccggagctgtttattgtcgatttaccgtgtcatgaaaacggctggaaacaggcaggcgacacgccgctgacgggaaccgaatcaacgatgccatcgccgccgttgggcgtagttcagcggcgtcttacctttactcaccagcgtgtttatccaggactcactaacgaaccacgccactgggttcgcagtaatccgcaggcgacggcgatcgcctttttgatgcgggacgataacggcgtagcgcaactgtggctgatatcgccgcagggaggcgagccccggcagttaacgcatcatgcgaccggcgtacagtcagcgtttaactggcatccgtcgggtaaatggctgggactggtgctggaaaatcggattgcctgctgcgacgcacaaagtgggaagatcgacttcttaaccgccaggcacgacaacccgccgtctgcggacgccgtcgttttttcaccggatgggcgacacgtcgcatggatggaagaggtgaaagggttccgtcagctatgggtgacggaaaccgggcgataa

SEQ ID NO: 371024 - DNA, 375 bp, Salmonella enterica
atgatgagcattgaaatagagaaaccgaccacacgagggcgctggctgcatattattccagccacgatcctcgtttatatcgtggcctatatggacaggaccaatatcgccattgggatcgcaggcggcatggatgaagatttaggcatgacggcttcttttgccggtctggtcgccgggatcttctttattggttatatcttcctgcaaattcccggcggtcagatagccgagcggctaagcgccaaaaagttaattgcctggacaatcgtcgcctgggggggctttgccctgctgaccggttttgttcagacaccgacgcagttgttgattatccgctttgtgctcggcgtggcggaaggtgctgtgtactga

SEQ ID NO: 371025 - DNA, 1110 bp, Salmonella enterica
atggttactaccgcgatctttccgtcacgatatgttcagggtaaaggagcgttgacaacgcatctcccgcaggaattggccgcactcggtcataaggcgctgattttgcaggatcctgttgttcacaacacctaccgggatacagttgcaacagcactgcacggggtgattgaatttgatatcgaagtgttcagtagcgagtgcagtgatgaggaaattgctcgcatctccgcacgcgcgcaggaaattggcgccgatgtgattgttggtatggggggcgggaaaaccctgaatacggcaaaagcaaccggcgccagcctgcggctgcctattgccgtggttcctactctggcctcaacggatgcgccgtgcagttcactggttgttatctatacgccagaagggaaattcaaacgctacctgatgattccacgtaacccgacgcttgtgctggtggacagcagtattattgctgccgcgccggtacgctttttggtttccgggataggcgatgcgctggcaacctggtttgaagcggaagattgccgcatcaaaggggcaggcaatatgaccactaggccaggaccgatgaccgcatttgagctggcgcgcttttgctacaccaccttaatgcgctatgggcgcctggcgaagcttgcttgtgaacaacatcaggttactccggcgctcgaacatgttatcgaagcgaatacgctattatccgggctcggttttgaaagcggtgggctggcggcggcgcacgccattcataacggtctgacggtactgcccgccacgcacaaatactggcatggggaaaaggttgcgtttggcacgctggcaatgcttatgctcaccgatagagcgcctgagcttatcgaggaggtttatcaattttgtgaagatataggcttgcccaccacgctggcggatattggtctggctggcgttagcgatgatgaactgctggccgttgccagggcgtcttgtcaaaccggggaaacgatgcacaacgagccgtttaccattacgccggaggctgtgcaggcggcattgcgggccgccgatgctgttgggcaggcgcggaaaaagatcgatcttgcaggttaa

SEQ ID NO: 371026 - DNA, 1497 bp, Salmonella enterica
atgaaaaatgctaagtggctttttttgtcaatcatgatggcgtttatcggcgtgccgctgctggtgaacattattacgattatcgtggggggaatgtgggcgtacattagcgttcttgaaaatagtatccccatcgcgcaatctattgagaaggcgaccattatcccggtagcgcttctgggcgcggggttaatttttctctgtggccgaatatggggaaagggaaatgcatcagaggtaaatccagaatggcgtgattgctgcctgcttatgcccgctctggtggtgctgatggggtgggtcatcctgatgtttctcaccgatcttaatattcgcgcgatagggcgtaaacccatcgcccaggtggtgcaaacgctttggttagtacccagcgtaatatcctttttcaacggctgggtatgggcagtgttgctcatcccggttggctcgcagctctgttttgcattggggtatggcggtgcgcgttggggagtgctacgcggcggtgcgggctactcttgtcgtaatctgctggtgatttgcctgctgtttttcgggagctgtgccgtataccagtcacatctttatgccgtgaagtatcccgctcccgagagcagtgaatatctttatttccgcgattatcaggcgcacacatggggcaacaagctaaccgggctgcgcgatgaaccgacacttttgctcacccaaaattggccgcggctcgatggcgcaacggctggcttgccgttatacgcctcggctttttatgcgcttacgcgctttccggatgatatctgccctgaagactaccttgaaaaccagggaaccattgaagcctatcaaaatatccttaacggtaatgccgatcttatttttgtcgcccagccttccactgctcaaaagcaattggccgaggccagtggcgtaaaactggtttacaccccctttgcacgtgaagcgtttgtgtttatcgtcaaccaaaacaatcccgtgtcatcgttgagtgatgtacaaattcgcggcatttttagcggaagaatcacccactggaatgaggtgggcggagaggcaatcgacattaagccctggcagcgaccggaaaactctggcagccaaacggcgatgctggcgaaggtaatgaaagaaacgaagctgatgccagcgcaaacaacatcagtggcaaccgcgatgggggatatggtggatatcgtggctgagtatcgcaatacgcacaacgccattggctatacctttcgttattacgctacgcagatgcacagcaataaagagattaaattactggcgataaacgatgttgcgccgacggttgaaaatattcgtaacggcagttacccgtacacggttgatgtttatatggtcacccgtgaacaccccacagcggaaacacaaaagctggtggactggtttctaagcccgcagggacaacagttggtgcaggatgtgggatatgtgccgctgtatccggccgcgaaataa

SEQ ID NO: 371027 - DNA, 546 bp, Salmonella enterica
atggaagaggttaaattatatgtggaacgggttggcatagacccggccagcggcgctgatattcgtattgcacggcgtgaatccacttcgtggcataaagatattgttgctgagctgattaatcaggtcctccggtgtggtgcagcattaatcatcatcgctgtgctgaccgcctgcgatgatcgccaggtaagctattttcctgattatgccgccatacccgagcaatccggtatctggacctggctgcctgtgttctttccatcgtccgccagtgaaatagagatgacgtttaacctggacagcaatcttttttatgctgactttagcgtggccgacggtgataaacgcgcgcattttgaaagcgtgctgggggaggagagtgtggttcattatgccaacttttctcataaaagctggtgtaaaacggggaaaactctctggaatagcgaagcgcgggcaaaacccttctttattacccaaataagtgtcgatcgctaccgtatcactaatcatatgcccggctgtacaaaacccggcgagtga

SEQ ID NO: 371028 - DNA, 1509 bp, Salmonella enterica
atggaaaccaaagatctgatcgtgataggcgggggcattaacggtgcaggcatcgcggctgatgccgccgggcgcggtttgtccgtactcatgctggaagcgcaggatttggcctgcgcaacctcttccgccagttcgaaacttatccacggcggcttacgctaccttgagcactacgagttccgtctggtcagcgaagcgctggcagaacgtgaagtgctgttgaaaatggcgccgcacatcgccttcccgatgcgttttcgtctgccgcaccgcccgcatttacgtccggcctggatgatccgtatcggtctgtttatgtacgatcacctcggcaaacgtaccagtttacccggttccaccggtgtgcggtttggcgcagattcggtgctcaaaccggaaatcgtgcgcggattcgaatattccgactgctgggtagacgatgcgcgtctggtgctggctaacgcacagatggtggtgcgtaaaggcggcgaagtccttacccgtactcgcgcaaccgccgctcgtcgggaaaatggcctgtggattgtcgaagcggaagatatcgacaccggtaaaaaatatgtctggcaggcgcgcggactggttaacgccaccggaccgtgggtcaaacagttcttcgacgaagggatgcacctgccgtcgccatatggcatccgcctgatcaaaggcagccatatcgtcgtgccgcgcgtccataatcagaagcaggcgtatattctgcaaaacgaagataagcgtatcgtctttgtcattccgtggatggaagagttttcgatcattggcacgaccgatgtcgaatataaaggcgatccgaaagcggtaaaaattgaagagagcgaaattaattacctgttgaaggtttataacgcgcacttccagaaacaactggggcgcgatgacatcgtctggacgtactccggcgtccgtccgctgtgcgatgatgagtccgactcaccgcaggcgatcactcgcgattatacccttgatattcatgatgaaaacggcaaagcgccgctgctttccgtgtttggcggtaagctcacgacctaccgtaagctggctgaacacgcgatggaaaaactggcgtcttattatccaggcatcggcccggcatggaccaaaacgtgcgtactgcccggcggcgacatcgacggcagccgcgaagattacgcggcgaagctgcgtcgtcgttatccgttcctgacggaatcgctggcgcgccactattcgcgcacttacggcagcaacacggagtggattctcggcgaagccacgtcgctgcttgatttaggcgaagatttcggtcatgagttttacgaggcggaactcaagtacctggtggatcacgaatgggtgcgccgtactgaagacgctatctggcgtcgcaccaaagaaggcatgtggctgaccgccgaacagcagtcccgcatcacccagtggctggcggcgtatgttgagaaacaccaactttcaatggcgtcgtaa

SEQ ID NO: 371029 - DNA, 327 bp, Salmonella enterica
atggaacaatttgaatgtatcactgtagaagaggcgtatcagaaactgcaccagggcgcggcggtgctggtcgatattcgcgatccgcaaagttatgccatgggtcatgcgccgcaggcgtttcacttgactaacgatacgctgggcgcgtttatgcgtgagcatggtttcgataccgccgtgatggtaatgtgctatcacggcaacagtagtaaaggcgccgcgcagtatctgctccagcaaggctatgatgcggtttacagcattgacggcgggtttgaggcctggcatcgccgtttccctgccgatgtcgcgaatggcgcgtaa

SEQ ID NO: 371030 - DNA, 831 bp, Salmonella enterica
atgttgatgattacttcctttgcgaatcctcgcgtggcgcaggcatttgttgattacatggccacccagggcgtcattcttactattcagcaacataatcaaagcgatatctggttggcagatgaatcgcaggccgaacgtgtgcggggcgagctggcgcggtttatagaaaatcccggcgatccgcgttatctggcggctagctggcagtccgggcagactaacagcgggctacgctatcgccgttttccctttctcgccacgctgcgtgaacgagccggccctgttacctggatcgtgatgctcgcctgcgtgctggtctatatcgcgatgagtctcatcggcgatcagacggtgatggtgtggctggcgtggccgttcgatccggttttaaaatttgaagtctggcgctacttcacccatatctttatgcacttctcactgatgcatattctttttaacctgctgtggtggtggtatctcggcggggcggtagagaagcgcctgggcagcggtaaattaatcgtcattacggtgataagcgcgctgctaagcggctatgtacagcagaaatttagcggcccgtggtttggcggactgtctggcgtcgtctatgcgctgatgggttacgtgtggctgcgtggagagcgcgatccgcaaagcggaatttacctccagcgcggcttaattatttttgcattattgtggatagtcgctggttggtttgactggtttggcatgtctatggcgaacggcgcgcacatcgccgggcttatcgtcggtttagcgatggcctttgttgatacgctgaatgcgcgaaaacgaacgtga

SEQ ID NO: 371031 - DNA, 759 bp, Salmonella enterica
atgaaacaaacacaacggcatgacgcgatcattgaactggtaaaaaaacaggggtacgtcagtacggaagagctggtggagcatttttctgtcagcccgcaaaccattcgtcgggatcttaacgatctggcggaacagaatatgattttgcgccaccacggcggcgcggcgttgccctccagctcggtgaacacgccgtggcacgatcgtaaggcgacgcaaacggaagaaaaagagcgcatcgctcgcaaagtcgcggcccagatccccaatggttcaacgctgtttattgatatcggcacgacgccggaagccgtagcgcacgccctgttagggcacagtaatttgcggatcgtgaccaacaatttgaacgtagcgaacacgctaatggcgaaagaggattttcgtattatcctcgccggcggtgaactccgtagccgcgacggcggcattattggcgaagcgacgcaggactttatcgcccagttccgtctcgatttcggcattctcggtattagcggtattgatagcgacggctcgttgctggaatttgactaccatgaggtacgcaccaagcgcgcgattatcgaaaattcgcgccacgtgatgctggtggtggatcactctaaatttggccgtaacgcgatggtaaacatgggcagcattagtatggtcgatgcggtctacaccgataccctgccgccgccgggcgtgatgcaggtgttgacggagaaccatattcaactggagctgtgttaa

SEQ ID NO: 371032 - DNA, 1584 bp, Salmonella enterica
atgcgaaaaacggtggcctttggttttgtcggcacggtgctcgactatgcaggacgcggcagtcagcgttgggaaaaatggcgccctactttgtgtctgtgtcagcaggagacgctggtcgttcaccgcctggaactgctgtacgatgcccgctctcgctcgctgtttgaaggattaaagaaggatatcgccagcgtctcgccggaaacggaagtcgtcggcgtagaaatcgcgatccgcaacccgtgggacttcgaagaggtttacgcctgcctgcacgatttcgcccgcagccatacctttcatcccgaagatgaagactatctgattcatatcaccaccggcacccacgtcgcgcagatctgctggttcctgctggcggaggcgcgctatctaccggcgcgattagcgcagacctcgccgccgcgcaaaaaagataaaccgcatagcacgggcgacgtgacgattattgacctcgacctcagccgctacaatgacatcgccacccgcttcgcccaggagcgggaggagacgctcaacttcctgaagtccggcattgcaacccgcaacccgtgtttcaaccggatgattgagcaaattgagcgcgtcgcgatacgctcccgttcgccaatcctgctcaacggcccgaccggcgcgggcaagtcgtttctcgcccgtcgcatctatgaactaaaactggcccgccaccagttcagcggcccgtttgtcgaagtgaactgcgccaccctgcgcggcgacacggcgatgtcggcgctgttcggccacgttaagggggcgtttaccggtgcgagagaggagcgtgcaggactgctgcgcagcgccgacggcggcatgctgtttcttgacgaagtgggagaactgggcgcggatgaacaggccatgttgctgaaagccattgaagagaaacgcttttaccctttcggcagcgaccagcaggtcagcagcgatttccagttgattgccggcacggtgcgcgacctgcgccagcgagtggcggaggggacattccgcgaagacctgtacgcgcgcattaatctctggaccttcgaactaccgggcctgcgtcagcgccaggaagatattgaaccaaaccttgactacgaactggaacgccacgcggcgctaaccggcgacagcgtgcgttttaataccgaagcgcgccgcgcctggctgagcttcgccacctcgccgcaggccgcctggcgcggtaacttccgcgaactctccgccagcgtcacccgcatggcgacgctagcggacaacgggcgaatcacggtcgaaacggtagacgatgaaatcgcgcgtttgcgctatagctggaatgaccatcgcccctccgcgctcgacggattgccgggcattgacgcaacggcgctggatctgtttgaccgtatgcaactggaaaacgtcgttgccatctgccgccaggcgaaaaccctttccgacgccgggcggcagctattcaacgtttcccgtcaggggaaagccacggtgaatgacgctgaccggctgcgtaagtacctggcgcgttttgggctgacgtgggacgttttacagaattaa

SEQ ID NO: 371033 - DNA, 1554 bp, Salmonella enterica
atggctaatccacttttgttccgttcgctgttaagggacgcgccgctggccaacgccagcaatcagcaaggcgcagcggccttcgccttcaccccacgccatacactggcgcaaatggtgatgaccggttgcatgaacgagactttttatgtcagcggccaggcgcagctaaatgatgttctggcgacagcgaaagatctcgacgatctgtttttagcgcaactggcgatttatggccgcgaacgcgggatgatgaaggatatgcccgcgctgttgaccgccattctggcggcgcgtggctcggcgctgctgccggtagtatttgcgcgggtgatcaataatggccggatgctgcgtaactttgtgcaaatgttgcgcagcggcgtgaccgggcggcgctcgctggggacgcggccaaagaagctggtgcagcgttggttgcagaacgccagcgaagagcgcttattgcaggcatcggtgggcaatatgccgtcgctggcggatatcgtcaaaatggtgcacccacggccgcaggcggcgtggcaggaagccttctttgcctggctgattggtaagccgtgcgataaggcgcaactgccggaaaaaacgcgcgcgctgctggcgtttcgtgaaggcaatatgggcgcggccttacccgatgtgccgtttttactgctgaccaacgcgccgctgagtcgcgaacaatgggcgcaactggcgcagcggatgagctggcaaacgttgcgcatgaatttgaatacgctggcgcgtcatgacgtgtttgagaatgcaacgcttgccgccagcgtggcgcagcggctggcggacagggcgcaggtgcgccagtcctgggtttatccttatcagctgctgtcggcgtggagcaatctgcaatgcagcgtgccgcaggttattcgcgaggctttagcgcaggcgatggagtacgcgctggagaacattccgccgtttcgcggcaacgtggtggtctgcccggatgtgtcggggtcgatgaagtcgtcgataaccggctatcgcaagggggcgaccagtaagatccgctgcgtggacgttgccgggctgatcgccgccgccgtgctgcgtaatcatccgcaggcccgcgtgctgccgtttgaatgcgatgtggtcgacgtgcagcttgatgcgcgccagtcggttatgcacaacgcgcaaaagctggcggcggttggcggcggcagcaccaactgctccgcgccgctgcgtaggttgttgaacgagcgggcgcgggtggatctggtgattatggtgtcggataacgaatcgtgggttgataagtcgcgccatggctcaacggccaccatggaatgctggatcgaactgaaaaagcgcaacccgcaggcgcgcctggtgtgtatcgatctgctgccttacggtaccacccaggcggcggaacgaagcgatattttgaacgtcggcggcttcagcgacgaggtgtttacggtgatagataactttgttaacggtcgctatggcagcgcgcactggctggaagagattgaagccgtgacgctgtaa

SEQ ID NO: 371034 - DNA, 1218 bp, Salmonella enterica
atgatgaattacgaattgatgaccacccagaacgcaccggtaaaaatgtggaccaaaggcgtaccggtagaagacgatgcccgtcagcaactgattaatacggcgaaaatgccgtttattttcaaacatattgccgttatgccggatgtgcatttggggaaaggatcgaccatcggtagcgtgatcccgacgaaaggggcgattattccggcggcggtgggcgtggatatcggttgtggaatgaacgcgctgcgtaccagcttaacggcggccgatctgccggaaaatctggcggagctgcgtagcgccatagaggccgctgtgcctcacgggcgtaccaccggacgcgggcgtcgcgatgtgggcgcatggggaaacccgcccgccaacgttgatgaaaaatgggcgcagctggaagcgggatatcagtggttaacgcaaaaatatccgcgctttttgaataccaatagctataagcacctgggaacattgggaaccggtaaccactttattgagatctgtctggatgaaaccgatcgggtatggatcatgctgcactccggttcgcgcgggatcggtaacgccatcggcacctattttatcggcctggcgcagcaagaaatgcaggagcagttagaaacgctgccgtcccgcgatctggcgtattttaatgaaggaagcgaatattttgatgattacctgaaagcggtacactgggcgcagcaattcgccagcctgaaccgcgaggcgatgatggaaaacgcgctggcggcgctccagcgctgcgtggaaaaatcgatcgtcctcgatatggacgagatcaactgccaccataactatgtgcaaaaagaacagcactttggcgaagagatttatgtgacgcgtaaaggagcggtttcggcgcggcgcggtgagttcggtatcattcccggttcgatgggggcgaaaagctttatcgtgcgcgggctgggtaacgaagagtcgttctgttcgtgcagccacggcgccgggcgtgtgatgagccgaacgaaagcgaagaaactgtttagcgttgacgatcagattcgcgccaccgcgcatgtcgaatgccgtaaagatgcggacgtgatcgacgagatcccaatggcgtataaagacattgatgcggtgatggcggcgcagtctgacctggtggaaatcatgtacaccctgcggcaggtggtgtgcgttaaaggatag

SEQ ID NO: 371035 - DNA, 1020 bp, Salmonella enterica
atggcaaggatcatcgcgctggatggcgcacagggagagggcggcgggcagattttgcgctcggcgctgagtttatcaatgataaccggccagccgtttgaaatgagcgacatccgcgccgggcgcgccaaaccggggctgctacgccagcatttaacggcggtgcgggcggcaacggaaatctgcggcgcgcaggtgaacggcgacgagctgggctcgcagcagttgcgttttacgccggggccgattcgcggcggcgagtaccgtttcgcgattggcagcgcgggcagttgtatgctggtgctgcaaaccgtcctgcccgcgctgtggtttgccgatggttcatcccgcgtggaggttcacggcgggacgcataatcaggccgcgcccagcgccgattttatctgccgcgtctgggagccgctgttggcgaggatgggcatcagccagcgcaccacgctgataaaacacggcttttatccggcaggcggcggcgcggcggcgacggtcgtcgaaccggcaacgtctttacgcgggctaacgctgatatcgcgcggcgagacgctgcgcaccaccgctgaagctttgctggcggcggttccttaccacgttggcgaacgtgaagtcgcaacgctggaagcccatttcccgctggcggagaaaaatgtcgttgcgctggaaggcggctgcgggccgggcaatgcgctgttgctgatgatccaaagcgaacagttgaccgaactgttcgccgcgttcggcgtaaaaggcaccagcgcggaagcggtagctaatcaggttgcgcatgaagcgcggcgctatctcgcaagcccggcggcggtgggagagcatctggccgaccagctgattttaccgctggcgctggcgggcgaaggcgcgtttaccgtggcacgggcttccgctcacttgcttaccaatattgcggtggtggaacggtttttgccggtcagattttcctgtgaagcaaccgaaagtggctatcttgtccgggtaagcgactaa

SEQ ID NO: 371036 - DNA, 261 bp, Salmonella enterica
atggctgcaaatgcgcttgttcgtgcccgtatcgacgaaacgctgaaggaccaggcggcagatgtcctggctgaaatggggttaaccatttctgatttgatacggattacactgactaaagttgcgcgtgaaaaggcattgccttttgatttgcgcatacccaatgagttaacgtcacgaacgatagaaaatagcgaagctggcgttgatattcataaagccaaagatgctgatgatttgtttgaccagttagggatctga

SEQ ID NO: 371037 - DNA, 276 bp, Salmonella enterica
atggggcaaagggaaattgaatattcgggacagttccagaaagatgtaaaacgggcacaaaagcgtcataaggatgtcggcaaacttaaaacacttatgacgcttctgattcaccacccttttccccttcctgccatttataaagatcacccgttacaaggttcatatagcggataccgggatgcccatattgagcctgactggattcttatttataagataacggatgaatgcctgcgatttgaacgaacaggaacgcatgccgatttattttaa

SEQ ID NO: 371038 - DNA, 2706 bp, Salmonella enterica
atgttgattccgtctaaattaagtcgtccggttcgtctcgaccataccgtggttcgtgagcggctgttggctaaactttccggcgcgaacaatttcaggctcgccctggtaaccagtcctgctggctatgggaaaaccacgcttgtctcacagtgggcggcgggcaaaaatgaattaggctggtactctctcgacgaaggcgataaccagcaagagcgattcgccagttacttaattgccgctatccaacaggccaccggcggacactgctctaccagcgaagcgatggcgcaaaaacgtcagtacgccagcctgacgtccctcttcgcgcagctctttattgaactggcgcagtggcatcgcccgctttatctggtgattgacgactaccatttgattaccaatccggtgattcacgacgcgatgcgctttttcttacggcatcagccggaaaatttcaccctggtggtgttatcgcgtaatttgccgcaactgggcatcgctaatctgcgcgtgcgcgatcagctgttggaaatcggcagccagcagttagcttttaaccatcaggaagcaaagcaattttttgaccgtcgcctttcgtcgcccattgaagccgctgagagcagtcgtatgtgcgacgatgtggccggttgggccactgcgctacagttgatcgccctctccgcgcgccagaaccatacctctgcgcatcactccgcccgccgtcttgccgggattaatgccagccacctttctgattatctggtggacgaagtactggataacgtggatgtcagcacccgacattttttacttaaaagcgcgatcttacgctcaatgaatgacgcgttgattgtgcgcgtgaccggcgaagaaaacggccagatgcggctggaggagattgagcgccaggggttattcctgcaacgcatggacgacacgggcgagtggtttagctatcacccgttgtttggtagctttctgcgccagcgttgccagtgggaactggcggcggaactgccggagatccaccgtgcggccgcggaaagctggatggaacagggttttcccagcgaagctattcatcatgcgctggcggcgggtgacgcgcaaatgctgcgcgatatcctgcttaaccatgcgtgggggctgtttaatcacagtgaactggcgctgctggaagagtcattaaaagcgctgccgtgggaaagcctgctggaaaatccgcggctggtgttgttacaggcctggctgatgcaaagccaacaccgctacagcgaagtgaatacgctgctggcgcgcgccgagcaagagatcaaaggggtcatggacggcacgctacatgctgaatttaacgcgctgcgcgcccaggtcgccatcaacgacggcaatccggaagaggctgagcggctggcgaaactggcgctggatgagcttcctctcgcctggttttatagccgtattgtcgcgacctccgttcacggcgaagtgctgcactgtaaaggcgatctcagccagtctttatcgctgatgcagcaaaccgaacaaatggcgcgccatcatgacgtctggcattacgcgctgtggagcttaattcaacaaagtgaaattcagttcgcccagggattcctgcaggccgcatgggaaacgcaggagagagccttccagttgatcaaagagcaacatctggaacaactgccgatgcatgagtttctggtacgtatccgcgcgcaattgctgtgggcgtgggcgcgccttgacgaagcggaggcctcggcgcgcagcggtatcgctgtgctgtccaccttccagccgcaacaacagttgcagtgcctgacgttactggtgcagtgctcgctggcgcgcggcgatctggataatgcccgtagtcagcttaaccgactggaaaatttattaggcaatggtcgttatcactgcgactggatctctaacgccgataaagtgcgtgtcatttactggcagttaaccggcgacaagaaatccgccgccaactggttacgtcatacgcccaaaccggcgtttgccaataaccattttctgcaagggcaatggcggaatatcgcccgcgcgcagatcctgctgggcgaattcgagcctgcggaaatcgtgctggaagagttaaatgagaatgcccgtagcctgcgcttaatgagcgatttaaaccgcaatctgctgttactcaatcagctttactggcaatccgggcggaaaaacgacgcccagcgcgtattgcttgatgccttacagctcgccaaccgcaccggatttatcagccattttgtgattgaaggcgaagccatggcgcaacaattgcgtcagcttatccagctcaatacgctgccggagatggagcagcatcgcgcgcagcgcatcctgcgagagattaaccaacatcaccggcataaattcgcccattttgacgaaggcttcgtcgagcgcctgcttaaccatccggatgtcccggagcttattcgcaccagcccgctcacccagcgtgaatggcaggtgttagggcttatctattccggttacagcaacgaacagattgccggcgaactggcggtggccgcaaccaccattaagacgcatatccgcaacctctaccagaaactcggcgtcgcgcaccgtcaggacgcggtacagcacgcacaacagttgctgaagatgatggggtacggggtttga

SEQ ID NO: 371039 - DNA, 2394 bp, Salmonella enterica
atgtcacagccaaccttcaataaagatcaattccaggccgccctgacgcgtcagtggcagcgtttcggtttactgtcggcgtccgacatgacgcctcgtcagtggtggcaggccgttagcggcgcgctggcggaattactgagcgcgcaaccggtagcgcagccgacgaaaggccagcgtcatgtgaactacatttcgatggaatttttgattggccgcctgacgggaaataacctgttaaatctggggtggtaccaggacgttagcgatgtgctgaaagcgcacgatattaatctgaccaatctgctggaagaggaagtcgatccggcgctcggcaacggtggtctgggacgtctggccgcctgcttcctcgattcgatggccactgtcgggcagtccgctaccggctatggtctgaactaccagtatgggctgttccgtcagtcatttgttgagggcaagcaggtggaagcgccggatgactggcatcgcggcagctatccgtggttccgccacaacgaggcgctggacgtccaggttgggatcggcggtaaagtcaccaaagaagggcgctgggagccaggttttgtgattacaggccaggcctgggatctgccggtgttaggctatcgtaacggtgtcgcgcaaccgctgcgtttgtggcaggcgacccacgcccatccgtttgatctgaccaaattcaacgacggcgctttcctgcgggcggaacagcagggtatcgatgcggaaaaactgacgaaggtgctttatcccaacgataaccacacggcgggcaaaaaactgcgcctgatgcagcaatacttccagtgcgcctgctcggtagcggatattctgcgtcgccatcatctggccggacgcaagctgcatgagctggcggattatgaggtcattcagctaaatgatacccacccgactattgccatccctgaactgctgcgcgtattgctggatgaacaccagatgagctgggatgacgcctgggctatcaccagcaaaaccttcgcctacaccaaccacaccctgatgccggaagcgctggagtgctgggacgagaggttaatcaaagcgctgttgccgcgtcatatgcagattatcaagcagattaacgatcgctttaagacgctggtcgataagacctggcctggcgataagcaggtatgggcaaaactggcggtggtgcacgaccgtcaggtacgcatggccaatatgtgcgtggtcagcggctttgcggtcaacggtgtggcggcgctgcactccgatctggtggtgaaagatctgttcccggaatatcaccagctttggccgaacaaattccacaatgtcaccaacggcattacgccgcgtcgctggatcaaacagtgcaatccgcagcttgcggcgttgctggataaaacgctgaaaaaagagtgggctaacgatctcgaccagttgatcaacctcgaaaaatacgctgacgatgcgaagttccgtcagcaatatcgcgacatcaagcgggcgaacaaagagcggctggtgaaattcatcaaggcccgtaccgggattgagatttcaagcaacgcgatttttgatattcaaatcaaacgtctgcacgagtacaaacgtcagcacctgaacctactgcacattctggcactgtacaaagagatccgcgaaaacccgcaggccgaccgcgtaccgcgcgtattcctgtttggcgcgaaggcggcgccgggctattacctggcgaagaacatcatttttgctatcaataaggttgcggaagccattaataacgacccggcggtgggtgataagctgaaggtggttttcctgccggattactgcgtctcggcggcggaaatgctcattccggcggcggatatttccgagcaaatttctaccgccgggaaagaggcgtccggcaccggcaacatgaaactggcgctgaacggggcgttgactgtgggaacgctggacggcgctaacgttgaaatcgctgagaaggtgggtgaagagaatatctttatctttggccatactgtggaagaggtcaaggcgctcaaagccaaaggctacgatccggtgaaatggcgtaaaaaagacaaagtgctggatgcggtgctaaaagagctggaaagcggtcaatacagcgatggcgataaacatgcctttgaccagatgctgcatagcctcggcaaacaggggggcgatccgtacctggtcatggcggacttcgccgcttatgtcgaggcgcaaaagcaggtggatgcgctgtatcgtgaccaggaagcgtggacgcgcgccgcgatcctcaataccgcgcgctgcggtatgttcagttccgatcgctctattcgcgattatcaagcccgtatctggcaggcaaaacgctaa

SEQ ID NO: 371040 - DNA, 2079 bp, Salmonella enterica
atggaaaataaacgtctcgatagtgccgcgctggcggcggggatcagccccagttacatcaatgctcatggcaaaccgcagtctattggcgctgaaaccaagagacgtttgctggcggcgatgcacggcacgacaacaggaccacaggcggtcgtgccgaatgtgaaggtttataccgcgggtaaaaaaatggcgttgccggtagaggggcgcggtgagtttgcctggctgctgactacggaagagggcgtgcattacaaagggcgcgtgacgggcggtaaaaaacttaaccttccggctacattgccggagggctaccacaccctgacgttgacccaggatgaacagcgtacgcactgccggattatcgtcgccccgccgcgatgctatgagccgcaggcgctgctggaggggaaaaaactgtggggggcctgcgtccagctttatactctgcgttcagaaaaaaactggggtattggcgatttcggcgatttgaagtcgatgctggtcgacgtggcgacacgcggcggcgcgtttatcggcctgaacccgatccacgcgctttatccggcgaatccggagagcgccagtccctacagcccctcgtctcgtcgctggctgaacgtgatatatatcgacgtcaacgccgtcgaagatttccgcctgagcgaagaggcgcaggcatggtggcaaatgcccgccacacagcaacagctgcgacaggcgcgcgatgcgcaatgggtcgattacgctaccgttaccgcgctgaaaatcacggcgctgcggatggcgtggacgcgctttgccgctcgcgacgatgcgcaaatggcggagtttcgtcactttatcgcccgcgaaggcgaaagcctttactggcaggcggcattcgacgcgctgcatgcgtatcaggtgaaagaggatgagcagcgctggggctggccagcctggccggaggcgtaccagtcggtagagtctcccgctgtaaaacaattctgtgaagcgcaccgcgaagaggtggagttttatctctggcttcagtggctggcctggcgccaattcgccgcctgctgggatacctgccagagttttaaactaccgattggtctgtaccgcgatctggcggttggcgtagcggaaggcggcgcggaaacctggtgcgaccgggagctgtactgcctgaaagcatctgtcggcgcgccgccggatatcctcggcccgctcggtcagaactgggggctgccgccaatggacccgcatatcattgtcgcccgggcgtatgagccctttatcgacctgctgcgcgccaatatgcaaaactgcggcgcgttgcgcattgaccatgtcatgtcgttgctgcgtctgtggtggataccgtatggcgaaacagcggatcagggggcttacgtccattatccggtagatgatttgctttctattctggcgctggagagccaacgtcaccgctgtatggtgataggcgaagatctggggacggtgccagttgagattgtcggcaagctgcgcgatagcggggtctattcttataaagtgctgtggtttgaaaatgaccttgagaaaaacttccgcgcgccaggtgcgtatccgcaacaatcgatggctgtcgcctcgacgcacgatctccccacgctgcgcggctattgggaatgcggtgacctgacgttgggtaaagctctggggctttatccggatgaagtgattctgcgcgggctgtatgaggatcgcgagcgggcgaaacaggggctattggacgcgctgcataaatatggctgtctgccaaaacgcgccgggcataaggcatcgttaatgtcgatgacgccaacgctaaatcgcggacttcagcgctatatcgccgacagtaacagcggtctattggggcttcagccggaggactggctggatatggccgatccggttaacgtaccgggcaccagcgatcagtataaaaactggcggcggaagctcaccgccacgctggagcagatgtttgccgatgagggcgtaaacaagctgattaaggatttggataagcgccgaaaagcggccgcgaagaagaagtaa

SEQ ID NO: 371041 - DNA, 1317 bp, Salmonella enterica
atgccattagtcatcgttgctatcggtgttatcttgttacttcttctgatgatccgcttcaaaatgaacggatttatcgcccttgtcctggtagcgctcgctgtcgggttgatgcagggaatgccgctggataaagtcatcggctccatcaaagccggtgtcggcggtacgcttggcagtctggccctgattatggggttcggcgccatgctgggcaaaatgcttgccgactgcggcggcgctcaacgtatcgccactaccctgatcgcgaaatttggtaaaaagcatattcagtgggccgtagtgttaaccggctttaccgtcggcttcgctctgttctatgaagtgggcttcgttctgatgctgccgctggtattcaccattgccgcagcagcgaatatcccgttactgtacgtcggcgtgccgatggccgcggcgctttccgtcacacacggcttcctgccgccgcacccgggcccaaccgcaatcgccacgattttccatgccgatatgggtaagacgctgctgtttggtacgattctggcaatcccgaccgtgatccttgccggaccggtttacgcccgtttcctgaaaggtatcgataagccgatcccggaaggcctgtacagcgcgaaaacttttacggaagaagagatgccgggctttggcgtcagcgtctggacgtcgctggttccggtgattctgatggcgatgcgtgcgattgccgagatgattctgccaaaaggccacgctttcctgcccgttgccgagttcctgggcgacccggtaatggctacgttaattgccgtactgattgcgatgttcacctttggcctgaaccgcgggcgttccatggatcagattaacgatacgctggtctcttccatcaaaattatcgccatgatgctgctgatcatcggcggcggcggcgcattcaagcaggtgctggtagatagcggcgtggataaatacatcgcttcaatgatgcatgaaaccaatgtctctccgctgttaatggcgtggtctatcgcggcggtgctgcgtatcgcgctgggctccgcgactgtcgcggcgattaccgcaggcggcattgcggcgccgctgatcgccactaccggcgttagccctgaactgatggttatcgcagtcggttccgggagcgtgattttctctcacgtcaacgacccgggcttctggctgttcaaagagtatttcaatttgactatcggcgagaccattaaatcctggtcgatgctggaaacgatcatctccgtctgcggcctgatcggctgtctgctgttgggtatggtggtttaa

SEQ ID NO: 371042 - DNA, 576 bp, Salmonella enterica
atgatccgtatttccgatgctgcacaagcgcactttgccaaactgctggcaaatcaggaagaagggacgcaaatccgcgtatttgtcattaatcccggcactcctaacgcagagtgcggcgtttcttattgtccgcccgacgccgtagaagccaccgatactgcactgaaatttgacctgttgaccgcttatgtcgacgagctgagcgcgccctatctggaagacgcggaaattgatttcgtgaccgaccagctaggttctcaacttacattgaaagcgccaaacgcgaagatgcgcaaagtggccgatgacgcgccgctgatggagcgcgtggaatatgctctgcaatcgcagattaacccgcagttggcgggccacggcggtcgcgtctcgctgatggaaattaccgatgaaggctatgcaattctgcagtttggcggcggttgtaacggttgctcgatggttgacgtcacgctgaaagaagggatcgagaaacagttgctgaatgaattcccggaactgaaaggggttcgcgatctgaccgaacaccagcgcggcgagcactcctactactaa

SEQ ID NO: 371043 - DNA, 684 bp, Salmonella enterica
atgctaacagtaccgggattatgctggctatgccgaatgccgctggcgttaagccactgggggatttgttccgtatgcgcgcgcgccgtccgccagcgcgtcagcgtgtgtccgcaatgtggattacccgccaggcatccttcgctcccctgcggtcgctgcctgcaaaaaccgccgccctggcagcgtctggtgagcgtcagtaactatacgccgcccttgagtttactggtgcatcagcttaaatttacccgccgtaacgaaattgccgccgctctggcgcgtctactgttgcaggaagtcctcatggcgcgccgcagcactggcttgcagcttcccgacagaatcgtcagcgttccgctctggtcgcgccgacactggcggcggggatttaaccaaagcgatctgttatgccaaccgttagcgcactggctgggctgcgcgtgggacagccagaccatcacgcgggtacgggcgaccgcaacacaacatcatctcagcgccaggttacggaaacgcaatttgaaaaacgcgtttcgccttgaattgccggtacagggtctccatatggttattgtggatgatgtcgtcactaccggaagtaccgtcgcggaaatcgcgcaactgcttttgcgcaacggcgcagcgactgtccaggtatggtgcctgtgtcgaaccttgtag

SEQ ID NO: 371044 - DNA, 771 bp, Salmonella enterica
atgaatgacatctggtggcagacctacggcgagggaaattgtcatcttgtgctgctgcacggatggggattgaacgcggaggtatggcattgcattcgcgaggaactcggctcgcattttacgctgcatctggtcgacttgccgggctatggtcgcagctcggggtttggcgccatgacgcttgaagagatgacggcgcaggtagcgaaaaacgcgccggaccaggctatctggcttggctggagcctgggcggcctggtggcgagtcagatggcgctcacccaccctgaacgcgttcaggcgctggtgacagtcgcctcttcgccatgctttagcgcgcgtgaggggtggccgggaataaaaccagaaatcctcggcggattccagcagcagcttagcgacgattttcagcgcacggtggagcgttttctggcgctgcaaacgttagggacggagacggcgcgtcaggatgcccgcaccttaaaaagcgtagtgctggcgcagcctatgccggatgtagaggtgctcaatggcggactggaaatcttaaaaacggtcgatctacgagaagcgcttaaaaatgtgaacatgccgtttttgcgtttgtatggttatctggacggtctggtgccgcgtaaaatcgcgcctttgctcgatacgttatggccgcacagtacatcacagataatggcgaaggcggcccatgcgccgtttatctcgcatccggcggcgttttgtcaggcgctgatgacgctaaaatcatcgctgtaa

SEQ ID NO: 371045 - DNA, 927 bp, Salmonella enterica
atggcgacctcaacaacatccacgccgcatgacgcggtattcaaacagtttctatgccaccccgatactgcacgggattttttggaaattcatctcccgacgacattacgtcaaatctgtaatctgaatacgttacggctggagtccggtagctttattgaagaggatttacgcccccattattccgatattctttggtcgctggaaacaagtgaaggtgaaggttacatttacgtggttattgaacatcagagtacgccggacgcgcatatggcatttcggctgatgcgttacgcaatggctgcaatgcaacggcacctggaggccgggcataagacgttgccgttagtggtgccaatgctgttttatcacggaaaccgcagcccgtatccgttttcattatgctggctggatgaatttgccgacccggtgatggcgcgtaagctatacgccaccgcctttcctctggtcgatattacggtcgtgccggacgacgagattatgcggcaccgacgggtcgcgctgctggaactcatacaaaaacacatccgccagcgtgatctgatggggcttgtcgaacagctggtcgccctgctggttaagggatacgctaatgacacccagcttcaaagtttgtttaattacatgatgcacactggcgacgccgcgcgcttcaatacgtttatccgccaggtggctatgcgtatcccacagcataaggagaagatcatgactatcgcagaaagattacgtcaggaaggacatcgtaacgggttacagaaagggctacagcaaggcaagcaggaaggccaacggctcgccgcattgcgcattgcccgctcgatgctaaacgatggtttcgatcgcgataccgtgcttagggttaccgggctggcgcctgccgatctggcgtctgaaaaccattaa

SEQ ID NO: 371046 - DNA, 237 bp, Salmonella enterica
atggcttcattgatacaggttcgcgatctactggcgctacgggggcgtatggaggcaacgcagatcagccatacgctgcacgctccgcagcccatgatcgacgccatgctgaatcaactggagatcatgggtaaagcggtacgtatcccggaagaagcggacggctgcctttcaggcagctgtaaaagttgtccagaaggtaaagcctgcctgcgcgaatggtgggccttgcgttag

SEQ ID NO: 371047 - DNA, 2319 bp, Salmonella enterica
atgaaaaaattaaccattggtttaattggtaatcctaattccggcaagaccaccttatttaaccaactcaccggcgcgcgtcagcgcgtggggaactgggcgggcgtcaccgtcgagcgtaaagagggccagttcgcgacaactgaccaccaggtcacgctggtagatttacccggcacctattctctgacgaccatctcgtcacaaacctctctcgacgaacagatcgcctgccactacatcctgagcggcgacgccgacctgttgataaacgttgtggacgcctccaatctggagcgcaacctctatttgacgctgcagctgctggagctgggtatcccctgtattgtcgcgctcaacatgctggatatcgccgaaaaacagcaggttcgtattgatgtcgacgctctgtccacgcgtctgggttgccctgtcgtaccgctggtatcgactcgcggccgcggtatcgaggcgctgaaactggccattgaccgtcacaacgctaacgacaacgtcgaactggtgcattatgcccagccgctgctgcgcgaagcaggtttcctggccgacgcgatggcccaggagatgcctttacaacagcgccgctggctgggtctgcaaatgctggagggcgatatctacagccgggcttacgcagatgaggcggcgcaaaacctggacacctcccttgcccgtctgaaggacgaaatggacgacccggcgctgcatatcgccgacgcccgttatcagtgtatcgccgctatttgcgacgtggtcagcaataccctgacagccgaacccagccgcttcaccagggcggtcgataaaattatcctgaaccgcttcctcggcttaccgatttttttgttcgtgatgtacctgatgttcctgctcgccattaacatcggcggcgcgttgcaacccctgtttgatgccggttccgtcgccatctttattcatggcattcaatggattggctacacgctgcacttcccggattggttaaccatcttcctggcgcaaggtcttggcggcgggatcaataccgtcctgccgctggtgccgcaaatcgggatgatgtacctattcctctccttccttgaagactccggttatatggcgcgcgcggccttcgtcatggatcgcctgatgcaggcgctgggactaccgggtaaatccttcgtgccgctgattgtcggcttcggctgtaacgtaccttccgtgatgggcgcccgcacgcttgacgctccgcgcgaacgcctgatgaccatcatgatggcgccgtttatgtcctgtggcgcgcgcctggcgattttcgccgtctttgccgccgccttcttcgggcaaaacggcgcgctggcggtcttctcgctgtacgtgctgggtattgtcatggcggtattaaccggcctgatgctgaagcataccattatgcgcggcgaagcctctccgtttgtgatggagctaccggtttaccacgtaccgcatatcaagagcctgatcatccagacctggcaacgcctgaaaggttttgtactacgcgccggtaaagtcattatcatcgtgagtattttcctgagcgcgtttaacagtttctcgctgagcggcaaaatcgtcgataacattaatgactccgccctcgcctccgtaagccgggtcatcacgccagtctttaaaccgatcggcgtccatgaagataactggcaagcgaccgtgggtctgtttacaggcgccatggcgaaagaagttgtcgtcggtacgctgaacacactctataccgccgaaaatattcaggacgaagcgtttaatcctgccgattttcacctcggcgatgaactgctgggcgcggttgacgatacctggcaaagcctgaaagacacctttagcctgagcgtactggctaacccgatcgaagcgagtaaaggcgacggcgaaatggcaaccggcgcgatgggcgtgatggatcaaaaattcggcagcgccgcggcggcgtacagttacctgattttcgtcctgctttacgtaccgtgtatctcggtaatgggcgctatcgcccgcgagtccagccgcggctggatgggcttctccatcctgtgggggctgaatatcgcctattcgctcgccacgctgttctaccaggttaccagcttcagtcaacacccgacatacagcctgatctgtattctggcagtgatcgtctttaacgttgtggtgttaagcctgttgcgccgcgcccgcagccgtgtagacattgaactgctggcaacccgcaaaaacgtcagttcctgttgttcgggcactgcgggcaattgtcactaa

SEQ ID NO: 371048 - DNA, 228 bp, Salmonella enterica
atgcaattcactcctgacactgcgtggaaaatcaccggctttgcgcgtgaaatcagcccggcgtatcgtcaaaaactgctttcgctcggcatgttgcccggctcttcatttaatgttgtccgcgtcgcgcccttaggcgatccgatccatatcgaaacacgacgcgtgagtctggttttgcgtaaaaaggatttggcgttaatagaagtggaagcggtttcctgttaa

SEQ ID NO: 371049 - DNA, 2331 bp, Salmonella enterica
atgatgaatgattctttctgccgcattattgcgggtgaaatccaggcaaatgccgggcaggttgaagctgccgttcgcctgcttgacgaagggaacaccgtgccgtttatcgcacgttatcgtaaagaaatcaccggcggtctggatgacacgcagttgcgtaacctggaaacgcgtctgggctatctgcgtgagctggaagacaggcgtcaggctatcctcaagtccatttccgaacaaggcaaactgaccgatgagctggctggcgccatcaacgctacgttaagtaagaccgagctcgaagacctctacctgccctataaacctaaacgccgcacccgtggacaaatcgccattgaagccggccttgagccgctggccgatctgctctggaacgagccgtcccacgatcctgacgtggaagcggcaaagtacattgatggcgacaaaggcgtggcggacacgaaagccgcgctcgacggcgcacgctacattctgatggagcgctttgccgaagacgccgcattgctggcgaaagtgcgtgattacctgtggaagaacgcccatctggtcgccacagtcgtgagcggcaaagaggaagaaggggcaaaattccgcgactatttcgaccatcatgagcccattgctaacgtcccgtctcaccgtgcgctggccatgttccgtggtcgtaacgaaggcattctgcaactttcgctcaatgccgacccacagtttgatgagccgccgaaagagagctactgcgagcagatcatcatggaccatctcggcctgcggctgaataacgccccggcggatagctggcgcaaaggcgtagtgagctggacgtggcgtatcaaagtcttaatgcacctcgaaaccgaactgatgggcaccgtgcgcgaacgtgcggaagacgaagcgattaacgtgtttgcgcgtaacctgcacgacctgctgatggcagcccccgcaggcctgcgcgccacgatgggccttgatcctggcctgcgtaccggcgtaaaagtcgctgtcgttgacggcaccggcaagctggtggcgacggataccatttatccgcataccggtcaggcggccaaagcggctaccgtgatcgccgcgctgtgcgaaaaataccacgtcgaactggtcgcgattggcaacggtacggcctcgcgtgaaaccgaacgcttctatctcgacgtacagaaacagttcccgaacgtgacggcgcagaaagtgatcgtcagcgaagcgggggcgtccgtgtattccgcttctgagctggcggcgcaggagtttccggatctcgacgtctccctgcgtggcgcggtctctatcgcgcgtcgtctgcaggatccgctggcggaactggtgaaaatcgatccgaaatcgatcggcgtcggccaatatcaacacgatgtcagccagacgcagctggcgcgtaagctggatgcggtggtcgaagactgcgtaaacgccgtcggcgtcgatttgaataccgcctccgtgccgctgctgacccgcgtcgcgggcttaacgcgcatgatggcgcaaaacatcgtcgcctggcgcgatgagaacggtcagttccagaaccgccagcaactgttgaaggtgagccgtctggggccgaaagcgtttgagcagtgcgcgggcttcctgcgtattaaccacggcgataacccgctggatgcctccaccgtccacccggaagcctatccggttgtcgaacgcattctggcggcgacgcagcaagcgctaaaagatctgatgggcaacagcaacgaattgcgtcacctcaaggccgctgattttaccgacgataaattcggcgtgccgaccgtgagcgatatcatcaaagagctggaaaaaccgggccgcgacccgcgtcctgaatttaaaaccgcgcaattcgccgatggcgtcgaaaccatgaacgacctgctgccggggatgattctggaaggggcggtcactaacgtcactaacttcggcgcgtttgtcgatatcggcgttcatcaggatggcctggtgcatatctcctcgctctcgaataagttcgtcgacgatccgcacaccgtggtgaaagcgggcgacatcgtgaaggtgaaagtgctggaagtggatctgcaacgtaagcgtattgcgctgacgatgcgtctggacgaacagcccggcgaaaccgccgctcgccgcggcggcggcgccgatcgcgctcagggcaaccgccctgcatctaaagcggcgaaaccgcgcggtcgtgacgcccagccagccggtaacagcgccatgatggacgcgctggcagcggcaatgggaaaaaaacgctaa

SEQ ID NO: 371050 - DNA, 474 bp, Salmonella enterica
atgaaaacgcccctgatcacccgcgaagggtacgaaacactcaaacaagagctcaattatctctggcgtgaagagcgcccggaggtcaccaaaaaagtgacctgggctgcgagtctgggcgaccgcagcgagaatgccgactatcagtataataaaaagcgcctgcgtgagatcgacagacgcgtcagatatctgaccaaatgcatggaaaatctcaaaatcgtggattattccccgcagcaggagggcaaagtcttcttcggcgcctgggtggaaattgaaaatgatgacggcgatacgctgaagttccgcattgtcggctacgatgaaattttcggacgtaaggattacatctctatcgactcgccgatggcgcgggcgctactgaaaaaagaagtgggcgatctggcggtggtcaacacccctgtcggcgaagcaaactggtacgtcaatgcgatcgaatacgtcaaataa

SEQ ID NO: 371051 - DNA, 720 bp, Salmonella enterica
atgcaagagaattataagattctggtggttgatgacgatatgcgtctgcgggcgctactggaacgttatctgaccgagcagggcttccaggttcgaagcgtcgctaacgctgagcagatggatcgtctgctgacccgtgaatctttccatctcatggtactggatttaatgctgccaggtgaagatggtctgtcgatttgtcgtcgcctgcgtagtcaaagtaatccaatgccgatcattatggtcacggcgaagggtgaagaggttgaccgtatcgtcgggctggaaatcggcgccgatgactacattcctaaaccgtttaacccgcgcgagctgttggcgcgtattcgcgccgtgttacgtcgtcaggcaaacgaactgcccggcgcgccgtcgcaggaagaggccgttatcgcgttcggtaagtttaaactgaacctcggtacgcgcgagatgttccgtgaagatgaaccgatgccgctgaccagcggggagtttgcggtactgaaagcgttagtcagccatccgcgcgagccgctctctcgcgataagctgatgaatctggcccgtggccgcgagtattccgcgatggaacgctccatcgacgtccagatctcccgcctgcgccgtatggtggaagaagatccggcacatccgcgttatattcagaccgtctggggcctgggctacgtcttcgtaccggacggttctaaagcatga

SEQ ID NO: 371052 - DNA, 1353 bp, Salmonella enterica
atgaggcgaatgcgcttctcgccgcgaagttcatttgcccgcacgctgttgctcatcgtcaccttgctgttcgtcagcctggtgacgacctacctggtggtgctgaacttcgcgattttgccgagcctccagcagtttaataaggttctggcttacgaagtccgtatgctgatgaccgataagctgcaactggaggacggcacgcagttagtcgtgccgcctgcgtttcgtcgggaaatctatcgcgagctggggatctctctctacaccaacgaagccgctgaagaggccgggctgcgttgggcgcaacactacgaattcttaagccaccagatggcgcagcaattaggcggcccgacggaagtgcgcgttgaggtcaacaaaagctcgcccgtcgtgtggctcaaaacctggctgtcgcccaatatctgggtgcgcgtgccgctgaccgagattcatcagggcgatttttctccgcttttccgttacacgctggcgatcatgctcctggcgataggcggcgcgtggctgtttattcgtatacagaatcgaccgttagtggatcttgaacatgccgccttgcaggtagggaagggaattattccgccgccgctgcgtgaatatggcgcctctgaagtgcgctctgtgacccgggcgtttaaccatatggcagccggcgtgaagcaattggccgatgaccgtacgctattgatggcgggcgtcagccacgacttgcgcacgccgttgacccgtattcgtctggcgacggagatgatgggcgaggaagacggttatctcgcggagtcgatcaataaagacatcgaagagtgtaacgccattatcgaacagtttattgactatctgcgtaccggtcaggaaatgccaatggagatggcggatctcaattccgtgctgggcgaggtgattgcggcggaaagcggctatgagcgtgagattaacactgcgcttcaggcaggcagcatccaggtgaaaatgcacccgctctcgattaagcgcgcggtggcgaatatggtggtcaatgctgcccgctatggcaacggctggattaaggtcagcagcggcaccgagtcgcatcgcgcctggtttcaggtagaagatgacgggccgggcattaagccggagcagcgtaaacatctgttccagccttttgtgcgtggcgacagcgcccgtagcaccagcggcacagggctggggctggcgattgtgcagcgcattatcgataaccataacgggatgctggagattggcaccagcgagcgtggcggattgtcaattcgcgcctggctaccggttcctgtggctcgcgtccaggggacgacaaaagaggcataa

SEQ ID NO: 371053 - DNA, 1620 bp, Salmonella enterica
atgcgcgttaacaatttaaccccgcaagatctcaaggcttatggtatcaacgacgtccaggatatcgtttacaatcccagctacgacaccctttatcaggaagaacttaatcctggtctggaaggctatgagcgtggcgtgttaactaacctgggcgctgttgccgttgataccggtatttttaccggtcgttcgcctaaggataagtatattgttcgcgacgacaccacgcgtgatacgctgtggtggtccgataagggtaaaggtaaaaacgataataagccgctttcccaggaaacctggcaacacctgaaaggtctggtgacgcatcagctttctggtaaacgcttattcattgttgatgcgttctgcggcgcaaatgccgatacgcgtctttccgtgcgctttattacggaagtcgcctggcaggcccacttcgttaaaaatatgttcattcgcccaacggacgaagagctggtaggcttcaaacctgactttattgtcatgaacggcgcgaagtgcaccaacccgcagtggaaagagcaaggactgaactcggaaaacttcgtggcgttcaacctgactgaacgtattcagcttattggcggcacctggtacggcggcgaaatgaaaaaagggatgttctcggtaatgaactacctgctgccgctcaaaggtatcgcctcaatgcactgttccgccaacgtgggtgaaaaaggcgatgtcgcggtcttcttcggcctttccggtaccggaaaaaccactctgtccaccgacccgaaacgtcgtctgattggcgatgatgagcacggttgggatgacgacggcgtgttcaactttgaaggcggctgctacgccaaaaccatcaaactgtcgaaagaagcggagccagaaatttatcatgcgattcgccgtgatgcgttgctggaaaacgtcaccgtgcgcgaagacggcaccgttgatttcgacgatggttccaaaaccgaaaacacccgcgtctcttacccgatctatcatatcgataacatcgttaagcccgtatccaaagcaggtcacgccacgaaggttatcttcctgacggcggacgccttcggcgtgttgccgccggtttcccgtttaaccgctaaccagacgcagtaccacttcctgtcaggtttcaccgctaaactggccggcaccgaacgcggcgtcaccgaaccgacccccaccttctccgcctgcttcggcgccgcgttcctgacgctgcacccgacgcagtatgctgaagtgctggtgaaacgtatgcaagcagcgggcgcgcaggcttatctggttaacaccggctggaatggcaccggcaaacgtatctccatcaaagatacgcgcgcaattatcgacgccattctgaacggttctcttgataacgcggaaaccttccgtctgccgctgttcgatctggcgatcccgactgaactgccaggcgtggatacccacattctcgacccgcgtaacacctacgcgtcgccggaacaatggcaggaaaaagccaccgcgctggcgaaactgttcattgagaacttcgagaagtatacggataccccggcaggcgaagcgctggttagcgccggaccgaagctgtaa

SEQ ID NO: 371054 - DNA, 1710 bp, Salmonella enterica
atggaaagtgtagcgctttcacgtactactcgctggggtatgttgctcaccggtttgctgcagggcgtcttgtgctacctgctgatggcctggctggtaccacaaaatagcgactggctgttctatggtatgcctgcgacgatagcgttgtcgtcaatgctattgcttaccgtggtttcttttaaacagcgcgcgctgtggggctggctggggctgacctttgtggtcgtgctggcaatgagcggctggctgaaatggcaggttgagacggtggagaaatggcgcctggccgagctcctctggctgtatggtctccggcttgtgttgatggcgatgctggtcttaccctggatgcaatatcagttacattcgcaaaccggttcggcgcgttatccccagttttatatgcggttatggcataacgtactgacattgtttatcgtcctggtcgccaacggactgttctggctggttctcctgctctggagcgcgctattcaggctggtgggcatccgctttttcagcacccttttctttgaaactgaagcctttatttatgtgaccatcggcttgattacggcgctggcggtcattctcgcccgcacgcagtcgcgccttgtggcggcggtgcaaaagctgctgacgctgatcgcgacgggtttactgccggtggtgtcgctgctggcattgctgtttattgtgacgttaccctttaccggactggaggcgatttctgcgcgtgtttccgctgcggggctgctatccacgctgacgctgatgctgctgctcctcgtggcgattgtcaatgaaccgcaaaagcgcatattaccctatccgcgcgtactacgcggcatgattagcgcctcgctgtgcgttgccccgatatatatgctgctggcgggctgggcgttatgggtacgtattcagcaatacggctggacgccggatcgtctgtatggcgcgctgacggcgtctgtcttgctggtatggtccttcggttatctgatcggtctgttacgccgcggacgcgaccctggtgagtggcaaggcaaggtgatactgagcgtctctttgttgacgctggtgatattgctgttgctggcctcgcctgtacttgatgtctggcgtattagcgtcaacagccatatggcgcgttaccatagcggtaaaattactgcggatcagatcagcctgtatatgctggatcacagcggcaaacctggccaggaagcgttgaaatcgttgcgggatgacgaggcgtttacgcagaacagaaagcgcaatcgtgaactgatgacgtttttgcagagaaataaggtctctccgacggcggacgatttagcgcgggtggtgatgattgcgcccggtagccagaagccggatgctgcattttgggcgtttgtcaaagagcagagttattcggacgattcctgccttgaaccggatgcctgcgttctggtgagtcaggatcttaacggcgacggtcagcctgagcaggtgctgtataactttattgttgccgagagccaggtctacggcttaaaagaggggaaatggacgcagaaagcgttcgcccgattgccggacgggttttctaagacgcaactgttgcacgcgattgccgggcatcggttagactcagcccccaaagcctggcgcgatatcattgttgatggtcagcggttggatgtggattactacaacgagtaa

SEQ ID NO: 371055 - DNA, 879 bp, Salmonella enterica
atgccgcaacatgaccaattacatcgttatctgtttgaaaactttgccgttcgcggcgagctggtgaccgtttcggaaaccttgcaacagatcctcgacaatcatacctacccgcagccggtgaaaaccgtactggccgaactgctggtcgccactagcctgctgaccgcgacgctgaagtttgccggcgacattacggtacagctccagggcgacgggccgttaagcctggcggtgatcaatggcaataatcagcagcagatgcgcggcgtggctcgcgttcagggcgacatccctgacaatgcggatctcaaaacgctggttggcaacggctatctggtgatcaccattacgccggaagagggtgaacgctatcagggcgtggtgggtctggaaggcgatactctggcggcgtgcctggaagattacttcctgcgctccgagcagttgccgacgcgcctgtttatccgtaccggcgatgtcgacggtaaaccggcggcaggtggaatgttgcttcaggtgatgccggcacagaacgcgcaggcggaggatttcgaccatctggctatgttgacggaaaccattaaaagcgaagagctgctgacgttaccggcaaatgacgtgctgtggcgtttgtatcacgaagaagaagtcacactctacgatccgcaagatgttgagttcaaatgcacctgttcacgcgaacgttgcgcgggcgcgctgaaaacattgccggatgaagaagtggacagcattctggcggaagaaggcgaaatcgatatgcactgcgattactgcggcaatcattacctgttcaatgcgatggatatcgcggagatccgtaacaacgcctctcctgccgatccacaggttcactaa

SEQ ID NO: 371056 - DNA, 402 bp, Salmonella enterica
atgaaagaaaagtcctccgttgaggtcagactggataaatggctgtgggccgcgcgtttttataaaacccgcgcgctggcccgcgagatgattgaaggcggtaaggtgcattacaacggccagcgcagtaagccgagcaaaatcgtcgagctgaacgcaacccttaccctgcgtcagggaaatgacgaacggacggtgatcgttaaagccatcaccgaacagcgccgtccggccagcgaagccgtcgctctgtatgaagagacggcggaaagcgtggaaaaacgcgaaaaaatggcgcaggcgcgcaagcttaacgccctgaccatgccgcatccggacaggcgaccggacaagaaagagcgccgcgacctgttacgatttaaacacggcgacagcgaataa

SEQ ID NO: 371057 - DNA, 669 bp, Salmonella enterica
atgcatattgatattgactggcaaaacgtggataccgttttgctggatatggacggcacgctgctcgatctcgcgttcgataactatttctggcaaaagctggtaccggaaacctacggcgcgcagcagggtatttcgccgcaggacgcgcaggaatatattcgccagcagtatcatgccgtacagcatacgctaaactggtactgtctggattactggagcgagcgtctgggtctggatatttgcgccatgacgacggcgcaagggccgcgcgccgttttgcgcgacgataccgtaccgtttctgaatgcgttaaaagccagcggaaaacgtcggattctgctcaccaatgcgcatccacataacctggcggtgaagctggagcataccggtctggcctcacaccttgatttattactttccacccacacatttggttatcccaaagaggatcagcggttatggcgcgctgtcactgaggaaacgggaataagcgcagagaaaacgctgtttatcgatgacagcgaaccgattctcgacgccgccgcccggtttggtattcgctactgtcttggcgtgacgaatcctgattccggcctggcggaaaagcactatacgcgccatccgtccctgaacgactaccgccgtctgatcccctcgctgatgtga

SEQ ID NO: 371058 - DNA, 2133 bp, Salmonella enterica
atgagcaccattctgatttttatagctgctttgctggcctgctctctactggcaatatggcggttccgggtaaagtccagacgagggagtttaccgtggatcagcgcctttcaggacgcgcaaacgcgtaaactgttgcccgaagagcgcagcgcggtagaaaactatctcgataaccttagccagatccagcaagttccggggccgacaggcgccagtgctgcgcccatctcgctgacgctgaacgcggaaagcaacagtgtcgtgatactgacccactccatcacccgctacggcattaccactgacgatcctaataaatggcgctactacctcgactccgtcgaagtccatctgccgcctttctgggaacagtacatcaatgatgaaaacaacgttgagctgatcctcacggatacgctgccgctggtgatctctttaaacggccacacgctgcaagagtatatgcaggagtcgcgcggctacgcgctacagaatacggcctctacgcaggcgtcgattcgcggcgaagagagcgagcagattgagctgttgaatatccgtcaggagacccacgaagaatatgcgctcagccgcccggctggcttgcgcgaagcgttgttaatcgtcgcctcctttttgttattctttttctgtctgataacgccagacgtttttgtaccgtggatgataggcggcgctatcctgctgctggcagccggactttggggactttttgcgccgccgtcgaaaagcgcgctgcgggaaattcactgtttgcggggaacgccccgccgctggggactgtttggggagaataatcaggagcagattaacaatatttcgctgggcatcatcgaccttatttaccctgcccactggcaaccctacattacgcaagatcttgggcaacaaacggatattgatatttaccttgatcgccatgtcgcgcgccagggccggtttttatccctgcatgatgaagtgaaaaacttcccgttgcagcactggttacgcagcactgttattgctatcggttcgctgctggtgttgtttatgctgctgttctggatcccgctggatatgccaatcaagttcacgctatcgtggatgaaaggcgcgcaaaccattgaagcgacaacggtaaaacagcttgaaaaggctggcgtacgggtgggcgatacgctgcacctgagcggtaaaggaatgtgtaatattcattccggcgcgacctggagcggccagtctaactcaccgtttatgccgttcgattgctcgcaaatcatctggaatgacgcgcctgcgctaccgctgccggaatcagacctggtgaataaagcgatggcgctaagccaggcggtaaatcgtcagctccatccaaaacccgaagacgactcgcgcgtaagcgcatctttacgctccgcgatacaaaaatcgggcatggtattattagatgactttggcgatattgttctgaaaaccgctgatttgtgcgcggcggaagacgagtgcgtgcgcctgaaaaatgcgctggttaatctcggtaacagtaaggactggaacgcgctggtgaaacgcgcgaacgccggcaaactggacggcgtcaacgtgctgctacgccccgtaagcgcagagtcgctggaaaatctggtcacgacctcaacggcgccgtttatttctcgcgagaccgcgcgtgccgcccagtcgctgaatagccccgctcccggcggattcctgatcgccagcgatgaaggcagcgaactggttgatcaggcctggccgtcaacgccgctgtatgactatcccgcgcaggaacagtggagcgccttccagcgtctggcgcaaacgcttatgcagacgccatttagcgccgagggcattgtcaccagcgtgtataccgatgccaacggcacgcagcatatcagcctgcatcgtatccccgataaatccggctggtggcgttacctcggcaccacgctgctgatgctggcaatgatagtgagcgcggtctacaacggcattcaggcgttcagacgttatcaacgccaccgtacccgtatggcggacatccaggaatactatgaaagctgtctcaatcccaggttaaccgtctctccggaaaatctcatctga

SEQ ID NO: 371059 - DNA, 564 bp, Salmonella enterica
atgagcaaatcattacaaaaacccaccattctgaaagtggaaaccgtcgcacaatcccgactgtttaacgtagaaagcgtggatctggagttcagcaacggcgtgcgtcgcgtgtatgaacgtatgcgaccatcaacccgtgaggcggtaatgattgtgccgatcgttgatgagcatctgattcttattcgtgagtatgcggtgggaaccgaatcctatgagctgggcttctcgaaaggattgatcgacccgggcgagaccgtttttgaagcggcgaaccgggagctcaaagaagaggtcgggtttggcgcgcataacctgaccttcttaaaaaaactcagcatggcgccctcttatttttccagcaaaatgaatatcgtggtggcggaagatctctatccggagtcgctggaaggcgacgagcctgagccattgccgcaggtacgctggccgctggcgcatttaatggatctgctagaagaccccgattttaacgaggcccgcaacgtcagcgcgctgtttctggtacgcgagtggttgaaagcgcagggccgaattgcctga

SEQ ID NO: 371060 - DNA, 2553 bp, Salmonella enterica
gtgaagttcgtaaagtatttattggtccttgcagtatgttgcatcctgctgggagcaggctcgatttatggcctttatcgctatattgagccgcagctacctgacgtcgcgacattgaaagatgtgcgtttgcaaattccgatgcaggtttacagcgcggatggcgaacttatcgcgcaatatggcgaaaaacgtcgtattcccgttacgctcgatcaaattccgccggaaatgatcaacgcctttatcgccaccgaagatagccgcttttatgagcatcacggcattgacccggtaggtattttccgtgcggccagcgtcgcgctcttctccggtcacgcatcgcagggagcaagtaccattacccagcaactggcgcgaaacttcttccttagccccgaacgcacgctgatgcgcaagatcaaggaagcgtttctggcgattcgtattgagcagttgctgaataaaaatgagatcctcgaactctatctgaacaagatctatctcggctaccgcgcctatggcgttggcgcggcggcacaggtctactttggtaagacggtcgaccagcttagtctaagcgaaatggcggttatcgccgggctaccgaaagcgccttctacctttaacccgctctactcgatggatcgggcgatagcgcgccgtaacgtagtgctttcgcgaatgttaagcgagggatatatcactcaggcgcagtacgatcaggcccgtagcgaacctatcgacgcaaattatcacgcgccggaaatcgccttctccgcgccttatctgtcggaaatggtgcgccaggaaatgtataaccgttatggcgaaagcgcttacgaagatggttatcgtatttacacgaccatcacccgcaaagtgcagcaggccgcgcaacaggcggtgcgtaataacgtgctggactatgacatgcgccacggttatcgcggcccggcgaatgtgctatggaaagtgggcgaaacagcgtgggacagtaaaaaaattaccgatacgttgaaagcgttgccgacctacggaccgctgcttcccaccgtggtcaccagcgctaatccgcaagaggcgaccgctgcgcttgccgacggtacgtccgtttcgctacatatggaaggaatgcgttgggcgcggccttaccgctcggatacgcagcaggggccgacgccgcgtaaagttaccgatgtcgtccagacaggtcagcaaatctgggttcgtcaggtggataacgactggtggctggcgcaggtaccggaagtgaactccgcgctggtttcgcttaacccgcaaacaggcgcggtactggcgctggtcggcggtttcgattttaatcagagtaaatttaaccgcgcgacgcaagctttgcgtcaggtggggtcgaacatcaaaccgttcctctacaccgccgcaatggataaagggctaacgctcgccagtatgctcaacgatgtgccgatttcccgctgggacgccggggcaggttcagactggcgtccgaaaaactccccgccgcagtacgccggaccgattcgtttacgccaggggctggggcagtcgaaaaacgtggtgatggtacgcgccatgcgcgccatgggcgtcgactatgcggcggagtatctgcaacgcttcggcttcccggcgcagaatatcgtgcataccgaatcgctggcgctgggctccgcctccttcacgccgatgcaggttgcgcgcggttatgcggtgatggcgaacggcggtttcctgatcgacccgtatttcatcagcaagattgagaacgatcagggcggcgtgatcttcgaagcgaaaccgaaaatcgcctgcccggagtgcgatatcccggtcatttacggcaatacgcagaaatccgacgtgctggaaaacaccaatgtggaagaggtcgcggtttcgcaagagcagcaaaacagcgccgtaccgatgcctgagctggaacaggcaaaccaggcgctggtcgcgcaaaacggcacgcaggagtacgcgccgcatgtgatcaatacgccgctggcgtttctgattaaaagcgcgctgaacaccaatatcttcggcgaacccggctggatgggtaccggctggcgtgcggcgcgtgaccttaaacgtcgcgatatcggcggcaaaaccggtacgaccaacagctcgaaagacgcatggttctccggctatggtcctggcgtcgtcacttccgtatggatcggctttgacgatcaccgccgtgatttaggccgcactaccgcttccggcgcgatcaaagatcaaatctccggctatgagggcggcgcgaagagcgcgcaacctgcatgggacgcctatatgaaagccgtgctggaaggcgtgccggaacagccgctaacgccgccgccgggcatcgtcacggtgaatatcgaccgcagtaccggacaactggcgagcggcggtaacagccgtgaagagtatttcatcgaaggcacgcagccgacacaacaggcggtacacgaggtgggaactaccattattgataatggtgaaacacacgaactgttctga

SEQ ID NO: 371061 - DNA, 780 bp, Salmonella enterica
atggcttttaaaacctggcaaataggattgcatattcagcagcatgaagcgctggccatcgccgttattcgcggcgcatcgggctggtctctgcaacgttggtggcgactgccgctgatgaacgcctccacggcagagggtacgattcctgacccgcaatcgctggctcacgtactgcgaccctggagccgtgagctgccgctacgtcaccgtatttatctctcttttcccgcaaatcggacattgcaacgcgcttttccacatccgccgatgcgtctgcgggaacgtgagcaagtcgcatggctttcacaaacgatggcgcgtgagctggatatggatccggacttattgcgtttcgactttcaggacgatgcgctgagccccgcgttcaacgttaccgccgtgcaaagcaaagaaatttcagcgctgttaacgctggcgcaaacgctcaatgtgcgcatcgctgctgtaacgcccgatgcctgcgcgttacagcgcttgctgccgtttataccttcggggcggcaatgtctggtctggcgcgatgagagccagtggctgtgggcgacgcgctatgcgtgggggcgtaaatcggcgcgcgaggcgacgacgctgcatgaccttgccgcaacattatccgtcgtgccggaacatatttcgttatgcgccgagggcgaattcgacccctggcgcgccgtaaccgtccgccaaccgccggttccgccggacggttatcgctttgcgattgcgctgggtttagccataggggagatacgctga

SEQ ID NO: 371062 - DNA, 540 bp, Salmonella enterica
atggcgcattctgtcaatttgctcccctggcggcgccaacattacgtagcgcgtctgcggctgtggtgcgtggtatggggcgcgtccctgctgctgatagcaagcctcgcgacgatcgcccggttggttttttggcaggaggggaggattaatgaactgctactgacggcggaaaacggacacacgacggcgcttgcggcgaacataccgcagttgcagcagcgtcagcggcagcaacaggcgcgattacaacgtcaggcgcagcgtgaactgacgcaagcctggcaatctatcttgactgaccttgccaacctgttgccagagcaggcatggctgacaagcctcaattatcagcaagagacgctagagctggaagggctggcgagaacgtttgacgccctgctcacgcttgagacatcgcttcgtcactatgtcagttttccgctaaaccgcacgggcgccacgcagcaggatgcgcaagggcgctggcagttccattatcagttaacgaggagcgccgcccgtgaacgcgctctttga

SEQ ID NO: 371063 - DNA, 474 bp, Salmonella enterica
gtgaacgcgctctttgatatctggtacgggatgtcgcgccgtggtcgggtttttggttggtgtgcaggcgtgctgtgcctgacgctgacggtcacgttatctgtgggctatcccggctggaagacgctgcatacgcaacaaacgcggttaagccagcagcgcgaggccgcccggcaacagtggcgtcatctgcgccgtctgagcgtcgcggctgaaccgctgttcgggcgcaccgtggaaaatccgcgtcctttttcgccgttagatttccaggcgcctcccctgcgtttgctgcactggcagccatcggcgcaggggggagaaatggcgctgaaaacgtcctgggatgcggtgccgtcgctgtttgtccggttggccgaaagcgagatgagcgtaagtcggttttcattgcgtaaagagggggcggaattattgatgacgctgcaactggagcgcctggcgaatgaaggctag

SEQ ID NO: 371064 - DNA, 402 bp, Salmonella enterica
atgaaggctagccgcagtgtattgctctgtttttgtttgctgatgttgacaggaatgcgcgatcccttccgcccgccggaagatcgctgccggatagcggaactctcgcagtggcggtatcagggcgcggtgcgtaaaggcgagcgatggacaggcattcttaaagatagtcagcaaaaatggcgacgagtggaagaagggcagacgctggaaaacggttggacgattgtccgcctgacggcggaagccttaacgttaacgaccggtaaaaattgtgcgccgccgcagtggcggtggctacgtcagggagcggacaatgaagcgatggatagccataatactgatagccttgatgcccgccgcgcaggcgggaaaagcggcgaaagtgacgctggtggttga

SEQ ID NO: 371065 - DNA, 1203 bp, Salmonella enterica
atgcccgccgcgcaggcgggaaaagcggcgaaagtgacgctggtggttgacgacgtccctgtggtgcaggttttgcagactttagccgaacaggagcggcagaatctggtggtgtcgccggacgtcagcgggacattatcgctacatctgacggatgtgccgtggaaacaggcgctacagacggtggtcaatagcgctgggctggtgctgcgtcaggaggggaatattctccatgttcattcacaggcctggcagaaagaacacagtgcgcggcaggatgccgagcggttaaggcttcaggctaatttaccgctggaaaaccgcagcattagcctgcaatacgccgatgccgccgaactggcgaaagcgggcgagaaactcctgagcgcgaagggaaccatcatggtagataagcgcaccaaccgcatgctgttgcgcgataaccgcgcggcccttgcggagctggaaaaatgggtatcgcaaatggatctgccggtggcgcaggtggagctggcggcgcatatcgttaccattaacgaaaagagtctacgggaactgggcgtaaagtggacgctggctgacgcgacgcaagcgggctcggtgggtgacgtgacgacgctttccagtgatttatctgtcgccgccgccacctcacgcgtcgggtttaacatcgggcgcattaacggacgcttgctggatctggagctgtcagcgctggagcaaaagcagcagttggatattatcgccagcccccggctgctggcttcccatctgcagccagccagtatcaagcaaggcagcgaaattccttatcaggtttccagcggcgaaagcggcgcgacctccgtggaatttaaagaagcggtgctggggatggaggtgacgcccaccgttttgcaaaaagggcgcatccgcctgaagttacatatcagccagaatgttcccggtcaggtactacaacaggctgacggcgaagtgctggcgatagataaacaggaaattgaaacgcaggtagaggtaaaaagcggcgagacgctggcgctgggcggtattttttcgcgaaaaaataaatcgggtagcgatagcgtgccgctgttgggggatattccctggcttggtcagctcttccgccatgacggcaaagaggacgagcgacgcgaattagtggtgtttatcacccccagactggtggcgacagaataa

SEQ ID NO: 371066 - DNA, 522 bp, Salmonella enterica
atggcagagaaacgcaatatctttctggttgggcctatgggtgccggaaaaagcactattgggcgccagttagctcaacaactcaatatggaattttacgattctgatcaagagattgagaaacgaaccggagctgatgtgggctgggtcttcgatgttgaaggtgaagacggcttccgtaatcgtgaagaaaaagttatcaacgaattgacggaaaaacagggtattgtgctggcaaccggcggtggctctgtaaaatcgcgtgaaacgcgtaaccgtctctccgcgcgtggcgtcgtggtctaccttgaaacgaccatcgaaaaacaactggcgcgcacgcagcgtgataaaaaacgcccgctgttgcaggttgaagcaccgcctcgcgaagttctggaagcgctggctaacgaacgcaatccgctgtacgaagagattgccgacgtcaccattcgcaccgacgatcaaagcgctaaggttgtggcaaaccagattattcatatgctggaaagcaactaa

SEQ ID NO: 371067 - DNA, 1089 bp, Salmonella enterica
atggagaggattacagtcactctcggggaacgtagttacccgatcaccatcgcggctggtttgtttaacgaaccagcttcattcttgccgctgaaatcaggcgatcaggtcatgttagtgaccaacgaaaccctggcgccgctttatctggacaaggttcgcggcgtactcgaacgggcgggcgttaacgtagacagcgtgattcttcctgacggcgagcagtataagagcctgacggtgctggatacggtgtttacggcgttactgaaaaaaccgcatggtcgtgataccactctggtcgcgcttggcggcggcgtgattggcgatctcaccggttttgcggcggccagctaccagcgaggcgtacgtttcatccaggtaccaactaccttactgtcgcaggttgattcttccgtgggcgggaaaaccgccgtcaaccatccccttggcaaaaacatgattggcgcgttttaccaacccgcttctgtggttgtcgatcttgattgcctgaaaacgcttcccgcacgcgaactggcatcggggctggcagaggtgatcaaatacggcattatactcgacgcagacttcttcacctggcttgagggtaatctggatgcgctattgcgtctggacggcccggcgatggcgtactgtattcgccgttgttgcgagctgaaagccgaagttgttgccgccgacgagcgtgaagcgggcttacgtgctttactgaatcttggacatacctttggccacgccattgaagcggaaatgggatatggcaattggttacatggtgaagccgttgccgcaggtatagtgatggctgcgcgcgcatccgagcgtttggggcagttcagttctactgatacgcagcgcatcatcgctctactcgaacgggccgggctgccagtcaatggcccttgcgagatgtccgcgcaggactatttgccgcacatgctgcgagataaaaaagtgttagcgggggagctgcgtttagtgcttccgctggccatagggaaaagtgaagtgcgcggcggagtgtcgcacgaagtcgttcttagcgcgattgctgactgtcagcaggcgtaa

SEQ ID NO: 371068 - DNA, 1278 bp, Salmonella enterica
atggatgaattcaaaccagaagacgagctgaaacccgatcccagcgatcgtcgtactggtcgttctcgtcaatcttcagaacgcgataatgagccgcagatcaactttgatgacgttgatctggatgccgacgatcgccgtccgacgcgtacgcgtaaagcgcgtagtgaagaacctgaagttgaagaagagtacgaatccgatgaagacgatacggtggacgaagagcgtgttgaacgccgtccacgtaagcgtaaaaaagcggcccataagccagcctctcgtcaatacatgatgatgggcgttggcgtactggtgctgctgctgttgattatcggtatcggctccgcgctgaaagccccctcaacgtcttccagcgagccgtcggcctctggcgaaaagagtatcgatctttccggtaacgccgccgatcaggcgaatgcgacccagcctgcgccgggcgccacctccgcagaacaaaccgcgggcaatacgtcgcaggatatttcgttgccgccgatttcttcaacgccgacgcagggacagtcacctgtggtcgctgacggtcagcagcgcgtggaagtacagggcgatctgaataatgcgctgacgcagaatccagagcagatgaacaatgttgcggtgaactctacgttgccgacagagcctgcaaccgtcgcgccagttcgcaatggcagcacgacgcgtcaggcggcggttagcgaacctaccgagcgtcataccacgcgtccggaacgtaaacaggccgtcattgaacctaagaaaccgcagaccacggcgaaaaccacgactgcggaaccgaagaaaccggtcgcgccagtgaaacgtacggaaccggcagcgccagccgcgacgccgaaagcgaccaccacgacggctgcgccgacagcgacggcaagcgctgcgccggtacaaaccgcgaagccagcgcaagcctcgacgacgcctgtcgcaggcggcgggaaaagcgccggcaacgttggcgcgttaaagagcgcgccatccagccactacacattgcagctcagtagttcttcaaattacgacaacctgaacggttgggcgaagaaagagaacctgaaaaattatgtggtatacgagacgacgcgtaatggacaaccgtggtatgtgctggtaacggggatgtatgcttcgaaagaagatgctaaacgtgcggtgtccaccttacctgccgatgtgcaggcgaaaaacccgtgggcaaaaccgttgcatcaggttcaggccgatctgaaataa

SEQ ID NO: 371069 - DNA, 837 bp, Salmonella enterica
atgaaaaaaaatcgcgcttttttgaagtgggcagggggaaaataccctctgcttgatgatatcaaacgacatttgccaaaaggcgagtgccttgtcgaaccttttgtgggtgccggatcggtgtttcttaacaccgacttttctcgttatatcctcgccgatatcaacagcgaccttattagcctctataacatcgtgaagttacgtactgacgagtatgtacaggcttcgcgcgagctgtttatgcctgaaactaaccaggctgaggtctattaccaactccgcgaggagttcaacacctgccaggacccctttcgtcgggcggtactgtttttatatctgaaccgctacggttataacggactctgtcgctataacttacgcggggaatttaatgtaccgtttggtcgttataaaagaccttacttcccggaagcggagttgtaccactttgcagaaaaagcgcagaatgcgttcttttactgtgagtcatacgcagacagtatggcgcgtgcggacaagtcgtcggtggtctattgcgatccgccttatgcgccgttgtccgccacggctaacttcacagcgtatcacaccaatagttttagcctgacgcaacaagcgcatctggcggaaatcgctgagaatctggtcagtaaccggataccggtgctcatttccaaccatgatacggcgctcacacgcgagtggtatcaactcgcaaaattgcatgtcgtcaaagttagacgcagtataagcagcaacggcggcacacgtaaaaaggtggacgaactgctggctctgtaccaaccaggagtcgcaacgcctgcaagaaaataa

SEQ ID NO: 371070 - DNA, 678 bp, Salmonella enterica
atgaaacagtatttgattgccccctcaattctgtcggctgattttgctcgcctgggtgaagacaccgccaaagcgctggctgccggtgctgatgttgtacactttgacgtcatggataatcactatgtgccgaacctgactatcggcccgatggtgctgaaatccctgcgtcagtacggtattaccgcgcctattgatgtccacctgatggtcaagccagtcgaccgtatcgtgcccgactttgccgccgctggcgcgagcatcattacctttcacccggaagcctccgaacatgttgaccgcacgctacagctgattaaagaacacggctgtaaagcggggctggtattcaacccggcaacgccgctcagttatctcgattacgtcatggacaaactggatgtgatcctgctgatgtccgtgaacccaggcttcggcggccagtcttttattccgcagacgctggataaactgcgcgaagtgcgtcgccgcattgatgcgtccggttacgacattcgcctggaagtggacggcggcgtgaaggtgaacaatatcggcgagatcgccgcagcaggtgcggacatgtttgttgcggggtcggcaattttcgataaacccgactacaaaaaagtaattgatgaaatgcgcagtgagctggcaaaggtaactcatggataa

SEQ ID NO: 371071 - DNA, 759 bp, Salmonella enterica
atggataagttacagaatattcggggcgtcgcctttgatcttgacggtacgctggtggatagcgcgccgggtcttgccgcggcggtggatatggcgctgtatgcgctggaactgccggtcgcgggcgaggagcgcgtgattacctggattggtaacggcgcagacgtattgatggaacgcgcgctggcctgggctcgcgaggagcgcgccacgctgcgtaagacgatggggaaaccgcccgttgatgaagatattcctgccgaggaacaggtacgcattctgcgtaaactgttcgacaggtattatggcgaagtggcggaagagggcacttttttatttccgcatgtcgccgacacgctgggcgcgctgcacgccagcggattgtcattaggtctggtgacgaataagccgacgccgttcgtcgcgccgttgctggaatcgcttgatatcgccaaatactttagtgtggttatcggcggcgatgatgtgcaaaataagaagccgcatccggagccgctgttgctggtggcaagccggctgggcatgatgccggagcagatgctttttgtcggcgattcgcgtaatgatattcaggctgcaaaagcggcgggctgcccttcggttggcctgacatacggctacaattatggcgaagcgatcgctcttagcgagccggacgtcatttatgacagttttaacgatcttttgcccgcacttgggcttccgcatagcgataaccaggaaataaaaaatgactaa

SEQ ID NO: 371072 - DNA, 1005 bp, Salmonella enterica
atgactaagcccatcgtttttagtggcgcacagccctcaggtgaattgaccattggcaactatatgggggcattgcgtcagtgggtaaacatgcaggatgactatcattgcatctactgcatcgtagaccaacatgctattaccgtgcgtcaggacgcgcagcagctacgtaaagcgacgctggatacgctggcgctgtacctggcatgtggtattgatcctgaaaagagcactattttcgttcagtcccatgtgccggaacatgcgcagcttggctgggcgctgaactgctatacctatttcggcgagctgagccgtatgacgcagtttaaagataaatctgcgcgctatgcggaaaacattaacgccggcctgtttgattacccggtgttgatggcggcagacatcctgttgtaccaaaccaatctggtgccggtaggcgaagatcagaagcagcatctggaactgagccgcgatatcgcccagcgttttaacgggctgtatggcgatattttcaaagtaccggaaccgtttattccaaaatccggcgcgcgagtgatgtcgctgctggagccgacaaagaaaatgtccaaatcggacgataaccgtaataacgtgatcggcctgctggaagatccgaaatcggtagtgaagaaaatcaaacgtgcggtcactgactccgacgagccgccggtagtgcgttatgatgtgaaagagaaagcgggtgtctctaacctgctggatatcctttccgccgtgaccggtcagagcattcctgaactggaaaaacagtttgaaggtaaaatgtatggccatttgaaaggcgaagtggcggaggcggtttccggaatgctgtctgagttgcaggagcgctatcaccgtttccgcaacgacgaagcgttcttacagaaggtgatgaaagacggggcggaaaaagccagcgcacgtgcggccgaaacgctgaaagccgtttacgaagccattggctttgtggcgaaaccgtaa

SEQ ID NO: 371073 - DNA, 171 bp, Salmonella enterica
atgtttaaatttgtaaaaattgccgttgtggcaggggttctggcgacgctcactgcttgtactggtcatatcgaaaacaaaaaaaataactgcagctacgattatttgctgcaccctgcaatttctatttctaaaattattggcggttgcggcccggctgccgatcaataa

SEQ ID NO: 371074 - DNA, 5838 bp, Salmonella enterica
atgcaaaagaaaaaacttatttctatcgctatcgctttaacgctacaaagttattacattccggccatcgccgcagaaaataacgatgatgaaaaagaatgtcccagtaatatctcctccctgcctaaagaaaaacgcgcaaaactttcaccgacctgccttgctacacctgaaaatgataatcactggggctgggttgctggcggcgttgctgcactggtcgcaggtgtggctattggcgttgaaaataacggtggcggagattctaatcattcttataccccccctacgcccgataatggcggcgatgacaatgtgatcccgcccgacgatagcggcgatgacgatgtaaccccacccgacgatagcggcgatgacgatgtaaccccgcccgacgatagcggcgatgacgatgtaaccccgcctgatgatagcggcgatgacgatgtaaccccgcccgacgatagcggcgatgacgatgtgaccccgcccgacgatagcggcgatgacgatgtgaccccgcctgacgatagcggcgatgacgatgtaaccccgcccgacgatagcggcgatgacgatgtgaccccgcctgatgatagcggcgatgacgatgtaaccccgcccgacgatagcggcgatgacgatgtgaccccgcccgatgatagcggcgatgacgatgtaaccccgcccgatgatagcggcgatgacgacgacacgcccccagatgactctgttattaccttcagcaacggcgtcaccatcgataaaggcaaagacaccctgaccttcgacagcttcaaactggataacggcagcgttcttgagggtgccgtgtggaattattcagaacaggacaaccagtggcagctcaccaccgcggacggtaaaacgctgaacgtcaccggctgggacgtgaccgacgccaatgccgccgtgattgaaggcacccaggaaaacggtctctactggaagtacgacagccggggctatctgattattgccgacgataacaccaccgttatcagcggcgatgaccaggcgcataattccgatcgcggcatggatatcagcggccaggatcgcaccggcgtgattatttccggcgatagaaccgtcaacacgctcaccggggactccagtgtgaccgacggtgccaccggcatggttatctccggtgacggcaccaccaacaccatttcgggccactccacggtggacaacgccaccggcgcgctgatttccggcaacggcaccaccaccaatttcgccggtgacattgccgtgagcggcggcggtaccgccatcatcatcgacggcgacaacgccacgattaagaataccggtacctctaacatcagcggcgcaggctccaccggcaccgtcattgacggcaataacgcccgcgtcaacaatgacggtgatatgaccatcaccgacggcggcaccggcggccacattaccggcgacaacgtggttatcgataacgccgggagcactaccgtcagcggcgcagacgccacggcgctgtatatcgaaggcgacaacgcgctcgttatcaacgaaggtaatcagactatctccggcggcgccgtcggtacgcgcattgacggcgacgacgcccataccaccaataccggtgatatcgcggtggatggcgcgggctctgccgccgtgattatcaacggcgacaacggcagcctgacccaggcgggcgatctgctggtcaccgacggcgcgatgggcatcatcacctacggcaccggaaatgaagcaaaaaataccggcaacgccaccgtgcgtgatgcggactcggtgggttttgtggttgcaggcgaaaaaaacaccttcaaaaacaaaggggatattgacgtcagccttaacggcaccggcgcgctggtgagcggcgatatgtcgcaggttacgctggatggcgatattaacgttgtctcagtccaggacagcgaaggcgtgtttagctcagcgacaggggtgagcgtgagcggcgacagcaacgccgttgatatcaccggcaacgtaaatatcagcgccgactacgggcaggatgacctggctgccggggctcccccgttaactggcgttgtcgtcggcggcaacggcaataccgttacccttaatggcgcgctgaatattgatgacaacgatctgtccgccgccagcggacaatacctggacgttgttggcctgagcgtaacaggtgatgataacgacgttgagattgacggcggtattaatatcacccacagcgaggatccacttgatggaacctctgcagacattaccggcatcagcgtcagcggtaacagtaccgttacgctaaacggtcattctaccattgataccaacacggtagtgggggggcacgttgtactggcgcgggtcaacaacggcggctccctgattctgggtgatgactcagttgttgacgttaatgtcagttatatacccacaggctattacacctacaacgcgttgctgatggctgatggcgaaggcacatcaattgaaaataaaggcgatattacaagccatggcgtgtattccgtcattcgcgcagataacggctcggaagtcagcaacagcggagatattctggtctacgcgaccagtagcaacagtagtgaggatcgtgcagccatcacaagggctagtggcgagggatcggctgttcataacaaagccggcggcgatatcaccctcatttctgatcagacgccgcagggcagtggcggtattgaagtatacccattgaaatggtacacccacaccttttacgccatgatggcttcggattatggcgatgtcgttaacgatgagggcgccacgatccatttgcagggggcaggtgtatatggcgttaccgccagccgaggtaaagcactaaacgaaggcgatatctatctggatggccttgtcccgacgctggacgatgaaaataacatcaccagcaccagctactggcagccatcatcgctctatctcaccagctcaggaatggtggcgggttccaccgatgccgatggcgacgccaccgccatcaacaccggcaacattaccgtcaacaacgccgggttcggcatgatggcgcttaatggcggcaccgccattaaccagggcgtgatcaccctgaccgccgatgacggcgtgaccggtcaggcagacgagctggtcgggatggcggcgctcaacggcggcgtcgtcatcaacgacaccagcggcgtgattaacatcgacgccgattacggccaggcgtttctgagcgacagttccagctacatcatcaataacggctctatcaaccttaacggcagcccgatggatgatactgattcacacatgggcggcacgccaacggacaaaatctggattcagtctctgcccggcagcggcgacagcgacaccaggacctccgacacaggtttcttcaccgccggtacgctggccaactacggtactgaaaccctgaacggcgatgtggacgttaacgggggctggctgtacaacgaagcgggcgcctcgctcaccgtcaacggcaccgtgacgattaacggcggggctaacgcgctggctaactacgggacgctggacgcggacgctatttccacctggcacagcctctttaatgaagcggacggcagcatcaccaccgatctgttaacccttaatggcgacgttactttttacaataacggcgatttcaccggctccatagcgggcaccagctaccagcaggaaatcgtcaatactggcgatatgacggtggcggaagatggcaaatcgctggtcagcggcagcttctatttctataacgaagaggacgcaacgcttaccaacagcggcagcgcggtggaaggcggcgagaacaccatcatcaatctgacgcgcgccaacgattcgctgacccaggtgaacagcggcaccatcaccgccactaacggttacagcgccatcaccacggccaacggcagcaatgaccccaaatggatctggaacaccgcaaccggcgtgattaacggtattaacccggatgcgccgctaatcaatttgggccgcggctataacttcggcaaccagggcactatcaacgtgcagggcgataacgccgtggcgattagcggcggcaccagcagttatgtcattaacctggtcaatagcggcaccatcaacgtcggtaccgagcagggcaaggaggacggcaccaacggcaccgggcttatcggcatcaagggcaacggtaatgccaccaccataaacaacaccgcagacggcgtgatcaacgtttacgcggatgactcgtatgcgtttggcggcaagaccaaagccatcatcaacaacggcgaaatcaacctgctgtgcgacagcggctgcgacatctacgcgccgggtactacgggcacgcagaacgaccataacgggacagcggacatcgtcatcccggatgcgactaccgccccgaccgagggcagcatcccgacgccgccagcggatcccaacgcgccgcagcagctctccaactatattgttggcaccaacgccgacggtagctccggtacgctgaaagccaataacctggtgattggcgacaacgtgaaggtggataccggctttaccagcggtacggcggataccaccgtggtggtggataacgccttcaccggcagcaatatccagggcgcggacaacatcacttccaccagcgtggtgtggaacgcccagggtagccaggatgccgacggcaacgttgacgtcaccatgaccaaaaacgcctatgccgatgtggccaccgacagctcggtaagcgacgtggcgagtgcgctggacgccggttacaccaacaacgagctgtacaccagccttaatgtggggactaccgccgagctgaacagcgcactgaagcaggtgagcggtgctcaagccaccacggtattccgtgaagcccgggtgttaagcaaccgctttaccatgctggccgacgccgcgccgcagatcaaagatggcctggcgtttaacgtcgtagcgaaaggcgacccgcgcgcggagctgggcaacgacacccagtacgacatgctggcattacgccagacgttggatctcaccgccagccagaatctgacgctggagtatggtattgcgcgtctggatggcgacggttcgaaaaccgcgggcgataacggcctgaccggcggctacagtcagttctttggtctgaagcacagcatggcgtttgatgaaggtctggcgtggaacaacagcctgcgctatgacgtacataacctcgacagcagccgttctgtcgcctatggcgatgtcaataaaattgccgattccgacatgcgtcagcagtaccttgagtttcgcagtgaaggggcgaaaactttcaccatgatgagtgatacgctgaaagtcacgccgtatgccggagtgaaattccgtcacaccatggaagatggctacaaagagcgcagcgccggagattttaacctgtccatgaactctggcaacgaaacggcggtagactctattgtcggcctgaagctggattacgccgggaaagacggctggagcgccacagctaccctggaaggcggcccgaacctgagctacagcaagagccagcgtacagcgtcattacagggtgcggcgggtcaatcgttcggcgtggatgacggtcaaaaaggcggcggcattaatggcctggcaaccatcggcgtgaaatacagcagcaatgataccgcgctacatctggatgcctaccagtggaaggaagacggtatcagcgataaaggctttatgcttaacgttaagaaaacatttcgttaa

SEQ ID NO: 371075 - DNA, 1374 bp, Salmonella enterica
gtggaccatttgcctatattttgtcaattacgcgaccgcgactgtctgatcgtcggcggtggcgatgtcgcagaacgcaaagcacggttactgctggaagcaggcgcacgtttaacggtcaatgcgctaaccttcattccacagttcaccgtatgggcaaatgaaggcatgttgactctggttgagggtccgttcgacgaaacgcttctcgactcgtgttggctggcgatcgcggccactgatgacgataccgtcaaccagcgcgtcagcgacgcggcggagtcacgccgtatcttctgcaacgtggtggatgcgccgaaagccgccagctttatcatgccctccattattgaccgctcgccgctgatggtcgccgtctcctcgggcggcacttccccggtactggcgcgtctgctgcgcgagaaactggaatcgctgctgccgcagcatctggggcaggtcgcgcgctatgccgggcaactccgcgcccgggtgaaaaagcagtttgccacgatgggcgagcgtcgtcgcttctgggaaaaatttttcgtcaatgaccggctggcgcagtcgctggcgaatgccgatgagaaagcggttaacgcgacaaccgaacgcctgtttagcgaaccgctggatcaccgtggcgaagtcgtgctggtcggcgccgggccgggcgatgccggactgctgacgctgaaagggttacaacaaatccaacaggcggatatcgtggtttacgatcgcctcgtctccgacgacattatgaacctggtacgccgcgatgccgatcgggtctttgtggggaaacgcgcgggttaccactgcgtcccacaggaagaaatcaaccagatcctgctgcgtgaagcgcaaaaaggtaaacgcgtggtacgcctgaaaggcggcgatccctttatctttggtcgcggcggcgaagagctggaaacgctgtgtcatgccggtattcctttctcggtagtgccagggattaccgcggcttccggctgctccgcctactccggtattccgctaacccatcgcgattacgcccagagcgtacgtctggtcaccggtcacctgaaaaccggcggcgagctggactgggaaaacctggcggcagaaaaacagacgctggtgttctacatggggctgaatcaggcagcgactatccaggaaaaactgatcgcattcggtatgcaggccgatatgccggttgcgctggtagaaaacggtacctccgtgaagcaacgcgtcgtccacggtgtgctgacgcagcttggtgaattagcgcaacaggttgaaagcccggcgctgattatcgttggccgggtcgttggcttacgcgataaattaaattggttctctaattattaa

SEQ ID NO: 371076 - DNA, 810 bp, Salmonella enterica
atgtttacagacactatcaataagtgtgcggctaacgctgcgcgcatcgcacgcctgtcggcgaataatccgctcggcttctgggtcagttcggcaatggccggggcttatgtcggtctcggcatcattcttattttcaccctcggcaatctgctcgacccgtccgtgcgtcctttggtgatgggagcgaccttcggtatcgccttaacgctggtcatcatcgcaggttccgaactgtttaccggccacaccatgttcctgacgctgggcgtcaaagcaggcaccatcagccacggtcaaatgtgggctatcctgccgcaaacctggctcggcaacctggtcggttccgtgtttgtcgccctgctttacagctggggcggcggcagtttgttgccggtcgataccagtatcgttcactcagtcgcgctggcgaaaaccaccgcgcccgccacggtactgttcttcaaaggcgcgctgtgtaactggctggtttgtctggcaatctggatggcgattcgcaccgaaggcacggcaaaatttcttgctatctggtggtgtctgctggcgtttatcgcttccggctacgagcactccgtcgcgaatatgacgctgtttgccctctcctggtttggtcatcacagcgacgcctataccctgtccggaatcggacacaatctgttatgggtcactctgggcaatactttgtccggcgtcgtgttcatgggattgggttattggtatgctacgccgaaatcggagcgtcctgttccgcaaaaaaccaaccaaattaaggttacagccaaccattaa

SEQ ID NO: 371077 - DNA, 327 bp, Salmonella enterica
atgagccagtggcaaaacatctgcaaaatcgatgacatcctgccgggaaccggcgtctgcgcgctgttaggtactgaacaagtcgcgattttccgtccttaccatagcgatcaggtgttcgcgatcagcaacatcgacccgttctttgaggccagcgtgctgtctcgtggactgattgcggaacaccagggcgaactgtgggtcgccagcccgctgaagaaacagcgcttccgcctgagcgatggtttgtgcatggaagatgagcagttctctgtgaaacagtacgacgcgcgggtaaaagacggcgtggtgcagttgcgcggttaa

SEQ ID NO: 371078 - DNA, 2544 bp, Salmonella enterica
atgagcaaagtcagactcgctattatcggtaatggtatggtcggccaccgctttattgaggatctccttgataaatccgacgctagcctgttcgacattaccgtgttctgtgaagaaccccgtaaagcctatgaccgtgtccacctgtcatcctacttctctcaccacaccgcggaagagctctctctggtgcgtgaaggattttacgagaagcacggcgtaaaggtactggttggcgaacgcgcaattaccattaaccgtcaggagaaagtgattcactccagcgcgggtcgtaccgtttattatgacaagctgatcatggcgaccggttcctatccgtggatcccgccgattaaaggctccgaaacccaggattgcttcgtttaccgtaccattgaagacctcaacgctatcgaagcctgcgcccgtcgcagcaagcgcggggcggtggtcggcggcggtctgctggggctggaagccgctggcgcgctgaaaaacctcggcgtggaaacgcacgtcattgaatttgcgccaatgctgatggcggaacaactcgatcaaatgggcggcgagcagctacgtcgcaagatcgaaagcatgggcgtgcgtgtacacaccagtaaaaacacgcaagagattgttcagcagggtaacgaagcgcgtaagactatgcgttttgccgacggcagcgagctggaagtcgatttcatcgtcttctctaccggtattcgcccccgcgacaagctggctacccagtgcggtctggccgtcgcgcagcgcggcgggatcgtgattaacgacacctgccagacgtctgacccagatatctacgctatcggcgagtgcgccagttggaacaaccgcgtttacggtctggtcgcaccaggctataaaatggcccaggtcgccgttgaccatatcctcggcagtgaaaacgcctttgaaggggcggatctcagcgccaagctgaagctgctgggcgtggacgtcggcggcatcggcgacgcgcatggccgcacgccgggcgcgcgtagttacgtttacctcgatgaaagcaaagaagtctacaaacgtctaattgtcagcgaagataacaaaacgctgctcggcgcagtactggtcggcgacaccagcgattacggcaatttgctgcaactggtactgaacgccatcgaactgccggaaaacccggattcgctgatcctgccgtcgcacgcgggcagtggtaaacccgctatcggcgtggataaactgccggacagcgcgcagatctgctcctgcttcgatgtgactaaaggcgatctgatcgccgctatcaataaaggctgccataccgtggcggcgctgaaagcggaaaccaaagccggaaccggctgcggcggctgcatcccgctggtgacgcaggtactgaacgccgaactggcgaaacagggtattgaagtcaacaacaacctgtgcgagcactttgcttattctcgtcaggaactgttccacttaatccgcgtggaaggtatcaaaacctttgaagaactgctggcgaaacacggtaaaggctacggctgcgaagtgtgtaagccgaccgtcggttcgctgctggcgtcgtgctggaacgaatacatcctcaagccgcagcacacgccgctacaggatactaacgataacttcctggcgaatatccagaaagacggtacttactcggtgatcccgcgctcggcgggcggcgaaatcaccccggaaggtctggtggccgtggggcgtatcgcccgcgagtttaacctctataccaaaattaccggttctcagcgtatcggtctgtttggcgcgcaaaaagacgatctgccggaaatctggcgtcagttgattgaagccggtttcgaaaccggtcacgcgtacgccaaagcgctgcggatggcgaaaacctgcgtcggcagcacctggtgccgctacggcgtgggcgacagcgtcggtttcggcgtggagctggaaaaccgctacaaaggcattcgtaccccgcacaaaatgaaattcggcgtctccggctgtacccgtgaatgtgcggaagcgcagggcaaagatgtgggtatcatcgccacggagaaaggctggaacctgtacgtctgcggtaacggcgggatgaaaccgcgtcatgcggatctgctggcagccgatctcgatcgcgacacgctgatcaagtacctcgaccgctttatgatgttctacatccgtactgccgacaaactgacccgtaccgcgccgtggctggataatctggaaggcggcatcgagtacctgaaatcggtcatcatcgacgataagctgggcctgaacgaacatctggaagaagagatggcgcgcctgcgcgcagcggtggtctgcgagtggacagaaaccgttaacaccccatccgcacaggttcgctttaagcactttatcaacagcgacaaacgcgacccgaacgtccaggttgtgcctgaacgtgaacagcatcgtccggccacgccgtatgaacgtatcccggtcactctggtggaggaaaacgcatga

SEQ ID NO: 371079 - DNA, 270 bp, Salmonella enterica
atgggtatgtggctgatttgtctggatttttataagtggcggaattgtcaggcttttcaggtttgtacaaatgacatacaaaatgaggggtttttaggccaacaggcctaccccgtcaggaggggggatagagtgccggagggcgatgtcgccatccggcaaggattatcaatgcgtagccggcgcgctatgctgacgatgacgggagacaaagccgagcgcaaagcacatcacaaagaccactgcatacagaccattcgcggtgagtaa

SEQ ID NO: 371080 - DNA, 1182 bp, Salmonella enterica
atgactaacagcaaccgcatcaagctcacatggatcagctttctttcctacgccctgaccggggcgctggtgattgtcaccgggatggtgatgggaaatatcgcagactattttcatctgcccgtttccagcatgagtaacacctttacttttctgaacgccgggattttgatctcgatcttcctcaacgcgtggctgatggaaatcgtcccgctgaaaacacagctacgctttggttttatcctgatggtgctggcggtggccgggctgatgttcagccatagcctggcgttgttctcagcggcgatgtttgtgctggggctggtcagcgggatcaccatgtcgattggcaccttcctgattacgcaactgtatgaagggcgtcagcgcggttcccgactgctgtttaccgactccttcttcagcatggcggggatgatttttcctatggtcgccgccttcctgctggcgcgtagtattgagtggtactgggtctacgcctgcatcggcctggtctacctggcgattttcatcctgaccttcggctgtgaatttccggcgctgggtaaacatgcgcagcactctcaggcgcctgtcgccaaagaaaaatggggcattggcgtactgtttctggccgtcgccgcgctgtgctatatcctcggtcaattaggctttatctcctgggtgccggaatacgccaaaggcctcggcatgagcctgaatgacgccggggcgctggtgagtgatttctggatgtcctatatgtttggcatgtgggcgttcagctttatcctgcgctttttcgatctgcaacgcattctgaccgtactggcgggtatggcggcggtactgatgtatctgtttattaccggcacgcaggcgcatatgccgtggtttattctgacgctgggcttcttctccagcgccatttatacctccatcattacgctgggatcgcagcaaacgaaagtggcctcgcctaagctggttaactttattctgacctgcggcactatcggaacgatgctgaccttcgtcgtcaccggcccgattgtagcgcacagcggcccacaggcggcgttactcaccgcgaatggtctgtatgcagtggtctttgtgatgtgctttgcgctcggctttgtctcccgtcatcgtcagcatagcgcgccggctacgcattga

SEQ ID NO: 371081 - DNA, 573 bp, Salmonella enterica
atgctcaaatcgactctggcggctgtcgcagctgttttcgctctttctgctctttctcccgtagcgttggcagcaaaaggtgatcctcatgtgctgttaaccacctccgccgggaatattgagctggagctgaacagccagaaagcgctgatttctgtgaaaaactttgtcgattacgtcaacagtggtttctataacaacactacgtttcaccgagttattcctggctttatgattcagggcggtggttttaacgagcagatgcagcagaagaaaccgaatccgccgattaagaatgaagccgacaacggtctgcgtaatactcgcggcacgatcgcgatggcgcgcaccgcagataaagacagcgccaccagccagttctttattaacgtcgcggataacgcttttctcgaccacggccagcgcgactttggctatgcggtatttggtaaagtggtaaaaggtatggatgtcgccgataaaatctcacaggtaccgacgcacgatgtcgggccttatcagaatgtgccgacaaaaccagtcgttatcctttccgcgaaagtcctgccataa

SEQ ID NO: 371082 - DNA, 273 bp, Salmonella enterica
atgcctgcgcgggcgcgagccgcccgcgttttctccctgtctcagcgtaacctgaaattgctgcttatacttgtggtcaagcacagacatattcagggaggcccggtgaagaaacttaccgataaacaaaagtcacgcttttgggaacagcggcgcaacgttaacttccagcaaagccgccgtctcgaaggtattgagatccccttagtaaccctgaccgccgatgaagcgctggcacgtcttgacgagcttcggaggcactatgagcgataa

SEQ ID NO: 371083 - DNA, 603 bp, Salmonella enterica
atgagcgataaatttggcgaagggcgcgatccgtacctctatccggggctgaacgtgatgcgtaatcggctggggattcatcaggcccagcgactggcgcaagcggcatacgaaatgaccgcgctccgcgccgccacgattgaactggggccgctgatacgcggcttgcctcatctgtgcgcgattcatcgccagctctatcaggatattttcgactgggcagggcaactgcgggaggtcgatatttaccagggcgatacccgtttctgccactttgcctatatcgaaaaagagggcaatgctctgatgcaggatctggaagaagagggctatctggtcggtctggcgcacgagaagtttgtcgagcggctggcgcattactactgtgaaattaacgtgcttcatccgtttcgtttggggagcgggctggcgcagcgcatcttctttgaacagctggcgttacatgcaggctatgcgctgagttggcaaggtattgcggttgaaacatggaagcaggcgaaccagagcggcgcgatgggcgatctctccgctttgcaggcgatttttcagaaagcgataagcgaagctcgcgaaactgagtaa

SEQ ID NO: 371084 - DNA, 564 bp, Salmonella enterica
atgatcctgcttatcgataactatgattcctttacctggaacctctaccagtatttttgtgaactgggcgcggaagtgcaggtccggcgcaatgatgcgctgacgctggcgcacattgacgctttgaacccgcaaaaaatcgttatctctcctggcccctgtacgccgaatgacgctggcatttcactggcggtcatccgccattatgccggacgtattccgatgctgggcgtttgcctgggtcatcaggcgatggcgcaggcctttggcgcgtcggtggtgcgggcagcgaaagtgatgcacggtaaaacgtcacctgttacgcataatggacagggcgtgtttcggggattgcccagcccgttaaccgtgacacgttaccactcgctgattgtcgaccctgccacgttgcctgagtgttttgagatcaccgcctggagcgaaacgcaggagattatgggcattcgccaccgcgagtgggatctggaaggcgtgcagttccacccggaaagtattctcagcgaacaaggacacgctctgctgaaaaatttcctccggcgttga

SEQ ID NO: 371085 - DNA, 1218 bp, Salmonella enterica
atggcaactgaacaaacggctattacgcgcgcaacttttgatgaggtgattctgcctgtttatgcaccggcggactttattccggtcaaaggtaaaggcagccgcgtatgggatcagcagggcaaagagtatatcgatttcgccggcgggattgcagtgactgtgctgggccattgccatccggcactggtcgaggcgctgaaatcccagggggaaaccttgtggcataccagtaacgtttttaccaatgaaccggcgttgcgtctgggacgtaaactgatcgacgccacgtttgccgagcgcgtgctgtttatgaattctggcaccgaagcgaacgaaaccgcttttaaactggcgcgtcattatgcctgcgtgcgccatagcccgttcaaaacgaaaatcattgccttccataacgcctttcatggccgttccttgtttaccgtctctgtaggcgggcagccgaaatattccgacggctttgggccgaaacccgccgatattattcacgttcccttcaatgatcttcatgcggtgaaagcggtaatggatgaccacacctgcgcggtggtggtcgagccgattcagggtgaaggcggcgtgcaggcggctacaccggaattcctcaaagggttacgcgacctgtgtgacgagcatcaggcgttgctggtgtttgatgaagtgcagtgcgggatggggcgcaccggagacctgtttgcctatatgcactacggcgtcacgccggatatcctcaccagcgccaaagcgttaggcggcggttttccggtgagcgccatgctgaccacgcaggaaatagcctcggccttccatgtcggttcgcatggttcaacctatggcggtaatccgctggcctgtgcggtggctggcgcggcattcgatattattaatacgccagaagtactacaaggcattcacactaagcggcaacagtttgtgcaacatttgcaggcgattgacgagcaatttgacattttcagcgatattcgcggcatggggctgctgattggcgcggaactgaagccgaagtacaaagatcgggcgcgcgattttctgtacgcaggcgcggaggccggcgtgatggtgctcaatgccggagccgacgtgatgcgttttgccccgtcgctggtggtggaagatgcggatatcaatgaaggaatgcagcgctttgcgcaggcggtagggaaggtggttgcctga

SEQ ID NO: 371086 - DNA, 2088 bp, Salmonella enterica
atgtggcgaagactgatttatcacccagagattaattacgcactacggcaaacgctggtgctgtgtctgcctgtggctgtcggtttattgataggccagctacacctgggcttgcttttctctctcgttcccgcctgctgcaacattgcaggtctggataccccgcacaaacgtttttttaaacgcctgatcatcggcgcgtcgctgttcgccggatgcagtctggtaacgcaacttctgctggcggaatccatccccctgccgttgatcctgaccgggctcacgctggtgcttggcgtgacggcggaaattagcccgcttcacgcgcggttactgccagcgtcgctgattgccgccatctttaccctgagtcttgcaggatacatgcccgtctgggagccgctgctcatttatgcgctgggcacgctatggtacggcgtgtttaactggttttggttctggctatggcgcgaacagccgctgcgcgagtcattgagtttgttataccgtgaactggccgattattgcgaagcgaaatacagcctgctcacccaacatatcgatccggaaaaagcgctgcctcccctgctgatacgccagcaaaaagcggtcgatctcattacccagtgttaccaacagatgcatatgctttcggcgcacaacaataatgattacaagcgcctgttacgggcttttcaggaagcgatggatttgcaggagcacatctccgtcagcttgcatcagccggaagaggtacagaaactggtagaacgcagccatgcggaagaggtgattcgctggaatgcgcaaacggtcgccgcccgtctgcgcgtgctggcggatgacattctttatcatcgtctgccgacgcgcttctccatggaaaaacagattggcgctctggagaaaatcgccaatcagcatcctgaaaatccggtaggccagttctgctattggcacttcagtcgaatcgcccgtgtgctgcgtactcagcggccgctgtacgcccgcgacctgatggccgataaacagcgtcgtttgccgctacttccggcgctgaaaaattatatgtctcttaaatcaccggcgctacgcaacgccggacgcatcagcgtgatgatgagcatcgccagtctgatgggcagtgcgttgcacctgcctaaaccgtactggatactcatgacggtgctgtttgtcacccaaaacggctatggcgcgacgcgcgtacgtattctgcaccgttcagtcggaacgctggtcggcctggtgattgccggcgtcacgctgcacttacatattcccgaaagcattacgctggcggtcatgctggtactaacgctggcaagttatctgattattcgtaaaaactacggctgggcgacggtcggctttacggtgacggcggtatacaccatccagttactgacgttaaacggagagcagtttattgtgccgaggctgatcgatacgctgattggctgtttaattgcctttggcggcatggtctggctgtggccgcaatggcaaagcgggctattacgtaaaaacgcccatgatgcgctggaagccgatcaagaagctatccgactgatcctcagtaacgatccgcaggccaccccgctcgcttatcaaagaatgcgggtcaaccaggcgcataacacgttattcaactcgttaaatcaggcaatgcaggaacccggattcaatacccactatctgtcggatatgaaactgtgggtcacgcacagccagtttattgtcgagcatatcaacgctatgacgacgctggcgcgggaacacaccatgctgacgcctgatctggcgcagcgctatctggaatcttgcgagattgcgattcagcgctgccagcagcgcctggagtacgacaggccaggcggctccggcgatgtcaatattctggagtcgccggacatgccgtcacatggcttattgagcactctggaacaacatttacagcgcatcattggccatctgaacaccatgcacaccatttcgtcgatggcctggcgtcagcgtccgcatcacggtatctggctgagtaagcggctacgggatacaaaaagttaa

SEQ ID NO: 371087 - DNA, 633 bp, Salmonella enterica
atggtgcttggcaaaccgcaaacagacccgactcttgaatggttcttgtctcattgccacattcataagtacccgtcaaagagcacgctgattcaccagggtgaaaaagcagaaacgctgtactacatcgttaaaggctccgtggcagtgctgatcaaagatgaagaagggaaagaaatgatcctttcttatctgaatcagggtgattttattggtgaactgggcctgtttgaagaaggccaggaacgcagcgcctgggtacgtgcgaaaaccgcatgtgaggtcgctgaaatttcctacaaaaaatttcgccaattaatccaggtcaacccggatattctgatgcgcctctcttcccagatggctcgtcgcttacaagtcacctctgaaaaagtaggtaacctcgccttccttgacgtcaccgggcgtatcgctcagacgctgctgaatctggcgaaacagcccgatgccatgacgcacccggatgggatgcagatcaaaatcacccgtcaggaaatcggccagatcgtcggctgctcccgcgaaaccgttggtcgtattttgaaaatgctggaagatcaaaacctgatctccgcgcatggcaagaccatcgtcgtctacggcacccgttaa

SEQ ID NO: 371088 - DNA, 405 bp, Salmonella enterica
atgcaagcgcgtgtaaagtgggttgaagggctcacgttcctcggagagtcctcctccggccaccagattttaatggatggtaactccggtgacaaagcgccgagtccgatggagatggtattaatggcggctggcggatgtagcgctattgatgtggtatcaatcctgcaaaagggccgtcagaatgtcaccaactgcgaagtgaagctgacatccgagcgccgggaagacgcgccgcgcctgtttacgcacattaatctgcattttatcgttaccggcagcgatctgaaagaggctgccgtcgcgcgcgctgtcgatctctccgcggaaaaatattgctcggtggcgctaatgctggaaaaagcggtcaatattacccattcgtatgaagtgattgcggcgtaa

SEQ ID NO: 371089 - DNA, 870 bp, Salmonella enterica
atgtcagccaaacatccggtgatagcagtaacagggtcaagcggcgcggggaccaccaccaccagcctcgcgtttcgtaaaattttcgcgcagttaaatctgcacgccgccgaggtggaaggcgacagttttcatcgttacacccgcccggaaatggatatggcgatccgcaaagcgcgtgacgccgggcggcatatcagctatttcgggcctgaagccaatgacttcagcctactggaacatacctttattgagtacgggcagacgggtaaaggccagtcgcgtaaatatctgcatacctatgatgaagccgtaccgtggaatcaggttcccggcacgtttaccccctggcagccgcttcccgaaccgaccgatgtgctgttttatgaaggactgcacggcggcgtcgtcaccccgcaacatgatgtcgcgcgtcatgttgatctgttggttggcgtggtgcctatcgtcaacctcgagtggattcagaaactgattcgcgacaccagcgagcgcggacactcccgtgaagcggtgatggattccgtggtgcgttccatggacgactacatcaattacattacgccgcagttctcgcgtacccatatcaacttccagcgcgtaccgaccgtcgacacgtccaatccgttcgccgcaaagggtattccctcgctggatgagagttttgtggtgatccatttccgcaatctggaagggatcgattttccctggctcctagcgatgctccagggctcgttcatttctcacattaatacattagtggtgccgggcggcaaaatggggctggcgatggagctgattatgttgccgctggtgcagcgattaatggaaggcaaaaaaatcgaataa

SEQ ID NO: 371090 - DNA, 219 bp, Salmonella enterica
atgatcattccctggcaggggctcgcccccgacacgctggacaacctgatcgaaagctttgtgttgcgcgaaggcaccgattatggtgaacatgaacgttcgcttgaacaaaaagtcgctgacgtaaaactccaactgcaatccggcgaggccgtgctggtatggtctgaattacatgaaacggtcaatattatgccgaaaaagcagtttcgcgaataa

SEQ ID NO: 371091 - DNA, 1023 bp, Salmonella enterica
atggttgagatcacgtccacagaaatgaccccgcctgtcaatgactcgcatgaatttattcccatgcgtggcattcgtaatcgccatttacaaactatgctgccgcgcttaatccgccgcaaagtgaagttcaacgcccactggcagcggctggagctaccggacggcgattttgtcgatctggcatggagcgaagaaccgcaacaggcaaagcataaaccgcggctggtggtctttcacggtctggaaggcagcctgaacagcccctatgcccacgggctgattgaggcggcgcaaaagcgcggctggctgggcgtggtgatgcactttcgcggctgtagcggcgaacccaaccgtctgaatcgtatttaccactccggtgaaacggaggacggagcctggtttttacgctggctacagcgggagttcggcgccgttccgacagccgccgtgggctattcgctcggcggtaatatgctggcgtgcctgctggcgaaagaaggccgcgatattcccatcgaggcggcggtaattgtttctgcacctttcgttctcgaagcctgtagctaccacatggacaaagggttttcccgcgtctatcagcgttatttgcttaatctgttaaaagcgaatgcgtcacgcaagctggcggcgtaccccgggtcgctgccggtgaatctggcgcaactgaaatcaatgcgccgtattcgcgagtttgacgacctgatcaccgcgaaaattcacggctttgccgacgccatcgactactatcgtcagtgtagcgccatgccgttgcttaaccagattgctaaaccgacgctgattattcacgctaaagacgatccgtttatggatcatcatgtgatccctaaagcggaagatctgcccccgcaggtggagtatcagctaactgagcatggcggacacgtaggatttatcggcggtacgccgctgcgccctgaaatgtggctggaacgccgaattcctgactggctgacaacgtacctggaggcgtcatcatga

SEQ ID NO: 371092 - DNA, 312 bp, Salmonella enterica
atgtcgaagacacttttacagatccattttaactttagcggcccttttggcgaggagatgactcagcaactggtcgggctggcggagtctatcaatgaggagccgggcttcatctggaaaatctggacagaaagcgagaaaaaccagcaagctggcggcatttacttgtttgaatccgaagaaacggcgcgggcttatattaaaaaacacactgcgcgtctgaaaaatcttggcgttgatgaggtgacgtttaaattatttggcgtgaacgacgcgctgacgaaaataaatcacggcaacctttgccgctaa

SEQ ID NO: 371093 - DNA, 222 bp, Salmonella enterica
atgaacctgtcaattaccgatgacattaccttccgcaagctcaccatcttaatgatgcttgtggagaagggtaacatcgcccgcaccgccgaggcgctgcacacgctgaaagagaacgttcgttgtccgctgttcgtccataaaggcctcttcggtactcgtcccgatataaaggttaccgttgcggtcggcagcaccggaacagaaggctgcgttatgtga

SEQ ID NO: 371094 - DNA, 1908 bp, Salmonella enterica
atgattgttttctcctcgttacaaattcgtcgcggcgtgcgcgtcctactggacaatgcctcggctatcattaatccaggccagaaagtcggcctggtgggtaaaaacggctgcggtaaatctaccctgctggcattgctaaaaaatgaaatcagcgccgatgccgggagttttaccctgcccggaacctggcaattagcgtgggtgaatcaggaaacacctgcgttgcctcagccagcgattgagtatgtcattgacggcgaccgtgaataccggcagctggaggcgcagcttaacgacgccaacgaacataacgacggacatgctatcgcctccatacatggcaagctggacgccatcgacgcatggaccgttcgttcgcgcgccgccagcctgctacacggtctcggcttctctaacgatcagctggaacgtccggtcagcgacttttccggcggctggcggatgcgccttaacctggcccaggcgctgatttgccgttccgatttactgctgctcgacgaaccgaccaaccacctcgatctggatgccgttatctggctggaaaaatggctgaagagctatccgggcaccctgattctgatctcccacgatcgcgattttcttgacccgatagtggataaaattatccatatcgaacaacagactctgttcgagtacaccggcaactacagcgcgtttgaagttcagcgcgccacgcgcctggcgcagcagcaggcgatgtatgagagtcagcaggagcgtgtggcgcatctgcaaagctacatcgaccgtttccgcgccaaggccaccaaggccaagcaggcgcaaagccgtatcaagatgctggagcgtatggagttgattgcgccggctcatgtcgacaacccgttccatttcagcttccgcgcgccggaaagcctgccgaacccgctgctgaaaatggaaaaagtcagcgcaggttatggcgatcgcatcattctggaatccatcaagctgaacctggtgcccggctcgcgtatcggcctgctgggccgcaacggcgcggggaaatcgacgctgatcaagctgctggcgggcgaactggaaccgttgcacggtgaaatcggcctcgccaaaggcattaagctcggctacttcgcccagcaccaactggagttcctgcgcgccgatgaatccccgttgcagcatatggcgcgtctggcgccgcaggaactggagcagaagctgcgcgactatctcggcggcttcggtttccagggcgacaaagtaacggaagagacgcaacgtttctccggcggcgagaaagcgcgcctggtactggcgctgatcgtctggcagcgtccaaatctgctgttgctcgatgaaccgaccaaccacctggatctcgacatgcgtcaggcgctcaccgaagcgctgattgatttcgaaggcgcattggtcgtcgtgtcgcacgaccgccacctgattcgctccaccactgacgacctctatctggttcacgacaaaaaggtcgaaccgttcgacggagacctggaagattatcagcaatggctgagcgacgtgcagaaacaggaaaaccaggccgacaacgcgccgaaggaaaacaacgccaacagcgctcagtcacgcaaagatcagaagcgtcgcgaagccgagctacgcactctgacgcaaccgctgcgtaaagagattacccgtctggaaaaagagatggaaaagctcaacgcccaattagcgcaggcggaagagaagctcggcgacagcagcctgtatgaccccagccgtaaagcggagatgaccgagtgtctgcaactgcaggccagcgccaaatccgggctggaagcgtgtgaaatggcatggcttgaggcgcaggagcagcttgagcagatgatgcagaacgactaa

SEQ ID NO: 371095 - DNA, 552 bp, Salmonella enterica
atgtctcagccagcgaaagtcttgctgttgtatgcccatccggaatctcaggactcggttgctaaccgggtactgcttaaaccggccatacagcacaataacgtaaccgtgcacgatctttatgcgcgctatcctgatttttttatcgacacgccctatgaacaagccctgttacgtgagcacgacgtcattgtttttcagcatcccctttacacctatagctgtccggctttactgaaagaatggcttgatcgcgttttgagtcgggggttcgccagcggaccagggggaaaccaactggtgggaaagtactggcgtagcgtgattacgaccggcgagccggagagcgcttaccggtatgacgcgctaaaccgctatccaatgagcgatgtactccgcccctttgaactgaccgcggccatgtgtcggatgcactggatgccgcccattattgtgtactgggcgcgccgccagtcgccgcagacgctggccagtcatgcgaaagcctatggcgagtggctggcgaatcctgtgagcgcgggaggctattga

SEQ ID NO: 371096 - DNA, 1806 bp, Salmonella enterica
atggaaggtgctgatttattgaccgcgggagtgttgttcctcttcgcggcggtggcggcggtgccgttagccgccaggctgggcatcggcgcggtgctagggtatttgctggcgggaatcgcgattggtccgtggggactgggcttcatcagcgacgtcgacgaaattcttcacttctccgaactgggcgtcgtgtttctgatgtttatcattggtctcgaactcaatccgtcccggctttggcaactgcggcgctctatcttcggcgtcggcgctgctcaggtgctgttaagcgcggcggtgctggcgggattattgatgcttgctgatttcttatggcaggcggcggtcgtcggcgggattggcctggcgatgtcttcgacggcgatggcgctacaactgatgcgcgagaaaggcatgaatcgtagcgagtccgggcagttagggttttccgtcttactgtttcaggatttagcggtgatccccgcgctggcgttggtgcctttattggcgggatcggccgacgagcatttcgactggtttaaagtggcaatgaaggtactggctttcgcggtaatgctgattggcggtcgttacctgctgcgcccggtatttcgttttattgctgcgtctggcgtgcgggaggtcttcactgccgcgacgctgttgctggtgttgagcgccgccttatttatggatgcgctgggactgtcgatggccctgggaaccttcattgccggcgttttactggcagagagtgaataccggcatgagctggaaaacgctatcgatccctttaaaggtttactgcttgggctgttctttatctccgtcggtatgtcgctaaatctcggcgtactttatacccatttactgtgggtggcggcgagcgttgttattctggtcgtcataaaaatgttgacgctgtatctgctggcgcggctatatggaataagaagttctgaacggatgcagtttgccagcgtgctgagtcaggggggcgagttcgcttttgtgctcttttctaccgcctcttctcagcgcctgtttcagggcgatcagatggcgttattattggtgactgtcacgttatcaatgatgaccacgccgctactgatgaaagggattgataagtggttatcgcgccgccttaatggcccggaagagaatgatgaaaagccgtgggttgaggatgataagccccaggtaattgtcgtcggctttggccgttttggtcaggtgatcgctcgcttattgatggcgaataagatgcgtatcaccgtgctggaacgcgatatcggcgccgttaatctgatgcgcaaatatggttataaagtgtattacggcgacgctacacaagtcgagctgctgcgttctgcgggcgcggaagcggcggagtcgatagtcatcacgtgtaatgaaccggaagacacgatgaagctggtggagttgtgtcagcagcattttcctcatctgcatattcttgcgcgagcgcgtggacgtgtggaggcccatgagttattacaggctggcgtcacgcagttttcccgtgaaacgttttccagcgcgctggaactgggacgtaaaactctggtgtcgttaggtatgcatccgcatcaggcgcaacgcgcgcagttgcattttcgtcggctggatatgcgaatgctgcgggagctgatcccggagcatagcgacatggtacagatttcgcgcgccagagaggcccgacgcgagctggaggagatttttcagcgcgaaatgcaacaggagcgtcgccagctggatggctgggatgaatttgagtag

SEQ ID NO: 371097 - DNA, 201 bp, Salmonella enterica
atggcaatccgtaaacgttttattgcaggcgcgaaatgtccagcctgtcaggcgcaggacacaatggcgatgtggcgtgaaaataatgtcgatattgttgaatgcgttaagtgcgggcatcaaatgcgggaggcggataaagacgttcgcgagcatgttcgcaaagaagagcaagtgattgggatttttcatccggactag

SEQ ID NO: 371098 - DNA, 591 bp, Salmonella enterica
atgaaagtagcaaaagacctggtggtcagcctggcctatcaggtacgtacagaagacggtgtgttggttgatgagtctccggtgagtgcgccgctggattacctgcacggccacggctctctgatctctggcctggaaacggcgctggaaggccatgaagttggcgacaaatttgatgtcgctgttggtgcgaacgacgcttacggccagtatgacgaaaatctggtgcagcgtgtgcctaaagacgtctttatgggcgttgatgaactgcaggtagggatgcgtttcctggcggaaaccgaccagggcccggtaccggtagagattaccgaagtggaagacgatcacgttgtggttgatggtaaccacatgctggcgggccagaatctgaaatttaacgtagaagttgttgcgattcgtgaagcgactgaagaagaactggctcacggtcatgttcacggcgcgcacgatcaccaccacgatcacggtgaagacggttgctgtggcggtcatggtcatgaccatggtcacgagcacggcggcgaaggctgctgcggcggtggtggtaaaggcggttgcggttgccattaa

SEQ ID NO: 371099 - DNA, 219 bp, Salmonella enterica
atgcaggatatcacgatggaagctcgtctggctgaactggaaagccgtctggcgttccaggagattaccatagaagaactaaacctgacggtaaccgcacatgaaatggagatggcgaagctgcgcgatcatctgcgtttgctcacggaaaagttaaaagccagtcagccgtcaaatatcgcctctcaggcagaagaaacgccgccgccgcattattga

SEQ ID NO: 371100 - DNA, 819 bp, Salmonella enterica
atgaaatcactgtttaaagccacgctgctggcaacgacgatggccgttgctatgcacgcaccgatcacttttgctgctgatgcggcgaaaccggcagctaccgctgatagcaaagcagcatttaaaaacgacgatcaaaaagcggcttatgcgctgggcgcctcgctgggtcgttacatggaaaattcgcttaaagagcaggaaaagttgggcatcaaactggataaagatcagttgattgccggcgttcaggatgcctttgccgataagagcaaactgtccgatcaggaaattgagcaaacgctgcagacgtttgaagcacgtgtgaagagcgctgctcaggcgaagatggaaaaagacgctgccgataacgaagcaaaaggtaaaacgttccgtgacgcttttgctaaagagaaaggcgtgaaaacctcctctaccggtctgctttacaaagtagagaaagaaggcacaggcgaggcgccgaaagatagcgataccgttgtggtgaactacaaaggtacgctgatcgacggtaaagagtttgataactcttacacgcgcggcgaaccgctctccttccgtctggacggcgttatccctggctggactgaaggcctgaaaaatattaagaaaggcggcaagatcaagctggttatcccaccggcgctggcctacggtaaaacgggcgtcccgggtatcccggcgaactccaccctggtattcgacgtagagctgctggatatcaaaccagcgccgaaagcggatgctaaacctgccgatgcggctgacgctaaagccgcagatgctgctaaaaaataa

SEQ ID NO: 371101 - DNA, 723 bp, Salmonella enterica
atgtccaggtcgcttttaaccaacgaaaccagtgaacttgatttgctggatcagcgtcccttcgagcaaaccgacttcgatattctgaaatcctacgaagcggtagtggacgggttagcgatgcttataggttcccattgtgaaatcgtattgcactctttgcaggatctaaaatgttcagccattcgtattgccaatggcgaacatacgggccgtaaaattggctcgccgattaccgacctggcgttgcgtatgttgcacgacatgacaggggcggacagtagcgtgtcgaaatgctatttcacgcgcgcgaaaagcggtgtcttgatgaagtcgttgacgattgccattcgcaaccgcgagcagcgcgtcattggtctactgtgcatcaacatgaatcttgatgtgccattttcacagattatgaatacctttattccgccggaaacgccggaagtcggctcagcggttaattttgcctcctcagtcgaagatttagtcacccagacgctggagttcacgatcgaagaagtgaatgccgatcgtaatgtctctaacaatgcgaaaaatcgtcagatcgtccttaacttgtacgaaaaaggcattttcgatattaaagacgccattaaccaggtagccgatcgtctgaatatctcaaaacacacggtttacctctatattcgccagttcaaaagcggcgattttcaggggcaggataaataa

SEQ ID NO: 371102 - DNA, 387 bp, Salmonella enterica
atgcgttatgccattatggtcaccgggccggcatatggcacccagcaggccagcagcgcattgcagttcgcccacgcgctgctcaatgaggggcatgagttagccagcgtctttttctatcgggaaggtgtctataacgccaatctcctgacctcgccggcgagcgatgaatatgatctggtacgcgcctggcagaaattgaatacgcagcatggcgtagcgctgaacatctgtgtcgcggcggcgcttcgtcgcggtattattgatgaaactgaagccggcagactggagttgccgtccgccaatcttcagccgggctttacgctaagcgggctgggcgcgctggcggaggcatctctcacctgcgatcgggtggtgcagttttaa

SEQ ID NO: 371103 - DNA, 357 bp, Salmonella enterica
atgaaacgtattgcatttgtcttttccaccgcgccgcacggcagcgcctcaggccgtgaaggactggatgcgctgctggcgacgtcagcgctaacggaagcgctgggcgtcttttttatcagcgacggcgtctttcagttattaccgggacaaaaaccagacgctgtgctggcgcgtgactatattgctactttcaagctctttgatttgtacgatattgatcaatgctggatctgcgcggcatcgctgcgcgagcgtggtctggagaacgttaattttgtggtagacgccacgccgctggaacccgtggcgttacgccgcgagcttggcaactatgatgtcatcctgagattctga

SEQ ID NO: 371104 - DNA, 288 bp, Salmonella enterica
atgctgcataccttacctcattgcgcttcgagcgttgattttcccgctttgctgcgcctgctaaaagagggcgatgcgcttttgttgctccaggatggcgttaccgtcgcgattgaaggtaaccgcttccttgaaagtctgcgcgatgcccccataacggtctatgccttgaaagaagacattgacgcccgcggcctgggtggtcaaatttcagacagtgtcgtcagggttgactatactgattttgtcagactcacggttaagtatgccaaccagatggcctggtga

SEQ ID NO: 371105 - DNA, 375 bp, Salmonella enterica
atggcaacagttaaccagctggtacgcaaaccacgtgctcgcaaagttgcgaaaagcaacgtgcctgcgctggaagcatgcccgcaaaaacgtggcgtatgtactcgtgtatatactaccactcctaaaaaaccgaactccgcactgcgtaaagtttgccgtgttcgtctgactaacggttttgaagtgacttcctacatcggtggtgaaggtcacaacctgcaggagcactccgtgatcctgatccgtggcggtcgtgttaaagacctcccgggtgttcgttaccacaccgttcgtggcgcgcttgactgctccggcgttaaagaccgtaagcaagctcgttctaagtacggcgtgaagcgtcctaaggcttaa

SEQ ID NO: 371106 - DNA, 471 bp, Salmonella enterica
atgccacgtcgtcgcgtcattggtcagcgtaaaattctgccggatccgaagttcggatcagaactgctggctaaatttgtcaatatcctgatggtagatggtaaaaaatctactgcagaatcaatcgtatacagcgcgctggagaccctggctcagcgttctggtaaatctgaactggaagctttcgaagtcgctctcgaaaacgttcgcccgactgtagaagttaaatcccgccgtgtaggtggttctacttatcaggtaccagttgaagtccgtccggtccgtcgtaatgctctggcaatgcgttggatcgtagaagctgctcgtaaacgcggtgataaatccatggctctgcgtctggcgaacgaactttctgacgctgcagaaaacaaaggtactgcagttaagaaacgtgaagacgttcaccgtatggcagaagccaacaaggcgttcgcacactaccgttggtaa

SEQ ID NO: 371107 - DNA, 2115 bp, Salmonella enterica
atggctcgtacaacacccatcgcacgctaccgtaatatcggtatcagtgcgcacatcgacgccggtaaaaccactactaccgaacgtattctgttctacaccggtgtaaaccacaaaatcggtgaagttcatgacggcgcagctaccatggactggatggagcaggagcaggagcgtggtattactatcacctccgcagcgactactgcattctggtctggtatggctaagcagtatgaaccgcatcgcatcaacatcatcgacaccccggggcacgttgacttcactatcgaagtagaacgttccatgcgtgttctcgatggtgcggtaatggtttactgcgcagttggtggtgttcagccgcagtctgaaaccgtatggcgtcaggcaaacaaatacaaagttccgcgcattgcgttcgttaacaaaatggaccgcatgggcgcgaacttcctgaaagttgttggtcagatcaaaacccgtctgggcgcgaacccggttccgctgcagctggcaattggtgctgaagaaggtttcaccggcgttgttgacctggtgaaaatgaaagccatcaactggaacgatgccgaccagggcgttaccttcgaatacgaagatatcccggctgacatgcaggacctggctaacgaatggcaccagaacctgatcgagtccgccgcagaagcttctgaagagctgatggaaaaatacctgggtggtgaagaactgactgaagaagagatcaaacaagctctgcgtcagcgcgttctgaacaacgaaatcatcctggtaacctgtggttctgcattcaagaacaaaggtgttcaggcgatgctggatgcggtaattgattacctgccatccccggtagacgtacctgcgatcaacggtattctggacgacggtaaagatactccggctgagcgtcacgcaagcgacgacgagccgttctctgcgctggcgttcaaaatcgctaccgacccgtttgtgggtaacctgaccttcttccgtgtgtactccggtgtggttaactctggtgataccgtactgaactccgtgaaaaccgcacgtgagcgtttcggtcgtatcgttcagatgcacgccaacaaacgtgaagagatcaaagaagttcgcgcgggcgacatcgcggctgctatcggcctgaaagacgtgactaccggtgacaccctgtgtgatccggaaaacccgatcattctggaacgtatggaattccctgagccggtaatctccatcgcggtagaaccgaaaaccaaagctgaccaggaaaaaatgggtctggctctgggccgtctggcgaaagaagacccgtcattccgcgtatggactgatgaagaatctaaccagaccatcatcgctggtatgggtgaacttcacctggatatcatcgttgaccgtatgaagcgtgaattcaacgttgaagctaacgtgggtaaacctcaggttgcttaccgcgaagcgattcgcgcgaaagttaccgacatcgaaggtaaacacgcgaaacagtctggtggtcgcggtcagtatggtcatgttgttatcgacatgtacccgctggagccgggctctaacccgaaaggttacgagttcatcaacgacatcaaaggtggtgtaattcctggcgaatacatcccggccgttgataaaggcatccaggagcagctgaaatctggcccgctggcgggttatccggtagttgatctcggtgtgcgtctgcacttcggttcttaccatgacgttgactcctctgagctggcgtttaaactggctgcgtctatcgcctttaaagaaggctttaagaaagcaaaaccagttctgcttgagccgatcatgaaggttgaagtagaaacacctgaagagaataccggtgacgttatcggcgaccttagccgccgtcgtggtatgctcaaaggtcaggaatctgaagttacaggcgttaagatccacgctgaagtaccgctgtctgaaatgttcggatatgcaactcagctgcgttctctgaccaaaggtcgcgcatcgtacactatggaattcctgaagtatgatgatgcgccgaacaacgttgctcaggccgtaatcgaagcccgtggtaaataa

SEQ ID NO: 371108 - DNA, 546 bp, Salmonella enterica
gtgaaaacattgattcttttctctacccgggacggacaaacgcgcgaaattgcctcttatctggcttctgaactcaaagagatggggatctgggccgatgtcgttaatctgcatcgcgcagaagagccggactgggatagctatgatcgcgtagtgattggcgcgtctattcgttatggtcattaccacagcgcctttcaggagtttgttaagaaatatgccacgcggttgaacggaatgccgagcgccttttattccgttaacctggtggcgcgtaaagctgaaaaacggacgccgcagactaacagctacgcgcgtaagtttttaatgagctctccgtggcgacctgactactgtgccgtcattgcaggcgcgcttcgctatccccgctatcgctggtatgaccgtctgatgatcaagcttattatgaagatgtcgggcggcgaaacggataccagtaaagaagtggtgtacaccgactgggagcaggttgcgcactttgcccgtgaaatagcccatttaaccaacaaatcgtcggcaaaataa

SEQ ID NO: 371109 - DNA, 1452 bp, Salmonella enterica
atgcattttcgcgccattacccgaatcgttggactactggttatcttattttcggggacaatgattctcccgggactggtagcgctaatatatcgtgatggcgcaggaagagcgttcacgcagaccttttttgtcgcgctggcgatcggttccatactgtggtggccaaaccgtagggaaaagggcgagctgaaatcccgcgaaggatttcttatcgtggtgctgttctggaccgtgctgggcagcgtgggtgcgctgccgtttattttctcggaaagcccaaacctcaccattaccgatgctttttttgaatcgttctccgggttaaccaccacgggcgccactacgctggtggggctggactcattaccgcacgccattctcttttatcgtcagatgctgcaatggtttgggggtatggggatcattgtgctggcggtggcgattctccctatcctcggcgtcggggggatgcagctctatcgggcggaaatgccggggccgctcaaagataacaaaatgcgcccgcgtattgccgagacggcgaaaacgctgtggcttatctatgtcttgctaacggtagcctgcgcgctggcgctatggtttgcagggatgcccgcgtttgacgctatcggacacagcttctccactatcgctatcggcggcttctcaacgcatgacgccagcgtaggctattttgatagtcccactattaataccatcatcgctattttcctgctgatctccggttgtaactatggcctgcatttctctttattaagcgggcgtagcctgaaagtatactggcgcgatccggaattccgcatgttcatcggcgtacagttgacgctggtggtgatctgcacgctggtactgtggttccataatatctacgactcggcgctgacaacgctaaatcaggcattcttccaggttgtgtcgatggcgacaacggcagggtttaccacggacagcattgcgcgctggccgctgtttttgcccgtcttgctgctatgttccgcgtttattggcggttgcgccgggtcaacgggcggggggttaaaggtcatccgtattctgttgttgtttaaacaggggaaccgcgaactcaaacgtctggtgcatccgaatgccgtttacagtattaagctggggaaccgggcgctgccagaacgtattctggaagccgtctggggattcttttctgcctacgcgctggtatttatcgtcagtatgctggccattatcgctacaggcgtagatgatttctcggctttcgcctcggtagtggctacgcttaataacctgggaccggggctgggggtggttgctgataacttcgccagtatgaatccggttgcgaaatggatactcatcgccaacatgctatttggtcgtctggaagtattcactttgctggtactttttaccccgactttctggcgtgaataa

SEQ ID NO: 371110 - DNA, 615 bp, Salmonella enterica
atggacagttggttaatccctgcagcgccggtcaccgttgttgaagagatcaaaaaaagccgctttattacgctattggcgcataccgatggcgtagacgcggcgaaagcgtttgttgagtcagtcagagctgagcaccctgatgcgcgccaccattgtgtggcgtgggtggcgggtgcgccggacgactcacagcaactgggcttttcagacgacggcgaaccggcgggaacggcaggcaagccgatgcttgcgcaattgatgggcagcggcgtcggagaaattactgccgtcgtcgtgcgctactatggtggtattctgctgggtacgggcgggctggtaaaagcctatggcggcggtgtgaatcaggcattacgtcagcttgccacacaacgcaagacgccattaaccgaatatactttgcagtgtgagtacggtcagttggccggaatcgaagcattattaggacagtttgccgggaagatcgtttccagcgattatcaggcgtctgttcggctcagggtggcgcttccttttgctcatgtgaatgcattttccacaaaactggcggattttagccgtggttcattgcaattgttagcgattgaagaataa

SEQ ID NO: 371111 - DNA, 1332 bp, Salmonella enterica
atggaatcactggccgcgctctataaaaatcatattgttaccttacaagaacggacgcgcgatgttctggcgcgctttaagctggatgcgttacttattcattccggcgagcttttcaacgtctttctcgacgatcacccttatccgtttaaggtcaatccgcagtttaaagcgtgggtgccggtaactcaggttccaaattgctggctgctggtcgatggcgtcaacaaacccaaattgtggttttatctgccggtcgattactggcataacgttgaaccgctgccaacgtcattctggacagaagaagtcgaggtcgtcgccttaccgaaagcggatggcatcggcagccaactgcctgccgcgcgtggcaatatcggctatatcggcccggttcctgagcgcgcgctacaattggatatcgccgccagcaacatcaacccgaaaggtgttatcgactatctgcattactaccgcgcctataaaacggattatgaactggcctgtatgcgcgaagcgcagaaaatggcggtgagcggtcatcgggcggcggaagaggccttccgttccggcatgagtgagttcgacatcaacctggcgtacctgaccgccacgggacatcgcgatactgatgttccatacagcaacattgtggcgctgaacgaacatgccgccgtgctgcattacacgaaactggatcatcaggcaccgtctgaaatgcgcagtttcctgctggatgcgggcgcggaatacaatggctacgcggcggatctgacgcggacctggtcggcgaaaagcgataacgactacgcccacctggtgaaagatgttaacgacgaacagttggcgctgatcgctaccatgaaggcgggcgtcagctatgtggattatcatattcagttccatcaacgtatcgcgaagctgctgcgtaaacatcaaatcattaccgacatgagtgaagaggcgatggtggaaaatgatcttaccgggccgtttatgccgcacggtattggtcatccgttgggtctgcaggtacacgatgtggccgggtttatgcaggatgattccggtacgcatctcgctgcaccgtccaaatacccgtatctgcgctgcacgcgtgtgttacagccgcgaatggtgttgaccatcgaaccggggatttacttcatcgaatcgctgttagcgccgtggcgcgaaggcccgttcagcaagcacttcaactggcagaaaattgaagcgctcaagcctttcggcggtattcgcattgaagataacgtggtcatccacgaaaacggcgtggaaaacatgacgcgggatttaaaactggcgtaa

SEQ ID NO: 371112 - DNA, 2190 bp, Salmonella enterica
atgctttataaaggcgacaccctgtacctcgactggctggaagatggcatcgccgaactggtgttcgatgctccaggctcggtcaataaactcgacaccgcaaccgtcgccagcctcggccaggcgcttgaggtgctggaaaagcaacacgatttaaaagggctgctgctgcgctctaataaagcggcctttattgtcggcgcggacatcaccgaatttctttcactgttcctcgtccccgaagagcagttaagccaatggctgcatttcgctaatagcgtctttaaccgtctggaagatttacccgtaccgacccttgccgccgtaaacggctatgcgttgggcggcgggtgcgaatgcgtgctggccaccgattaccgtctggcgacgccagacctccgtatcggtctgccggaaactaaactgggcatcatgccgggtttcggcggctccgttcgtctgccgcgtatgctgggcgcagacagcgcgctggagattatcgcggcaggtaaagatgtcggtgctgagcacgcgctgaaaatcggccttgtggacggcgtggtcaaacaagagaagctaattgaaggcgcgatagcggtgttacgccaggccattaccggcgatctcgactggagagctaaacgccagccgaaactggaaccgttgaaactcagtaagattgaagcggcgatgagctttaccatcgctaaaggcatggtcgcacaaacggcgggtaaacattatccggcgccgatgaccgcagtgaaaaccattgaagccgccgcgcgttttggtcgtgaagaagcgctgaatctggaaaataaaagctttgttccgctggcgcataccaatgaggctcgtgcgctggtcggtatcttcctcaacgatcaatatgtaaaaggtaaagccaaaaagctgaccaaagatattgagacgccgaaacaggcagccgtactgggcgcgggcattatgggcggcggtatcgcttaccagtcggcctggaaaggcgtaccggtcatcatgaaagatatcaacgataaatcgttgaacctcggcatgaccgaagcggccaagctgctgaacaaacagctggagcgcggcaagatcgacggtctgaagctggcgggcgtcatttcgaccatccacccgactctcgattatgccggtttcgatcgcgtagatgttgttgtcgaagcggtagtcgaaaatccgaaagtgaaaaaagcggtactggcggaaaccgagcagaaagtgcgcccggaaaccgtgctggcctcaaatacctccaccatcccaattggcgaactggcaagcgccctggaacgtccggaaaacttttgcggaatgcacttcttcaacccggtacaccggatgccgctggttgaaatcattcgcggcgagaagagttcagacgaaaccattgccaaagtcgtcgcctgggccagcaaaatgggcaagacgccgattgtagtcaacgactgccccggcttctttgttaaccgcgtgctgttcccctatttcgccggtttcagtcaactgctgcgcgacggcgcggatttccgcaaagtcgataaagtgatggaaaaacagttcggctggccgatgggcccggcctatctgctcgacgtggtgggtattgataccgcccaccacgcgcaggcggtaatggcggcaggcttcccacaacggatgcagaaagagtatcgcgacgcgatcgacgcattgtttgacgccagccgttttgggcaaaaaaacggtctgggcttctggcgctataaagaagacagcaagggtaagccgaagaaagaagaagatgctgcggtggatgacctgctggcaagcgtcagtcagacgaaacgcgacttcagcgacgacgagataatcgcccgtatgatgatcccgatgattaacgaagtggttcgctgtctggaagaaggcattatcgcaagcccggcggaagccgatatggcgctggtctacggcctgggcttccctccgttccacggcggcgcattccgctggctggatacacagggcagcgcgaaatatcttgatatggcgcagcagtatcaacacctcggcccgctgtatgaagtgccggaagggctgcgtaataaagcgcgccataacgaaccgtattatcccccggttgaaccagcccgtccggttggttctctgaaaacggcttaa

SEQ ID NO: 371113 - DNA, 1164 bp, Salmonella enterica
atggaacaggttgtcattgtcgatgctattcgcaccccgatgggccgttcgaagggcggcgcgtttcgcaacgtgcgggcagaagatctctccgcccacttaatgcgtagcctgctggcgcgtaatccgtcgcttacagcggcgaccctcgatgatatttactggggctgcgtacaacaaacgctggagcaaggcttcaacattgcccgtaacgccgcgctgctggcagaaattccccattcggtaccggcggtcaccgtcaaccgtctgtgtggttcctcgatgcaggcgttacacgatgcagcgcgaatgatcatgaccggcgatgcgcaggtttgtctggttggcggcgtggagcatatggggcacgtgccgatgagccacggcgtggattttcacccgggtctgagccgcaacgtcgccaaagcggcagggatgatggggctaacggcggaaatgctctcccgcctgcacggcattagccgggaaatgcaggaccagttcgccgcgcgttctcacgctcgcgcctgggccgccacccagtctggcgcattcaaaacggagattatcccgactggcggtcatgatgccgatggcgtgttgaagcagtttagctacgatgaagtgatccgcccggaaaccacggtcgaagcgctatcaacgctgcgtccggcatttgatccggttagtggcacggtcacggcgggcacctcatccgcgctttccgatggcgcagccgccatgctggtaatgagcgaaagtcgtgcccgtgagctgggcctgaaacctcgcgcccgtattcgctcaatggcagtggtgggttgtgatccgtcaattatgggttacgggccggttccggcgtcaaaactggcgttgaaaaaagcgggactgtcagccagcgatatcgatgtgtttgagatgaacgaagcgtttgccgcacagatcctgccatgcattaaggatctgggattgatggagcagatagacgagaagatcaacctcaacggcggtgcgatcgcgcttggtcatccgctcggctgctccggagcacgtatcagcaccacgcttatcaacctgatggagcgcaaagacgcacagtttggtctggcgacgatgtgtattggtctgggtcagggcatcgccacggtgtttgagcgggtttaa

SEQ ID NO: 371114 - DNA, 1824 bp, Salmonella enterica
atgaaatttaaatatgctttaacttctctcgcattatctgttgcaattttgtcatcagtaccttctactgctttcgccatcggcggcgccagcggcgctaaagtggactatcaggtccagggaaaaattggcgaagttgttatgaacccctatgatatcgcgccgctaaccgccgttattcgtaatggcggttaccagttacgtgacgtgcatgtacggattgtccccaaagaaaatggccaggagatcgcgtataaagttaataataaataccttttaacgtatggcggtatccccgtctttggtctttacccagattatgtcaataccgttgaagttgaatatacaaggatccagggtagtaaaaccgaaaatataaaagaaagctataaaatgtatgcaccgcctgcctatattgaatcagcgggtacaaaagaagaacaatcagcactctttactatcgatgttaaaaaggtttccccagaatttaaagatcgcttgtatcttttgaataatacgaaagataagtctgggaatggaacgcgtactgtctggaacaaccctactgggggtgcattagaatggaacttcactacagctaacgctattatcgacacctccggtgatattcgttggtttatgaatccaagttcaatttatgatttaaagtcaatttatcgtgctggcgttatgatgggctttaaacaaaaccaggatggcgcactatcgtggggctacggtcagcgttatgtgaaatacgatatcatggggcgtgaaatctttaaccgccgcctgccggataattataacgatttttcacactcaatggataacgcggccaacggtcactacttcctgcgtgtagccagctctaactataaacgccctgatgggaaaaatgttcgtaccgtgcgtgatgtgattgccgaagttgatcagaacggcgtggtagtggatgaatggcgtctgtttgatatcctcgatccttatcgtgatgtgataatgaaaaccctcgatcagggcgctgtgtgcctgaatatcgacgccagccagtccggccatacgttgagcgaagaagatctggcggcgctggactcctccgacaaattcggggatatcgtgggtagtggggctggccgcaactgggcgcatgtcaacagcgtcgactatgacagtgaagatgattccatcatcatcagctcccgccaccagagtgcgattatcaaaatcggccgcgataagaaagtgaagtggatactgggtacgcctgctggctggaaagcgccatttaatgccgcaattctgacgcctgtggatagcaaaggccaaaaaatcgcctgccaggacagtggctgcgagggtgacttcgactggacatggacgcaacatacggcctttaaaattgatagtaagagtaaaggcgatatcttatacctttccgctttcgacaatggcgatggccgcggcttagaacagcctgctatgcagagtatgaaatacagccgctccgtgatttacaaaatcgaccagaaaaacaagacagtccaacagatctggcaatacggtaaagagcgcgggaacgagtggtttagcccggtaacctctatcaccgagtaccagactgacaagaattctgtgttcgtgtattccgcaacagcaggtggtgcgtttgatttatcggtaggcgcatttaccagcttgcctaatccgtatctggaagagttcaaatggggagaaaaagagcctgcggttgaaatgcaaatacatggtgcgcgtggatatcaggctatgccatttagcctgaccaaagcgcttactgagtag

SEQ ID NO: 371115 - DNA, 702 bp, Salmonella enterica
atgacaaccttaagctgtaaagtgacctcggtagaagctatcaccgataccgtatatcgggttcgtttagtgccggacgcggcgttttcattccgcgctggtcagtatttgatggtcgtaatggacgagcgtgacaaacgcccgttttcgatggcttcaacgccggacgagaaagggtttattgaattacacattggcgcttccgagctcaatctgtatgcgatggcggtcatggatcgaattctgaaagaccgggaaatcgtcgtcgatattccgcatggcgacgcctggctacgtgacgatgaagagcgtccgttgattctgatcgcgggcggtacgggcttttcttatgtgcgctccatcctgttgacggcgttagcgcgcaacccgaaccgcgatgttaccatttactggggtggtcgcgaagaaaagcacctctatgatctctctgagctggaagcactctctgttaaccatccgaatttgcgtattgaacctgttgtcgagcagccggaagaaggctggcgtggacgtacaggaacggtacttacggcggtattgcaggattatggtacgctggcggggcacgatatttatattgccggacgttttgagatggcgaaaatcgcccgcgatctgttctgtcatgagcgtaacgcgcgggaagatcgtctgtttggcgatgcgttcgcatttatttaa

SEQ ID NO: 371116 - DNA, 1479 bp, Salmonella enterica
atggacgccatgaaatatcacgatttacgcgacttcctgacgctacttgagctgcagggggaactaaaacgcatcacgctacctgtggatcctcatctggaaatcacggaaatcgctgaccgcacgctgcgtgccggtggaccggcgttgctgtttgaaaatcctaaaggttacgccatgccggtgctgtgcaacctttttggcacgccaaaacgcgtggcgatgggcatggggcaggatgatgtttccgccttacgggaagtgggtaaattattagcgtttcttaaagaacctgagccgccgaaaggctttcgcgatctgtttgacaagctgccgcagtttaagcaagtgctgaatatgccgacgaaacggttacgcggcgcgccttgccaacagaaaatcgcgtctggcgatgatgtcgatttaacgcgtcttcctgtcatgacctgttggccggacgacgccgcgccgctgattacctggggactgacggtaacgcgtggcccgcacaaagaacggcaaaacctgggcatttatcgtcagcagttgataggtaaaaataagcttattatgcgctggctgtctcaccgaggcggcgcgctggattttcaggagtggttagccgcgcgtccgggtgaacgtttcccggtctccgtcgcattgggcgccgatccggcgacgatacttggcgccgtgactcctgttcccgatactctgtcggagtatgcctttgcgggcctgctgcgcggcacgaaaactgaagtggttaaatgcctttctaacgatctggaagtgcctgccagcgccgagattatccttgaaggttacattgagccgggagagatggcgccggaaggaccgtatggcgatcatacgggctattataatgaagtggataactttccggtctttaccgtcacgcatattacgcagcgtgaggatgccatctatcactccacctataccgggcgtccgcccgatgagcctgcggtattaggggtggcgctcaatgaagtcttcgtgcctattctgcaaaaacagtttccggaaatcgtcgacttttatctgccgccggaagggtgttcttaccgcctggcggtagtgacgatgaaaaagcagtacgctggtcatgcgaaacgcgtcatgatgggcgtctggtcgtttttgcgccagtttatgtatacgaagtttgttatcgtttgcgatgatgacgttaacgcacgcgactggaatgatgtgatctgggcgattaccacccgtatggaccctgcgcgggatacggtgctggttgaaaatacgccgattgactacctggattttgcctcgccggtctccgggctgggttcaaaaatggggctggatgccacaaacaaatggccgggcgaaacccaacgcgagtggggtcgtcctattgttaaagatcctgaagttaccgcgcgtattgatgcgatttgggatgagctggctatctttaaataa

SEQ ID NO: 371117 - DNA, 489 bp, Salmonella enterica
atgcaatcctggtatttactgtactgcaaacgcgggcaacttcagcgtgctcaggaacacctcgaaagacaagcggtaagttgcctgacaccgatgatcaccctggaaaaaatggtacgcggaaaacgtacctccgtcagcgaaccgctctttcctaattatctgttcgttgaatttgatccggaagtgatacataccactacaatcaacgccacgcgcggcgtcagccattttgtgcgctttggcgcgcatcctgcgatcgtgccttccagcgttattcatcagctttctatctacaagcccgaaggcgttgtcgatcctgaaaccccctatcccggcgatagcgtcatcatcacggaaggcgcatttgaagggctgaaagcgatttttaccgaaccggatggcgaaacgcgttcgatgttactgcttaatttactcaataaagaagtgaagcagagcgtaaaaaacaccggttttcgcaagatttag

SEQ ID NO: 371118 - DNA, 795 bp, Salmonella enterica
atgggggcaagcatgtttgatattggcgttaatttaaccagtagccagtttgcaaaagatcgtgatgatgtggtcgcccgtgcgtttgcggcgggagtaaaaggtatgctactgaccggaacgaacatccatgaaagtcagcaggcgttaaaactggcgcggcgctacccccattgttggtcgacggctggcgtccatccccatgacagcagtcagtggtcacccgcgtctgaagacgccattattgcgctggcgaaccagccggaagtcgtcgctatcggtgagtgcgggctggatttcaatcgcaatttttccacgccgcaggagcaggagcgtgcctttcaggcgcagctacaaattgccgccgaattgcagatgccaatctttatgcactgccgggacgcgcatgagcgatttctggcattgcttgatccctggctggatagtcttcctggtgcaatactgcactgctttaccggttcacgccagcaaatgcaggcctgtgtggatagagggctctatatcggtattaccgggtgggtttgcgacgaacgacgcgggcttgagctacgtgaactcttaccgtttattccagcggaaaagctactgatagaaaccgacgcgccgtatctgttgccccgcgatcttacgccgaaaccaacgtcacgacgcaacgagcccgcgtatctgcctcacatcctggagcgcattgcgctatggcgtggtgaagatccgcaatggttagcggcgatgacagatgccaacgccagaaccttatttgaggtcgtattctga

SEQ ID NO: 371119 - DNA, 780 bp, Salmonella enterica
atggctgtagaagatactcaaccgcttatcacgcatctgatcgagttgcgtaagcgcctgctaaactgcatcgtcgcagtacttctgatttttctggcgttaatttacttcgccaatgatatttatcatttagtcgccgcaccgctgattaaacagatgccgcaaggggcgacaatgattgcgacggatgtggcgtcgccgttttttacgcctatcaaactcaccttcatggtgtctttgatcttatccgcgcctgtcattttgtaccaggtttgggcctttatcgccccggcgctgtataaacatgagcgtcgtctggtcgtaccgctgctggtatccagttcgctgcttttctacattggtatggccttcgcctattttgtcgtattccctttggcctttggtttcctgacgcatacggcgccggaaggggtacaggtttcgacagatatcgccagctatcttagctttgtcatggcgctttttatggcctttggcgtagcctttgaagtgccggtggcgattgtgttgctgtgctggatgggcatcaccacgccagaagatttgcgtaaaaaacggccttatatcctggtcggggcattcattgtgggaatgctgcttacgccgccagatgttttctcgcaaacgttgctggcgataccgatgtactgcctgtttgaaattggcgttttctgctcacgcttttatgtcggtaagcgacggacgcgcgacgaagataacgaggccgaaaccgaaaaggccgagcacactgaagactaa

SEQ ID NO: 371120 - DNA, 549 bp, Salmonella enterica
gtgtttgatatcggttttagcgaactgctgttagtgttcgttatcggcctcattgtgttggggccgcaacgattgccagtagcggtaaaaacggtagcgggctggattcgcgcgttgcgatcccttgcgacaacggttcagaatgaactgactcaggaactgaaacttcaggagttccaggacagtctgaaaaaagtcgaaaaggcgagtctggaaaatctgactcccgaactgaaagcatctatggatgaactgcgtcaggcggcggagtcgatgaaacgcacctacagcgctaacgatcccgaacaagcgagcgatgaagcgcataccatccataatccggtggtaaaagggaacgaaacgcagcatgagggcgtcacccctgccgccgctgaaacacaggcgagcgcgccggaacaaaagccggagcccgttaaagctaacgtgcctgagtcgacggaaaccgcttccgtagccacgatagacgccgagaagaaatccgctgcgcctgttgtcgaatcttccccctcgtcgagtgataaaccgtaa

SEQ ID NO: 371121 - DNA, 255 bp, Salmonella enterica
atgggtggtatcagtatttggcagttgttgattgttgccgtcatcgtcgtactgctgttcggcaccaaaaaactcggttccatcggttccgatcttggcgcgtctatcaaaggctttaaaaaggccatgagcgatgatgatgccaaacaggataaaaccagtcaggacgctgattttaccgctaaatctatcgcggataagcaaggcgaagcgaaaaaggaagacgctaaaagccaagataaagagcaggtataa

SEQ ID NO: 371122 - DNA, 1641 bp, Salmonella enterica
atgacgccaggtgaagtacggcgcctatatttcatcatccgcacgtttttaagctacggccttgatgaactcatcccccgaatgcgtcttacactgccactccgattatggcgctattcgctgttctggatgccaaaccggcataaagataaattgctgggtgaacgattaagactggcgttgcaagagctgggaccggtctggatcaaatttggccagatgctctccacgcgccgtgacctgttcccgccgcaaatcgccgatcagctcgctttgctccaggataaagtcgcgccattcgatggtcggctggcgaaagcccagattgaagaggcgatgggggggctacctgtcgacgcctggtttgacgactttgatatccagcctttagcgtcggcgtcaatcgcccaggtacataccgcgcgattgaaatcaaacggtaaagaagtggttattaaggtcattcgcccggatattttgccggtaattcaggcagacctgaaactgatttatcgccttgctcgctgggtaccacgcctgttgccggatgggcgtcgtctgcgcccgacggaagtggtgcgtgagtatgaaaaaacgctgatcgatgagctgaatctgctgcgggaatcggccaacgcgattcagttacgccgcaattttgaaaatagtcccatgctgtatatcccggaggtgtactccgattactgtagccagaacatgatggtgatggagcggatatacggcattcctgtttcggatgtggcggcgctggaaaagaacggcaccaacatgaaactgctggcggaacgcggggttaaagttttcttcacccaggttttccgcgacagctttttccatgcggacatgcatccgggaaatatttttgtcagccatgaacaccctgaaaacccgcaatatatcggcattgactgcggtatcgtcgggtcgctaaacaaagaagataagcgttatctggctgaaaactttatcgcgttttttaatcgcgattaccgaaaggtggcagaactgcatgtcgattcaggctgggttccgccagataccaacgttgaagattttgagtttgccatccgcaccgtctgtgaacctatctttgaaaagccgctcgcggaaatctcgtttggtcatgtgttgttaaaccttttcaatacagcgcgtcgatttaacatggaagtccagccgcaactggtgttgttgcagaaaacattattgtatgttgaaggggttgggcggcaactttatcctcagcttgatttgtggaaaacggcgaagccgtttcttgagtcctggatcaaagatcaggtgggtattccggctctcacgcgggctcttaaagaaaaagcgccgttctgggtcgaaaaaatgccagaaatacctgaactggtgtacgacagtttgcgccagggcaaatatttacagcacagtgttgataagattgcgcgcgagttacaggtaaaccatgtgcgccaaagtcagtctcgttatttattgggaattggcgcaacgctgttactgagcgggtcattcttactcgtcaaccgccctgaatggggattgatgcctggctggctcatggtcggcggcgtagttgtctggctggttggctggcgtaaaactcgttga

SEQ ID NO: 371123 - DNA, 606 bp, Salmonella enterica
atgccttttaaacccttagtgaccgcaggaattgaaggtctcctcaatacgtttctgtatcgttcgccagcgctgaaatcagccagaacgcgcttacagggaaaagtactgtgtgtgaaactaaagggattttcgacgccattagtcctggtattcagcgaacgccaggttgatgtgctgggggcatgggaaggcgaagcggactgtacggtaatcactcaagctagcgttttgccaaaactacgcgatcgtcagcagctggccgcgcttattcgcagcggcgaactggaagtgcagggcgatattcaggtcgtgcaaaattttgtggcgctcgccgatctcgccgaattcgatcctgcggagctgttggcgccatacacgggtgatattgcggcggaaagtatcggtaaggccgtgcgtggcggggctaaattcctgcgccacgggtttcaacgccagcagcgttatgccgctgaagcgatcactgaagagtggcgtatggcgcctggcccgctggaagtcgcatggtttgccgaagaaaccgcggctgttgagcgcgccgtagattctctgaccacacggctggaaaaactggaggccaaatga

SEQ ID NO: 371124 - DNA, 756 bp, Salmonella enterica
atggtggaagattcacaagaaacgacgcactttggctttcagaccgtcgctaaagagcagaaagctgacatggtggcccacgtttttcattctgtggcgtcaaagtacgatgtgatgaatgatttaatgtcatttggcattcatcgtttgtggaagcgcttcaccattgattgcagtggcgtgcgtcgtggacaaaccgttctcgatttagcgggcggtacgggcgatcttaccgcgaaattttcacgtatggtcggggaaactggcaaagttatcctggcggatattaatgattctatgctcaaaatggggcgtgagaagctgcgtaatatcggcgtgatcggcaacgtagagtatgtgcaggcgaatgccgaagctctgcctttccctgataatacgtttgattgcattaccatttcgtttggtttgcgcaatgtaacggaaaaagaaaaagcgctgcggtcaatgttccgtgtgttgaaacccggcggacgtttactggtgcttgaattttccaagcctatcattgagccgctgagtaaagcgtatgacgcctattctttccatattttaccgcgtattggctcgatggtcgcaaacgatgcggatagctatcggtatctcgcggaatccatccgtatgcatcccgatcaggataccttaaaagccatgatgcaggacgccggatttgagagcgtggattattacaatctgacggcgggcgttgtggcattgcaccgtggttataaattctag

SEQ ID NO: 371125 - DNA, 1431 bp, Salmonella enterica
gtgaatattactcttatgataagcgccgtcgtggcgctggcggctggggcggtgattggctggctggcgacgaaagcgcacgccgatcaaatccgcgccgatcttatcgaagaacggcgtgagctggatatcgaacttagcgcggcccggcagcaattagcgcaagaagcgcactggcgcagtgaatgcgagttacttaataacgaactgcgtagcctgcacagtatcaatacctctctggaagccgatctgcgtgaagtcacgacccgtctggaagcgactcaacaacacgcggaagacaaaatccgtcagatgatcaacagcgaacagcgtttaagcgagcagtttgaaaatctggcgaaccgtatttttgaacacagtaatcgtcgcgtagacgaacaaaaccgacaaagcctgaatagcctgctgacgccgctgcgtgagcaactggacggttttcgccgccaggttcaggagagttttggcaaagaagcgcaggagcggcatacgctggcgcacgaaattcgtaatttgcagcagcttaacgcgcaaatggcgcaggaagcgatcaacctgacgcgcgccctgaaaggggacaataaggcgcaaggaaactggggcgaagttgtgctggcgcgggtgctggaggcatccggactgcgtgaaggctacgaatacgaaacccaggtcagtattgagaacgatgcgcgctcgcggatgcagccggatgtcatcgtccgcttgccgcagggcaaagatgtggtcatcgacgctaaaatgacgttggtcgcctacgagcgttactttaacgctgaagatgactacacgcgcgaggccgctttacaagagcacatcgcctcggtgcgcaatcatattcgcttactggggcgtaaagactaccagcagcttcccggcctccgctcgctggactatgttctgatgtttatccccgtagaacccgctttcctgctggcgttagataaacagcccgaactgataaccgaggcgctgaaaaataacattatgctggtaagccccacgacgctgctggtggcgttacggacaatcgccaacctgtggcgctatgaacaccagagccgcaatgcgcagcacatcgcagacagagccagtaagctctacgataaaatgcggttgttcgttgatgatatgtcagcgatcggtcagagtctggataaagcgcaggataactaccgccaggcgatgaaaaaacttgcgtcggggcgtggcaacgttttggcgcaggcggaggccttccgggggctaggcgtggaaatcaaacgcgagattaatccggatttagcggaacaggccgttacgcaagatgaagaatatcgtttacgatcgatccctgaagggcggcaggatgaacattatcccaatgatgaacgggtgaagcagcagttaagttaa

SEQ ID NO: 371126 - DNA, 762 bp, Salmonella enterica
atgtccaagtctgatgtttttcatctcggcctcaccaaaaacgatttacaaggggcccagctcgccatcgtccctggcgatcctgagcgtgtggaaaagatcgccgcgctgatggataagccggttaagctggcatctcaccgcgaattcacctcctggcgcgctgagctggatggcaaagcagttatcgtttgctctaccggtatcggcggcccgtctacctctattgccgtggaagaactggcgcaactgggtattcgtaccttcttgcgtatcggcaccacgggggctattcagccgcacattaacgtcggcgacgttctggtaacgaccgcatccgtacgtctggatggggcgagcctgcattttgcgccgatggaattcccggcggttgccgactttgcctgcaccactgcgctggttgaagccgcgaaatcgattggcgccacgactcacgttggcgtaaccgcctcttccgacactttctatccgggtcaggaacgttacgacacctattctggccgcgttgttcgtcgcttcaaaggctctatggaagagtggcaggcgatgggcgtgatgaactacgaaatggaatccgctacgctgttaaccatgtgcgcaagccagggtttacgcgcaggtatggtggcgggcgttatcgtcaaccgtacccaacaagagattccgaatgcggaaacgatgaaacaaactgaaagccacgcggtgaaaatcgtcgtggaagcggcccgtcgtctgctgtaa

SEQ ID NO: 371127 - DNA, 813 bp, Salmonella enterica
atgacaacgacacatccatccggctttgcacctgcagcttccccacttgcccctacgatgattcatacgcctgatggggccattagcgcggggataacgtcgatcccctctcagggcgacgatatgccagcctattacgccagaccaaaagcgagcgacggcgcgctgcctgtggtcattgtggtacaggaaatttttggcgtacatgaacacattcgcgatatttgccgacgactggcgctggaaggctatctcgctatcgcgccagaactctatttccgcgaaggcgaccccaatgatttcgccgatatacccacattattgagcgggctggtggctaaagtaccggattcgcaagtccttgccgacctggatcacgtcgccagttgggcttcgcgcaacggcggggatgcgcataggctgatgatcaccggtttttgttggggaggccgaattacctggctgtacgccgcgcacaaccctcagttaaaagcggcggtagcgtggtacggcaagctggtgggcgacacgtcactcaattcgccgaagcatcccgttgacatcgccaccgatcttaacgcgccggtactgggtttatacggcgggcaggataccagtattccacaggagagcgtggaaaccatgcgtcaggcgctacgcgccgctaatgcgaaggcggaaatcgtggtctatcccgatgcagggcacgcgtttaatgccgattatcgtccgggctaccacgaagcctcagcgaaagacggctggcaaagaatgctggaatggttcgcgcagtacggtgggaaaaaaggctaa

SEQ ID NO: 371128 - DNA, 1296 bp, Salmonella enterica
atggcggtagcaggttgtcacgtaatggccaaacccggcggcgcgatctgcaatattgattgcacatattgcttctatcttgaaaaagaggcgctgtacccggaacgcaataaaaactggcggatgtcggacgagacgctggaacaatttatacgccagcatattgccgcgcagagtggcgaccgcattgactttgcctggcagggcggcgaaccgaccatgatggggctaccgtttttccgccgggttgtcgcattatgtgaaaagtacggcgatgggcgaaaaatcactcatgcgttgcagacgaacggcatcctggtgaatgacgagtgggcgcgctttttcgctgaacagcattttctcatcggtctctctatcgacggcccggcgtcgttacacaaccactatcggcttaatcgcgctggaaaaggaactcatgaacaggtcgtcgcagcaatggcgcggcttaaagcgcaccatgtcgactttaataccttaaccgtcgtgggaaaacataacgtcggtcatgcagcagacgtctacgaatttcttctggcggcgggatcgcgttttattcagtttatcccgctggtggagcgaatgagcaccgataactcatcggtacttaatctggtgatgcccggcgaaagcgcggcaaagctggcgccatggacggtaccgtcgtggcaatatggcgaatttctcaaccagatctttgatatctgggttcgtcgcgacgtagaccgcgtctatgtgcagatgtttgacgtggcgttagccgcctggacggcgcagcagccggtactgtgtgtacattccgagacttgtggacatgccttcgcgttggagtcgaacggcgatctctacaactgtgaccactttgtctacccggagcatctgctggggaatatccaccagcacagcatcaaaaccttaaataatagcgagcgggctattgcgtttggcgaggccaagcgggagaccctgaccgccgattgtcgtcgctgtgactaccgctttgcgtgtcatggcggctgtccgaagcatcgctttgccgtctcgccgtccggtcatcctgcgcataattacttgtgtgcgggctataaacattttttccagcacgttacgccgtatatgaatgtctggcgggagctgctggcgcaaggctatccgatggcatcgatcatgcgctggctggcgcaggacgcgcgtaaagacacaggagccgtcagtcgtaaccatctctgtccctgcggcagcggcaaaaaatataaaaaatgctgtggtaaagcatag

SEQ ID NO: 371129 - DNA, 2265 bp, Salmonella enterica
atgacaatattgactcataccctcggttttcctcgcgttggcctgcgtcgcgagctgaaaaaagcgcaagagagctactgggcggggaactcaacgcgtgaagcgttactggcggtaggccgcgaactgcgcgcgcgtcactgggagcagcagaaacaagcgggtattgacctgttaccggtaggcgactttgcctggtacgaccatgttctgaccaccagcctgctgttaggcaatgtgccggctcgtcatcagaacaacgacggttccgtggacatcgacactctgttccgcattggccgcggtcgcgcgccaaccggcgaaccggcggcggcagcggaaatgaccaaatggtttaatactaactatcactacatagtaccggagttcagcaaaggccagcagttcaggcttacctggacacagttgctggaggaagtggacgaagcgctggcgctggggcataagatcaaacccgtactgctggggcctgtcacgtatctgtggctgggtaaagtgaaaggcgagccgtttgaccgcctgacgttgctgaaagacattttgccggtgtatcagcacgtgctggctgagctggcgaagcgtggtgttgagtgggtccaaattgatgagccagcactggtgctggaactgccgcaggcgtggctggatgccttcaaaccggcttacgacgcgctcgccggccaggtgaagctgttgctgacgacctattttgaaggcgtgacgccaaacctggacactattatcgcgctaccggtacaggggttacatgttgacctcattcatggcaaagatgatgtagcggaactgcatcaacgtctgccggtcgactggctgctctccgcaggcttgattaacgggcgtaatgtctggcgcgccgatttgaccgaaaaatacgcgcagattaacgccattgtgggcaaacgcgcgctgtgggtagcatcctcctgctctttgctgcacagcccgatcgatctcagcgtcgaaacgcgtctggatacggaagttaaaagctggtttgcctttgcgctgcaaaaatgcggtgaactggcgttgctgcgcgatgcgctgaacagcggcgaaacggcggcacttgaggaatggagcgcaccgattcaggctcgtcgtcactcccgccgcgtacataatgccgcggtagaaaaacgcctggcggcgatcaccgcgcaggccagccagcgtgagaatccgtatgaggtgcgcgctgaagcgcaacgcgcccgctttaaacttcccgcctggccgacgacgactatcggttcgttcccgcaaaccacggaaattcgcggtctgcgtctggacttcaaaaagggcaacctcgacgcgaacaactaccgcaccggcatcgccgaacatatcaaacaggctatcatcgagcaggagcgtttagggctggatgtgctggtacacggcgaagccgagcgaaacgacatggtggaatacttcggcgagcatctggacggcttcgtctttacccagaatggttgggtgcaaagctatggctcccgctgtgtgaaaccgccggtagtgattggcgatatcagccgtccggcaccgattaccgtggagtgggcgaaatatgcccagtcgctgaccgacaagccggtaaaagggatgttgaccggcccggtgacaattctttgctggtcattcccccgcgaagacgtgacccgcgaaacgattgcgaaacagattgcgctggcgctgcgtgatgaagtcgcggatctggaggcggcggggatcgggattattcagattgacgaaccggcgctgcgtgaaggtttaccgctgcgtcgcagcgactgggacgcctatctggaatggggtgtggaagccttccgcatcaacgcggcggtggcgaaggatgaaacccagatccacacccacatgtgttactgcgagttcaacgacattatggattcgatcgccgcgctggatgcggatgtgatcaccattgagacctcccgctcggatatggagttgctggagtcgttcgaagcgttcgactacccgaacgaaatcgggccgggcgtgtacgatattcactcgccgaacgtgccgagcgtcgagtggattgaagccctgctgaagaaggcggcacagcgtataccggcacaacgcctgtgggtgaatccggactgcggtctgaaaactcgcggttggcctgaaacccgcgcggcgttagcgaacatggtcaaagcggcgcacaatctgcgtcaggcgaaataa

SEQ ID NO: 371130 - DNA, 954 bp, Salmonella enterica
atgatcgaaattaaacatctgaaaacactccaggcattgcggaatagtggatcgctggctgccgcggcggcggtgctgcaccagacccaatccgctctgtctcatcagttcagcgatctggaacaacgccttggcttccgcctgttcgtgcgtaaaagccagccgctgcgctttacgccgcagggggaagttctgctgcaactggcaaaccaggtgctgccgcaaatcagccgtgcgctgcaggcgtgcaacgaaccgcagcaaactcgtctgcgcatcgctattgaatgtcatagctgtattcagtggctgaccccggcgctggaaaacttccgtgcaagctggccgcaggtagaaatggatttcacatccggcgtcacttttgatccgcaaccggccttgcaacaaggcgagctggatttggtgatgacgtcggatattttgccgcgcagcgggctgcattattcgccgatgtttgattttgaagtccgactggtgctggcgcccgaccatccgctggccagcaaaacgcagattacgccggaagatttagccagcgaaacgctgttgatttacccggtgcagcgcagccgactggatgtctggcgacatttcctgcaaccggcgggtaccagtccgctgctgaaaagcgtggataatacgctactgctgattcagatggtggcggccagaatgggcattgccgccctgccgcactgggtggtggaaagcgttgagcgccagggtctggtggtgaccaaaaccctgggcgatggtctgtggagccgcctgtatgccgccgtgcgcgacggcgaccagcgtcaggcggtgaccgaggcgtttattcgctcgacgcgggatcacgcctgcgatcatctgccgtttgtgcggagcgcggagcgacccattttcgatgcacccacagcgaagccaggatcacagccgcgcctgtaa

SEQ ID NO: 371131 - DNA, 900 bp, Salmonella enterica
gtggcgctactcatcattaccactatcctgtgggctttctcctttagtctatttggcgagtatcttgccgggcatgtcgatagctatttcgcggtgctgatacgcgttgggctggcggcgctcgtttttctgccgtttttgcgttctcgcgggcacaacctaaaaaccatcagcctgtatatgctggtgggggcgatgcagcttggcatcatgtatatgttgagcttccatgcttacctctacctgaccgtatccgaactgctgctgtttaccgttctgacgccgctctatatcacgctgatttacgatgtgatgagtcagcgtcgtttgcgctggggctatgcatttagcgcgttgctggcggtgattggcgccgggattattcgctacgatcgcgtgaccgaccatttttgggtcggtttgctcctggtgcagctttctaatatcagtttcgctatcggaatggtggggtataaacgtctgatggagacccgtcccatgccgcagcacaacgcctttgcatggttctatctgggggcgtttttggtggcggcggtggcgtggtcgctgttggggaacgcgcaaaagctgccggaaaccacgctgcaatggagcattctggtgtttctcggcgtggtggcgtccggcattggctactttatgtggaactatggcgctacccaggtagatgccgggacgctgggtatcatgaataatatgcatgttcccgcaggactactggttaatcttgccatctggcatcagcagccccactggccaagctttattacaggcgcggctgtgatcctggcttcgctgtgggtgcatcgaaaatgggtcgctccgcgctccgcacaaacggcagatgatcgcaggcgtgatcccgcgtcgagcgaataa

SEQ ID NO: 371132 - DNA, 801 bp, Salmonella enterica
atgtatcaggttgttgcgtctgatttagatggcacgctgctctcccccgaccatacgttgtccccttatgccaaagagactctgaagctgttgaccgcacgcggcatccattttgtctttgccactggtcgtcatcatgtcgatgtagggcaaatccgcgataatcttgaaatcaagtcttacatgatcacctccaacggcgcgcgagtgcacgataccgacgggaatttggtttttacgcataatctggacagcgacattgccagcgacctgttcggggtggtgaatgcgaacccggacatcgtgactaacgtttatcgcgacgacgaatggtttatgaatcgtcatcgccccgatgaaatgcgttttttcaaagaggcggtatttaactactcgctgtttgagcctgcgctgctggagccggagggcgtcagcaaagtgtttttcaccagcgacactcatgaaaagttgttgccgctggagcaggcgattaacgcgcgctggggcgatcgggtaaacgtgagcttctctacgctaacctgtctggaagtgatggcgggcggagtgtcgaaaggtcatgcgctggaagcggtcgctcaggcgatggggtacagcctgaaagagtgtatcgcctttggcgacggaatgaacgacgctgaaatgctcacgatggcgggcaaaggctgcatcatgggcaatgcgcaccagcgtctgaaagacctgtatcccgaacttgaggtgatcggcatcaacgcggataacgccgtgccgcattacctgcgcgatcttttcttacgctga

SEQ ID NO: 371133 - DNA, 1017 bp, Salmonella enterica
atgtttcagcagcaaaatgactgggaaacaagagaaaatgcgtttgccgcttttgctatggggccgctgaccgatttctggcgtcagcgggaagaggcggagtttatcggcgtgggtaacattccggtgcgctttgtccgttttcggaatgattctaacgatcggacgatcgtcatttgtcctggccgcattgagagttatgtaaaatacgctgaactggcgtatgacctttttcatctcggttttgatatcttcatcatcgaccaccgtggtcaagggcgctccgggcggatgttatcggacccgcatcggggccacgttgatcattttaacgattatgttgaggacttagcggcgttctggcagcaggaaattgagctggggccgtggcgtaagcgttatatcctggcgcactcaatggggggcgcgatagccaccctgttcctgcaacgccatcgtgtgcggtgcgacgctattgcgctcaccgcgccgatgtttggtattgtgatacgcttgccttcctttatggtgcgccatattctcgactgggccgaggggcaccagcgtatccgtgaagattacgctattggtaccggtcagtggcgggcgttgccgtttgggatgaatgcgctgacccacagccgccagcgttatcagcgcaacttacgattttatgccgacgagccgcagctgcgcgttggcggccccacctggcattgggtacgcgaaggcattctggcgggtgagcaggttctggctggggcgagcgatgacacgacgcctacgctactgattcaggcggaagaagagcgggtagtggataaccgcacccacgatcgtttttgtgaaattcgcgccgcggcgggatacccttgtgaagggggaaaaccgctggttatcaaaggcgcgtaccatgagatcctttttgaaaaggacgccatgcgctcagtcgcgcttaacgccattgttgaatttttcaacaagcctaatttatccagcggaaatcgctttgcttag

SEQ ID NO: 371134 - DNA, 621 bp, Salmonella enterica
atgacctttgaatggtggttcgcctatctactgacctcaactctgctgagtctttctccgggttcaggcgccatcaataccatgacgacgtctatcaaccatggatatcgtggcgcagtggcttctatcgccggactccagaccgggctggggatacatatcgtactggtgggcgtcggactgggtacgctcttttcgcgctcgctcctcgcttttgaaattctgaaatgggctggcgcggcttatcttatctggctgggtatccagcaatggcgcgccgcaggcgctatcgatctgcataccctcgcccagacgcaatcgcggggtcggctgttcaaacgggcgatatttgtcaatctaaccaatcccaaaagtattgtctttcttgccgccctgtttccgcaattcatcatgccgcagcaaccgcaactggcgcagtacctcattctcggcgtcaccacgattgtggtggatatggttgtgatgaccggttacgccacactggcgcagcgcattgccgcctggattaaaggaccaaagcagatgaaggcgctgaataaagcgtttggttcgttgtttatgctggtaggcgcgctcctggcgtcggcaagacacgcgtga

SEQ ID NO: 371135 - DNA, 621 bp, Salmonella enterica
atgatgatgctatttttcaccgtggcaatggtgcacatcgttgcgctaatgagccccggccccgactttttcttcgtgtctcaaactgctgtcagccgttcgcgtaaagaagcgatgatgggcgtactgggcatcacctgcggcgtgatggtatgggcgggcgtggcgctgcttggcctgcatctcatcatcgaaaaaatggcctggctgcatacgatcattatggtaggcggcggcctgtacctgtgctggatgggctatcagatgctgcgcggcgcgctgaaaaaacaggatgcggcggcgtcttctccgcacattgaactggcgcagagcgggcgcagctttctcaaagggctgctgaccaatctgtcgaatcctaaagcgattatctattttggttccgttttttcactttttgtcggcgataacgtcggcgctgcggcgcgctggggtattttcgcgttaatcaccctggaaacgctggcctggtttaccgtagtcgccagcctgttcgcgctgccgaaaatgcgccgtggctatcagcgtctggcgaaatggattgatggctttgccggcgctctgtttgcgggctttggtattcacctgattatttcgcgctaa

SEQ ID NO: 371136 - DNA, 1848 bp, Salmonella enterica
atggtgaacggggttaatgtggcgcaggcggaagtgttgaatctggaatcaggggccaaacaggttttgcaggaaacctttggctaccaacagtttcgcccgggccaggaagcgattattgatactgcgctctccggtcgcgactgtctggtcgtcatgcccaccggcggcggcaaatctctgtgctatcaaatccccgcgttgttgctggacgggttgaccgtcgtcgtttcgcccctgatctcgttgatgaaagaccaggtcgatcagctactggcgaacggggtggcggcggcgtgcctgaactccactcaaagccgcgagcagcagcttgaggtgatggcggggtgccgtaccggacagattcgtctgctgtatattgcgccggaacgcctgatgctggacaactttcttgatcatctggcgcactggaatccggtattgctggcggtggatgaagcgcactgtatctcgcaatggggacatgatttccgtccggaatatgcggcgctcggtcagcttcgccagcgttttcccgctttgccgtttatggcattgaccgccaccgccgacgacaccacgcgcctggatattattcgtctgcttgggcttaacgatccgttaatccagatcagtagctttgaccgaccgaatatccgctacatgctgatggagaagtttaagccgctcgaccagctaatgcgctatgttcaggagcaacgcggcaaatcgggtatcatctactgcaacagtcgggcgaaagtggaagataccgccgcgcgcttgcaaagtcgcggcattagcgcggcggcctatcatgcggggctggaaaacgctattcgcgccgatgtgcaggaaaaatttcagcgcgacgatctgcaaatcgtggtggcgaccgtcgcttttggaatgggcataaacaaacctaacgtacgtttcgtcgtgcatttcgatatcccgcgtaatattgaatcctactatcaggaaacgggccgcgccgggcgcgacggactgcctgcggaagccatgctattttacgatccggctgacatggcctggctacgtcgttgtctggaagagaaaccagccggacagcttcaggatattgaacggcataaactgaatgcgatgggcgcttttgctgaagcgcaaacctgccgccgcctggtattgcttaattactttggcgaaggccgacaagaaccgtgcggcaactgcgatatctgtctcgatccgcccaaacaatatgatggcttaaacgatgcccagattgcgctttctaccattggtcgggttaaccagcgttttggcatgggctacgttgtcgaggtgatccgcggcgcgaataaccaacgcatccgcgatttcggtcatgacaaactcaaggtttatggcatgggacgcgaaaagagccatgagcactgggtgagcgtgattcgccagctcattcatctggggctggtaatgcaaaatattgcgcagcactccgcattacagttgacggatgccgcgcgtccggtactccgtggagacgttccgctaaagcttgcggtgccgcgcatcgtcgccctcaaaccccgcgtgatgcagaaatcgttcggcggtaattacgatcgcaaattgttcgctaagttgcgcaagctgcgtaaagctatcgctgatgaagagaatatcccgccgtatgtggtctttaacgacgccacgttgatagaaatggcggaacagatgccggtttccgccagcgagatgttaagcgttaacggggttgggatgcgcaaactggagcgcttcgggaaagaatttatggcgctcatccgcgcgcatgtcgatggtgatgacgaagagtag

SEQ ID NO: 371137 - DNA, 870 bp, Salmonella enterica
atgcgggcgattttgagagggttgttgccagccacgctactgccattagcggcatatgcacaagaagctacgataaaagaggttcatgatgcgcctgcagtacggggaagtatcatcgctaacatgctacaggagcatgataacccttttacgctttacccttatgacacgaactacttgatctacacgaacaccagcgatctgaacaaagaggccataagtacctacaactggtctgaaaacgcacgtaaagatgaagtgaaatttcagttgagcctggcgtttccgctgtggcgcggaatactggggccgaactcggtactgggcgcttcctatacgcagaaatcctggtggcagctttccaacagtaaagagtcttcgccgtttcgcgaaaccaactacgaaccgcagctttttcttggttttgctaccgattatcgctttgccggctggacgctgcgcgacgtagagatgggctacaaccatgactctaacggacgttcggaccccacctcgcgtagctggaaccgtctgtatacccgtctgatggccgaaaacggtaactggctggtagaggtcaaaccgtggtacgtgattggcagtaccgacgataatccggacatcaccaaatatatgggttattaccagcttaaaatcggttatcacctgggcgaggcggtattaagcgccaaaggccagtacaactggaatacaggctacggcggcgcggaagttggattaagctatccggtcaccaaacatgtccggctttatacccaggtgtacagcggctatggcgaatcgctgatcgactataattttaatcagacacgtgtcggcgtcggcgtgatgcttaacgatatcttctga

SEQ ID NO: 371138 - DNA, 468 bp, Salmonella enterica
atgtccgctgtacttaccgctgaacaagctctgaaattagtgggtgaaatgtttgtctaccacatgccgtttaatcgggcgttagggctggagctggaacgctatgaaaaagcgttcgcccaactggccttcaacaaccagccgatgatggtcggcaactgggcgcaaagcattttacacggcggcgtgatcgcctctgcgctggatgtcgccgccggactggtatgcgtcggcagcacgctaactcgccacgaaaccatcagcgaagatgaactacgccagcgcctgtcgcggatgggaacgattgacctgcgcgttgactacctgcgtccgggcagaggcaaccgctttacggccaccagtagcctgctgcgcgcagggaataaagtggccgtcgcccgcgtggaattacacaatgaagatcagctgtacatcgccagcgccaccgctacttatatggtgggataa

SEQ ID NO: 371139 - DNA, 888 bp, Salmonella enterica
atggacgcaaaacaaacacggcagggcgtattactcgctcttgccgcctattttatttgggggatcgcccccgcgtatttcaagctgatctattacgttcgcgcagatgagatcctgacgcaccgcgtgatttggtcatttttctttatggtggcgctgcttagcgtcagccggcagtggcgacaggttaagcgcttactgaaaacgccaaagaagattttcctgctggccctgtccgccgtactggtcggcggtaactggctattattcatttgggcggtaaataatcaccatatgctggaggccagcctgggttatttcattaatccactggttaacatcttgctggggatgatttttcttggcgaacgcttccgtcgaatgcagtggctggcggtgattctggcggtgtgcggcgtgctggtgcaactctggacgtttggttcactgccgattatcgcgctggggctggcgtttagttttgcgttttacggcctggtgcgtaagaagatcgccgttgaagcgcagacgggtatgctggtcgaaacgctatggctgttgccggtcgcggcaatttatctgtttggcatcgccgatagccctaccagccatatgggacaaaacgcactatcgttgaacttgctgttaatggcggcgggtgtggtcactacgattccgctgctgtgcttcaccggagcggctacgcgtctgcgtctttctacactgggctttttccagtatatcggcccaacgctgatgtttttactggcggtgacgttttatggcgaagtgccgggcgcggataagatggtgacatttgcgtttatctgggtcgcgctggcgattttcgtgatggatgcgatttatacgcagcggcgtaagcattaa

SEQ ID NO: 371140 - DNA, 297 bp, Salmonella enterica
atgcaaaagaaaaatttctggcaaatttattttggtaaagaccctttttctaaagccgaattcattaaagcttggattggatggtgggtgattgctattgtcctgctcggtgtactgtcgatttgtacttcattaaatttgagggggattggaatagcgttgggattcggcttttgccagattcatgcccgctatttaacgtttgttggttggaataagtttattggtgtgttgggcgtgtttccagtaacaaatattatattatttattgtattgctatttactaagaagaaataa

SEQ ID NO: 371141 - DNA, 474 bp, Salmonella enterica
atgacattaattaccattgctgtcattagaaaattcagtgtaatatatttacatgtgagatctgaagttggttatcaatatggaaaaaataatatgattaggattattaaagatatttttcacccttccccaagggatacattgaagcgagcaaaatttgttatttatacattatcatcgtggataatattatttactataatgcctaaaaaccaatatcttaatttaatatttattattgccaatacctatatccatattaatattggcgcgaagagaatcagagattcaggttgcagggcactttatttcatcgcattgtctataggtgtaaatgtcttctgtacagtcagtgtcgcactcaatggggctgattgcgataacattggtatacaactcaatattgcctgggtaatactcacaacactactgctatctttcatcgcttcttcaaaacaagaactttcctcatga

SEQ ID NO: 371142 - DNA, 951 bp, Salmonella enterica
atgctgagcgcatttcaactggaaaaaaaccgactgacccggctggaagtcgaggagtcacaaagcctgattgatgccgtatgggtcgatttggtcgaaccggacgacgacgagcgattgcgcgtacaatctgagctgggccagagtctggcgacgcgtcctgaactggaagatatcgaagcatccgcgcgcttctttgaagacgaagacggactgcatatccactccttcttcttcttcgaagatgcggaagatcatgccggtaactctacggtggcattcactattcgcgatggccgtctgtttacgctgcgtgaacgtgaactgcccgccttccgtttgtatcgtatgcgcgcccgcagccaggcgatggtcgacggtaatgcttatgaattactgctcgatctgttcgaaaccaaaattgaacagctagcggatgagatcgaaaacatttacagcgatctggaaaaactgagccgcgtcattatggaagggcatcagggcgatgaatacgacgaagcgctctccacgctggcggagctggaagatatcggctggaaagtacgcctgtgtctgatggatacccagcgcgcgctgaacttcctggtgcgcaaggcgcgcttaccgggcggacagctggagcaggcgcgtgagatcctgcgcgatatcgaatctctgctaccgcacaatgaatcgctgttccagaaggtgaacttcctgatgcaggcggcgatggggttcatcaacatcgagcagaaccgcattatcaaaatcttctcggtggtttccgtggtgttcctgccgccgacgctggtcgcttccagctatgggatgaacttcgagtttatgccggaacttaagtggagctttggttatccaggcgcgattatctttatgattctggcggggcttgcgccgtatctgtactttaagcgtaagaactggttgtaa

SEQ ID NO: 371143 - DNA, 2163 bp, Salmonella enterica
atggacgtttcttacctgctcgacagccttaatgataaacagcgcgaagcggtggccgcgccacgtagcaacatgctggtgctggcgggcgcgggaagcgggaaaacccgcgtgctggtgcaccgtatcgcctggttactgagcgtagaaaacaattcgccatactccatcatggcggtgacctttaccaataaagcggcggcggaaatgcgccatcgtattggccagttgatggggaccagccagggcggaatgtgggtagggacgttccacggtctggcgcaccgcctgctgcgcgcgcatcatatggacgctaatttgccgcaggatttccagattctcgacagcgaagatcagatgcgtttgcttaaacgcctgattaaggcgatgaatcttgatgagaagcagtggccgccgcgtcaggcgatgtggtacatcaatagccagaaagacgaagggctacgcccgcaccatatccaaagctatggcaatccggtggaacagacctggcagaaggtgtatcaggcctatcaggaagcgtgcgatcgcgctggtctggtggatttcgccgagctactgctgcgcgctcatgaactatggctgaacaagccgcacatcctgcaacactatcgcgagcggtttactaacatcctggtggacgaattccaggataccaacaacattcagtacgcctgggttcgtctgctggcgggcgataccggtaaggtgatgattgtcggcgacgatgaccagtcgatttacggctggcgcggggcccaggtagagaacatccagcgcttcctcaatgatttccccggcgcgcagaccattcgtctggagcagaattaccgctcgaccagcaacatccttagcgcggcgaacgctctgattgagaataacaatgggcgtttgggtaaaaagctgtggactgacggcgttgatggcgaaccgatatcgctgtactgcgctttcaacgaactggatgaagcgcgctttgtggttaaccgtatcaaaacctggcaggacaacggcggcgcgcttgcgcaatgcgccatcctttatcgcagcaacgcccagtcgcgcgtgctggaagaagcgttattacaggccagtatgccgtaccggatttacggcggtatgcgcttcttcgaacgccaggagatcaaagatgcgctctcttatctgcgtttgattgccaatcgcaacgatgatgccgcctttgaacgcgtggtgaataccccaacgcgcggtatcggcgaccgcacgctggacgtggtgcgccagacctcgcgcgatcgccagctaacattgtggcaggcgtgccgtgaattgttacaggaaaaagccctggccgggcgtgcggccagcgcgctgcaacgctttatggaactgatcgacgctctggcgcaggaaactgccgacatgccgctgcatgtgcagactgaccgggtgatcaaagattccggcctgcgcaccatgtatgagcaagaaaaaggcgagaaaggccagacgcgcatcgaaaacttagaggaactggtgacggcgacgcggcagttcagctacaacgacgaagatgaagatttaatgccattgcaggccttcctctctcacgcggcgctggaagcgggcgaggggcaggcggatacctggcaggatgcggtacagctgatgacgctgcactcggccaaagggctggagttcccgcaggtgtttatcgtcgggatggaagaggggatgttccccagccagatgtcgctggatgagggcgggcgtttggaagaggagcgtcgtctggcctacgtcggcgttacccgtgccatgcagaaactgacgctaacctatgccgaaactcgccgtctgtatggtaaagaggtctaccatcgcccgtcgcgttttatcggcgagttgccggaggagtgcgtggaagaggtccgtctgcgcgccaccgtcagtcgtccggtgagccatcaacgaatgggaacgccgctggcggaaaacgacacaggctacaaactcggccaacgcgtgcgccatgcgaagttcggcgagggaactattgtcaacctggagggcagcggcgagcatagccggttgcaggtggcttttcaggggcaagggatcaaatggctggttgccgcgtatgcgaagctggaaacggtttga

SEQ ID NO: 371144 - DNA, 717 bp, Salmonella enterica
atgcgtttttaccggcctttggggcgtattgccgcgctcacctttgacctggatgataccctttatgataaccgtccggtgattttgcgtactgagcaggaagcgctcgcttttatgcaaaattatcacccgtcgctacgttcgtttcaaaacgtcgatttacagcggatacggcaggcggtgcgtgaagcggagccggaaatctatcatgacgttacccgctggcgccatcgtgcgatagagcaggccatgcgggatgcgggattatcggcgcaggaggccattgccggcgcgaatgcggcgatgatgcattttgccaaatggcgcagccagattgaggttccgcaggctacccatgagacattacagcagcttgcgaaaaaatggccgctggtggcgatcactaacggcaacgcccagccggaactatttggtctcggcgattactttaagtttgtactgcgcgccggcccggatggacgttccaagccgtttagcgacatgtatttcctggcggcggaaaagctgcatgtgccgatcggcgagatcctgcatgtcggcgacgatctgactaccgatgtggctggcgctattcgctgtgggatgcaggcctgctggattaaacctgaaaatgccgacctgatgcggacgcaggacagccgtttactgccgcatatcgaaatttcgcggttggcatctctcacctcgctgatataa

SEQ ID NO: 371145 - DNA, 903 bp, Salmonella enterica
atgacggatgtcgcgctttctcaggatgtctcgcggttcctgcgctatttaggcgtggagcgccagcttagccccattaccgtgcagaactaccagcgtcagcttgatgccattatcgctttagccggagaaaccgggctgaaaagctggcaacaatgtgacgctgcgattgtgcgcagttttgcggtgcgcagtcggcgtaaagggcttggccctgccagtctggcgctacgtctctcggcattgcgaagcttttttgactggttagtcagtcagggcgaattgaaagctaacccggcgaagggcgtctccgcaccgaaagcgccgcgtcatctgccgaaaaatattgatgtcgacgacgttaaccgcctgctggacatcgatcttaacgatccgctcgccgtacgtgaccgggcgatgctggaggtcatgtacggcgcggggctgcgtttatccgaactggttggcctggatataaagcacctcgatcttgataccggcgaagtgtgggtaatgggtaaaggcagcaaagagcgacgcctgccgattggccgtaacgcggtgacgtggattgagcactggctggatctgcgcggcctgttcgccagcgatgaagaggcgttattcctgtcgaagctcggcaagcgtatctccgcgcgcaatgtccaaaaacggttcgccgaatggggcataaagcaggggctaaacagccacgtgcatccacataagctgcgccattcgttcgcgacccatatgctggaatcgagcggcgatctgcgcggcgtgcaagagctgctgggtcatgccaacctttccaccacccaaatttatactcatcttgattttcaacatcttgcttcagtgtacgacgcggcgcatccgcgcgctaaacgggggaaataa

SEQ ID NO: 371146 - DNA, 708 bp, Salmonella enterica
atgaagcaaccagaggaagaactacaggaaacgctcacggaactggacgatcgagcggtcgtcgattacctgcgccatcaccctgagttttttatccgtaacgcccatgccgtggaagcgatgcgtgttccacatcccgtgcggggaacggtttcgctcgttgagtggcatatggcccgcgcgcgtaatcacatcaatgtgcttgaagaaaatatgacgctgctgatggaacaggctcatgccaatgaaagcctgttttatcgcttgctgcatctgcaaagccgtctggtcgccgcggatagtctggatgagatgctggtgcggtttcaccgctgggcgcgcgatttggggcttgccggcgcgacgctgcgtttgttcccggatcggtggcgtcttggcgcgccatcgcgctatacgcatctggctttaaaccgtcaggccttcgagccgctgcgtattcaacgactgggacagtcgcagcattatcttggcccgctaaacggcccggaactgctggtggtcttgccggaggcgaaggctgtaggctcggtagctatgtcgatgatgggcagcgatggcgacctcggggtgattctcttcagcagccgtgacccgcaccactatcagccggggcaggggacgcagcttttacaggagatcgcgctgatgctgccggaactgctggagcgctggattaaacgcgtatga

SEQ ID NO: 371147 - DNA, 825 bp, Salmonella enterica
atgcaattctctaaaatgcatggccttggcaacgattttatggtcgtcgacgcggtaacgcagaatgtctttttttcgccggaactgattcgtcggctatccgacagacacctgggcgtagggttcgatcagctgctggtggttgagccgccctatgatcctgagttggactttcattaccgcatcttcaacgccgacggcagtgaagtctcgcagtgcggcaatggcgcgcgctgtttcgcgcgatttgttcgcctgaaagggctaaccaataaacgcgacattcgggtcagtaccgcgaatggccggatggtactgagcgtcacggaagatgaactggtgcgggtgaatatgggggagccaaactttgaacccgcgcaggtgccttttcgcgccaacaaagcggaaaagacgtatattatgcgagcggcggaacagaccatactgtgcggcgtggtttcaatgggcaatccgcactgtgtcattcaggttgataacgtcgacacggcggccgttgaaacactggggccggttctggaaagccatgagcgttttccggaacgcgccaacattggttttatgcaggttgtaagacgtgagcatatccggctgcgagtctatgaacgcggcgcaggggagacccgcgcgtgcggcagcggcgcgtgcgctgccgttgccgtggggattcagcaggggctgctggctgaagaagtacgcgtggaattaccgggcggtcggctggatatcgcctggaaaggtcctggtcatccgttatacatgactggtccggcggcacatatctacgacggatttatccatttatga

SEQ ID NO: 371148 - DNA, 204 bp, Salmonella enterica
atgaaaaacgtgtttaagacactcgctgtacttctgactctgttcagcctgacgggctgcggtttgaaagggccgctttatttcccgccagccgataaaaatgcgccgccgccgacgaaaaaagtcgattcgcaaacgcagtccacgatgcccgataagaacgatcgcgcaacgggagatggcccgtcccaggtcaattactga

SEQ ID NO: 371149 - DNA, 252 bp, Salmonella enterica
atgcaatatcgtaatttgttttgccttttttcgctttcacttctgctacctcccgcctggggatgccggctgagtgaatctccgcacaatgtttatcaacggcaaggcagcggcgtggtttatctccagccagaagaggagaacaatctttcgttgccggaggtgaatttcaaacgcctgcgtcggttacccaattcattgattaacccggcaaatcagggctggaactggatagcccagcccccttcctga

SEQ ID NO: 371150 - DNA, 234 bp, Salmonella enterica
atgcgtgatagccagcaaggtcagggtattcatgtctttagcatcaatgggccgctaaaagtcaccgagcgttttgcgtatgacaaccgctatgtttatacgtggattggcagccagctttaccgaacagcatccccctgcccggataagtcgcatactctgaataggaacgtcatgtacaccaataataaagatatcatcatcataacgcaggcgcaggaatgccaaaaatga

SEQ ID NO: 371151 - DNA, 381 bp, Salmonella enterica
atgacgccgctaaaccgttttgcgcgtttgaataaacatctgaaaaacgcccttcggggcgtggggatcggttcatgcatttacgtcattgttgaaagcgttatgcacggcacgataaacggtgttgaagctgccggagtcctgacgataagcgcggtactcggtctgcttagcgctcttttggatatcaaagcaaagccgcgcgcccccttaatcctgttgcattttctcctctgcggcggctgcgtcgcgctgatggtggcaatgctgtcggctctgaaccatttcccggttaacgcgtccgtcatacttatcaccagtgcgctatttatcgtcatttacctaccgctgagttttatcctttaccgctcacaacggtaa

SEQ ID NO: 371152 - DNA, 321 bp, Salmonella enterica
atgaacgacagtgaatttcatcgcctggctgacgccctgtggctcaccattgaagaacgcctcgataactgggacggcgacagcgatatcgactgcgaaatcaacggcggcgtgctgaccctcagctttgagaacggcagtaagatcattattaaccgtcaggagccgttgcaccaggtgtggctggcgaccaaacagggcggctatcatttcgatctgaaaggcgacgagtgggtttgcgatcgcagcggcgaaacgttctgggatctgctggagcaggcggcaacgcagcaggcgggtgaaaaggtgagctttcgttga

SEQ ID NO: 371153 - DNA, 2547 bp, Salmonella enterica
ttgtacctctatattgagactctgaaacagagactggatgccataaatcaactgcgtgtggatcgcgcgcttgctgccatgggacccgcttttcagcaggtttacagtcttctgccgacattattgcactatcaccatccactgatgccgggttaccttgatggtaacgttcccagcggtatttgcttctacacgcctgatgaaacccaacgccactatctgaacgaacttgagctgtaccgcggtatgacgccgcaggacccgccgaagggcgagctgccgattaccggcgtttacaccatgggcagcacctcctcggttgggcagagctgctcgtccgacctggatatctgggtgtgccatcagtcctggctcgacggtgaagagcgtcagttgctgcaacgtaagtgtagcctgctggaaagctgggccgcctcgcttggcgttgaggtgagcttcttcctgatcgacgagaaccgtttccgccataacgaaagcggcagtctgggcggggaagactgtggttctacgcagcatatcctgttgcttgatgagttttatcgtaccgctgtgcgcctggccgggaaacgtatcctgtggagtatggtgccgtgcgacgaagaagagcattacgacgactatgtcatgacgctctacgcgcagggcgtattaacgccaaacgaatggctggatctggggggcttaagctcgctctccgccgaagagtactttggcgccagcctgtggcagctatacaagagcattgactcgccgtacaaagcggtgctgaaaacgctgctgctggaagcctattcatgggaatatcctaacccacgtctgctggcgaaagatattaaacaacgtctgcatgacggtgaaatcgtatcgtttggactcgatccctactgcatgatgctggaacgggtcactgaatacctgacggcgattgaagatccgacgcggctggatttagtccgccgctgcttttacctgaaagtgtgcgagaaattaagtcgcgagcgtgcctgcgtaggctggcgtcgggaagtattaagccagttagtcagcgagtggggatgggacgacgcgcgtctgaccatgctcgataatcgcgcaaactggaaaatcgatcaggtgcgcgaagcccacaacgaattgctcgacgccatgatgcaaagctatcgtaatctgattcgctttgcgcggcgcaacaacctcagcgtgagtgccagcccgcaggatatcggcgtactgacgcgtaagctgtacgctgcttttgaagcgttgccgggtaaagtcacgctggtgaacccgcagatatcgccggatctgtccgagccgaatttaacctttatccatgtgccgccgggacgcgccaaccgttcaggctggtatctctacaaccgcgcgccgaacatggattccatcatcagccatcagccgctggaatataaccgttatcttaataagctggtcgcgtgggcgtggttcaacggcctgctgacgtcgcgaacgcatctgtttattaagggcaacggtattgtcgacctgcctaagttgcaggagatggtcgccgatgtttcgcaccatttcccgctgcgcttgcctgctccgacgccgaaagcgctctacagcccctgtgaaattcgccatctggcgattatcgttaacctcgaatatgacccgacggcggcgtttcgcaataaagtggtccattttgacttccgtaagctggatgttttcagctttggcgaagagcaaaactgtctgataggcagtatcgacttgttatatcgcaactcgtggaacgaagtgcgtactctgcactttaacggcgagcaggcgatgatcgaagcgctgaaaacgattctggggaaaatgcaccaggatgccgcgccgccggatagcgtggaggtgttctgctacagtcagcatcttcgcggtctgattcgcacccgcgtgcagcaactggtctccgaatgtatcgagctacgtctttccagcacccgtcaggagaccggtcgcttcaaggcgctgcgggtttccgggcagacgtggggactattcttcgaacgcttgaatgtctcggtgcagaagctggagaacgctatcgaattctacggcgcgatttcgcataacaagctgcacgggctgtcggtacaggtggaaaccaaccaggtgaaattgccgtcagtggtggatggcttcgccagcgaagggattatccagttcttctttgaagaaacgggcgatgagaaaggctttaatatttatattctggatgaaagtaaccgggcggaagtgtatcaccactgcgaaggtagcaaggaagaactggtgcgcgacgtcagtcgcttctattcatcatcgcacgatcgcttcacgtatggctccagttttatcaactttaacctgccgcagttctaccagatagtgaaaaccgatggccgcgcgcaggtgatcccattccgtacgcagcctatcaacaccgtgccgccagcaaaccaggatcatgacgcgccgctattgcagcagtatttttcctga

SEQ ID NO: 371154 - DNA, 963 bp, Salmonella enterica
ttgataatgacggtaacaagcatgttagacaatgttttaagaattgccacacgccaaagtccccttgcgctttggcaggcacattatgtcaaagacgcattgatggcaacccatccgggactgacggtagaactggtgccgatggtcacacgcggcgacgtgattctcgatactcccctggcgaaagtgggcggtaagggactgtttgttaaagagcttgaaatcgcgctgctggaaaaacgcgctgatatcgccgtgcactctatgaaagacgttccggtggccttcccggacggtctcggtctggtgaccatttgcgagcgcgaagatccgcgcgacgcgtttgtctcgaataaatatcacagtctggacgatctgcccgcgggtagtatcgtcgggacgtccagtttgcgtcgtcagtgtcaactggcggaacgccgtccggacctcattatccgttcgttgcgtggcaacgttggcacacgtctcggcaagctggacaacggcgattatgacgccattatcctggccgtggccggtctgaaacgcttaggtctggagtcgcgcattcgcacagccttgccgcccgacgtttcacttcctgccgtaggccagggcgccgtcgggattgagtgtcgtcttgacgacgcgcgaacacaggcgctgctcgcaccgttgaatcactcgcaaaccgcgctgcgcgtaacggcggaacgcgctatgaacacccgcctggaaggcggttgtcaggtgccgattggcagctatgcagaaatcatcaacggtgaaatttggctacgcgcgctggttggcgcgccggacggttcggtgatggtgcgcggcgaacgtcgtggttctcccgagcaggcggagcaaatgggcatctcgcttgcagaggaactgctggaaaacggcgcacgcgcgattctgacggaagtttataacggcgagacgcccgcatga

SEQ ID NO: 371155 - DNA, 741 bp, Salmonella enterica
atgagtattctgatcacccgcccctctcccgcaggggaagcgttagtgagccgtctgcgcgcactggggcaggtggcctggagttttccactgattgaatttgtcgccggccgggagctacccaccctggccgaccgcctggcgacactgacggaaaacgatctggtttttgccctttcacagcacgccgtcgcctttgctcacgcccagctccagcgggatggccgaaactggcctgcgtcgccgcgctatttcgcgattggccgcaccacggcgctcgcccttcataccgttagcgggttcgatattcgttatccattggatcgggaaatcagcgaagccttgctacaattacctgaattacaaaatattgcgggcaaacgcgcgctgattttgcgtggcaatggcggccgcgaactgctgggcgaaaccctgacagctcgcggagccgaagtcagtttttgtgaatgttatcaacgatgtgcgaaacattacgatggcgcggaagaagcgatgcgctggcatactcgcggcgtaacaacgcttgttgttaccagcggcgagatgttgcaacggctctggtcgctgactcccgagtggtatcgtgagcactggttactacgctgtcggctattggtcgtcagtgaacgtctggcgcacctcgcccgggagctgggctggcaagatattaaggtcgctgataacgccgacaacgatgcgctgttgcgcgcattacaataa

SEQ ID NO: 371156 - DNA, 1170 bp, Salmonella enterica
atgacggaacaagaaaaatcctccgccgtggttgatgagaccagggagagcgtggaaaccacgccacagccagttaataccgagaaaaaaagtaagaacggcgccgcgctggtattaagcgcggtggcgattgcgattgccctggcggcaggtattgggctttatggctgggggaaacagcaagcaaccgcgcaaacggaaaccagcgatgcgctggcgacgcaactgaccgccttgcaaaaggcgcaggagagccaaaaagcggagctggaagggattatcaaaaaacaagcggcgcagttagatgacgcgaatcgccaacaggcggcgctggcgaaacagcttgatgaagtacaacaaaaagtcgccaccatttccggcagcgatgctaaaacctggctgctggcgcaggctgatttcctggtgaaactcgccggacgtaaactgtggagcgatcaggacgtcactaccgccgctgcgctgctcaaaagcgctgacgccagtctggcggacatgaatgaccccagcctgattaccgcacgacgcgcgattactgacgatatcgccagcctgtcatccgttgcgcagatcgactacgacggcattattctcaagctcaatcagctctctaaccaaatcgataacctgcgtctggcggataacgataccgatggttcgccgatggattcagacagcagcgagctgtccagctcgctaagcgaatggcgcgttaacctgcaaaaaagctggcagaactttatggacagctttattaccattcgccgccgcgatgataccgccgtaccgctgttggcgcccaaccaggacgtctatttacgcgaaaatattcgctcccgcctgttagtcgccgcgcaggccgtgccacgccatcaggaagaaacataccgtcaggcgctggataacgtttcgacctgggttcgcgcttattacgatactgacgacgccgcgacaaaagccttcctggaggaggtcgataaattaagccagcaaaatatcacgatggatctgccggaaactctgggaagccaggcgattcttgaaaaactgatgcaaacccgcgtgcgtaatctgctggcgcaaccgacagtctctacggcagcgcctgccacgcagacagacgctccggcagccgcgccgcaaggagaataa

SEQ ID NO: 371157 - DNA, 1200 bp, Salmonella enterica
atgatgctaaaagtattattgctctttgtgttgttgcttgcgggtatcgtggtcggcccgatgatagccggtcaccagggctatgtgttaatccagaccgataactacaacattgaaaccagcgtcaccggcctggcgatcattctcatcgtcgctatggtggtgctattcgccattgagtggttactacgccgtctgtttcgtaccggcgcgcacacccgcggttggtttgccggtcgtaaacgccgtcgcgcccgcaagcagaccgaacaggcgctgctgaagctggcggagggcgactatcagcaggttgaaaagctgatgtcaaaaaatgccgaccatgctgaacaaccggtggtaaattatctgctggcggcagaagcggcgcagcagcgcggcgatgaagcacgcgctaatcagcaccttgaacgtgcggcagagctggcggggaacgacaccatcccggtcgagatcacgcgcgtgcgcttacagctggcgcgcaatgaaaatcacgcagcgcgtcacggcgtggacaaactgctggaggtcacgccgcgtcacccggaagttctgcgtctggcggagcaggcctatattcgcaccagcgcatggagttctttactggatatcatcccatccatggcgaaagcgcacgtcggcgatgaagcgcatcgcgccatgctcgaacaacaggcgtggataggactcatggatcaggcgcgcgccgagcagggcagcgaaggattacgcacctggtggaaaaaccaaagccgtaaaacccgccatcaggtggcgctgcaggtcgcgatggccgagcatctgatcgaatgtgacgatcatgatatggcgcagcagattatcatcgacggtctgaaacgccagtatgacgatcggctggtgctgcccattcctcgcctcagaaccaataatccggaacaactggagaaagtgctgcgtcagcaaatcaagacggtaggcgatcgcccgctgttatggagcacgctcggccagtcgctaatgaaacacggtgaatggcaggaggcaaccctggctttccgcgccgcgctaaaacaacgcccggacgcgtatgattatgcctggcttgccgatgcgcttgatcgactgcatcaaccggaagaggccgccgccatgcggcgcgatggcttgatgctgacattacagaacaatcccccgcagtaa

SEQ ID NO: 371158 - DNA, 1386 bp, Salmonella enterica
atggcagagaaaaaaccggagctacagcgtgggctggaagctcgtcatattgaattgattgccctcgggggcaccatcggcgtcggactctttatgggcgccgccagtacgctgaaatgggcgggcccgtcagtgctgctggcgtatatcatcgccggattgttcgtctttttcatcatgcgttcgatgggggagatgctctttctggaacctgttaccggctcctttgccgtgtacgcccaccggtatatgagtcctttttttggctatcttaccgcctggtcatactggtttatgtggatggcggtcgggatctcggaaattaccgccattggggtctacgtccagttctggtttccggagatggcgcagtggataccggcgctgattgccgtcggacttgttgcgttggcgaatttggctgcggtgcgcctgtatggtgaaatcgagttctggtttgcgatgatcaaagtcaccacgattattgtgatgatcatcatcggtctgggggtgattttcttcggctttggtaacggcggccaggcgattggctttggtaatctgaccgagcatggcggcttttttgccggcggctggaaaggctttctgaccgcattatgtatcgtggtggcctcttatcaaggggttgagttgatcggtattaccgccggtgaagcgaagaatccacaggtgacgttgcgtagcgcggtgggtaaggtgctgtggcgtatcctgattttttatgttggcgcgattttcgtgatcgtcaccattttcccgtggaatgagattggcagcaacggcagtccctttgtgctcaccttcgcgaaaatcggcatcaccgccgcggcaggcattatcaactttgtcgtgctgacggcggcgctctccggctgtaacagcggaatgtatagctgtgggcgtatgctttacgcgctggcgaaaaaccgtcaactgccggcggcagtcgcgaaagtctctcgccacggcgtgccggtcgcgggcgtggcgctctctattttgattttgctggtaggttcttgcctgaactacatcatccccaatccgcagcgcgtctttgtttacgtttatagcgccagcgtactgccggggatggtgccgtggtttgtcattctgattagccaactgcgctttcgtcgggcgcataaagaagcgattgcggatcatccttttcgttccattatgtttccgtgggcgaactatttgacgatggcgtttctggtttgcgttttaatcggcatgtactttaatgaagatacgcgcatgtcgctgtttgtcggcgtcatcttcctgctggccgtcacgctggtctacaaagttttcggtctgaatcgtcacggaaccgcccacaaggtgggggaataa

SEQ ID NO: 371159 - DNA, 741 bp, Salmonella enterica
atgaccaataatgccgctgcgcccctttactcgctgcgtggattacctctgattggctggcgcgacatgtcacacgcgctgaattatctgtttgccgatggtcaactgaagcaaggcacgttggtggcgatcaacgccgaaaagctgctgacggcggaagataatccggaagtccgcgcgttgatagcggcggcggaatttaaatatgccgatggcatcagcgtggtgcgttcaatacgtaaaaaatttccgcaggcgcaggtttctcgcgtggctggcgccgacctttgggaagcgttaatggcgcgcgcggggaaagaaggcacaccggtatttcttgtcggcggcaagcctgaggtgctggcgcagacggaagcaaaactgcggacgcagtggaacgtcaatattgtgggtagccaggacggttactttacgccggagcagcgtcaggcgctatttgcgcgtatccatgccagcggcgcgaaaattgtcaccgtcgcgatgggatcgccaaaacaggaattactcatgcgcgattgtcgggaagtgcatccccatgcgctatatatgggggtgggcggtacctatgatgtgtttaccggtcacgtcaaacgcgccccaaaaatatggcagaacctggggctggagtggttgtatcgtctgctttctcaaccgaggcgtattacccgccagatgcgcctgctgcgctatcttcgctggcactatactggcgatctctaa

SEQ ID NO: 371160 - DNA, 1359 bp, Salmonella enterica
atgagtttaatgcaattcagcgggctgctggtggtctggctgctctctacgctgtttatcgccacgctgacctggtttgaattccgccgcgtgcgttttaacttcaacgttttcttttcgttgctgtttttgttgaccttcttttttggttttccgctaaccagcgtgctggtatttcgtttcgacgttggcgtcgcgccgccggaaatcttattgcaggctctattatccgccgcctgtttctacggcgtgtattacgtgacctataaaacgcgtttacgcaaacgcgttgtggatgtaccacgcaagccgctatttaccatgaaccgggtggaaacccaccttacctgggtgatcctgatgggcatcgcgctggtgagcgtggcgattttctttatgcataacggctttttgctgttccggctgcactcctacagccagatattttccagcgaagtctccggcgtggcgttaaaacggttcttctatttcttcattccggcgatgctggtggtctatttcctgcgccaggacagcaaagcgtggctgttctttctggtgagcaccgtcgcgtttggtctgttgacctacatgattgtcggcggcacgcgcgctaacatcattattgcgtttgctatcttcctgtttatcggcattattcggggctggatcagcctgtggatgctggcggcggcgggcgtgctggggattgtcggtatgttctggctggcgctcaaacgctacggattaaatgtgagcggcgatgaggcgttctatacgtttctttatctgacgcgcgataccttttcgccgtgggagaatctggcgctgctgttgcaaaattaccacaatatcgattttcaggggctggcccctatcgtgcgtgatttctacgtctttattcccacctggttatggccgggacgacccagtattgtgctgaactctgcgaattacttcacctgggaagtcctgaacaaccattctggcctggcgatatcgccaacgcttatcggatcgctggtggtcatgggcggggcgctgtttattccgctcggcgcgatcgtcgtcgggctgattatcaaatggttcgactggctgtatgaactgggtaaccgggagcccaatcgctataaggcggcgattctgcacagtttctgctttggcgccatctttaatatgattgtgctggcgcgagaagggctggattcgtttgtttcgcgcgtggttttcttcctggtggtttttggcgccagcctgctggtcgctaagcttctgttctggttatttgatagcgccgggctgattcataaacgtacaacttcgctccctcaggcacaggtggaaggaaaactatga

SEQ ID NO: 371161 - DNA, 1080 bp, Salmonella enterica
atgactgtactgattcacgtcctgggatcggatatccctcaccataaccacaccgtgctgcggtttttcaatgatacgctggccgccacaagcgagcacgcgcgcgaatttatggttgccggtgaagataacggcttcacggaaagctgcccggcgctctcgcttcgtttttatggcagtaagaaagcgctggcgcaggcggtcatcgccaaagcgaaagcaaatcgtcgacagagattcttctttcacggtcagttcaacaccagcctgtggctggcgctgttaagcggcggtattaagccagctcagttttactggcatatctggggcgcggatctctacgaagtgtccaacgggctgaaattccgccttttctacccgcttcgtcgtatcgcgcaggggcgagtagggtgcgtattcgcgacgcgcggcgatctcagctattttgcgcgccagcatccgaacgtacgcggcgagttgctctatttcccgacgcgcatggatccttccctgaatgctatggcaaaagagtgccaacgtgcggggaaattgaccattttagtagggaactccggcgatcgcagtaaccaacatattgcggcgttacgggcggtgtatcagcagtttggcgatacggtaaacgtggtggtgccgatgggctatccggccaataaccaggcctatattgatgaggttcgccaggccggcctggcgctatttagcgccgaaaatctacaaattcttagcgaaaaaatggaatttgatgcctatcttgcgcttttgcgccagtgcgacctcggttattttatttttgcccgccaacaggggatcgggacgttgtgtctgctaattcaggccgatatcccgtgcgtactgaaccgcgacaatcctttctggcaggatatggcggaacagcatctgcccgtcctgtttaccacggacgatcttaatgagcaggtcgtgcgcgaggcgcagcgtcagctcgcatcggtagataaaagcggcatcaccttctttagccccaactacctgcagccgtggcataatgcgttgagaatcgccgcaggagaagccgaatga

SEQ ID NO: 371162 - DNA, 1251 bp, Salmonella enterica
atgtcgcttgctaaagcctccctgtggacggcggtcagtacgctggtaaaaattggcgccggactgctggtggtgaaactactggccgtctcttttggtccgtcgggcgtcggacaagcgggtaacttccgccagatgattaccgtgctgggcgtattggctggcgccgggatatttaacggcgttaccaaacttgtcgcacaacatcatgataacccggcgcagttacgtaccgtggtgggaacctcctccgcgatggtattggggttctctacgctgctggcgctggtcttcttgctggcggcggcgccgattagccagggattgttcggtcacacggactatcaagggctggtgcgtctggttgcgctggtacaaatggggatcgcctgggcgaacctgctgctggcgctaatgaagggctttcgtgacgcgtcgggtaatgccttatcgttaattgtcggcagctttttgggcgtcgccgcttggtatctctgctaccgtgtcggcggctatgaaggtgctctgcttggtctggcgctggtgccggcgctggtagtagtaccagccggtatgatactgattaagcgcggcaccgtcccgctacgctatctcaagccctcctgggacaatggtctggcagggcagctcagtaaatttaccctgatggcgctgattacctccgttacgatgccggtcgcctatgtgatgatgcgaaaccaactggccgcgcactatagctggagcgatgtcgggatctggcagggcgtaagcagtatttctgacgcctatctgcaatttatcaccgcctccttcagcgtttacctgttacccacgctctcacgcctgacggaaaaacaggacattacgcgtgaagtggtaaaagcgctgaaatttgttttaccagcggttgcggcggcgagttttaccgtctggctactgcgcgattttgctatctggctgcttttttccgccaaattcaccgcgatgcgcgatctgttcgcctggcagttagtgggcgacgtgctgaaagttggcgcctatgttttcggttatctggtgattgccaaagcgtcgttgcgattttacattctggccgaaattagccagttcattctgttaacggcgttcgctcactggctgattcccgctcacggcgcgctgggtgcggcacaggcttatatggtcacctatattgtctatttttcactttgttgcggcgtatttttactctggcgtaggcgagcatga

SEQ ID NO: 371163 - DNA, 1131 bp, Salmonella enterica
atgattccttttaatgcgccgccggtggtgggaaccgaactcgaatacatgcagtctgcaatgagcagcggcaaactgtgtggcgacggcggctttacgcgtcgttgccagcagtggctggagcaacatttcggcagcgcgaaggtgttgctaacgccttcctgtaccgcatcgctggagatggcggctctgttgttggatattcagcccggcgatgaagtgatcatgccgagctttacgtttgtctccactgctaacgcttttgtcctgcgcggcgcgaaaattgtgtttgtcgatattcgtccggatacgatgaatattgacgaaacgctgattgaggcggcgattactgataaaacccgcgctatcgtgccggtacactacgctggcgtcgcttgtgaaatggacgtcatcatggcgctggcggataagtataatctgttcgttgtcgaggatgccgcccagggtgtgatgtccacgtacaaagggcgcgcattagggacgatcggtcacatcggctgttttagcttccatgaaaccaaaaattacaccgctggcggcgaaggcggcgcgacgctgatcaacgatcgtacgctaattgaacgcgcggagatcatccgcgaaaaaggcaccaaccgtagccagttcttccgtggtcaggtggacaaatacacctggcgggatatcggctccagttatttgatgtccgatctgcaggctgcctatctgtgggcgcaactggaggccgccgatcgtatcaatcaacagcgtctgtcgctgtggcagacttactacgatgcgttaacgccgctggcgcgcgccgggcgtatcgagctgccttctattccggaaaactgcgggcataatgcccacatgttttacatcaaactgcgggatatcgccgatcgcagcgcgctgattaatttcctgaaagaggcggaaatcatggcggtattccattacattccgctgcatgattgtccggcgggcgataaattcggcgagtttatcggggacgatgtctacaccacaaaagagagcgaacgtttgttgcgtctgccgctgttttataaccttgcgcccgtcgatcaacgaacggtgattactaccttgctaaattatttctcctga

SEQ ID NO: 371164 - DNA, 678 bp, Salmonella enterica
gtgcccgtccgcgccagtattgaaccgttactctgggaaaatacgttttttggcgtgaatagcggcattgtgcgtatcgatgcctcagcgcccgaattaacgccagaagcgctgcaggcgtggcaacgcgtgcaggtaaaagtgccggctgaaaacatcgcctggctgtcggcgttgcaatcgctgggattctctttggttgaaggcgaggtggattttgcgttgccggtaaaagggcatcgcgaccagcatggcgcggaaattgcacaccttacggacattcctgctttgcgtcagttggccggagaggcgtttacgcagagtcgttttcgcgcgccgtggtatgcgcccgacgccagcgcccgtttttacgcccagtggattgagaatgcggtacgcggcacgtttgatcaccaatgcctggtgcttcgcacggagacaggcgctatccgcggttacgtctcgctgcgggaattgaatgataccgacgcgcgcattggcctgttggccggacgcggcgcgggagcggaacttatgcaggcggcgatctgttgggcgcagagtcgcggcaaagcaacattgcgggtggcgacccagttgggcaacaccgccgcgcttaaacgttacatacaaagcggtgccaacatcgaaagcactgcgtactggttatacaggtga

SEQ ID NO: 371165 - DNA, 225 bp, Salmonella enterica
atgaaaggcatcattctggcgggaggttccggtacccggttgcatcccattacgcgcggcgtatcaaagcgccagggcttcaaaattgcctgtctggaggagattgcctggcgcaacggctggctggatgatgatggtttgaaacgcgccgccagtcagcttgaaaaaaccggctatggccaatatttactggagttgctccgtgcccgtccgcgccagtattga

SEQ ID NO: 371166 - DNA, 1068 bp, Salmonella enterica
atgaaacgcattctggtgaccggaggcgcaggctttatcggatctgcggtggtgcggcatatcatccatgaaacggcagacgcggtggtggtggtggataaactcacctatgcgggcaacctgatgtctctggcgtcggtggcgcaaagcgaccgtttcgcctttgagaaggtggatatctgcgatcgggcatcactggagcgagttttccagcagtatcagcccgatagcgtgatgcacctggcggcggaaagccatgtagaccgttccatcgacggcccggcggcgtttattgaaacgaatatcgttggtacttacaccttgctggaagccgctcgcgcttactggtccgcgcttgacgcggacgctaaagcggcgttccgcttccaccatatctccaccgatgaagtgtatggcgatctgcatactgcagacgatttcttcaccgaaaccacgccatatgcgccaagcagcccttattccgcctccaaagccagcagcgaccatctggtacgcgcctggttacgtacctacggtctgcctacgcttgtcaccaactgctctaataactacgggccctaccatttcccggaaaaactgatcccgctgatgattctgaacgcgctggcgggtaaaccattgccggtctatggcaacggtcagcaaattcgcgactggctgtatgtagaggatcatgcccgtgcgttgtatcacgtggtgacgaacggcgcggtgggcgaaacgtataatatcggcggtcataacgaacgtaaaaatctggatgtggtcaggacgatctgcgctctgctggaagaactggccccacaaaaaccgcagggtgtggcgaattatcacgatctgattaccttcgtcgacgatcgacccggccatgacttacgttatgccatcgacgcgtcgaaaatcgcccgcgagctgggctggacgccgcaggaaaccttcgaaagcgggatgcgaaaaaccgttcagtggtatctcgccaatgaggcctggtggaaacccgtgcaggatggcagttatcagggcgaacgcttaggactgaaacgctaa

SEQ ID NO: 371167 - DNA, 1263 bp, Salmonella enterica
atgagttttacgaccatttctgttattgggctggggtatatcggattaccgactgcggccgcttttgcttcccgccagaagcaggttatcggcgtggatatcaaccaacatgcggtagacaccataaatcgcggtgaaattcacatcgtggagccggcgttgggcaatgtggtgaagatggcggtggaaggcggctttctgcgtgcgacgacgacacctgtcgaggccgatgcgtacctgattgccgtgccgacgccattcaaaggcgatcacgaccctgacatggcctatgtggaagccgcggcgaaatccattgcgccggtattaaaaaaaggggcactggtgattctggaatcaacatcgccggtcggcgcaacggagcaaatggctggctggctggccgggatgcgcccggatctgacctttccccagcaggcgggcgagcaggccgacgtgaatatcgcctattgtccggagcgtgtgctgccgggtcaggtgatggtggaactcattaaaaatgaccgcgtgattggcggtatgacgccagtatgttcggctcgcgccagcgcgctgtacaaaattttccttgagggcgaatgcgttgtcaccaactcgcgcaccgcagagatgtgcaagctgacggaaaatagcttccgtgatgtgaatatcgcctttgcgaatgaattgtcgctgatttgcgccgaacaggggattaacgtctgggaattgatccgtctggcgaaccgccatccgcgcgtcaatattttgcagccgggcccaggcgttggcgggcactgcattgcggtcgatccgtggtttattgtggcgcaaaatccgcagcaggcgagactgattcgcaccgcgcgtgaagtgaacgacggcaaaccgcactgggtggtcgatcaggtaaaagccgcggtcgcagattgcctggcggccaccgataaacgcgccagcgaagtgaaaatcgcctgttttgggctggcctttaagccgaatatcgacgatctgcgcgaaagcccggcgatggggatcgcgcaaagtatcgcccgctggcacagcggcgaaaccctggtcgtcgaaccgaatatccgtcagttgccgaaaaaattggacggactttgcacgctggcgaaactggacgcggcgctgaccgccgccgatgtgctggtgatgctggtcgatcacgacgaatttaaagcgattcccggcgatgcggttcatcaacgttatgtggttgataccaaaggagtctggcgctga

SEQ ID NO: 371168 - DNA, 1086 bp, Salmonella enterica
atggcgcctctggtccatgcgctggaaaaagatcctcatttcgaggccaaagtatgcgttactgcgcagcatcgggagatgcttgatcaggtattaactcttttttctattgtgcctgattacgatctcaacattatgcagccgggacaggggttgacggaaattacctgccgaattctggagggattaaagccgatcctggcagattttaaacctgatgtggtgctggttcatggcgataccaccactacgattgctaccagcctggcggctttctatcaacgaattccggtagggcacgtagaagccgggttgcgaaccggcgatctctattccccctggccggaagaggcaaaccgcacgctgaccggacatctggcgatgtaccactttgcgccgacggaaaactcgcggcagaatctgttgcgggagaacattccggatgagcgcatttttgtcactggcaataccgttattgacgcgctgatctgggtacgcgatcgcgttctgacgagcgatacattacaggctgaactggccgagcagtatcctttcctcaacgcgaataagaagatgattttggtgaccggtcatcggcgtgaaagctttggtcagggctttgagcatatctgccaggcgctggcggaaatcgccgccgcgaaccagaatgtgcaaattgtctatccggtgcatctcaatcccaacgtcagcgaacctgtcaaccgtatcctcggccatgttgaaaacgtggtactgattgagccgcaggactacttaccttttgtctggctgatgaatcacgcctggctcattctgaccgattccggcggtattcaggaagaagcgccgtcattaggtaagccggtattggtcatgcgtgaaaccacagagcgtccggaagccattaccgctggtacggtaagactgatcggcacggactcccggcgcattgtggcggaagttatgcgtctgctgcacgacgaaaatgaatatcaaaccatgagccgcgcccataatccttatggtgacgggcaatcatgcgcgcgcattttacaggcgttaaaaagttatcgggtatcgttatga

SEQ ID NO: 371169 - DNA, 1047 bp, Salmonella enterica
atgacacaaccattaccgggggcacgcgcggtgagcgctgaaaatgaactggatattcgcgggttgtttcgtactttatgggctggcaaattctggattatcggcattggcctgctatttgcccttatcgcgttagcctataccttttttgctcgtcaggagtggagtgcgacggcgatcaccgatcgcccaaccgtaaatatgttgggcggttattactcccagcagcagtttctgcgcaacctggatattaagaccgatcctgcttcttctgataagccctcggtgatggatgaagcgtataaagagttcatcatgcaacttgcctcctgggatacgcgtcgcgatttctggttacagacggactattacaagcagcgaatggtcgggaatagcaaagctgatgcggcgatgcttgatgaactgatcaataacatacagtttacgcccggcgattttacacgcgccatcaacgacaatgtgaagctgattgctgaaactgcgccggacgccaataatctgctgcgtcagtatgtcgcattcgccagccagcgggcggcgagccatctgaatgatgaattaaaaggtgcctgggctgcgcgtaccgtgcagatgaaagcccaggtcaaacggcaggaggaggttgcgaaagcgatctattcgcgtcgtgtaaacagtattgagcaggcgctcaaaattgcggaacaacataatatttctcgtagcgcgacggatgtcccggcggatgaattaccggactcagagctttttttactcggtcgccctatgttgcaggcgcgtcttgaaaatctgcaagcggttggccctgcgttcgatttggactactttcaaaatcgggcaatgttgaatacgcttaatgtggggccgaccctggaccctcgttttcagacctatcgttatttgcgtacgccggaagaaccggtaaaacgtgatagcccacgccgagccttcctgatgatcatgtggggtatcgttggggcgctaatcggtgcgggcgttgccttaacccgtcgccgcacgatttag

SEQ ID NO: 371170 - DNA, 1104 bp, Salmonella enterica
gtgaagttactcaccgctttatctgagctaatcagtatttttttattcacgaccatttttatttttcttgcgcgaaaagtagccataaaaattggtttagtggataaaccaaactttcgtaaacgacatcagggcgttatcccattagtcggcgggatttctgtgtttgcaggaatctgctttatgtttggcctctcggattactacataccgcacttatcgctatatcttatttgcgctggtgtattggtttttgttggtgcgatggatgaccgttttgatatcagtgtaaaaattcgtgctgtggttcaggctgttattgcggttgtaatgatggttatcgcaaaacttcacttaggtagccttggttacatctttgggccttgggagttagtgcttggcccctttggctatttccttactctgtttgcggtatgggcggcgatcaacgctttcaatatggtggacggtattgacggcctgctgggtgggttatccagcgtctcatttgcggcgatggggctgattttatggtttgatggtcagactagtctggcaatgtggtgctttgccatgatcgccgcgattctgccttacattatgcttaatctcggtattttggggcggcgttataaagtctttatgggcgatgccggtagtacactgattggctttaccgtcatctggcttttactggaaacgacgcaggggaaaactcactctatcagcccggttaccgcgctatggattatcgctattccattgatggatatggtggcgattatgtatcgccgtctgcgtaaagggatgagccccttttcccctgatcgccaacatattcatcatttggttatgcgagcagggtttacttcccgccaggcatttgttcttattacgctcgcagcggcgattctggcgggagtaggcgtaacggcagaatactctcattttgttcctgaatgggttatgttggtgctctttttgctagcattcttcctctatggctactgcattaagcgggcctggaaggtggcgagatttattaagcgtgtgaagcgtcgcctgcgcaggcaacgtgagaaccggccaaacttaaccaagtaa

SEQ ID NO: 371171 - DNA, 1260 bp, Salmonella enterica
atgaatcttaccgaattaaagaatacgccggtttctgagctgatcactctcggcgaaagtatggggctggaaaacctggcccgtatgcgcaagcaggacattatttttgccatcctgaagcagcacgcaaagagtggcgaagatatctttggcgacggtgtgctggagatattgcaggatggatttggtttcctccgttctgcagacagctcctacctcgccggtcctgatgatatctacgtttcccccagccaaatccgccgtttcaacctccgcactggtgataccatttctggtaagattcgcccgccgaaagaaggtgaacgctattttgcgctgttgaaagttaacgaagttaactacgacaaaccggaaaacgcccgtaacaaaatcctctttgagaacttaaccccgctgcacgcaaactctcgtctgcgtatggagcgtggtaacggttctaccgaagacttaacggcgcgcgttttggatctggcttcgccgatcggtcgcggccagcgcggtctgattgtcgcgccgccgaaggcgggtaaaaccatgctgctgcagaacatcgcgcagagcattgcgtataaccacccagactgcgtgctgatggtgctgctgattgacgaacgtccggaagaagtgaccgagatgcagcgtctggtgaaaggcgaagtggttgcctctacctttgacgaaccggcatcccgccacgttcaggttgccgaaatggttatcgagaaggcgaaacgtctggttgaacacaagaaagacgttatcatcctgctcgactccatcacccgtctggcgcgtgcctacaacaccgtggtgccggcttccggtaaagtattgaccggtggtgtggacgctaacgccctgcatcgtccgaagcgtttcttcggcgcggcgcgtaacgtggaagagggcggtagcctgactatcatcgcgacggcgctaatcgataccggttccaagatggacgaagttatctacgaagagtttaaaggcaccggtaacatggagctgcatctctcgcgtaagatcgctgaaaaacgtgtcttcccggctatcgactacaaccgttccggtacccgtaaagaagagctgctcaccactcaggaagagctgcagaaaatgtggatcctgcgtaaaatcatccatccgatgggtgaaattgacgcgatggaattcctcattaacaaactggcgatgaccaaaactaatgacgactttttcgagatgatgaagcgctcataa

SEQ ID NO: 371172 - DNA, 330 bp, Salmonella enterica
atgagcgataaaattattcacctgactgacgacagttttgacacggatgtactcaaagcggacggggctatcctcgttgatttctgggcagagtggtgcgggccgtgtaaaatgatcgctccgattctggatgaaatcgctgacgaatatcagggcaaattgaccgttgccaaactgaacattgaccagaacccaggtactgcgcctaaatatggcatccgcggtattccgactctgctgctgtttaaaaacggcgaagtggcggcaaccaaagtaggcgcactgtctaaaggtcagttgaaagagtttctcgacgccaatctggcgtaa

SEQ ID NO: 371173 - DNA, 1266 bp, Salmonella enterica
atgagcaaaacacatttaacagaacagaagttttccgacttcgccctgcacccacaggtggttgaagcccttgaaaaaaaagggttttataattgtacgcccattcaggcactggcccttccgctaacgctggcgggtcgtgacgttgcagggcaggcgcaaaccggtaccgggaaaacgatggcgtttctgacgtcaacgtttcattatttactttctcatcccgcgatcgacgatcgcaaggtgaaccagccgcgcgcgctgatcatggcgccgacgcgtgaattagccgtacaaattcacgcagacgcggagccgttggcgcaagcgacaggcttaaaattaggcctggcttacggcggcgatggttacgacaagcagcttaaagtgctggaaagcggcgttgatattcttattggtacgacgggccgactgatcgactacgccaaacaaaatcacattaacctcggcgccattcaggtcgtcgtactcgatgaagccgatcgcatgtacgatttgggctttattaaagatatccgctggctgttccgccgtatgccgccggctgcgcagcgtctgaacatgttgttctccgccaccctgtcttatcgggttcgcgagctggcgtttgaacagatgaacaacgccgaatatgttgaagtggaaccggagcaaaagaccggccaccgcattaaagaagagcttttctacccctctaatgaagagaaaatgcgtttactgcaaacgctgatcgaagaagagtggccggatcgcgccattattttcgccaacaccaagcatcgttgcgaagatatctggggacatctggcggcagatggccatcgtgttggtctgctgaccggcgacgtcgcgcagaaaaagcgcctgcggattctggatgagttcacccgcggcgatctggatattcttgtggcgaccgatgtcgcggcgcgcgggttgcatatccccgccgtaacgcacgtctttaactacgatctgccagacgattgtgaagactatgttcaccgtatcggtcgtaccggtcgcgctggcgccagcgggcattccatcagcctggcttgcgaagagtatgcgctgaatctgcccgccattgagagctatatcggccactcgattccggtcagcaaatacaatccggaagcgctcatgaacgatctgcccaagccgttgcgtctgacgcgttcgcgtcctggcaatggtccgcgccgcgctggcgctccgcgtaatcgtcgtcgttcaggttaa

SEQ ID NO: 371174 - DNA, 1482 bp, Salmonella enterica
atgaattccacctcgttgtatgccgccattgatctcggttccaatagttttcatatgctggtcgtgcgcgaggcggcgggaagcatccagacgctgacccgaataaaacgtaaggtgcgtctggccgcgggtctgaacaacgacaaccacctttcagccgaagcgatggaacgcggctggcaatgcctgcgtctgtttgctgaacgtttgcaggatatcccgcagccgcaaatccgcgtggttgccaccgcaacattgcgtctcgccgtcaatgcgggtgaatttatcgcgaaagcgcagactatccttggttgtccggtgcaggttatcagcggcgaagaagaggcgcggctgatttatcagggggtcgctcataccaccggcggcgcagatcagcgactggtggtggatatcggcggcgccagcactgaactggttaccggcactggcgcgcaaaccacgtcgctatttagcctgtcgatgggctgcgtaacgtggcttgaacgctattttagcgatcgtaatctggcgcaagaaaactttgatgatgcggagaaggccgcgcgcgatgtactgcgtccggtcgccgatgaactgcgttttcatggctggaaggtctgcgtgggtgcctccggcaccgtacaggcattgcaggaaatcatgatggcgcaggggatggacgagcgcattacgctcgccaaactgcagcagctaaaacaacgcgcgatacagtgcgggcgtctggaagagctggaaatcgaaggcctgacgctggagcgcgcgctggttttcccaagcgggctggctattctgatcgcgatatttaccgagctgaacatccagagcatgacgctggcaggcggcgcgttacgcgaagggctggtgtatgggatgttgcatctggcggtagatcaggatatccgcagccgcacgctgcgaaacattcagcgtcggtttatcgtcgataccgatcaggcaaatcgcgtggcgaagctggcagataacttcctcaaacaggtagaaaatgcctggcatattgagcctatcagtcgtgaactgttgcttagcgcttgccagttgcatgagatcggtctgagcgttgattttaaacaggcgccctatcatgccgcctatttagtacgccatttggatctgcctggctatacgcccgcgcagaaaaaattgctcgccaccctcttactgaatcagaccaatccggtcgatctctcttcgcttcatcagcaaaacgcggtaccgccccgtgttgcggaacagctatgccgtttgctgcgactggcgattctttttgccggtcgccgtcgtgacgatctggtaccagaaattacgctacaggcgctaaatgaaaatctgacgttaaccttgcctggcgactggctggcacatcacccgctgggtaaagagttgattgatcaggaaagccagtggcaaagctatgtacactggccgctggacgttcgctaa

SEQ ID NO: 371175 - DNA, 2025 bp, Salmonella enterica
atgcgtttaaatcccggccaacaacacgctgtcgaattcgtcaccggaccctgcctggtgctggcaggagcgggttctggtaaaactcgcgtaattaccaataaaatcgcccacctgatccgcggatgcggctatcaggcccggcatattgcggcggtgacgtttaccaacaaggcagcgcgtgagatgaaagaacgcgtcgggcagacgctcggccgtaaggaagcgcgcggtttgatgatctccacctttcatacgctagggctggatattattaagcgcgagtacgctgcgctggggatgaaatcgaacttttcattgtttgacgataccgaccaggtcgccttgctcaaagagctgaccgaaggcctgatcgaagacgacaaggttctgttgcaacagctgatctccacgatctccaactggaaaaacgatctcaaaacgcctgcacaggcagcggcgggggcgaaaggtgaacgcgatcgtatttttgcccactgctacgggctttacgacgcccatatgaaggcatgcaacgttctcgattttgatgatttgattttgctgccgacgctgctgctgcaacgcaatgacgaggtgcgcgagcgctggcagaataaaattcgttatctactggtggatgaatatcaggatactaacaccagccagtatgagttggttaagctgctggttgggcaacgcgcgcgctttacggtcgtaggcgatgacgatcagtctatctactcctggcgcggggcgcgtccgcaaaacctggtgttactgagccaggactttccggcgctgcaggtgattaaactggagcaaaactatcgttcttcgggccgcatcctgaaagcggcgaatattctcatcgccaacaatccgcacgtctttgaaaagcgcctcttttccgaactcggttacggcgcggaactcaaagtgttaagcgcaaacaatgaagagcatgaagctgagcgcgttaccggcgaactgattgcccatcactttgtgaacaagacccagtacaaggattacgccattctgtatcgcgggaatcatcagtcgcgggtatttgaaaaattcctcatgcagaaccgcattccgtacaaaatttccggcggcacctcattcttctcccgtccggagattaaagacctgctggcctacctgcgggtgttgaccaacccggatgatgacagcgctttcctgcgcatcgtgaatacgccaaaacgcgaaatcggtccggccacgctgcaaaagctgggtgaatgggcaatgacgcgtaataaaagcctgtttaccgccagctttgatatggggcttagccaaaagctgaccgggcgtggttacgattcattgacgcgttttacccactggctgggggaaatccagcgtctggccgaacgcgagcctgtcgccgccgtgcgcgatctcatccacggtattgactatgaatcctggttgtacgaaacctcgccgagccccaaagcggcggaaatgcgtatgaaaaacgttaaccagctctttagctggatgactgagatgctggaaggcaacgaactcgatgagccgatgacgctcacccaggtggttacacgctttacgctgcgcgatatgatggagcgcggcgagagcgaagaagagctggatcaggtacagttgatgacgcttcatgcgtcgaaaggactggaattcccgtatgtctatatggtgggaatggaagaaggatttttgccgcatcaaagcagcattgacgaagacaatattgaggaagagcgtcggctggcctatgtcgggatcactcgtgcgcagaaagagctcacctttacattatgtaaagagcgccgtcagtatggggaactggtgcgcccggaacccagtcgcttcctgttagaactgccgcaggatgatttaatctgggagcaggagcgcaaagtggtaagcgctgaggagcgaatgcaaaaagggcaaagtcacctggctaatctgaaagccatgatggcggcaaagcgagcgaaatcgtag

SEQ ID NO: 371176 - DNA, 282 bp, Salmonella enterica
atggcaaaaatggcagcagcactgcatatccttgtaaaagaagagaaactggctttagatcttctggagcaaattaaaaacggcggcgattttgagaagctggcgaagaagcattctatctgcccatccggtaaaaaaggcggtcatttaggcgaatttcgtcagggccagatggttccggcattcgataaagtagtcttttcctgcccggtactggagccaaccggcccgctgcatacccagttcggttaccacatcattaaagtattgtatcgcaaataa

SEQ ID NO: 371177 - DNA, 1476 bp, Salmonella enterica
atggctaactactttaatacactgaatctgcgccagcagctggcgcagctgggtaaatgtcgctttatgggccgcgacgaattcgccgacggcgcgagctaccttcagggtaaaaaagtggtcatcgtcggctgtggcgctcagggtctgaaccagggcctgaacatgcgtgactccggtctggatatttcctacgccctgcgtaaagaagctattgctgagaagcgcgcctcctggcgtaaagcgaccgaaaacggcttcaaagtaggcacctacgaagagctgatcccgcaggctgacctggtggttaacctgacgccggacaaacagcactccgacgttgtacgttctgtacagccgctgatgaaagacggcgcagcgctgggctactcccacggcttcaacatcgtggaagtgggagagcagatccgtaaagacatcaccgtggtgatggtggcgccgaagtgcccggggaccgaagtgcgtgaagagtacaaacgtggtttcggcgtgccgacgctgatcgccgttcacccggaaaacgatccgaaaggcgaaggcatggcgattgctaaagcctgggcggcggccaccggtggtcaccgtgcgggcgtactggaatcttctttcgtggcggaagtgaaatccgacctgatgggcgagcagactattctgtgcggtatgctgcaggccggttctctgctgtgcttcgacaagctggtggcagaaggcaccgacccggcatacgcggaaaaactgattcagttcggctgggaaaccatcaccgaagcgctgaagcagggcggcatcaccctgatgatggaccgtctgtctaacccggcgaaactgcgtgcttacgcgctgtccgaacagctgaaagagatcatggcgccgctgttccagaaacacatggatgacatcatctccggcgaattctcttccggcatgatggctgactgggcgaacgacgataagaaactgctgacctggcgtgaagagaccggtaaaaccgcgttcgaaaccgcaccgcagtttgaaggtaaaatcggcgagcaggagtacttcgataaaggcgtgctgatgatcgcgatggtgaaagcgggcgttgagctggcgttcgaaaccatggtcgattccggcatcatcgaagaatccgcttactacgaatcactgcacgaactgccgctgatcgcgaacaccatcgcccgtaagcgcctgtacgaaatgaacgtggttatctccgataccgcagaatacggtaactacctgttctcttacgcttgcgtaccgctgctgaaaccgtttatggcggaattgcaaccgggcgatctgggtagtgctatcccggaaggcgcggtagacaacgcacagcttcgcgacgtgaacgacgcgattcgtagccatgcgattgagcaggtaggtaagaaactgcgcggctatatgacggatatgaagcgtattgcggtagcgggttga

SEQ ID NO: 371178 - DNA, 888 bp, Salmonella enterica
gtggatttacgcgatctaaaaaccttcctgcatctggcggaaagccgccactttggccgcagcgcgcgggcgatgcacgtcagcccctccacgctctcccggcagattcagcggctggaagaagatctcggccagccgctgtttgtgcgtgataaccgcacggtcacgctgaccgaagcgggtgaagagctgcgagtgtttgcccaacagacgcttttgcaatatcagcagttgcgccataccctcgatcagcaggggccatccctttccggcgaactgcatattttctgctcggtgaccgcggcatacagtcatctgccgccgatcctcgaccgcttccgcgccgaacatccctcggtggaaattaagctcaccaccggcgacgccgccgacgccatggacaaagtggtcaccggcgaggccgatctggcgattgccggtaagccggaaacgctgcccggtgcggtggcgttttcgatgctggagaatctggcagtggtgctgatcgccccggcgctgccctgcccagtgcgtaatcaggtttcggtcgacaagccagactggtcgacggtgccgtttatcatggccgaccaggggccggtacgccgtcgcattgagctatggttccgccggcataaaatcagcaatccgcagatttacgccaccgtcggcggtcacgaagcgatggtctcaatggtggcgctgggctgcggcgtggcgctgctgccggaagtggtgctggaaaacagcccggagccagtgcgcaaccgggtgatgattttagaacgcagcgatgaaaaaacgccgtttgaactcggcgtctgcgcgcaaaaaaagcggctgcatgagccgctaattgatgcgttctggaagattttaccgaattag

SEQ ID NO: 371179 - DNA, 342 bp, Salmonella enterica
gtgattgccaaaactgatagtgatattcgccatgtgacgccatctggcggtaatgtttttgctgatttggggtttcataagcaggacgcagaaaagttttacgctgattccctgaatgaaatcgaaaacacgttagccattaaacaacagctaatggaagaaattaccctctggattacgcaaaaccagatgaagcaagccgaggttgctacagttttgcatatatcccgaccgcgcgtttcggatgtcgtcaacaagaaatgcagcaaattcaccattgatgctctggtgaatatgcttagccgtattgggaagcctgttcgggtaatggtagggccgtaa

SEQ ID NO: 371180 - DNA, 363 bp, Salmonella enterica
atgttactcacccgagctctctccaatgaaaaagaaattcgatgggtgggatcttctctggaggatctcctggcttttcccataacggtacgtaaagcagtcggttatcagcttcacaaaattcagtatggaattgaacccgatgactggaaaccgttttcagaaattggggctggggtaaatgaaattcgtattcgtgacaacaatggtatctatcgcgttatgtatgtcgctaagtttgaagaagcactctacgttttgcatagtttccaaaaacagacgcaacaaaccagtcagcatgataaaaacatcgccagaacgcgttataaccgggtggtgcaacaacggagaaacagcttgtga

SEQ ID NO: 371181 - DNA, 1545 bp, Salmonella enterica
atggcggaatctcaaccactgtcagtcgcgccggaaggggcggagtatctgcgcgcggtgctacgcgcgccagtatacgaagcggcgcaggtgacgccgctgcaaaaaatggaaaagctctcgtcacgtctggataacgttattctcgtcaaacgcgaagaccggcagccggtacatagctttaagctgcgcggcgcttacgcgatgatggccggattgaccgaagaacaaaaagcccacggcgtgattaccgcgtcggcggggaaccatgcacagggcgtggcgttttcctccgcgcggcttggcgtgaagtctctgatcgtcatgccaaaagcaacggcggatattaaagtcgatgcggtacgcggttttggcggcgaagtgctgttgcacggcgctaattttgatgaagcgaaagcgaaagctattgaactggcgcagcagcagggttttacctgggtgccgccgtttgatcacccaatggtgatcgccgggcagggcacgctggcgctggagctgcttcagcaggattcgcatctcgatcgtgtctttgtgccggttggcggcggcggcctggcggcgggcgtagcggtactgatcaaacaattgatgccgcaaatcaaagtgattgccgtcgaagcggaggattccgcctgcctgaaagcggcgttggaagccggtcatccagtggatctcccgcgcgttgggttatttgctgaaggcgtggcggtaaaacgcatcggcgacgaaaccttccgcctgtgccaggaatatctcgacgacattattacagtcgatagcgacgctatctgcgcggcgatgaaagatctgtttgaagatgtgcgtgcggtggcggagccgtccggcgcgctggcgctggcggggatgaaaaaatatatcgccctgcacaatattcgcggcgaacgcctggcgcacgtcctttccggcgccaacgtcaacttccacggcttgcgctatgtgtctgaacgctgcgagctgggggaacagcgcgaagcgttactggcggtgaccattccggaagaaaaggggagctttctcaaattctgccagttgcttggcgggcgtatggtcaccgaatttaactaccgttttgccgacgcgaaaaatgcctgtatttttgtcggcgtacgcgtcagtcaggggctggaggagcgaaaagagattatcacccaactgtgcgacggcggttatagcgtagtggatctctccgacgatgaaatggcgaagctgcatgtgcgctatatggtcggcgggcgtccatcccatccgctacaggaacgcctctacagctttgaatttccggagtcgcccggcgcgttgctcaaattcctgcatacgcttggcacgcactggaatatttcgctattccattaccgcagccacggtaccgattatggccgcgtgctggcggcgttcgagttaggcgatcatgagccggatttcgaaacccggctgcatgagctgggctatgaatgccatgatgagagcaataacccggcgttccggttctttctggcgggttaa

SEQ ID NO: 371182 - DNA, 1851 bp, Salmonella enterica
atgcctaagtaccgttccgccaccaccacccatggtcgtaatatggcgggtgcccgcgcgctgtggcgcgccaccggaatgaccgacagtgattttggcaaaccgattatcgccgtggtgaactcattcactcagtttgtgccgggtcacgttcatctgcgcgatctcggtaagctggtcgccgaacagattgaagcttccggcggggtggcgaaagagttcaacactattgccgtggatgacgggattgccatggggcacgggggtatgctctattcactgccgtcgcgcgagctgatcgccgactccgttgagtacatggtgaacgctcactgcgctgacgcgatggtgtgtatctccaactgcgacaaaatcaccccagggatgctcatggcctcgctgcgcctgaatattccggtgatctttgtctctggcggaccgatggaagccgggaaaaccaagctttcagacaaaattatcaagctggatctggttgatgccatgattcagggagcggacccgaaagtctctgacgatcaaagtaaccaggttgaacgctccgcctgtccaacctgcggctcctgctccggcatgtttaccgctaactccatgaattgcctgaccgaagcgctgggcctgtcgcagccgggcaacggctcgctgctggcaactcacgctgaccgtaagcagttgttcctcaatgccggtaagcggattgttgaactgactaaacgctattacgagcaaaacgacgaaagtgcactgccgcgtaacatcgccagcaaagccgcgtttgaaaacgcgatgacgctggatatcgcgatgggcggttcgaccaacaccgttcttcacctgctggcggcggcgcaggaagcggaaatcgacttcaccatgagtgatatcgacaagctgtcccgcaaggtgccgcagctgtgtaaagtggcgccaagtacccagaaatatcatatggaagatgttcaccgtgccggcggtgtgctgggtattttaggcgagctggatcgcgccgggctgctgaactgcaacgtgaaaaacgtattaggcctgacgctgccgcaaacgctggaacagtacgacatcacggttacgcaggacgaagcggttaaaaaaatgttccgtgctggccctgccggtatccgtactacccaggcgttctcgcaggattgtcgctgggattcgctggatgacgaccgcgcagcgggttgcatccgctcgctggaatatgcctatagcaaagacggcggtctggcggtgctgtatggcaacttcgccgaaaacggctgcattgtgaaaaccgcaggcgtggatgacagcatccttaaatttaccggcccggctaaagtgtatgaaagccaggacgacgcggtagaggcgattctcggcggcaaagtagtggaaggcgatgtagtcgtgatccgctacgaagggccgaaaggcgggccgggaatgcaggaaatgctctatccgaccagtttcctgaagtcgatggggctgggcaaagcctgcgcgctcatcaccgatgggcgtttctccggcggtacttcgggtctttccatcggccacgtctcgccggaagcggccagcggcggcactattgcgttgattgaagatggcgacactattgcgattgatatcccgaaccgcagcattcagttgcagttgaacgaggctgaaatcgccgcacgccgtgaggcgcaggaggctcgtggcgacaaagcctggacgccgaaaaatcgtcagcgtcaggtttcgtttgccctgcgtgcctacgccagcctggcgaccagcgccgataaaggcgcggtgcgcgataaatcgaaactgggaggttga

SEQ ID NO: 371183 - DNA, 930 bp, Salmonella enterica
atgacgacgaaaaaagctgattatatttggttcaatggcgagatggtgcgctgggaagacgcgaaggttcacgtaatgtctcacgcgctgcactacggtacgtcggtatttgaagggattcggtgctacgactctcacaaaggcccggtagtgtttcgtcatcgtgaacatatgcagcgcctgcgcgactcagcaaaaatttatcgttttccggtttcccagagtattgatgagctgatggaagcctgccgcgaagtgatccgcaaaaacaacctgaccagcgcctatatccgtccgttggtatttgtcggcgatgtcggtatgggcgttaacccgcccccgggatacaccactgacgtcatcatcgccgcgttcccgtggggggcatacctgggtgccgaagcgctggatcaggggatcgatgcgatggtttcttcctggaatcgcgctgcgccgaacaccattccaaccgccgccaaagcgggcgggaactatctttcctcactgctggtgggtagcgaagcgcgccgccacggctatcaggaaggcatcgccctggatgtaaacggctatatctccgaaggcgcaggtgaaaacctgtttgaggtaaaagatggtgtgctgtttactccgccgtttacctcttccgcgctgccaggcattactcgcgatgcgatcatcaaactggcgaaagagctgggtattgaagtgcgcgagcaggtgctgtcccgtgagtcgctgtatctggccgacgaagtgtttatgtccggaaccgcggcagaaattactccggtacgcagcgttgatggtatccaggtaggcgaaggccgctgcggtcctgtcaccaagcgtatccaacaagccttctttggtctcttcactggagaaaccgaggataaatggggctggttggatccggtaaattcataa

SEQ ID NO: 371184 - DNA, 264 bp, Salmonella enterica
atgatgcaacatcaggtcaatgtatcggcacgctttaatccagaaaccttagaacgtgttttacgcgtggtgcgccatcgtggttttcaggtgtgctccatgaatatggaagccgcgaccgatgcgcagaatataaatattgaattgaccgttgccagtccccggtcggtcgacttactgtttagtcagttaagtaaactggtagatgttgcgcatgtcgcgatctgccagagcgctgccacatcacaacaaatccgcgcctga

SEQ ID NO: 371185 - DNA, 1647 bp, Salmonella enterica
atgaacggggcacagtgggtggtacatgctttgcgagcgcagggggtgaaaaccgtatttggttatcctggcggcgcaattatgccggtttacgacgcgttgtatgacggtggtgtggagcatttgttgtgccgacacgagcagggtgcggcaatggcggcaatcggttatgcccgttctaccggcaaaaccggtgtttgtatcgccacctccggccctggcgccactaacctgatcactggcctggcggatgcgttgttagattcggtccccgtcgtcgcgatcacgggtcaggtttccgccccgttcatcggcaccgatgcgttccaggaggtggatgtgttaggcctgtcgctggcctgtaccaaacacagcttcctggtgcagtcgctggcagagctgcctcgtatcatggcagaggcttttgaagttgccaacgctggccgtcctggcccggttctggtggatatcccgaaagatatccagttggccagcggtgagctggaaccctggtttactaccgttgataacgaagcgaccttcccgcaggctgatgttgaacaggtgcgccagatgctggaacaggcgaaaaaacccatgctgtacgtcggcggtggtgttggtatggcgcaggcggttccggcgctgcgtaaatttatcgcggtaacgcaaatgccagttacctgcacgctgaaagggctaggggctgttgaagctgattatccgtactatctgggcatgctgggaatgcacggtactaaagcggctaatttcgcggtgcaagagtgtgatttactgatcgcagtgggtgcacgttttgatgaccgggtgaccggtaagctgaatacgtttgcgccgaacgccagcgtaatccatatggatatcgacccggcggaaatgaacaaactgcgtcaggcacacgtcgcgttgcagggcgatttaaattcgctgttgccggcattacagcaaccgctgaagatcgacgcatggcgtcagtcctgtgcagagctgcgcgcagaacacgcctggcgctatgatcatcctggcgagactatctatgcaccgttgttgttgaagcaattgtcggaacgcaaacccgcagacagcgtggtgacgacggatgtggggcagcatcagatgtggtcagcccagcatatgacttacacccgcccggagaacttcatcacctccagcggtctggggacgatgggattcggcttaccggcggccgttggcgcgcaggtagcgcgaccgaatgataccgttatctgtatctccggtgacggctccttcatgatgaatgttcaggagttgggcaccgtaaaacgcaagcagttaccgttgaagatagtcttactcgacaaccagcggttagggatggttcgacaatggcagcaactgtttttccaggagcgatatagcgaaaccaccctgaccgataaccccgatttcctcatgctggccagcgccttcggcattccaggccagcacattactcgtaaagaccaggttgaagcggcactcgacactatgttggcaagcgaagggccgtacctgcttcacgtctcaatcgacgaacttgaaaatgtctggccgttggtgccgcctggcgccagtaactctgaaatgctggagaaattatcatga

SEQ ID NO: 371186 - DNA, 1521 bp, Salmonella enterica
atgtcactggcgattgttcatactcgcgccgcacttggcgtcaatgcgccgcctatcactatagaggtgcatatcagtaatggattaccgggattaaccatggttggcctaccggaaaccacggtaaaagaggcgcgtgaccgggtacgtagtgcgattattaatagcggatatgaatttccggctaaaaaaataaccattaaccttgctccagccgatctaccgaaagagggcggaaggtatgacctgcctattgctgttgcgcttctggccgcgtctgagcagcttacagcgtcgaatcttgaggcatatgagctggtgggtgagttagcgcttacaggcgcattacgcggcgttcctggcgcaatatcaagtgcaacggaagccatcagggccggcagaaatattatcgtcgcaacagagaacgcggcggaggttgggcttatcagcaaagaaggatgttttatcgccgatcatctacaaaccgtctgcgcctttctggaagggaaacacgccctggaaagacctttagctcaggatatggcatcgtctaccgcaactgccgatcttcgcgatgtgatcggtcaggagcagggtaaacgcggcctggagattacagcggcagggggacataatctgctattgatcggcccgccgggtacgggtaaaaccatgctggccagtcgactgagcgggattcttccaccattaagcaatgaagaggcgttggaaagcgccgcgatcctcagtctggttaatgccgatacggtacaaaaacgatggcagcaacgtccctttcgctcacctcatcatagcgcctcacttactgctatggtcggcggcggcgcaatacccgccccgggagagatatcgctggcgcacaacggaattttgttccttgatgaattgcctgaatttgaacgacgcacactggatgcgctacgtgaacctatagaatccggtcaaattcatttatcccgtaccagagcgaaaataacgtaccctgccaggttccagttaatcgccgcaatgaatcccagcccgaccggacattatcagggaaaccataatcgctgcacgccagaacagacactacgttaccttaatcggttgtcaggcccgtttcttgatcgttttgacctttcgcttgagataccgcttccaccgcccgggattcttagccaacacgcctcaaagggtgagagcagcgctacggtaaaaaagcgggtcatcgccgcccatgaacggcagtaccgacgccagaagaagttaaacgcgcgtctggagggtcgcgaaatccaaaaatattgtgttttgcaccacgatgacgcccgctggcttgaagacacgctggtgcatcttggattatccattcgcgcctggcagcgtttactaaaagtggccagaaccattgccgacatagaactggctgaccagatctcgcgtcagcatttgcaggaggcggtaagctatcgggcgatagacaggttgttaattcatttgcaaaagctgctggcgtaa

SEQ ID NO: 371187 - DNA, 339 bp, Salmonella enterica
atggcggaaagctttacgacgactaatcgatattttgacaataaacattatccacgtggattctctcgtcacggtgatttcacgattaaagaggcacaactgcttgagcgtcatggtcatgcctttaatgatctggatcttggcaagcgtgagcctgtgactgaagaagagaagctgtttgtagcggtatgtcgcggtgaacgcgagccggtaacggatgcagaacgcgtctggtccaagtatatgacgcgtatcaagcgtccaaaacgcttccacaccttgtctggcggcaagccgcaagttgaaggcgcagaagactacaccgaagctgatgattaa

SEQ ID NO: 371188 - DNA, 837 bp, Salmonella enterica
gtggatacggaattgttaaaaactttcctggaagttagccggacacgccatttcgggcgggccgcagaagcactttacctgacgcaatccgcggtgagctttcgtatcaggcaactggagaatcaactgggcgtaaacctttttacgcggcacagaaacaatatccgtttaaccacggctggcgaaaaacttttaccgtatgcggaaacgctgatgaatacgtggcaggcggcacgtaaagaggtggcgcatacctcacgccataacgagttttccatcggcgccagcgcgtctttatgggagtgtatgcttaacgcctggctggggcgactgtaccaactacaggagccgcaaagcggcctgcagttcgaagccagaatcgctcaacggcaatcgcttgtgaagcaacttcatgaacgccagcttgatctcctcattactaccgaagcgcccaaaatggatgagttcagcagtcagctgttagggcacttcactttggcgttatattgcagcagccctgcccgtaagaaatcagaactcaattatctgcggctggagtggggaccagacttccaacagcatgaaacagggctgatcgcagcagatgaagtgccggtattaacaaccagctcagccgaactcgcccgacagcagcttagcgcattaaatggctgtagctggcttcctgtaaactgggcaaatgaaaagggcggattacataccgttgccgacagcgcaacgctttcacggccactatacgctatttggctgcaaaacagcgataaatactcgctgatctgcgatctgttaaaaacggatgtgctggatgaacaatga

SEQ ID NO: 371189 - DNA, 198 bp, Salmonella enterica
atgcaggcgtttctccaccatgtcggccatgaagaaggccttctcgaccacgtcagtttccttcatcatcatggccagcgccctggcccgtgtcagctcatggccgagggggcccagcaggttgacatggtacttgatcatccggtcaccgtgcggcagtacgtgccggatggcctgggccacgcccatcgtctgtga

SEQ ID NO: 371190 - DNA, 144 bp, Salmonella enterica
atgtgggtcggaagccggataagtatcactgaaagttattttatcatgttcatgaaattcgtttattacgcctgtctggccgtcgtcatattaatggctgtggtcttttgtgtgtcagtgctttttattctggaaaattcatga

SEQ ID NO: 371191 - DNA, 351 bp, Salmonella enterica
atggcgtctgctttgaccgttttcccggaagacggggacatcaaccggatatggtacgatcggttttgtatcgaatttaacagcgacggcggactgagtccggctgaactgcgggttatccgactgctgctgcggggctataacagcgggcagattgctgccctctgttttcgcagcgtcaaaaccatttcagcccagaaagttctggctttcaggcgcctcggcgtcaggaatgatgccaccctgttgccaaccctgatgcttctggggatggtgacactgtataccgacctgaaccggtgtcattcactggaggagggcggcccggaatgtgggtcggaagccggataa

SEQ ID NO: 371192 - DNA, 210 bp, Salmonella enterica
atgggtgaatccatcattacaaacatcatctccataatccgggagcgtcagagtgcggacaacgcgcctgttaaaatccgcgatattgctgatgctgccggactcagtatctaccaggtccggtcatatcttgagcaactccgtgctgtcggggtgcttgagaaagtaaatgccggaaagggagcgcccggattatggcgtctgctttga

SEQ ID NO: 371193 - DNA, 816 bp, Salmonella enterica
atgttgaaaaaaaacgccataaaaataaaactatatcgttatgctattttacattcgaaaaactgtattgttaccattaagaacaagtcaaagccagaggaaataaaaataactagaggcaacatagccttaatagaaaaaaatatagaagccgttgtggaaattgaatatatggatgacattgaatcatttgacattattactttgccagatgaattattaagtagagttttatgcttatttgaggcttctaattgctcagaaagtttatcaccaatacgctacagaacatttagcgataaggtttttattataaccgacaatggaattaatggaattttatttgaatatttaaaaaagagaaaaaataacaataatgatatttatgaaattgcctgcttattttcaaaagtgaataatatcgagcagctatacacatctctgtgcatttcagtctcacgtagtttttctgatattgttagaaaaacaatagataatgacatttcaacgaaatggagattaaaaacattatccgaaaaactaaatttatcagaagtgactatcagaaaaaaacttgagaatgaaaatactaatttttacagaatccttctggatgccaggatgcaaaaagcagcgcgtttggtgcttgatagcgacacccatattaataaagtatcatatgccgtaggaatgtcaagcgtatcatatttcattaaattattttctgactattatggcttaaccccaaaacaattccatctaaaatataagcatagaaatacaggagaaaaagctgcatttatgctttataattaa

SEQ ID NO: 371194 - DNA, 447 bp, Salmonella enterica
atgaatcagtataattcgtcaatacctaagttcattgtctctgtttttctgattgttactggttttttcagctcaactattaaagcacaagaacttaaattaatgattaaaataaatgaggctgttttttatgaccgtattacaagtaataaaataataggtacggggcatctatttaacagagagggaaaaaaaatcctcattagttcaagtttagaaaaaattaaaaataccccaggggcatatattattagaggtcagaataactcagcccataagcttaggataagaataggtggagaagactggcaaccagataattcaggtattggtatggtatctcattctgattttactaatgaatttaatatttattattttgggaatggagacattcctgttgacacatatttaataagcatatatgcgacagaaattgaattataa

SEQ ID NO: 371195 - DNA, 2445 bp, Salmonella enterica
atgaagaaaaccacaattactctatttgttttaaccagtgtatttcactctggaaatgttttctccagacaatataatttcgactatggaagtttgagtcttcctcccggtgagaatgcatcttttctaagtgttgaaacgcttcctggtaattatgttgttgatgtatatttgaataatcagttaaaagaaactactgagttgtatttcaaatcaatgactcagactctagaaccatgcttaacaaaagaaaaacttataaagtatgggatcgccatccaggagcttcatgggttgcagtttgataatgaacaatgcgttctcttagagcattctcctcttaaatatacttataacgcggctaaccaaagtttgcttttaaatgcaccatctaaaattctatctccaatagacagtgaaattgctgatgaaaatatctgggatgatggcattaacgcttttcttttaaattacagagctaattatttgcattctaaggttggaggagaagattcatactttggtcaaattcaacctggttttaattttggtccctggcggctaaggaatctatcatcttggcaaaacttgtcaagcgaaaaaaaatttgaatcagcatatatttatgctgagcgaggtttaaaaaaaataaagagcaaactaacagttggggacaaatataccagtgcagatttattcgatagcgtaccatttagaggcttttctttaaataaagatgaaagtatgatacctttctcacagagaacatattatccaacaatacgtggtattgcgaaaaccaatgcgactgtagaagtaagacaaaatggatacttgatatattctacttcagtcccccccgggcaattcgagataggtagagaacaaattgctgatcttggtgttggggttggggttcttgatgttagcatttatgaaaaaaatgggcaggtccaaaactatacagtgccatattcaactcctgtattatctttgcctgatggatattctaaatatagtgtaactattggtagatacagggaggttaacaatgattatatcgatcctgttttttttgaagggacttatatatatggtctgccttatgggtttactttatttggtggagtgcaatgggtaaatatttataattcatatgccataggcgcaagtaaagatattggtgagtatggtgctctgtcttttgactggaaaacatctgtttcgaagactgatacatccaatgaaaatggtcatgcatatgggattagatacaataaaaatatcgctcagacaaacaccgaagtatctttggctagtcattactattattcgaaaaattatagaactttttctgaagcaattcatagtagcgagcatgatgaattttacgataaaaataagaaatcaacaacctctatgttattaagtcaggcattaggatctctgggttctgttaacttaagctacaattatgataaatattggaaacatgaaggtaaaaaatcaataattgctagttatgggaagaatttaaatggtgtttcgttatcgctttcatatacgaaaagtacatcaaagattagtgaagaaaatgaagatttattcagttttctactcagtgtacctttgcaaaaacttacaaatcatgaaatgtatgctacatatcaaaactcatcctcttcaaagcatgatatgaatcatgatttaggtattactggtgtggcatttaatagccaattgacatggcaagcaagagggcaaatagaagataaatcgaaaaatcaaaaggctacatttttaaatgcttcttggcgaggtacttatggggagatcggagcaaactatagtcataatgaaataaatcgtgatattgggatgaatgtttctggtggggtgattgctcattcatcaggaattacgtttggtcagagtatatcggatactgctgcactggtagaggctaaaggtgtaagtggggcaaaagttctgggcctaccaggtgttagaaccgattttagaggctatacaatatccagttatcttactccatatatgaataacttcatatctatagatccaacaacgttaccaataaatacggatattaggcaaactgatattcaagtagttcctaccgaaggtgctattgtaaaagctgtatataaaacaagcgtgggtactaatgcattaattagaattacaagaacaaatggaaagccactagctcttggcacagttctttcacttaagaataatgatggagtaatccaatcaacatctattgttggcgaagatggtcaggcatatgtatctggattgtcaggagtgcaaaaattaatcgcttcgtgggggaataagccctccgatacttgtacagttttttactctcttcccgataaaaacaaaggtcagattagctttttaaatggagtgtgcaaatga

SEQ ID NO: 371196 - DNA, 741 bp, Salmonella enterica
atgtatattttgaataaatttatacgtagaactgttatctttttctttttttgctaccttccaattgcttcttcggaaagtaaaaaaattgagcaaccattattaacacaaaaatattatggcctaagattgggcactacacgtgttatttataaagaagatgctccatcaacaagtttttggattatgaatgaaaaagaatatccaatccttgttcaaactcaagtatataatgatgataaatcatcaaaagctccatttattgtaacaccacctattttgaaagttgaaagtaatgcgcgaacaagattgaaggtaataccaacaagtaatctattcaataaaaatgaggagtctttgtattggttgtgtgtaaaaggagtcccaccactaaatgataatgaaagcaataataaaaacaacataactacgaatcttaatgtgaatgtggttacgaatagttgtattaaattaatttataggcctaaaactatagacttaacgacaatggagattgcagataaattaaagttagagagaaaaggaaatagtatagttataaagaatccaacatcatcatatgtgaatattgcaaatattaaatctggtaatttaagttttaatattccaaatggatatattgagccatttggatatgctcaattacctggtggagtacatagtaaaataactttgactattttggatgataacggcgctgaaattataagagattattag

SEQ ID NO: 371197 - DNA, 498 bp, Salmonella enterica
atgcgtaaatcagcatctgcagtagcagttcttgctttaattgcatgtggcagtgcccacgcagctggctttgttggtaacaaagcagaggttcaggcagcggttactattgcagctcagaatacaacatcagccaactggagtcaggatcctggctttacagggcctgctgttgctgctggtcagaaagttggtactctcagcattactgctactggtccacataactcagtatctattgcaggtaaaggggcttcggtatctggtggtgtagccactgtcccgttcgttgatggacaaggacagcctgttttccgtgggcgtattcagggagccaatattaatgaccaagcaaatactggaattgacgggcttgcaggttggcgagttgccagctctcaagaaacgctaaatgtccctgtcacaacctttggtaaatcgaccctgccagcaggtactttcactgcgaccttctacgttcagcagtatcaaaactaa

SEQ ID NO: 371198 - DNA, 534 bp, Salmonella enterica
atggctgcggctaccagcgagcttaacctgtatgaatcgcagctctacaactggcgaagcaaacagcaaaatcagctctcttcttctgaacgcgaacaggagatgtccgcagaaatcgtccgtctgaagcgtcaactggcagaacgggatgaggaactgaccattctccagaatggtcgcgacatacttcgcgaaacgcctgaaatgaagtatgtcttcatcgaaaaacatcaggctgagttcagtatcaaagccatatgccgtgtacttcaggttgcccgtaacagctggtacgtccggcgtcagcagttccgacttgtctgtgataacgtcgtacgggaggcattcagtgacgcaaaacagcgctacggtacgccacgcctgacggatgagcttcgtgctcagggacgggtgtataacataaaaaccgtagcggccagcctgcgccggcaggtgctgcgggcgaaagcttcacggaagatcagtccagtcagttaccgcgaacatggtctgccagtccagagaatctgctga

SEQ ID NO: 371199 - DNA, 159 bp, Salmonella enterica
atggctctcaccgatatcaaagttaggactaccaagccctccgacaaacctttcaaactcacagatgggcagggtatgcacctgctgatcaaccccaatggttcaaaatactggcgactccaatactgtttcgtgggtaaactgatcctacccgcgtaa

SEQ ID NO: 371200 - DNA, 309 bp, Salmonella enterica
atgcaatacatggtttatcgcaataaaggaaacagcaaggcttatccttatttacttgatgtgcaaagcgatattattgatgaactgcatactcgcatggttatcccattgtttcctgtgagcagattggtaaataacccagttaagcgcctcacgcccactctgaatgtggaaggtaatgactatctggtgatgactcacgaaatggcgagtatcaggctttcgcagattggtgatgaggtgatggacgttcgttcccacaggcaaaccatcaaaaatgctctcgattttatctttgacgggttctga

SEQ ID NO: 371201 - DNA, 240 bp, Salmonella enterica
atgccgggtatgagtgtacgacataaaaaaacagtcagtgtcacgctggaacctgcattgcttcagcaagcccgtgatgcaggtattaatctgtcagcggtgcttaccgccgcgctgaaagaggaaatcagtgccacaggcgttgaacgctggaaagcagaaaatagagcgggtttgcaggagctcaatcgtattactgatgagcacggccttttatcggacgattacaggacgttttaa

SEQ ID NO: 371202 - DNA, 249 bp, Salmonella enterica
atggcttcttccgctaaacagaccatcagcgcccagattccagttgagttggctgctgctgttgaaaatctggcaattgagttagatcgttctaagagctggattattaaggaagcattgaccagtatgctggccgaaagagaacggcgtcatcagagcatccaggccggtcttgccgatgtggatgctggtcgtgtagtgagtcattcggatatggtagattttgacaaccgtttaaaggaaacctga

SEQ ID NO: 371203 - DNA, 501 bp, Salmonella enterica
atgctgatgctgcaccggggcgattgcgtcagcgacgttgccagaacgctctgctgtgcccgttcctccgtcggtcgctggattaactggttcacgttgtcgggtattgaaggtctgaaatcattatctgccgggcgtacccgtcgctggccgtttgagcatatctgcacgctgttacgtgagctggtaaaacactctcccggtgattttggctaccagcgttcccgctggagtacagaacttctggcaataaaaatcaatgagataaccggttgccagttacatgccggaaccgttcgccgctggttgccgtctgcggggcttgtgtggcgaagggccgcgccaactctgcgtatccgtgacccgcataaagatgaaaagatatctattcgctattttcagaagggcagcgggcatatcacgtttaagcgtctggatctggtggagaagatgaatgatatcgtggctaaacactatccggggatgttgcctgtgaaataa

SEQ ID NO: 371204 - DNA, 1020 bp, Salmonella enterica
atgacgataataaaaagctacgccgccaaagaggcgggcggcgaactcgaactctatgaatatgacgcgggagaactccaaccggaagatgtcgaggtacgggtcgactactgcgggatctgccattccgatctgtcaatgatcgacaatgaatgggggttctctcaataccctctggttgccggacatgaggtcatcggtcgggtggccgcactcggtagcgcggcacaggataagggactaaaagtcggccagcgcgttggaatcggctggacggcgcgcagctgcggacactgcgatgcctgtatcagcggcaatcaaattaactgcctggaaggggcagtgcccactatcctcaatcgtggcggttttgccgagaagcttcgcgcgggctggcagtgggtaattcctcttccggagaatatggatatggcgtccgcaggcccgctgttatgtggcggcattacggtctttaaaccgctactgatgcaccatattactgctaccagccgcgttggcgtcatcggtattggcgggcttgggcatatcgccataaagctgttacatgcaatgggctgcgaagtcaccgcgttcagctccaatccatcgaaagagcaggaagtgctggcgatgggtgccaataacgtggtgaacagccgcgatccggaagcgttaaaagcactggcgggccagttcgatctcattattaacacggtcaacgtcgatctcgactggcagccctacttcgaagcgctgacgtatggcggcaacttccataccgttggggccgtattgaagccgctgcccgtaccggcgtttacattaattgccggcgatcgcagtatctcaggctcggcaaccggaacgccatatgaacttcgcaaactgatgaaattcgccggacgcagcaaagtcgcgcccaccacggaactgttcgcgatgtcacaaatcaacgaggctatccagcacgttcgcgacggcaaagcccgctatcgtgtagtgctaaaagctgacttctga

SEQ ID NO: 371205 - DNA, 531 bp, Salmonella enterica
atggccggggaaagctatattttaatgggtgtttcaggtagtggtaagtctttaataggcagcaaaattgcaacattattttctgcgaagtttattgacggcgatgatctccatccggcgaaaaacattgataaaatgtctcagggaataccgttaactgatgaagaccgcttaccctggctggaacgattaaatgacgcttcatacagtctttataaaaaaaatgagacgggatttattgtctgctcgtcattaaaaaaacagtaccgcgatattttacgtaagagcagccctaacgtacatttcctgtggctggatggcgattacgctaccattctgcagcgaatgcagcgtcgtgccgggcattttatgccgccagacctgctgcaaagtcagtttgacgcgctggagcgaccgtgtgccgatgaacatgatattgcgcgtatcgatgttaatcatgacatcgagcacgtgacggagcagtgccgacaggctgtacaggcttttcgtcaggcactcagcgcttcctga

SEQ ID NO: 371206 - DNA, 1032 bp, Salmonella enterica
atggaagtaaaaactcaatcctgcgttgttgcgggtaagcgtgctgttgccgttacggaacaaaatattgaatggaataataaaggaacactcgtacaaattacccgtggcggcatttgtgggtctgacttacattattatcaggaaggcaaagtcggcaattttacagtaaaagcgccaatgattttaggtcatgaagtgattggcaaaatcgttcatagcgactcagatttattacgtgaaggacaaccggtagcgattaatccatcgaagccttgtggtcattgcaaatactgtctgcagcatgaagaaaaccactgtactgaaatgcgtttctttggcagcgccatgtattttccgcatgtcgatggcggttttacccgatttaaagctgtcgataccgctcagtgcattccctggccggaacaggcggacgaaaaagccatggcctttgccgaaccgctggcggttgccattcatgcggctcatgaggcgggcgatctgcagggcaaacgcgtctttatctccggcgttggccctatcggctgcctgattgttagcgcggtaaaaacgctgggcgcggcggaagtggtatgtgccgatatcagcgcccgttctctctcgctggcccggcagatgggcgcggatacgctggtgaacccacagcatgattctcttgatggctggaaagcagaaaaagggtatttcgatatcagttttgaagtctctgggcatccttcctctatctcaacgtgtctggaagtcacacgggccaaaggcgtgatggtgcaggttggcatgggcggcgcagtccccaacttcccgatgatgatggtaataagcaaagagatctccctgaaaggctctttccgttttactaccgaatttaatactgcggtttcctggcttgccaaccgcgttatcaatccgctgccgttactgagcgcggaatatccatttaccgacctggaagcggcgctgatctttgccggagacaaaacacaggcggcaaaagttcagctcattttctga

SEQ ID NO: 371207 - DNA, 765 bp, Salmonella enterica
atgaacgatcttttttcactggcaggtaaaaatatccttatcaccggagccgctcagggaattggttatttgctggcaaccggtcttggtcgctatggcgcgcgcattattgttaacgatattactccggagcgcgccgaaacagccgtgacgaaacttcagcaggaagggataaaggctattgccgctccctttaatgtcacccataaacaggatattgaagctgcgattgaacatatcgaaaaagatatcggcgtcattgacgtcctgataaataacgccggtatccagcgccgtcatccgtttactgagtttcccgagcaggagtggaatgatgtcatcgccgtaaatcagaccgcggtttttctcgtctctcaggccgttacgcgccgtatggtggcgcgtaaggcaggaaaagtgatcaatatctgttcgatgcaaagcgagctgggccgcgacacgattacgccatatgccgcgtcgaagggtgccgtgaagatgctgactcgcggcatgtgcgtggagctggcgcgtcataatatccaggtcaacggtattgcgccgggatacttcaaaacggagatgaccaaagcgctggttgaagatgaagccttcacctcctggctatgcaaacgtacgcctgccgcacgctggggcgatccccaggagcttattggcgcagcggtgtttctctcgtcaaaagcctccgactttgttaacggacatctgctgtttgtcgatggcggtatgctggttgccgtctga

SEQ ID NO: 371208 - DNA, 1320 bp, Salmonella enterica
atgccattaataattattgcggcaggcgttgcgctgctgttggtcttaatgattggctttaaagttaacggctttatcgcccttgttctggttgccgccgtggtgggatttgccgaagggatgggcgcgcaagacgtcctgcactccatacaaaacggaattggcggtactctgggcggactcgccatgatcctcggttttggcgcgatgctgggaagattaatttccgataccggcgccgcgcagcgcattgcgacgacgctcattaatacgttcggcaaaaaacgcgtgcaatgggcgctggtgatcaccgggcttatcgtcggcctggcaatgttttttgaagtcggattcgtactgctgttgccgctcgtttttacgattgtggcctcatcgggactgcccttgctgtatgtcggggttccaatggtcgccgccttatccgttacgcactgcttcctgccgccgcatcccggccctaccgctattgcgacaatttttgaggcaaatctcggtacgaccctgctgtatgggttaatcattaccataccgaccgtgattgttgccggcccgctgttttcaaaattgctggcgcgctttgagaaagcgccgcctgaaggattatttaatcctcatctattcagtgaagaagagatgccgtcattctggaacagtatttttgccgccgtgatcccggtcattctgatggccatcgcagcggtatgtgaaatcacgctgccaaaaacgaatgccgtgcgggttttcttcgaatttatcggtaatccagcagtggcgttgtttattgccattatcatcgccatttttacgctgggccgacgcaacggacgtacggttgagcaggtgatggatatcgtcggcgagtccattggcgctattgcgatgattgtttttatcatcgcgggcggcggcgcgtttaaacaagtgctggtggatagcggcgtgggccaatatatctcgcaattaatgaccggcacctcgctatctccgttattaatgtgctggacggtagccgccgtgctgcgtattgcgttaggttccgcgaccgtggccgcgataaccacagcgggcgtcgtattgccgattattaacgtaacccacgccgatccggcgttaatggtactggcgacaggcgcgggaagcgttattgcatcacatgttaacgatcccggtttttggctgtttaaagggtattttaatcttagcgtcggggaaaccctacgtacctggaccgttatggaaacattgatttctgtcatggggttactgggcgtactggcgctgaatgcggttctgcattaa

SEQ ID NO: 371209 - DNA, 999 bp, Salmonella enterica
atgaggaatcacagaatttctttgcaggatatcgctacgcttgctggcgtgacaaaaatgacggtgagccgttacatccgctcgccgaaaaaagtcgccagggaaaccggcgagcgtattgcgcagatcatggaggaaattaactacataccaaatcgcgcgccagctatgctgttaaacgcgcaaagttacactctgggcgtgctgatcccctctttccagaaccagttgtttgccgacattcttgccgggattgaatccgtaacgtcgggtcataactaccaaactctcattgcgaattacaattacaatcgcgattcggaagaagagtccgttatcaatttactgtcttacaatatcgacggcattattctttcagaaaaatatcataccctcagaaccgtcaaattcctgcgctcagctacccttccgattgtagaactcatggacatccagggtgatcgcttagatatggaggtggggtttgataaccgtcaggccgcctttgatatggtcagcaccatgctggataaacgccagcggcgaaaaatcctctatctgggttcaaaagacgatatccgagatgagcagcgttatcacggctactgcgatgcgatgacgcgccgggggctggcgccgttgcgcatcaatccccgcgctatctcctctatccatctggggatacagctaatgcgtgatgcgcttactgcgcacccggacgtggatggcgtcttttgtactaacgacgatatcgcaatgggcgctctactgtggtgccgcgagcgtcaactggccgtaccggagcagatctccatcgccggcttccacggtctggagatgggcaggcaaatgataccgagcctcgccagcgtaattacccctcgttttgagatcgggcgcagagccgcgcagatgttgctcaacaaaattaaaaataacgatctcaaccataatacgattgatttgggttatcagatttatcacggcaacacattataa

SEQ ID NO: 371210 - DNA, 1083 bp, Salmonella enterica
atgcagccatttggtgtacttgaccgctatatcggtaaaaccatttttaccaccatcatgatgacgttgttcatgctggtgtcgctctccgggatcatcaagtttgtcgatcagctgaaaaaagcggggcagggtaactacgacgcgctgggcgcgggtatgtacaccctgctcagcgtacctaaggatatccagatcttctttcctatggcggcgctgcttggcgcgctgctgggactggggatgctggcgcagcgtagcgaactggtggtgatgcaggcatcgggtttcacccgtatgcaggtggcgctgtcggtgatgaaaacggctatccccctggtgctgttaaccatggcgatcggcgaatgggtcgccccgcagggcgagcagatggcgcgtaactatcgtgcgcaggcgatgtatggcggctcgctgctttccacccagcaaggtctgtgggcgaaagacgggaataactttgtctatattgaacgggtgaagggcgacgaggagctggccggcattagcatttacgctttcaacgatcagcgtcgtttgcagtcggtgcgttacgccgcttcggcaaaattcgacccggagcataaggtctggcgtttgtcgcaggtggatgagtccgatctgcaaaacccgaaacagatcaccggttcgcagacggtgagcggcacctggaaaacgaatctgacgccggataagttaggcgtggtggcgctggacccggatgcgctttccatcagcggtctgcataactacgttaaatatctgaagtcgagcggacaggacgccggacgttatcagctcaatatgtggagtaaaatcttccagccgctctccgtggcggtgatgatgctgatggcgctgtcgtttatctttggaccgctgcgtagtgtgccgatgggcgtgcgcgtggtgacggggattagcttcggcttcgtcttctacgtcctcgaccagatttttggcccgctgacgctggtatatggcattccgccgattgtcggcgcgctgctgccgagcgcgtctttcttcctgattagcctgtggctaatgctgcgtaagtcgtaa

SEQ ID NO: 371211 - DNA, 1101 bp, Salmonella enterica
gtgataatcataagatatctggtgcgggagacgctcaaaagccagctggcgatactcttcatcttacttttgatcttcttttgtcaaaagttagtgaggattctcggcgcggcggttgacggcgatattcccgcaaatctggtgctctcgcttctggggctgggcgtaccggaaatggcgcagctcatcctgcctttaagcctgttcctggggctgctgatgacgctgggcaaactgtataccgaaagtgaaattacggtcatgcacgcctgtgggttgagcaaagccgtgctggtaaaggccgccatggtactggcgttatttaccggtatccttgcggcggttaacgtgatgtgggccggcccctggtcgtcaaaacaccaggatgaagtactggcagaggcgaaagcgaaccccggtatggcggcgttggcgcagggacaattccagcaggcgaccaacggcagctcggtgctgttcatcgaaagcgttgacggcagcgacttccacgatgttttcctggcgcaaattcgccctaagggcaatgctcgtccttctgtggtcgtggccgattccggacaccttactcagttgcgcgatggttcccaggttgtcaccttaaacaaagggacgcgttttgaaggaacggcgttgctacgcgattttcgcatcaccgacttccagaactatcaggcaattattggccatcaggccgtggcgctggacccgaacgataccgaccagatggacatgcgcacgttgtggaataccgacaacgatcgcgctcgcgccgagctgcactggcgtatcacgttagtctttaccgtatttatgatggcgctgatggtcgtgccgctcagcgtggtgaatccacgtcaggggcgtgtcttgtctatgttgcccgccatgctgctttatctgctgttcttcctgatccagacctccattaaatcgaatggcggtaaaggcaaactggacccggttatctggatgtgggcggtcaacctgatctatctggcgttggcgattggtttgaacctgtgggatacggtgccggtccgccgcctgcgtgcccgttttctgcgtaaaggagcggtataa

SEQ ID NO: 371212 - DNA, 1512 bp, Salmonella enterica
atggagttcagtgtaaaaagcggtagcccggagaaacagcggagtgcctgcattgtcgtgggcgtctttgaaccgcgtcgcctttctccgattgcagaacagctcgacaaaattagcgacggatacatcagcgcattgctgcgtcgcggcgaactggaaggaaaaccggggcagactctgttgctgcaccatgttcctaacgttctttccgagcgaatcctcctcattggttgcggcaaagagcgcgagcttgatgaacgtcagtataagcaggttattcagaaaacgataaatactctgaatgatactggttcgatggaagccgtctgtttcctgaccgaactgcacgttaaaggccgcaacaactactggaaagtgcgtcaggccgtcgaaacggccaaagagacgctttatagctttgatcaactcaagaccaacaagagcgagccgcgccgcccgctacgtaagatggtctttaatgtgccgacccgccgtgagctcaccagcggcgaacgcgccattcagcacggtctggccatcgccgccgggattaaggctgcgaaagatctcggcaacatgccgcccaatatctgtaacgccgcctacctggcgtcacaggcgcgccagttggccgacagctacagcaaaaatgtcatcacccgcgtgatcggcgaacagcaaatgcgcgaactgggtatgaacgcttatctggcggtcggccacggttcgcagaatgaatcgctgatgtcggtgattgagtacaagggcaatccgtccgaagacgcgcgtccgatcgtgctggtgggtaagggcctgaccttcgactccggcggcatctccatcaagccatctgaagggatggacgagatgaagtacgacatgtgcggcgcggcggcggtttacggcgtgatgcgtatggtcgccgagcttcagctaccgattaacgttatcggcgtactggcgggctgtgaaaacatgccgggcggacgcgcgtatcgtccgggcgacgtactgaccaccatgtccggtcagacggttgaagtgctgaataccgatgctgaaggccgtctggtactgtgcgacgtgctgacctacgttgagcgcttcgaaccggaagccgtcattgacgtcgcgacgctaaccggcgcctgcgtgattgcgctgggccatcacattaccggtctgatgtcgaaccataacccgctggcgcatgaactgatcggcgcgtccgagcaagcgggcgaccgcgcgtggcgtctgccgctgggcgatgagttccaggaacaactggagtccaactttgcggatatggcgaacattggtggtcgtcctggcggcgctatcaccgcgggctgcttcctgtcgcgctttacccgtaagtacaactgggcgcacctggatatcgccggtaccgcctggcgttccggcaaagcgaaaggcgcgacgggtcgtccggtagcgctgctgtcgcagttcctgctcaatcgtgcgggctttaacggcgaagagtaa

SEQ ID NO: 371213 - DNA, 483 bp, Salmonella enterica
atgacaacgcatttaaatccaccacaagaagccccatatatgaaaaatgcgacgttctatcttctggataatgacaccaccgtcaacggtttaagcgccgttgaacaactggtgtgtgaaattgccgcagaacgttggcgcgcgggcaagcgcgtgctgatcgcctgcgaagatgagaagcaggccattcggctggatgaagcgctgtgggcaagaccggcggaaagttttgtcccgcacaatctggcaggcgaaggcccacgcggcggcgcgccggttgaaatcgcctggccgcaaaaacgcaacagcagcccgcgcgatattttaatcagcctgcgtacaagctttgcagattttgccaccgctttcacagaagtggtagacttcgtcccttacgaagaaactttgaaacaactggcgcgcgaacgctacaaagcctaccgcgtggctggttttaacctgaatacggcaacctggaaataa

SEQ ID NO: 371214 - DNA, 2856 bp, Salmonella enterica
atggaaaagacatataacccccaagatatcgaacagccgctttacgagcactgggaaaagcagggctatttcaagcctaacggcgacgaaagcaaagagtccttctgcatcatgatcccgccgccgaacgtcaccggcagtttgcatatgggacatgctttccagcaaaccatcatggataccatgatccgttaccagcgtatgcagggtaaaaacaccctgtggcaggtcggcaccgatcacgccgggatcgccacccagatggtggttgagcgtaagattgccgctgaagaaggtaaaacccgtcacgactacggccgcgatgcgtttatcgacaaaatctggcaatggaaagcggaatccggcggcaccattacccgtcagatgcgccgtctcggcaactccgttgactgggagcgcgagcgcttcaccatggacgaaggtctttccaatgccgtgaaagaagtctttgtccgcctgtacaaagaagacctgatttaccgcggcaaacgcctggtgaactgggacccgaagctgcgcaccgccatctctgacctggaagtggaaaatcgcgagtccaaaggctccatgtggcacatccgctatccgctggccgacggcgcgaaaaccgcagacggtaaagattacctggtcgtcgccaccacccgtccggaaaccgtactgggcgatactggcgtggccgtgaacccggaagatccgcgttataaagatctgattggcaaattcgttattctgccgctggttaaccgccgcattccaatcgttggcgacgaacatgccgatatggaaaaaggcactggctgcgtgaagatcaccccggcgcacgactttaacgactatgaggtcgggaaacgtcatgccctgccgatgatcaacatcctgacctttgacggcgacatccgcgaaagcgcggaagtgttcgataccaaaggtgaagagtctgacgtttattccagcgagattccggctgagttccagaagctggaacgctttgctgcccgtaaagcagtcgttgctgccgttgacgcgctgggcctgctggaagaaattaaaccgcacgatctgactgtcccttacggcgaccgtggcggcgtggttatcgaaccgatgctgaccgaccagtggtacgtccgtgcagacgtgctggcgaaaccggcggtggaagcggttgaaaacggcgacattcagttcgtgccgaagcagtacgaaaacatgtacttctcctggatgcgcgatattcaggactggtgtatctctcgtcagctgtggtggggtcaccgtatcccggcatggtatgacaacgacggcaacgtctacgttggccgtaccgaagacgaagtgcgtcaggaaaataacctcggcgccgacattcagcttcgtcaggacgaagacgttctcgatacctggttctcctccgcgctgtggactttctctaccctcggctggccggaaaacaccgacgccctgcgtcagttccacccgaccagcgtgatggtttccggcttcgacatcatcttcttctggattgcccgcatgatcatgatgaccatgcacttcatcaaagatgaaaacggcaagccgcaggtgccgttccataccgtctacatgaccggtctgattcgcgacgacgaaggccagaagatgtccaaatccaagggtaacgttatcgacccgctggatatggtcgacggcatctccctgccggaactgctggaaaaacgcaccggcaatatgatgcagccgcagatggcggagaaaattcgcaagcgtaccgagaagcagttcccgaacggcattgagccgcacggcaccgacgccctgcgctttaccctggcggcgctggcttctaccggtcgcgacatcaactgggatatgaagcgtctggaaggttaccgtaacttctgtaacaagctgtggaacgccagccgctttgtgctgatgaacaccgaagagcaggattgcggcttcaacggcggcgaaatgacgctgtcgctggcggaccgctggatcctggcggaattcaaccagaccgttaaagcctaccgcgaagcactggataacttccgcttcgacatcgccgcgggcattctgtatgaattcacctggaaccagttctgcgactggtatctggagctgaccaagccggtaatgaccgggggttccgagtctgaactgcgcggcacccgccatacgctggtcaccgtactggaaggtctgctgcgcctggcgcacccgatcatcccgttcatcaccgaaaccatctggcagcgcgtgaaggtcatttgcggtattaccgccgacaccatcatgctgcagccgttcccggaatataacgccgcacaggtggatgaagccgcgttggccgataccgagtggctgaagcaggcgatcgtcgcagtacgtaacattcgtgcggaaatgaacatcgccccgggcaaaccgctggaactgctgctgcgcggctgtagtgaagaagccgttcgtcgtgttaacgacaaccgtagcttcctgcaaaccctggcgcgtctggaaagcatcaccgtgctgccagccgatgacaaaggcccggtttccgtgaccaaaatcatcgacggcgccgaactgctgatcccgatggcaggcctcatcaacaaagacgatgagctggcgcgtctggcgaaagaagtggcgaaaatcgaaggcgagattgcccgtatcgaaggcaaactgtccaacgaaggtttcgtcgcccgtgcgccggaagcggtgattgccaaagagcgtgagaagctggaaggttatgcagaagccaaagcgaagctgattgagcagcaggcagttattagcgcgctgtaa

SEQ ID NO: 371215 - DNA, 1188 bp, Salmonella enterica
atgaataacgttatcagtagtaaagataaccataatcacacgttggtgtttacaggcaagggcggaaagtattttgttatttgccttgtgaatttcttgttgacgtgtatcacgttgggaatctatgcgccgtgggcgatggtgaaatgtcgacgttatatttatactaatatgacgctaaacaatcagccttttgcttacaaagccacgggcggcgcattatttattagtgtgttgttagtttttattatttatattgttagcctctctcttattgaacacggtcatcccggtctcggttttacgctattcggcttattaattgcgattattccttttatggcggtgaaaggattacagtatcaggcgatgatgacttcgcttaatggcgtacattttggattccagtgttccatgcggcgcgcctggtggtacatgttcgctcttcctgtactcctgatggtggcgctttatattgttctttatattatctcactggtaaccatcgccgtcggcggtttagtgttcagtatcgtttttctcggtttgctggctattattgggataggggtcattaacggtattacctacagcaaatggatgaccttgtttggtaatggcgcaaactttggcattcatcgtttctcgattcaggttaatgttaaaacgtgcatcagagggtgcgtgttggcaatgttgacccttttcccttttgctgtcgtgattggttatctaatcgcgccggtgttcaccgacatgattcttttgagtatgatggggaatgcgcaggcaggaggggcgcttattctgcaatattatggccagataatggcatgttatttcctctattttctcgcgattattgtggtaaccagttacttatatgtggcgttacgcaacctgtttttaaacaatttgtcactggcgaacgattcgattcgttttcattcctctgtcactgcacacggtatgctgtggcggttactggtggtgtttgtgatttccggcgtgaccttagggctggcttatccgtggttgaaaatttggctggtgagctggctggcgcagaatacacaggtccagggcgatctggattcgcttgagttaaccaatgatgagaagccgctggaaaacagcccgctaatgtggatttctcgtggcatcatgccttacttcccgtttatctga

SEQ ID NO: 371216 - DNA, 504 bp, Salmonella enterica
atgaataatgtcgcctcgccaacgctcacggtgcgccgaatcactaccgctgacaatgccgctattgcccgtgtcatccgtcaggtttcagcggaatacggacttaccgccgataaaggttataccgttgccgaccccaatctggatgaactgtatcaggtttatagccaaccgggcgcggcctactgggtggtagagcaaaacggttgtgtggtgggcggcggcggcgtggcgccgttatcctgtagcgaaccagacatttgtgaactgcaaaaaatgtattttttaccggtgattcgtggtcagggactagcgaaaaagctggcgctgatggcgctggatcatgcccgtgaacagggttttaaacgctgctatctggaaacaacggcttttttacgcgaggcgattgcgctatacgaacgtttaggatttgaacatattagcgaaccgctcggttgcaccggacatgtcgattgcgaagtgaggatgttaaaggatctctga

SEQ ID NO: 371217 - DNA, 195 bp, Salmonella enterica
atgaaacgcctattatcagcaattgttttccccgctatgtttattagtatctctaatgtatatgcattagatatacagcccggcgaatggaaaatggaaaatatagaaatgcgcaccatcaatccagatacaaaagaagtattaatggatgaaaaaaaattcgggcatagcgacgcttatgtgttatacccctaa

SEQ ID NO: 371218 - DNA, 342 bp, Salmonella enterica
atgaaaaaaaattcgggcatagcgacgcttatgtgttatacccctaaaatgtctgaagattctaaaaaaatggtgaagggtttttctaccagtgcaggcggttgcacgacaacatttgtagaaagtacggataccaaactgatcaatgagactgtctgtaataatcctgatgtcaaatcgcactctattgtagaaacgacgaaaataagcgatacagaatttgcgatgaccatgaaatcggatgtcgatgcaggaggtaataaaacaacctccatcaacaaaattaaacaaacctttgttggcaagacctgctctgaagcgtcaaaaggcgtgaaacagtaa

SEQ ID NO: 371219 - DNA, 765 bp, Salmonella enterica
atgaattacccgcaaatactctctccggtgcttaatttcctgcattgcccgacgccgcaggcgtggattgtccaggcccgcgatccgcaaaatcttcctcttctgcttaccgatcacctgatctgcgaactgaaggctgcgcaaaccgcgttgctgttggtgcgtaaatatgtcgccgataaatcgggcgccgacgcgctgctctcctggctgcaaccttacgaggcgttcgcgtttcgtcaggggccggagccggattttgttgccctgcataaacagattagcaaaagcgccatgccgcaaactgatgacccctggggacgtcagcttatcgaccgtatggtgttattgattaaagaggagttgcaccatttttggcaggtacgcgaggtcatgcaggccagaaacattccttatgtgaaaatcaccgccagccgctacgcgaaaggaatgttgaaagcggtacgcacgcacgaaccgctcaccttaattgataagctgatttgcggggcgtatatcgaagcccgctcctgcgaacgttttgccgctctggcgccctggctggatgaggatttacagacgttttatctctcgcttctgcgctccgaagcgcggcattatcaggattacctggcgctggcgcagcagatttccgccgaggacatttctgcgcgcgtgcgctattttggcgaggtggaagctgaccttatcttgtcgccagaccgcgagtttcgttttcatagcggcgtgccagccgccggataa

SEQ ID NO: 371220 - DNA, 417 bp, Salmonella enterica
atggcaaacccggaattactggaagagcagcgtgaagaaacgcgcttaattattgaagagttacttgaggacggcagcgatccggatgcgctgtacactatcgagcatcacctttccgctgacgatttcgaaacgttggaaaaagccgcggtagaagcctttaaactcggctatgaagtgacggagccggaagagctggaagtggaagagggcgatacggttatttgttgcgacatcctcagcgagtgcgcgttgaacgccgaactcatcgacgctcaggttgagcaactgatgaacctggcggaaaaatatgatgtcgaatacgacggctggggaacctattttgaagaccctaatggcgaagagggtgatgacgacgattatgtcgatgaagatgacgacggcgtgcgtcactaa

SEQ ID NO: 371221 - DNA, 1005 bp, Salmonella enterica
atgtctacgttttaccaaaaaccttttttaaagttacttgatttcaccgccagcgagctcactgctctgttgcagcttgccgccaaactgaaagccgataagaaaaacggtaaagaagaacaaaagctggtgggtaagaatattgcgctcatcttcgaaaaagactcgacccggacacgatgctctttcgaagttgccgcatacgatcagggggcgcgcgtgacgtacctgggttccagcgggagccagatcggccataaagagtccatcaaagatactgcccgcgtcctgggccggatgtttgacggtattcagtatcgaggatatggccaggagatcgtcgaaacgctggctgaatattccggtgtgccggtatggaacggtttaaccgatgagtatcacccaacgcaattactggcggatctgctcaccatgcaggaacatctgccgggtaaagcctttaacgagatgacgttggtctatgccggagacgcgcgtaataacatgggtaactccatgctggaagccgccgcgttaacaggattggatctccgtctggtcgcgccaaaagcctgctggccgcaagccgcgttagtggcggagtgcagcgccatggcgaaaaagaacggcggcgccatcaccctgaccgaagatatcgcctcaggcgtaaaaggcgcggattttatctataccgatgtttgggtctctatgggcgaacccaaagagaaatgggcggagcgtattgccctgctgcgtgattatcaggtcaacagccagatgatggcgttaaccggcaatccgcaggttaagttcctgcattgtctgcctgcgttccatgatgacgaaaccacgctcggcaaaaaaatggccgaagagtacggtttacatggcgggatggaggtgaccgacgaggtttttgagtctgcggccagcattgtctttgatgaagcggaaaaccgcatgcataccatcaaagcagtaatggtagcgacgctgtctaaataa

SEQ ID NO: 371222 - DNA, 453 bp, Salmonella enterica
atgattattggcaatattgaatatctggaggcctggctgccgacggcgttacggcaggcgattgagcacgtcaatgcgcatgtcacggcaacgaccgcgccaggtaagtatgacattgacggcgacaggctgttttatatgatttctgaaaatatgacggagccgggcgaatcgcgcagcgcagagtatcacgcccgttatcttgatattcagattgtgctacaaggtcaggaagggatggcattcagtacccggcctgcgggaacgccgcacacggactggctggcggataaagacattgcatttttaccgacgagcgtcgacgagaaaaccgtcgtcctgaacgaaggcgactttgtggtgttttatcccggcgaagtgcataagcccctgtgcgcggtgggagaaccggcgcgggtacgtaaagcggttgtgaaaatgctgatggcgtaa

SEQ ID NO: 371223 - DNA, 1221 bp, Salmonella enterica
atggaaaagcattttgtcggttctgaaatcggtcaattacgcagcgtaatgttgcatcggcccaatctcagcctaaaaagacttaccccttcaaattgtcaggaattactttttgacgatgtattatccgtagagcgcgctggcgaagagcatgacatttttgccaacacgctgcgccagcaagggatagaagtgttgctgttaaccgacctgctcacccaaacgctggatgtggctgacgctaaagcctggctactggatacgcaaatttccgattatcgccttgggcccacctttgccgcagatattcgcgcctggctggcggatatgccgcaccgtgaactggctcgccatttaagcggcggtttaacttacggcgaaattcccgcctccataaaaaatatggtggtcgatactcacgatattaatgactttattatgaagccattaccgaatcacctatttacccgtgacacgtcctgctggatatataacggcgtctcaattaaccccatggcgaaacctgcacgccaacgtgaaacgaataatttacgtgctatttatcgctggcatcctcaattcgcaggcggtgatttcattaaatatttcggcgacgaggacattaattacgaccacgccactttagagggcggcgatgtgctggtgattggccgcggcgcggtgttgatcggtatgtctgaacgtactacgccgcagggcgtcgagttcctggcgcaggcattgtttaaacatcgtcaggcggaacgcgtcattgccgttgaactgccaaaacatcgctcctgcatgcaccttgacaccgtcatgacccacattgatatcgacaccttctccgtctatccggaagtcgttcgcccggacgttcagtgctggacgctgacgccagacggacgcggcggtctgaaacgaacccaggagagcacgctggttcatgctcttgaaaaagcgcttggcatcgatcaggtgcgcttaatcaccactggcggcgacgcatttgaagctgagcgcgaacagtggaatgacgccaataacgtgctcaccctgcgtcccggcgtggtggtgggctatgagcgcaacatctggaccaacgaaaaatacgacaaagccggcattaccgtccttcccattcccggcgatgaactgggtcgcgggcgcgggggcgcacgctgcatgagctgtccactggaacgcgatggtatttaa

SEQ ID NO: 371224 - DNA, 933 bp, Salmonella enterica
atggaaaacaaacgcacactggtcgtcgcgctgggcggcaatgcgctgctcaaacgcggcgaaccgctggaggctgatattcagcgtaaaaatatcgaactggcggccagaaccatcgcccagcttacgcggcaatggcgcgtggtgttagtgcacggcaacggcccacaggtaggactgctggcgctacaaaatagcgcctacgctaacgttacgccctacccgctcgatattctcggtgcggaaagccagggcatgattggctacatgctgcaacaggcgctgaagaatcatctgccggagcgtgaaatcagcgtcctgctcacccaggtcgaagtcgatgccaacgacccggcattcctcaatccaaccaaatatatcggccccatttacgacgaagcgcaggcccgtgcgttacaggcagaaaagggctgggtattcaaagccgacggtaacgccttccgccgcgttgtgccctccccgcagccgaaacgcattgtggaaaacgatgccatccgcgcactgattagccgcgatcacctggttatctgtaacggcggcggcggcgtgccggtagtggaaaaagccgatggctaccacggtatcgaggcggtgatcgacaaagatctgtccgccgccctgcttgccagccaaattcacgccgacgcgctgctcattctgaccgatgccgacgcggtgtatctcgactggggcaaacccacccaacgcccgctggcgcaggttacgccggagctgcttcgtgaaatgcagttcgacgccggttcgatgggcccgaaagtgaccgcctgcgctgagtttgtcagccattgccgcggcattgccggaatcggctcgctggcggatgggcaagccattctcgcgggcgagaaaggtactttgattcggtgtgaaaccgccgacgttgacgcataa

SEQ ID NO: 371225 - DNA, 1005 bp, Salmonella enterica
atggttatttcactgaaaaatcgtaactttttgaagctgcttgactacaccccggcggaaatccaacacctcatcgatctggctattgagctgaaagccgcaaaaaaagccggatgcgaaaagcaaacactgatcggcaaaaacatcgcgctgatttttgaaaaaacctctacccgcacccgatgcgcgtttgaagtcgccgcgttcgaccagggcgcgcaggtgacttatctcggcccaagcggctcgcagatcggccataaagagtccatgaaagatactgctcgcgtcctagggcggatgtatgacggcatcgaatatcgcggatttggtcaacacattgtggaagagctgggggaatacgcgggcgttcccgtctggaacggcctgaccgatgaatttcaccccacacagatcctggccgatctgatgaccatgctggaacatgcgccgggcaaaacgctgccggaactgagcttcgcctacctgggcgacgcgcgcaacaacatgggcaactcgctgatggtgggcgcggcgaagatgggcatggatatccgcctgatagcgccaaagtccttctggcctgatgccgcgctggtcgcgcagtgccgggaaatcgccagcgttaccggcgctcgtatcaccttaacggagagcgttgaagacggcgttcacggtgtggatttcctctataccgacgtctgggtctcgatgggagaacccaaagaagcctgggcggagcgcgtcagtctgatgacgccatatcaggtcaaccagcaggtggtaaacgctaccggtaatcctgatgtgaagtttatgcactgcctgcccgccttccataacgagcacaccaaagtgggacgcgaaatcgaaatggcttacggcctgaaaggactggaggtcacggaagaggtgttcgagtccgcaggctcgatagtcttcgatgaagcggaaaaccggatgcacaccatcaaagcagtcatggtggcgacgctcggcgactaa

SEQ ID NO: 371226 - DNA, 1404 bp, Salmonella enterica
atgggtaaatttaaatttcccaccgcttataccatcctgtttattcttattgccctggtcgcggtgatgacctggattgtgccggcgggaaaataccaaatggcgatgaacgccacgctgggaaaagaggtgccggtggcgggaacgtatgcccccgtggacgcgcatccgcaagggattaccgctgttttactggcgccgattgacggcctctataaccacgaaacctacaccgccggcgccattgacgtcgcgctgtttgtcttgattatcggcggctttctgggggtggtgaataaaacgggggcgattgatgccggtattgaacgggtaactatcaaactcaacggcaaagatgagtggatgatccccattctgatggcgctgttcgccgcaggcggcactatttatggcatggcggaggagtcgttgcccttctacacgctgctggtaccggtcatgatggcggcccgcttcgatccgttagtggcggcggcaaccgtactgctcggcgcagggataggcacgctcggttcgaccattaaccctttcgccacggtcattgccgccaacgccgccggcatcccttttactcagggaatgctgatgcgcgtactgctgttaattgtcggctacgtactgtgcgtgttttgggtaatgcgctatgcgcgcaaagtccgcgcccatcctgagctttctatcgtggcggataaaatggaggaaaatcgcgctcattttctcggcaatcgcgccaatacactgctggagtttacggctacccggaaatgggtgctgctgatcttcgccgcctctttcgcggtgatgatttacggcgtggcggttctcggctggtggatggcggaaatctccggcgtctttctggcggcggcgattatcgttggcgtgataacgcggatgggtgaggaagcgtttaccagtacctttatcgacggcgcgcgggatttgctcggcgtggcgctaattattggtatcgcgcgcggcattgtggtggtcatggataacggtatgattacccacaccattttgcacagcgcggaaagtctggtttccggcctctctaccactattttcataaacgtaacctactggctggaagtattgctctccttcctggtgccctcctcttccggtcttgccgtattgacgatgcccattatggcgccgttagcggattttgcccacgtacagcgggatttggtcgtaaccgcctaccagtcggcctccgggattgtgaacctggttactcccacctccgccgtggtcatgggcggtctggcaatcgcgcgggttccctatgtccgctatctgaaatgggtcgcgccgctgttgctgatcctgacattgctgaatatggcggtactgagcatcggagcgatgatgtaa

SEQ ID NO: 371227 - DNA, 489 bp, Salmonella enterica
atgaaggaatacgatgattactccgccaaagaacaacagcaactggcggtttgtcagcgcctgattagtgaaaaaagttacctgtcccaggaggagattcgccgcgatttacaaaatgagggatttgaaggtatcagccagtctacggtttcgcgcctgctcaagctgctgggcgcaataaaaatcagaaatacgaagggacaaaagatttattccgtaaatccccagcggcgtccttcgccggatgccggacgttcaatagctgaaatggtcgtcagcgttgaacataatagcgaatttatccttatccatacggcggcaggttatggtcgcgccgtcgcgagaattctggattaccacgcattgccggaaattctcggcgtcgttgccggtagcagtattgtctgggtcgcaccacgggtcgttcagcgtacggcgctggtacacaaacaaattaattatttgcttaaaatgaatttaaattcataa

SEQ ID NO: 371228 - DNA, 936 bp, Salmonella enterica
atggctaacccgctatatcaaaaacatatcatttccataaacgacctcagccgcgacgatcttaatctggtactggccacggcggcgaaattaaaagccaacccgcagccggagcttttgaaacataaagtgatcgccagctgctttttcgaagcctccacgcgtacccgcctgtcgtttgaaacttcaatgcatcgcctgggcgccagcgtagtgggcttctccgacagcgccaacacgtcgctggggaaaaaaggagaaacgttagccgacacgatctcagtgattagcacttacgtggacgcgattgtgatgcgccatccgcaagaaggcgcggcacgtctggcgacggagttttccggtcaggtgccggtgctcaatgcgggcgacggttcgaatcagcatccgacgcaaaccctgttggatctgttcaccatccaggaaacgcagggccgtctggataacctgcatatcgcgatggtcggcgatctgaaatatggccgcaccgtgcattcgctaacccaggcgctggcgaaatttagcggcaaccgtttttattttatcgcgccggacgcgctggcgatgccgcagtacattctggatatgcttgatgaaaaagggatggcctggagcctgcatggttctattgaagaggtcatggccgacgtcgacatcctctatatgactcgcgtacagaaagagcgtctcgacccgtcggagtacgccaatgtgaaggcgcagtttgttctgcgcgccagcgacctgaacggcgcgcgtgaaaatatgaaagtgctgcacccgctgccgcggattgatgaaatcaccacggatgtggataaaacgccacacgcctggtacttccaacaggcgggcaacggtattttcgctcgccaggcgttactggcgttagtactgaatagcgaactgagtctgtaa

SEQ ID NO: 371229 - DNA, 462 bp, Salmonella enterica
atgacacacgataacaaactgcaggttgaagccattaaatgcggcaccgtgattgaccatatccctgcgcaggtaggctttaaactgctgagtctgtttaaattgaccgagaccgatcagcgaatcactatcggtctgaatctcccgtctggcgagatggggcgtaaagacttaatcaaaatagaaaacacctttctcaccgaagagcaggttaaccaacttgctctgtacgcgccgcaggccaccgttaaccgcatcgacaactacgacgtagtcgggaaatcacgccccagcctgccagagcgtattaataatgtgctggtttgcccgaacagcaactgcatcagccacgcggaaccagtatcctccagctttgcagtgaaaaaacgcgccaatgatatcgccctcaaatgcaaatactgtgaaaaagagttttcgcattatgtggtgctggccaactaa

SEQ ID NO: 371230 - DNA, 387 bp, Salmonella enterica
atgagcaaaactattgcgacggaaaatgcaccagcagcaatcggcccatacgtacagggcgttgacctgggtagcatggtaatcacttccggtcagattccggtcgatccgaaaaccggtgccgtagcggaagacgtatccgctcaggcacgtcagtcgctggaaaacgttaaagctatcgtggaagccgctggcctgaaagtaggcgacattgtgaaaacgaccgtattcgtgaaagacctgaacgatttcgcgaccgtcaatgccacctacgaagcgttcttcaccgagcacaacgcgaccttcccggcgcgttcctgcgtggaagttgcccgtctgccgaaagacgtgaaaattgagattgaagcgatcgctgttcgtcgctaa

SEQ ID NO: 371231 - DNA, 447 bp, Salmonella enterica
atggtaagagcgcgttttaccgaggaacaaatcgccgattttctgcaacagtctaaaaacggcgtaccgaataaggcgttatgcgaagaatatggatttagcaacagcacgctccgtcgctggcaggagaaacatgctgaaagcatacgccaggaattaaaacagatagaatctaccgcgaagatagtctttttatgcttcattgtcgcagccatattgcttacccttatgtttcctaaacccactgccgccttagcgattcctccttacttagtttattgcattagctatattcgccgctttcgtcgcatatccgcaaaacatatccggcggtgggacatctcctcctctcgttccggattgggggcagagaatgtattttacaaacttagctggacattcctcttttttatgcctgcatatagcattctacagttgcttgaataa

SEQ ID NO: 371232 - DNA, 2709 bp, Salmonella enterica
atgctaaaaaccattacccgccagctttttgcccggcttaatcgtcatttgccttatcgtctggttcaccgcgatccgctgcccggcgcgcagaccgcggtaaatgcgactatcccgccttcgctgagcgagcgctgtctgaaagtcgcggcaatggagcaggagactctctggcgcgtttttgatacgcacccggagggattaaacgctgccgaggtgacgcgcgcgcgtgaaaagcatggcgaaaaccgccttccggcacagaaaccctcgccgtggtgggtgcatctgtgggtatgttatcgcaatcctttcaacatcttactcacgattcttggcggcatttcttatgccacggaggatctgtttgccgcaggcgttatcgccctgatggtcggtatctcaacgctgctgaattttgtgcaggaagcgcgctcgacaaaagcggcggacgcgctaaaagcgatggtgagcaataccgctaccgtactgcgggttattaatgaaaatggcgaaaacgcctggctggaattacccatcgatcaactggtgcccggcgatattattaagctggcggcgggggatatgatcccggcggatttacggattatccaggcgcgcgatctgtttgtcgcccaggcgtcgctgaccggcgaatctctgccggtcgagaaagtcgccgcgacgcgtgagccccggcaaaataacccgcttgagtgcgacacgctgtgctttatggggacgaacgtcgtgagcggaacggcgcaggccgtggtgatggcgaccggcgccgacacctggtttggtcaattggcggggcgcgtgtcggaacaagataacgagcagaacgctttccagaaaggaattagccgcgtcagtatgttgctgatccgctttatgctggtcatggcgccggtagtactgattattaatggttacacgaaaggtgactggtgggaagcggcgctatttgcgctctcggtcgcggtagggctcaccccggaaatgttgccgatgatcgtcacctccaccctcgcgcgcggggcggtgaagctctcgaaacagaaagttatcgtgaagcaccttgatgcgattcagaacttcggcgcgatggatattctgtgcaccgataaaaccggcacactgacgcaggataaaattgtgctggagaatcatacggatatttctggtaagcccagcgagcatgtactgcattgcgcctggctgaacagccattatcagaccggtctaaaaaatttactggatacggcagtcctggagggagtagacgaaaccgccgcgcgtcagctctccggacgctggcagaaaatcgatgagattccgtttgattttgagcgtcgccggatgtcggtggtggtggccgaagattcgagcgtgcatcaactggtctgcaaaggcgcgttacaggagatcctgaacgtgtgtactcaggtgcgccacaacggcgatattgtgccgctggacgacaatatgctgcgccgggtgaaacgcgttaccgacacgctgaaccgtcaggggctacgcgtggtcgccgtcgcgaccaaatacctgcctgcgcgtgagggcgattaccaacgtatcgatgagtctgacctcattctggaagggtatatcgcttttctcgatccgccgaaagagaccaccgcgccggcgttgaaagcgctgaaggcgagcggaattacggtgaaaattctcaccggcgacagcgagctggtagcggcgaaagtttgccatgaagttgggctggatgcgggcgatgtcattattggcagtgatattgaagggttaagcgacgacgcgctggcggcgctggccgcccgtacgacgttgtttgcgcgtctgacgccgatgcataaagagcgcatcgtcactttactcaaacgcgaggggcatgtggtcggttttatgggcgacgggattaacgatgctccggcgttgcgggcggcggatattggtatctcggtagatggcgcggtggacatcgcccgtgaagcggccgatattatcctgctggaaaagagcctgatggtgctggaagaaggcgtcattgaaggtcgtcgtactttttctaatatgttgaaatatatcaagatgacggccagctcaaatttcggtaacgtgtttagcgtgctggtggcgagtgcctttttgccgttcctgccaatgctgccgctgcacttgctgattcaaaacctgctgtacgatgtatcccaggtggcgattccgtttgataatgtcgatgaagaacaaattcaaaagccgcagcgctggaatccggcggatttggggcgctttatggtctttttcggtccgatcagctcgattttcgacattttgaccttttgtctgatgtggtgggtatttcatgcgaatacgccagaaacgcaaactttgttccagtccggctggtttgtggtgggattactgtcgcaaacgctgattgtgcatatgatccgtacccgccgtctgccgtttattcaaagtcgcgctgcctggccgctgatggcgatgacattgttggtgatggtggtgggagtttcgttgccgttttcgccgctggcgtcttacctgcaattacaggcgctgccgttaagctatttcccgtggctgattgccattctggcgggctatatgacgttaacccagttggtgaaagggttttacagccgacgttatggctggcagtaa

SEQ ID NO: 371233 - DNA, 948 bp, Salmonella enterica
atgcaaaaccggctcactatcaaagacatcgcccgcctgagcggcgtagggaaatcaaccgtttcccgcgtgcttaacaatgaaagcggcgtaagcgaacgtacccgcgagcgtgtcgaagcggtgatgaatcaacacggtttctccccgtcccgctccgcccgcgcgatgcggggacaaagcgataaagtggtcgctattatcgtcactcgccttgattcgttgtctgaaaacctcgcggttcagaccatgctgcctgcgttttatgaacagggctacgaccctattatgatggaaagtcagttctcgccgacgctggtaatggaacatctgggcatgctcagacgacgtaacattgatggcgtggtgctgtttggctttaccggcatcacagaagagctgatcgccccctggaaagcctcgctggtgctgctggcaagagatgcgcaaggttttgcctccgtctgttacgacgacgagggcgcgattcatatccttatgcagcggctgtatgagcagggacaccgcaacattagctttctgggcgttccccatagcgatattaccaccggcaaacgtcggcatgacgcatacctggcgttttgcaaaaaacataaacttcatcccgtcgccgccctgcccggtcttgccatgaagcagggctatgagcatacggcaagtgtcatcatgccggataccaccgcgttagtctgcgccaccgatacgctggcgttgggcgccagtaagtatttacaggagcaacgtattgagacgctgcaactggcaagcgtcgggaacacgccgctgataaaattcctgcacccggagatcgtcactgtcgatcctggctatgctgaagccggacggcaggcggcttcgcagctgatcgaacagatcaatggccgctgcgatccgcgccggatcgtcattccttctaccctcgcctga

SEQ ID NO: 371234 - DNA, 1419 bp, Salmonella enterica
atgagcaaagtaaaacaagccgatatcgaccggctgattgacctggtcggcgggcgcgacaacatcgccacggtgagccgctgcattactcgcctgcgctttgtgctccaccagcccgcgaacgccaggccaaaaaagatcgaacaattaccgatggttaaaggttgtttcaccaacgctggtcagtttcaggtggtgattggcaccgacgttggcgattactataacgcgctgctggagaccaccggcaaagcgtatgctgataaagagcaggccaaaaaagccgctcgccagaacatgaaatggcatgagcagttaatttcccactttgcggagatcttctttccgctactaccggcgttgatcagcggcggtttgatcttaggctttcgtaacgtgatcggcgatgtgccgatgagcaacggccaaacgctggcgcagatgcatccggcgctaaaaacgctttatgattttttatggttgatcggcgaagcgatctttttctatctgccggtggggatctgctggtcggcggtgaaaaaaatgggcggcacgccgattcttggtatcgtgctcggcgtgacactggtgtcgccgcagttgatgaatgcgtatctgctgggccagcaaacgccggacgtctggaacttcggcttatttagcattgagaaagtgggctaccaggcgcaggttatcccggcgctactggcagggctggcgcttgggtttattgaaacgcggttgaaacgcatcgtgccggattatctctacctggtcgtcgtcccggtgtgttcgttgatactggccgtctttctcgcccacacctttatcggcccctttggtcgtatgatcggcgacggcgtggcctttgcggtacgttatctgatgaccggcagtttcgccccgataggcgcggcgctgttcggcttcctgtatgccccgttggtcattaccggcgtccaccagacaacgctcgctatcgatatgcagatgatccagagcatgggcggtacgccagtctggccgctgattgcgctgtcgaatatcgcgcaggcctccgccgtggtgggcatcatcatctccagccgtaaacacaatgaacgcgagatctccgttcctgccgccatttccgcttaccttggggtaaccgaaccggcgatgtacggtatcaacctgaagtatcgttttccgatgctgtgcgcgatgatcggatctggtctggcgggactgctctgcggtctgaacggcgtcatcgccaacggtatcggcgtgggcggcctgccgggcatcctgtctataccgccgcgctactggcaggtgtacagcatggcgatggttatcgcgatcgtgatcccggtgattctgaccacctttatctatcagcgtaagcatcgtcagggcacattacaaattgtctaa

SEQ ID NO: 371235 - DNA, 1653 bp, Salmonella enterica
atgactattcccctctggtggcaaaacggcgttatttatcagatctacccgaaaagttttcaggacacgaccggcagcggcaccggcgatttacgcggcgtgacgcagcgccttgactatctacagcgactcggcgtagatgccatctggctcacgccgttttatatctcgccacaggtggataacggttatgacgtcgcaaattatacggctatcgacccgacctacggcacgctggatgattttgacgagctggtcgcgcaggcgaaagcacgcggtattcgtatcatcctggatatggtgtttaaccatacttctacccagcacgcctggtttcgcgaagcgctgaacaaagagagtccataccgtcagttttatatctggcgcgatggcacgccggatgtctgcccgaataactggcaatccaaatttggcggcagcgcctggcgctggcatagccagagcgaacaatattatttacaccttttcgcgcctgaacaggccgacctgaactgggaaaatcccgccgtgcgcgccgagctgaaaaaggtctgcgaattctgggccgatcgcggcgtggatggcctgcgtctggacgtggtgaacctgatcgccaaagatcaggattttcctgacgatccgacgggcgacggacgccgcttttataccgacggaccgcgcgcgcatacgtttttacgcgaaatgaaccgtgacgtttttacgccgcgtaatctgatgacggtaggcgaaatgtcctctaccacgctggaaaactgccagcaatatgccgcgcttagcggcgacgaactctcgatgaccttcaattttcatcatctgaaggtggattaccccaatggcgaaaagtggacgctggcaaaacctgattatgtggcgctgaaagcgttgttccgccactggcaacaggggatgcataacgtcgcctggaacgcgttattctggtgtaatcacgatcagccgcgcatcgtttcccgctttggcgacgagggtgaataccgggttccagccgcgaaaatgctggcgatggcgctgcacggtatgcaagggacgccttatatctatcagggcgaagaaatcggcatgaccaacccacactttacccgcatcaccgattatcgcgacgtggaaagccataacatgtttgccgcgctacgcgccgccggacgcgaccccgacgaactactggctatcctggccagtaaatcccgcgacaacagccgcacgccgatgcagtgggacaacggtaaaaacgccggtttcacccagggcgagccgtggataagcctgtgcgataactatacggaggttaatgtcgcggcggcattacgcgatgaaaactcggtgttttacacctatcaaaagctgattgcgctacgtaaaacccagcctgtactgatctggggcgattatcaggatctcctcccggatagcccatcagtatggtgttatcgccgccagtggcaggggcaaatcctgctggttgtcgccaatctgagtaaccagtgtcaggagtggcatccaccgcatatcaaaggacagtggcaggcgctactgcacaattatggcgaggtcaccagccagccagccgcgatgacgctccgcccatttgaagccatctggtggttacaacgctaa

SEQ ID NO: 371236 - DNA, 2139 bp, Salmonella enterica
atgacaccgcatgtgatgaaacgagatggctgtaaagtgccattcaaatcagagcgcattaaggaagccattctacgtgcagctaaagcagcgggagtcgatgacgcagattactgtgccaccgtcgcagaagtcgttagcagccaaatgaacgcgcgcagtcaggtggatattaacgagatccaaactgcggttgaaaaccaactgatgtccggcccgtacaaacagcttgcccgcgcctacatcgaataccgtcacgatcgcgacattcagcgtgaaaagcgtggtcgtctgaaccaggaaattcgcggcctggtagagcaaaccaactccgcgttgctcaatgaaaacgccaacaaagacagtaaagtcattcccacccagcgcgatttgctggccgggattgtcgccaaacactatgcccgccagcacctattgccgcgtgacgtagtacaagcgcatgagcgcggcgatatccactatcacgatctcgactattcgccgttcttcccgatgttcaactgtatgttgatcgacctgaaaggcatgttgacccagggctttaagatgggtaacgccgagatcgaaccgccaaaatctatctctaccgccactgccgttaccgcgcagattatcgcgcaggtcgccagccatatttatggcggcaccaccattaaccgtatcgacgaagtgctggcgccgtttgtcaccgaaagctataacaagcaccgcaaaaccgccgatgagtggcagattcctgatgccgaaggatatgcgcgttctcgcaccgaaaaagagtgctacgacgccttccagtcgctggaatacgaagttaacacgctgcacaccgctaacggccagacgcctttcgtgacctttggttttggcctcggcaccagttgggagtcgcgtctgatccaggcgtctattttgcgtaaccgtatcgccggtctgggtaaaaatcgcaaaaccgccgtgttcccgaaactggtcttcgctatccgcgatggtttgaaccacaagtttggcgatccgaactacgacattaaacaactggcgctggagtgcgcgagcaagcgcatgtatccggacattctcaactacgatcaggtggtcaaagtcaccggttcgttcaaaacgccaatgggctgccgcagcttcctcggcgtgtgggagaacgaaaacggcgaacagatccacgacgggcgtaacaacctgggcgtgattagccttaacctgccgcgcatcgcgctggaagcaaaaggcgacgaaaccgcattctggaaactgctggatgaacgtctggcgctggcgcggaaggcgctgatgacccgtatcgcccgccttgaaggcgtgaaagcccgcgtcgcgcctatcctgtatatggaaggcgcctgcggcgtgcggctgaaagcggacgacgacgtgtctgaaatctttaaaaatggtcgtgcgtccatctctctgggctacattggtatccatgaaaccattaacgcgctgttcggcggcgaacacctgtacgacagcgagcaacttcgcgctaaaggcatcgcgattgtggagcgtctgcgccaggccgtggatcagtggaaagacgagaccggctacggctttagtctgtacagcacgccaagtgaaaacctctgtgaccgcttctgccgtctggataccgccgagttcggcgtggtgccgggcgtaaccgataaaggttactacaccaacagcttccacctcgacgtggagaagaaggtcaacccgtacgacaaaatcgatttcgaagcgccgtatccgccgctggcgaacgggggtttcatttgctacggcgaatacccgaacattcagcacaacctgaaagcgctggaagatgtctgggattacagctatcagcatgtaccctattacggcaccaatacgccgatcgatgaatgctacgagtgcggctttaccggcgagttcgaatgtaccagtaaaggtttcacctgcccgaaatgcggcaaccacgacgccgcacgcgtctcggtcacccgccgcgtgtgcggttatttaggcagcccggacgcgcgtccgtttaacgccggtaagcaggaagaagtgaagcgccgcgtgaagcatttaggcaatgggcagataggttaa

SEQ ID NO: 371237 - DNA, 465 bp, Salmonella enterica
atgcgctaccatcaatactaccccgtagacatcgttaacggccccggcacccgctgcaccctgtttgtgtcagggtgcgtgcatgaatgccctggctgctataacaaaagcacctggcggctgaactccggccagccgtttaccaaagagatggaagataagatcattgccgatctgaacgacacgcgcattcaccgtcaggggatctcgctgtcgggcggcgatccgctgcatccgcaaaacgtaccggatatcctggcactggtacaacgcatccacgcggagtgcccggggaaagatatctgggtgtggaccggctacaagcttgatgaactcaacgccgcacagatgcaggtagtcgatctcatcaacgtgctggtcgatggcaaatttgtgcaggatctgaaagacccggcgcttatctggcgcggtagcagcaaccaggtagtgcatcatttgcgttga

SEQ ID NO: 371238 - DNA, 285 bp, Salmonella enterica
atgacttatgaactggaattcgacccgagggccttaaaagagtggcataagctgggcgatacggtgcaggctcagcttaagaaaaagttggctgatgtgctattgaaccccagaatcgactctgcccgtttaaacgatcttcctgactgctataaaattaagcttaaatcgtccggttatcgcttggtgtaccaggttcgggatgacgttgtgattgtgtttgttgtcgcggtcggtaagcgagaacattcagccgtctatcacgatgcaaacaaacggctttag

SEQ ID NO: 371239 - DNA, 243 bp, Salmonella enterica
atggccacgctgaacgtccgtctggatgacaaactcaaaaatgaggcttatgccgtgctggaaaaactgaacattactccaacggaagccgtgcgattactgttccagtacgtcgcggaaacggggcgcatgccagtgaaaaccgtcactcttagcgacagtgaagatgcattgattcagacagttcgggagaggctgtctagtccgcaaaagggaatcaaggttagtctggatgacttatga

SEQ ID NO: 371240 - DNA, 1914 bp, Salmonella enterica
gtgcgattccccaaccaacgtttagcgcagctatttgcgatgctgcaaaacgagacgctgccgcaggatgagctggcgcagcggttgtcggtctccacgcgtaccgttcgggcggatatcgccgcgctgaacatgttgctgacgccgcatggcgcgcaatttactctcagccgcggcaacgggtatcagctcaaaattgatgatccggcacgttatcaatccctgcaaacgcagcaatctcccgccctggcgcgcggtccgcgcaccagccaggagcggatacactatttgctggtgcgttttttaacctccgccttctcgctgaagctggaggatttagcagatgaatggtttgtcagccgtgcgacgttgcagaacgacatggcggacgtgcgcgagcatttgctgcgttatcatctgacgctggaaacgcgtccgcgtcatggcatgaaattgtttggcggagagatggcgattcgcgcctgtctgaccgaccttttatggacgctggcgcagcaggagccctctcatccgttaattgttagtaccacgctgaacaccgaggtgtctcaacggctgcggtctcttttgccggatattttctctcattgtcaaatccgcctgaccgatgagggcgagctgtttctgcgtttatactgcgcggtggcggtacggcgtattcgcgaggggtatccgttatcggaatgcgtggcagaggaggtcgatgaaaaagtgcgccatgcggcgcatgagattgcggagctactacaacagctggccgacaagccgctgtcggagccggaagtaagctggctgaaggtgcatattgccgcccgccaggtacaggaaattgcccccagcgccattaatgccgatgatgaagaggcgctggtgcgctatatcctcaattttattaatacccagtacaactataacctgttgaatgataaacagcttcacgcggacttgctgacccacatcaaaacgatgatcacccgcgtgcgctaccagatcatgctccccaacccactactggaaaatattaagcagcactatccgatggcgtgggatatgacgttggcggcgatatcgagttggggaaaatacacgccgtataccattagcgaaaacgaaatcggttttctggtgctgcatattggcgttgggctggaacgtagttacaacattggctaccagcggcagccgcaggtactgttggtgtgcgatgctggtaatgcgatggtgcggatgattgaagcggtactggcgcggaaatacccgcagattgagattgcccgcactctgacgctacgcgactatgaggcgcgggacagtattgtggaggattttgtgatttccacggcgcggatcggcgaaaaagataaaccggttatcatgatcgccccctttcctaccgactatcaattggagcagatcggtaagctggtgctggtggacagaacccgtccgtggatgctggataaatatttcgatgcctcgcattttcgcatcgtggagggggaaatagatcaacagacgctgtttaaaacgctgtgcgatcagttgcacgaggaaggctttgttgatgcggcgtttctcgattcggttattgaacgtgaagctattgtcagtacgttattaggcgacgggattgccttgccacacgcgctggggctgctggcgaagaaaacggtggtttatacggtgctcgcgccgcaggggattgcctggggtgacgaaacggcgcacgttatttttttactcgccatcagcaaaagtgaatatgaagaggcgatggccatctacgatattttcgtcactttcctgcgcgaacgcgccatgacgcgcctctgcgcatgtcagaattttacgcaatttaaaacggtcgcgatggagtgcgtgagtcgtttttga

SEQ ID NO: 371241 - DNA, 741 bp, Salmonella enterica
atgaaactgacccctaacttttaccgcgatcgcgtttgcctgaacgtactggccggttcgaaagataacgcccgggaaatctacgcggcggcggaaggtcatgtgctggttggcgtgctctccaaaaactatccggatgtggcaagcgcagtcgcggatatgcgtgaatatgcggcgcttatcgataatgcgctctccgtcggactgggggcaggcgatcctaaccagtcggcgatggtgagcgaaatctcgcgtcaggtacagccgcagcatgtcaaccaggtgtttaccggcgtaggggccagccgggcgctgctggggcaaaacgagacggtggtgaacggtcttgtctcgccgaccggcacgccgggacgggtgaaaatttccaccggcccgctaagcagccgcgcgccggacggcatcgtacccatagaaacggcgattgcgctgctcaaagatatgggcggcagctccgttaaatactttccgatgggaggactcacctgtcgcgacgagtataaagcggtggctgacgcctgcgcccgccatgatttctggctggaaccgacgggcggcatcgatctggaaaacttcgccgagattctgcacatcgcccttgatgcaggtgtaagcaaaatcattcctcacatttatagttcgattattgataaggtgagcggcaacacccgtgcggacgatgtacgtcagttactcgctatcgtccggtcgcgtgtcggctaa

SEQ ID NO: 371242 - DNA, 1119 bp, Salmonella enterica
atgccttcgatttttgagaagtatcaattaaaacaggtgattaacgcctccggacgtatgacggcgctcggcgtctctacgccgcgcccggaagtgatagacgcggcgatggccggaatgaatcagtatttcgagatgaaagatctggtgaataaaaccggcgagtacattgcgaaattgctggaggtggaaggggcgacggtagtctcctgcgccagtgcgggtcttgcccagtcggttgccgcggtactggttcaggacagcgactggctgctggaaaacctgcacgttacaccgattgaaaataacgaaatcgtcctgccaaagggccacaacgtcaactttggcgcgccggtgggaacgatggtggcgctgggcggcggcaaactggtggaagccggttacgccaacgaatgttccgccgcgcagttggcggcggccattacgccgcgcacggcggctattctctatatcaaatctcaccactgcgtacagaaaagtatgctcaacgtggagcaggctgcggtggtggcgcgtacgcataatctcccgctgattgtggacgcggcggcggaagaagatttgcagtgctactaccgcgtgggcgcagatctcgttatctatagcggcgcgaaagcgattgaagggccgaccagcgggctggtgattggcaaaacgcagtatgttgagtgggtaaaacgtcagtcagcgggcattggccgggcgatgaaggtcggcaaagagggaattgttggcctgacctgcgccattgaattgtacctgcgggcgcaaaaagagagcggcgcggagatggtagaaaaaatggcgccctttatcgacacgttgaacacgtttaacggcgtcagcgcccgcgtggtgtgggacagcgccggacgcgacatcgcgcgcacggaaattaagtttgatgaagccgttaccggcatcgccacaggcgaactggtcgacgcgctgaagcaaggagaatacgcgatttactttcgcggatacaaagccaacgaagggattattgaagcggatgtccgcagcgtcgatcgcgcgcagttagcgattgtggcgcgtcgtattggcgaggtgattaatcaggagaaacaagcatga

SEQ ID NO: 371243 - DNA, 1134 bp, Salmonella enterica
atgtttgatttactcctgcgccatgcgcgtctggtcgatgacacgctgactaatattgccctacaagatggcaaaatcgcggtgttgggtgacgttgatggtccggcggtgaaaaccattgacctgcgcggcgagtgttacgttagcgcgggttggattgattctcacgtccactgctacccgacatcgccgatttaccatgacgaaccggacagcgtgggtattgccactggcgttaccacagtggtggatgcaggcagcactggcgcagatgatattgacgatttttacaccctgactcgtcaggcgaccaccgacgtttatgcgctgctgaatgtttcacgcgtcgggcttattgcccaaaacgagctggctaacatggccaatattgacgctgatgcggttcggcaggcggtaaaacgccatccggattttatcgtcggcctcaaggcgcggatgagcagcagcgtggtaggcgttaacggcatcacgccgctggaacgcgctaaagccatgcagcaagaaaacggcaacctgccgctgatggtacatattggcaataacccgccggatctggacgaaatcgcggagcgtctgacggcgggcgatatcattacccactgttacaacggtaagccgaaccgtattcttcggcctgacggcgagctgcgcgcctcggtgacacgagcgctggcgcgcggcgtgcgtctggatgtcgggcatggtaccgccagcctgagctttgcggtggcgaaacgcgctattagcctggggattttaccgcataccatcagttccgatatctactgccgtaaccgcatcaacggcccggtacattcgctggctaatgtgatgtcgaaattcctcgccatcggcatgtcgctgccgcaggtcattgcgtgcgtgacggccaatgccgccgatagcctgaatctgaaaaccaaagggcgtcttcagctaggtctggatgccgacctgaccctctttacgcttaaacgccagcccaccgtgttggtagacgcggaaaacgacagcttacaggctgaagaattgctgacgccgcttgccgcgatacgcgcaggcaagggctatatgaccgaacaagggagcgcggaacatgccttcgatttttga

SEQ ID NO: 371244 - DNA, 645 bp, Salmonella enterica
atggaagagaataaaggtttttggtatgccgactggtcgttcccgatctttgttggcctgctctcctccggcgttttcgccgggacgcatatgtactatctgtacggcatcggcgcatttaacgaagtcgcttttgtggcgatgttgaaagcggggatggataccggcgtctacggcgcggtcgccgctttcggcgccagctttttatttgcccgcattatcgaaggttcgctggtcggaattctggatatcggcggggcaattcagaccggcgtgggcttaggggttccggcgttattgctgggagccggctttgtcttcccggtggcgaactttatcgcttcgctgataaccggtctggtgattggcctggcgattggctacatcattattctggcgcgtaagttcaccattaatcagagcgactccacgtacggagcggacgtcatgatgggggccggtaacacttcaggccgttttctggggccgttaattatcctcagcgccatgacggcatcgattcccattggtctgggctctctggtgggcgcgctgctgttttatatctggcagaagccgattaccggcggcgcgattttaggcgcgatgatcctcggttccatcttcccgattgcgattagctaa

SEQ ID NO: 371245 - DNA, 777 bp, Salmonella enterica
atgttcctgataatactaattaaatcgctcattatcggcgcgctggtcggcgtaggggtgggcgctggggctgcacgcatgtttcacgcgccaaccacgcaggggatgggcgcgttccgtacgttgggcgaactcaactcttgtgaaggcgacccggcatctcacttctcctttgggctgggtttcttctttaacgcctgggcgtcgtctgtggcggccggatcgttcacccaggatgtcgatcaccgcatcatccctaactggggcgcggcggcgctaatgatcaaaaaccgtaacgtcggcgagacgctgcacgacccgaaaaaaatggcgatcgcctgcgccgtcatcggcatgattgtcgtaacgttccttaacctgaccgcctcatccgtgccagaagcgctacaggtgacggcggttaaggtgctggtaccggcggcaaacctgctggtcaatatcgtcatgcctgtgatcttctggttagcggcgatcgacgctggtaaaaaatcgggcttctgggccaccgttttcggcggcgcggcgcagctcatcatggggaacgccgtaccggggctggtgctgggtattttgatcggcaaaggcgtagaagagagcggctggaaccatgtcaccaaagtgatgatggtcgccatcgttttgctgtttgtgttgagcggcttcttccgcggcttcgacatgaaaatgatcgagtctttcaacatgacggtaccgaactggcttgaactgatccacaactcgctcagcggcaaataa

SEQ ID NO: 371246 - DNA, 303 bp, Salmonella enterica
atgatgaaagagcaattcaccaccacggtgagagtaaaaggcaagggcgacgccaaagcacgcgcctttgccgatgcgctgaaccatgttcagtcggcggtgatgagagagtcgccgtatatcttactgcgtattgagccacaggatgtgcggattgttcaggcgcatgagtcggtgcgtaaagaggcctttctgtttttctttttgcgccgggaacgacgcacttacagcgtggagctggatgtgaccgtcaacgtgaccgccatcaatctcgacagggtggatttcgtcgcgaaacgctga

SEQ ID NO: 371247 - DNA, 363 bp, Salmonella enterica
atggaacagattaccgtcgtgattggcgatcgcctgggtaaaggccagaaagtagcggcaggcgtggaaaaagcgggcggtcgcgcggtcgtcgtaccgggcgtcgcggcagacatgaagctgggcgatgtgatgaaagcggaaaacgccaccttcggcatttcattttgcggcagcggcggcgcgggcgctatcaccgcgcaaaacaagcatggctacaaagccaaatatggaatgcggtcagtggatgaaggcgtcaccgctatcaatgaaggctgcaacgtgttgggtttcggctttatggataaagaagagctcggcgagcgcctggtgcaggcgtggcaaaagaaatacggcgcctga

SEQ ID NO: 371248 - DNA, 330 bp, Salmonella enterica
gtggataacggagcagtaaaacacgatgctggtgagcgaattaacgaactggctgaacaggtgttaacgcaggtggatagcctgctggggcggcatcacattgtccccaatgcggtacagacgcaaatgctgacctcgcacgttcgcgcgatggcgcaccggtcaattaccggcgagcctttaccggaagtcgatgccagcttgtttgatgaaatctcagccgaatcaatggcgctcgcccgcgaaatcgtggcggcgtttggcaaccttcctgacgaagaagcctggctattatcggtacattttgaagtcgcgaaagacaacctctaa

SEQ ID NO: 371249 - DNA, 387 bp, Salmonella enterica
atgcgtaaaagcctgttagctattcttgctgtgtcatcgctggtattcggttcggctgtttttgctgccgatcttgaagataatatggatattctcaatgataacctgaaagttgttgagaaaacggatagtgcccctgaactgaaagcggcattaaccaaaatgcgcgcggccgcgctggatgctcaaaaagctacgccgccaaagctggaagataaagcgccggatagcccggaaatgaaggattttcgtcacggttttgacattctggtcggccaaattgatggcgcgctgaagctggcgaacgaaggtaacgttaaagaagcgaaagcggcggcggaagcgctaaaaaccacccgcaatacgtatcataagaagtatcgttaa

SEQ ID NO: 371250 - DNA, 1353 bp, Salmonella enterica
atggcatttgcaatgaaagtaatctcacaagttgaagcgcagcgtaagattctggaagaagcagtttcgacagcgctggagttagcctcaggcaaatcggatggggcggaagtcgccgtcagcaagaccaccggcattagcgtcagcacccgttatggtgaagtagagaatgtcgaatttaatagcgacggcgcgctgggaattacggtgtatcaccagaaccgcaaaggcagcgcctcttcgacggatttaagcccgcaggcgattgcccgtaccgtgcaggccgcgctggatatcgcgcgttacacgtcgccggacccgtgcgcaggcgtggcggacaaagaactgctggcgtttgacgcgccggatctggacttgttccacccggcagaggttacgccagacgaagccattgaactggccgcgcgtgcggaacaggcttctctaaaggcggataaacgcatcaccaataccgaaggcgggagctttaacagccattacggcattaaagtgttcggcaacagccacggcatgttgcagggatattgctccacgcgccattcgctctcaagctgcgtcatcgccgaagagaacggcgatatggagcgtgattacgcttacaccatcggtcgggcaatggcggatctgcaagcgccggaatgggtcggggccgagtgcgcgcgccgtaccttatcccgcctgtcgccgcgcaagctctccaccatgaaagcgccggtcattttcgccaatgaagtggcgacagggctatttggtcatctggtcggggcgattgccggcggcgcggtataccgtaaatccacttttctgctcgactcgctgggcaaacaaattctgcctgaatggttaaccatcgaagaacacccgcatctgctaaaagggctggcgtcttcaccgttcgacagcgaaggcgtgcgtacggagcgccgggacattgtgaaggatggcgtactgatgcaatggttgctgaccaactattccgcccgcaaactggggctgaaaagtaccggtcatgccggcggcattcataactggcgtatcgccgggcaggggctgaactttgagcaattgctaaaagagatgggcaccggcctggtggtgacggaactgatgggccagggcgtcagcggtattaccggcgactactcccgcggcgctgcgggattctgggttgaaaatggtgaaatccagtacccggtaagtgaaattaccattgccggtaatttaaaagagatgtggcgtaatattgtcaccgtgggtgatgatattgaaacgcgcagtaatatacagtgtggttcggtattgttaccggagatgaaaatcgccggacaataa

SEQ ID NO: 371251 - DNA, 552 bp, Salmonella enterica
atgacaaagcagcccgaagactggctcgacgacgttcccggtgatgacatcgaagacgaagacgatgaaattatctgggtcagtaaaagtgaaattaaacgcgatgccgaggaattaaaacgcctgggcgcggaactggtggatctggggaaaaacgcgctggataagatcccgctggacgccgatctgcgcgacgccattgaactggcccagcgtatcaaaatggaaggacgccgccgccagttgcagcttatcggaaaaatgctgcgccaacgcgacgttgaacctattcgccaggcgctggacaagctgaaaaaccgccataatcagcaggtggtgctgtttcacaagcttgagcatctgcgcgatcgtctgatcgtcgaaggcgatgacgcggtagccgaagtactgaccctgtggccgcacgccgatcgtcaacagcttcgttcattgatccgcaatgcgaagaaagagaaagaaggcaacaaaccgccgaaatcagcgcgtcagatcttccagtatctgcgcgagctggcggaaaacgaagggtaa

SEQ ID NO: 371252 - DNA, 1374 bp, Salmonella enterica
atgcgcattcatattttgggaatttgtggcactttcatgggggggctggcgatgctggctcgctcgcttggtcatgaagtaacgggttcggacgccaatgtgtatccgccgatgagtaccttacttgagaagcaaggcattgatctgatccaggggtatgacgccagccagctcgatccgcagccggatctggtgattatcggcaatgcgatgacgcgtgggaatccgtgcgtggaagcggtgctggaaaaaaacattccctttatgtctggtccacagtggctgcatgactttgtgttgcgcgaccgctgggtactggcggtcgccggtacccacggcaaaaccacgaccgcaggcatggcgacctggatactggaagcgtgcgggtacaaaccgggcttcgtgattggcggcgtaccgggcaactttgaggtttccgcgcgcctgggcgagagcccattttttgttatcgaagcggatgagtacgactgcgcgttctttgataaacgttctaaatttgtgcattactgcccgcggacgttgatcctcaacaaccttgagtttgatcatgccgacatcttcgacgatctgaaagcgatccagaagcagttccaccatctggtgcgcatcgtgccggggcaggggcgcatcatctggccggaaaacgacatcaacctgaaacagaccatggcgctgggctgctggagcgagcaggagctggtgggcgagcagggacactggcaggcgaagaagctgactacggatgcttccgagtgggaagtgtggctggacggcgaaaaagtcggcgatgtgaaatggggcctggtcggcgaacataacatgcacaacggtctgatggcgattgccgccgcgcgccacgtgggcgtcgcgcccgcagaagcggccagcgcgctggggtcatttattaacgcccgccgccgtctggagctacgcggtgaagcgaacggcgtgacggtgtatgacgattttgctcaccatccgacggcaattctggccacgctggcggcgctgcgcggtaaagtgggcggcaccgcgcgcattatcgcagtgctggagccgcgttctaacacgatgaagatggggttatgcaaggatgacctggcgccgtcgttagggcgtgcggatgaagtgttcctgctgcagccgccgcatattccgtggcaggtttcagaagtggcggacgcctgcgtacagcctgctcactggagtggagatgtcgatacgctggcggaaatggtggtgaaaaccgcacagcctggcgatcacatcctggtgatgagcaacggcggtttcggcggcatccatcagaaattgctggatgggctggcgaaaaaagcactggttgtggagtaa

SEQ ID NO: 371253 - DNA, 999 bp, Salmonella enterica
atgaaaacgttaggtgaatttattgtcgaaaagcagcacgagttctctcaggctaccggtgagctcactgctttgctgtcggcaataaaattgggcgccaagatcatccaccgcgatatcaacaaggccggtctggtcgatatcctgggtgccagcggtgctgagaacgtacagggcgaggttcagcagaaactcgatctgttcgcgaacgagaaactgaaagctgcactaaaagcgcgcgatattgtagcgggcatcgcatcggaagaagaggacgaaattgtcgtctttgaaggctgcgaacacgcgaaatatgtggtgctgatggatcctctggatggctcttctaacatcgacgttaacgtctctgtcggtacgattttctcgatttatcgccgcgtgacgcccgtcggcacgccagtcaccgaagaagatttcctgcaacccggcaacaaacaggtcgctgcgggatatgtcgtgtatggctcgtccaccatgctggtttacaccaccggctgcggcgtacacgctttcacctacgatccgtcgttaggcgtgttctgtctgtgccaggaacgtatgcgtttcccggaaaagggtaaaacctactccattaacgaaggcaactacattaaattcccgaatggcgtgaagaagtacatcaaattctgccaggaagaggatagttcaacaagtcgcccttatacctcacgttacattggctctctggtggccgatttccatcgcaacctgctgaaaggcggcatctatctctaccccagcaccgccagccatccgcagggaaaactgcgtctgctgtatgaatgcaacccgatggcgttcctcgcggaacaggccggcggcaaagcaagcgatggtaaagaacgtattctggatatcattccggaaagcctgcaccagcgccgctcgttcttcgttggcaaccgccatatggttgacgatgtggaacgctttatccgcgaatacccggacgcgtaa

SEQ ID NO: 371254 - DNA, 531 bp, Salmonella enterica
atgagcttactcaacgtcccggcgggtaaagaactgccggaagatatctacgtcgttatcgagatcccggctaacgcagatccgatcaaatacgaagttgacaaagagagcggcgcgctgttcgttgaccgcttcatgtccaccgcgatgttctatccgtgcaactacggttacatcaaccataccctgtctctggacggcgacccggtagacgttctggtcccgacgccgtacccgctgcagccaggcgccgtcatccgttgccgtccggttggcgtactgaaaatgaccgacgaatccggtgaagatgcgaaactggttgccgtaccgcacaccaaactgagcaaagagtacgatcacattaaagatgtgaacgatctgccggaactgctgaaagcgcagatcactcatttcttcgagcattataaagatctcgaaaaaggcaaatgggtgaaagttgacggttgggacaacgccgaagcggctaaagcggaaatcgttgcctccttcgagcgcgcagcgaagaaataa

SEQ ID NO: 371255 - DNA, 1161 bp, Salmonella enterica
atgaaaaatgatatattaattaccggtggacatatcatcgatcccgctcgtaatattaatgagattaacaatttacgcatcattaacgatattatcgttgatgccgataaatatcctgtaacttcggagacccggattatccatgccgacggcatgatcgtcactcccggtcttatcgattatcacgcgcatgttttttatgacgcgacggaaggcggcgtcaggcctgatatgtacatgccgccgaatggcgtcaccaccgtcgtggatgcaggttctgccggtacggcaaactttgatgccttctaccgaacggtgatttgcgccagcaaagttcgaatcaaagcgtttctgaccgtgtcgccgccgggccaaacctggtcacaagaaaattatgatcctgacaatattgatgaaaataagatccacgcgctgtttcgccagtatcgcaacgttcttcagggattaaaactcaaggttcagactgaggacattgctgaatatggcttaaaaccgctgactgaatcccttcgtattgccaacgatttaaggtgccccgtagcaatacactcgactcatcccgtcgttcccatgaaagaacttgtctccttgctacgccgcggcgatattatcgctcatgcgtttcacggcaaaggtagcaccattcttactgatgaaggcgctgtcttagccgaagtccgtcaggcaagggaaagaggcgttatatttgatgccgccaatggtcgcagccatttttcaatgaacacggcacgccgggccatcgccaatggctttcttccggatatcatcagtagcgatctctcaaccatcactaaactcgcctggcctgtttacgccttaccatggattttatcgaaatatttagcactcggcgtcgcgcttaccgatgtcattaacgcctgtacccataccccagcagttttaatgggtatggcagcagaaattggtacgctggcccctggggcatttgccgatatcgccatctttaaattaaaaaacaggcatgttgaatttgccgatattcatggtgaaacgctcacggggacgcatgtgctggtaccacaaatgaccataaaatccggtgagatattatttcgtcaaattgattttggcgcgcggccaaacggagttgaaaaatga

SEQ ID NO: 371256 - DNA, 1209 bp, Salmonella enterica
atgacctcaatacaaaaatggctacggatcggcgcgacattaatgttcggcctttttgttgcttatcttgaccgttctaatctttccgttacgttacctacgattacacacgacctgaatattgatggcgcaacggccagcattgtattaaccatatttcttattggctatgccttttcaaatatttttggcggcgtatttacccagcgatacgatccgaaaaaaatagtcattctgatggtgctaatctggtcgattgcgaccgtttttgtcggatttacctcgtcagtgtacgttattttgatttgtcggctggtgcttggcattaccgaaggcatttattggccgcagcagtcccgcttcgccagcgactggttttcagacaaagaacggacgcaggcgaatagtattatccagtattatggacagttcctggcattaggcctgggatttatgattttgtccccgctggatgctgccttcggttggcgaaatgtttttattatcactggtgtgatcggcattgttgttgttgttccactttatataacaatgctgaaaaaacaggaagaagcgccttattatcgtgcgccggcgccaacagagaaaactaaacttaccctggaatcgctgggcggaacccccttcctacttcttatttttacctacatcactcaagggatgttgttctggggaattacgttatggatacccatggttgtcaattctctcggctataccggattcagtaaagcattggtcagttctctgccttatctgactgcggttatactggcaatccctatctcatggatcagtgataagacacaaaagcgtgtacttattgcttcactgggcctactaatccccggcgtgatgttatttctcctgccatttgtcgatgcgccgggctttaaaatcacgctcattaccctggcgatgggttattatgccgccagctttacccccaatatctggtcgattatccagtcgaacgttaaaccccatgcgattggcccagcctccggtattattaatggcatcggcgccggcggcggcggtacgttggcaggcctaatggtcggctatttttaccggacaaccggcagctatatgcagggatttatggttctcggatgcattgttatcctgggcggcgcgtcattattgatttacggcagaataagagctcaccatgcccggcgttaa

SEQ ID NO: 371257 - DNA, 345 bp, Salmonella enterica
atgcgaatatttgtctatggcagtttacgacagaaacaaggcaacagtcactggatgaccaatgcccaattgcttggcgattaccgtatcgataactaccagttgtatagtctgggccactatccaggcgcagttccgggaaacggagcggtatacggtgaagtttatcgaattgataacgccacgctggccgaacttgatgctttgcgcaccaggggcggtgaatacgcacgccagttaatccagacgccttacggcagcgcatggatgtatgtatatcaacgtcctgttgatgggttaactctgattgaaagcggtgactggttagacagaaaccagccctga

SEQ ID NO: 371258 - DNA, 3780 bp, Salmonella enterica
atgagtttatggaagaaaataagcctcggcgtgttgattttcattgtggtgttactggcgagcgttgcgtttctggtcgggacgacgacggggctgcatctggtattcagtgcggcgaaccgctgggtgccggggctggagattgggcaggtcaccggcggctggcgggacttatcgttaaaaaatatccgctatgagcagccgggcgttgcggtgaatgcgggcgaaattcatctggccgtcgggcttgattgcctgtggcgcagtagcctgtgcgtcaatgatctggcgctaaaagacattaatgtcgctatcgacagcaaaaaaatgccaccctccgaaccggcgcaagaagaggaagaaagcggaccgctgaacctctccacgccctggcccatcacgctgtcgcgcgtggcgttgaataacatcaatatcaagattgatgacactaccgtttcggtgctggattttacctccgggctggcatggcaggagaaaaacctgaccctgaaaccgacgcggcttcagggattgctgatcgcgctgccgaaggtcgctgacgtggcgcaggaagaggtggttgaacccaaaatcgagaaacctcaaccggatgaaaagccgcttggcgaaacgctaaaagatctgtttgcaaaaccagtaatgccggagatgaccgatgttcacctgccgctcaatctgaatatcgagtcatttcgcggcgagcagctacgcatcaccggcgataccgatctgacggtgcgcacgatgctgcttaaagtcagcagtatcgacggtaatatgaagctggatactctggatatcgacgccaaccagggcacggtgaaagcctccggtacggcgcagctcgccaataactggccggttgatattacgctcaacagtacgctgaatatcgatccgctaaagggtgaaaagataaaactcaaggtcggcggcgcgttacgcgaacaactggaggtcggggtgaacctttccgggccgatggatgtcgcgcttcgcgcccagacgcggctggcggaggccggtttaccgctcaatcttgaagtcgtcagccaacgcattgcctggccattgacgggtgatacccagtttcaggctgacgatctgaagctcaaactgagcggtaagatgaccgactatacgttgtcgatgcgaaccgccgtgaaaggacaagatattccgccggcgaccattacgctggatgctaaagggaatgagcggcagattaatctcgataaactcaccgtcgccgctctggagggaaaaaccgaactgaaagcgctggtggactggcagcaggcgattagctggcgtggcgaactgacgctgaatggcatcaataccgctaaagagatcccggattggcccgcgaagcttaacggcgtcatgaaaaccaaaggcagcctctacggcggcacctggcagatggatgtcccggagctcaagctgaccggcaatgtgaagcagaacagcgttaacgtcaacgggacgctaaagggcaacagctacatgcagtggacgatcccggggctgcaccttgcgctgggcccaaacagcgccgatataaaaggcgagcttggcgttaaggagctgaatcttgacgccgccatcgatgcgccggggctggataatgcgctgccaggactgggcggcatggcaaaaggaatcgttaaagtccgcggtacggtagaagcgccgcagctgttggcggatatcaccgcccgcggtctgcgttggcaggagctgtctgtcgcccaggcgcgcattgagggcgatattaaatccaccgatcagatagcgggccatctcaacgttcgcgtagagcggatttcgcagcccgacgttaacatcaatctggtgacgcttgacgccaaaggcagcgagaagcagcatcagctacagctccgtgttcagggagaaccggtatccggtcaactttccctgacaggcagttttgatcgcgaggcggcgcgctggaaagggacagtaagcgacacccgtttccagacgccagtggggccatggtcgttgacccgcgcgattgcgctggactaccgtaataaagaacagaaaatcagtatcgggccgcattgttggctgaacccgaacgccgagctgtgcatcccgcaaaccattgatgcgggcgccgcaggacgggcggtggtcaatctcaaccgctttgatctggcgatgctgaagccatttatgcctgataccacgcaggccagcgggatctttagcgggaaggcggacgtgtcgtgggacaccacccaggagggattgccgcaggggaaggtcacgctttccggtcgtaatgtgaaggtcacgcagaccgtcaatgacgcgccattaccggtcgcgtttgagacgctgaacctcagcgccgatctgcacaataatcgcgccgagctgggatggctgattcgcctgacgaacaatggtcaattcgatggcctggtgcaggtaaccgatcctcaggggcggcgcaatctcggcggtaacgtcaacatgcgcaatgtcaatctggcgatggtcaaccctgtcttttcgcgcggcgaaaaagcggcgggaatgttaaacgccaggctacgtctgggcggcgatgtgcaaagcccgcagttgtttggtcagttgcagcttagcgcgctggatattgacggtaattttatgccgtttgagatgcagccgagccagctcaccatgaactttagcgggacgcgttcgacactcgccggtatcgtgcgaacacaacaagggcaaattaacctgaacggtaacgccgactggagtcagattgacaactggcgcgcgcgggtgacggcgaaaggcagccgggtgcggattaccgttccgccgatggtgcgcctggatgtctcgccggatgtggtctttgacgcgacgccttcgctgttcacgttggatgggcgtgtggacgttccgtgggcacgaattgtggtgcacgacctgccggagagcgcggtcggcgtctccagcgatgtggttatgctcaataatgacctgcaaccagaaacgccgcagacagcgtctattcccatcaacagtaatctgacggtccacgtcggcaacaacgtgcgcatcgacgccttcgggcttaaagcgcgtttgaccggcgatttgaaagtcgcgcaggataagcaggggctggggctgaatggtcaaatcaatattcctgacggccgattccgcgcctacggccaggacctgcttgtccgtaaaggcgagctgctgttctccggcccgccggatcagccgctgctcaatatcgaagcgatccgtaaccctgacgccaccgaagacgatgtcattgcgggtgtgcgcgtcacaggcactgctgatgaacccaaagcggaaatcttctccgatccggcgatgccgcaggctgaagcgctttcttatctgctgcgtgggcaggggttggacagcaatcagagtgatagcgcagcaatgacctccatgcttattggcctgggggttgcgcaaagtggtcaggttgtgggtaaaatcggagagacattcggtgtaagtaatctggcgctggacacgcaaggggtgggcgattcgtcccaggttgtggtcagcggctatgtactgccgggtctacaggtgaagtatggtgtagggatatttgactctctggcgacgctcacgttacgttatcgcctgatgcctaagctatatctggaagcagtgtctggcgtagatcaggcacttgatttgctctatcagtttgagttttag

SEQ ID NO: 371259 - DNA, 1734 bp, Salmonella enterica
gtgccacatatccgtcagttatgttgggttagcttactgtgcctgagcagttctgcggtagccgcaaatgttcgtctgaaagtcgaagggctatccggagagctggaaaaaaacgttcgcgcacagctctctacgattcagagcgatgaggtgacgccggatcggcgctttcgcgcccgagttgatgatgcgattcgcgaagggcttaaagcgttaggctattacgaacccactatcaaattcgacttgcttccaccgcctgcgaaaggacggcaggtattaatcgccagggttacgcccggccagccggtgttgattggcggtacagaagtcattttacgcggcggcgcgcgcacggacaaagattatctggccttactgaaaacgcgtccggcaatcggcacggtgctgaaccagggagactatgacaattttaaaaagtcgttaaccagcgtgtcgctacgtaaaggctatttcgacagcgaattcgttaaaagtcagttgggaattgctctgggctgccatcaggcgttttgggatattgattatgatagcggtgagcgctatcgcttcggacctgtcaccttcgaaggttcgcagattcgtgatgaatatttacaaaatctgttgccgtttaaagagggcgatgagtacgaatcgaaagatttggcggaactaaaccgccgactttccgctaccggatggtttaattctgtcgtggtggcgccggaatttgagaaatcgcgtaaaacaaaaattctgccgttaaaaggcgtggtatcgccgcgaaccgaaaatacgattgaaaccggggtggggtactccaccgacgtcgggccgcgcgtgaaagcgtcgtggaaaaaaccgtggatgaactcttacggtcatagtctgaccaccagcaccagtatttctgcgccggaacaggtgctggattttagttataaaatgccgctgctgaaaaacccgctggagcaatactatctggtacagggcggttttaaacgtaccgatttgaatgatacggagcaggactcgaccacgcttgccgtgtcgcgttactgggacctttccagtggttggcagcgggcgattaacctgcgctggagtttcgaccactttacccaggggaacgtcaccaataccaccatgctgttctacccgggcgtgatgatcagccgaacccgctcgcgagggggactgatgccaacctggggcgattcgcagcgctattcagtagactattcgaatacggcctggggctccgacgtggatttctccgtgctgcaggcgcaaaacgtctggattcggactttgtacgatcgccaccgttttgtgatgcgcgccaatttgggctggatagaaaccggtgatttcgacaaagttccgccggatttacgtttcttcgccgggggcgaccgcagtattcgcggctataaatacaaatctatttcgcctaaagatagcgacggcaatcttaaaggcgcctcaaaactggcaaccggatcgctggagtaccagtataacgtcactggcaaatggtggggggcagtgtttgtcgatagcggcgaggcggtgagtgatattcgccgtagcgatttcaaaaccgggaccggggtcggcgtgcgctgggcgtcgccggttgggcctatcaaactcgattttgccgtaccggtcggcgacaaagacgaacacggtttacagttttatatcggtctggggcctgaattatga

SEQ ID NO: 371260 - DNA, 639 bp, Salmonella enterica
atgagtttatttgataaaaaacatctggttactcaagcagatgcgttaccaggacgcaacaccccgatgccgatcgccactctgcatgcggtaaatgaacactctatgaccaatgtccctgccgggatggagatcgcctacttcgctatgggctgtttctggggcgtagaacgtttattctggcaattgcccggcgtatatagcaccgcggcagggtatgcaggcggttacacgcctaatccaacctaccgggaagtctgttccgggcagaccggtcatgccgaagcggtacggatagtgtacgatcctgccgttatccgttatgagcagcttttacagaccttctgggaaaatcacgatccgacgcaggggatgcaacagggtaacgatcacggtacgcaataccgttctgcgatttatcccttaacgccggaacagaatgccgccgctcacgccagtcgcgagcgctttcagtcggcaatggccgccgccggagaccatcgcccgattaccacggaaatcgcccatgcgacgccgttttactacgccgaagatgaacaccaacagtatctgcacaaaaatccatacggttactgcgggattggcgggatcggcgtttgcctgccgcctgacgcgtga

SEQ ID NO: 371261 - DNA, 1344 bp, Salmonella enterica
atgttaaacagtatattcattatattctgcctgatcgctgtaagtgcgttcttctccatctccgagatctcgcttgccgcatcacgtaagattaaacttaagttattagctgatgaaggcagtatcaacgcacaacgcgtattgaaaatgcaggaaaatcccggcatgtttttcaccgttgtgcaaattggcctgaacgccgtcgctattcttggcggtatcgtcggcgatgcggcattttcgcccgccttttccgcccttttctcgcactatatgtcgccagaactctccgagcagctgagctttattctctccttctcgctggtgacggggctgtttatcctgttcgcggatttaaccccgaaacgcatcggtatgattgcgccagaagctgtggctttgcgtatcatcaacccgatgcgcttctgcctgttcgtttttcgcccgctggtgtggctgtttaacggcatggcaaacaacatcttccgcctgttcaaaattccaatggtgcggaaagacgacattacttctgatgatatttacgcagtggtggaagccggcgcgctggcgggcgtcttgcgcaagcaagagcacgaactgattgaaaatgtgtttgaacttgaatcccgcaccgtaccgtcttctatgacgtcgcgcgaaagtatcatctggtttgatctgcacgaagacgaacaaagcctgaagaaaaaggtcgccgaacatccgcactcaaaatttttggtgtgtaatgaagatatcgaccacatcatcggctatgtagactccaaagatctgctgaatcgcgtgctggcgaaccaaagtatggcgctgaatagcggcgtgcaaattcgcaataccttgattgtgccggatacgctgaccctttctgaggcgctggaaagtttcaaaacggcgggcgaagatttcgcggtcattatgaatgaatacgcactggtcgtcggtatcattacgctgaacgatgtgatgaccacgctaatgggtgacctggtcggccagggactggaagagcaaattgtggcgcgcgatgaaaattcctggctggttgacggcggcacgccgattgacgacgtcatgcgcgtgctggatatcgatgagtttccgcaatccggcaactatgaaaccattggcggctttatgatgtttatgctgcgcaagatcccaaaacgcactgattcggtgaagttttccggctacaaatttgaagtggtggatatcgacaactaccgtatcgatcagttgctggtgacgcgtctcgacaataaaagcaacgtaccggcgccgaaactgcccgatgcaaaagacaaagaagacagcgcggcctga

SEQ ID NO: 371262 - DNA, 207 bp, Salmonella enterica
atgaaaattttccaacgctacaacccgctacaggtggcgaagtacgtgaagatcctgttccgtggacggttatatatcaaggatgttggcgcttttgagttcgataagggtaagattcttatcccaaaagtgagagacaagcagcacttgtctgtgatgtctgaagttaaccgtcaggttatgcgtctgcaaactgagatggcgtaa

SEQ ID NO: 371263 - DNA, 558 bp, Salmonella enterica
atgaccctacgtaaaattctggcgatgtcgtgtctgctactccccataatggcttgtgcgcataaccttgaagataaccaacgggtgccgccggtaggcattgccgatcgtggcgaactgacgttgaataaagatgagtttagttataaaaactggaatagcgcgcagctggcgggaaaagtgcgcgtcctgctgcacattgcgggtcgaacgtcagcgaaggaaaaaaacgccacgctgattgaagcgattaaatccgccgggcttccgcatgacagataccagacgaccacaattgtgaacaccgatgatgcgatccccggctccggtatgttcgtgcgtagcagtatagaaagtaataaaaagctctacccgtggtcgcaatttattgtcgacagcaatggcgtggcgcgtaacgcctggcaattaaaagaagaggggtccgccgtcatcgtgcttgacaaagacggtcgggttcaatgggtgaaagatggcgcgttaacccagcaagaggtacagcaggtggtcgacctgctgcataagctcctcagtaaatag

SEQ ID NO: 371264 - DNA, 741 bp, Salmonella enterica
atgttagaacaagtatgccagcttgcacggaacgcgggcgatgccattatgcaggtttatgatggagccaaaccgatggagtacgcccgcaagcaggacgattctccagtcactgcggcggatatcgccgcacataccgtgattctcgaagggttacgcacgctcacgccggatattccggtgctttcagaagaagatccgcccgcctgggaagtgcgccagcactggcagcgctactggctggtcgatccgctcgacggcaccaaagagttcatcaagcgcaatggcgaattcacggtcaatattgcgctgattgagcagggcaagccggtgttgggcgttgtctatgcgccggtgctgaaagtgatgtactacgcggcggaaggtaaggcctggaaagaggagtgcggggtgcgtaagcagattcaggtgcgggatgcccgcccgccgctggtggtgattagccgttcgcatacggatgatgaactcaccgaatatctccaacagcttggcgaacatcagaccacctctattggttcctcgctgaaattctgtcttgtggcggaaggccaggcgcagctttaccccagatttgggccgaccagcgtctgggacactgccgcaggtcatgccattgctgttgcagccggggcgcacgttcacgactggcagggaaaaacgctggactatacccctcgtgagtcgttccttaaccccggcttccgggtgactatttactga

SEQ ID NO: 371265 - DNA, 1944 bp, Salmonella enterica
atgattaagtttagtgcaacgcttctggctacgctgatcgccgccagcgtgaatgcggccaccgtcgatctccgtatcatggaaactactgatttacatagcaacatgatggatttcgattattacaaggataccgcaaccgaaaaattcggattggtacgtaccgcaagtttgattcatgccgcccgaaatgaagtcaaaaacagcgtgctggtggataacggcgacctgattcaggggagccctctgggcgattatatggcggcaaaagggctcaaagacggtgatgttcacccggtctataaagcgctcaacactctggattacgcggttggaaacctcggcaaccatgagtttaattatggtctggactatctgcataacgcgctggccggcgcgaaattcccttatgttaacgccaatattatcgacgttaaaacccaaaagccgctctttacgccttatctgattaaagagacgagcgttattgataaagacggccacccgcaaactctgaaaatcggctatatcggctttgttccgccgcaaatcatgatttgggataaagcgaatctgagcggcaaagttaccgtcaatgacattacggaaaccgcccggaaatatgtgcccgaaatgcgcgagaaaggcgctgatatcgtggtagtcattgctcactcaggcctttctgccgatccgtaccacagcatggcggaaaactcggtttattacctcagcgaagttcccggcgtcgacgcgattatgtttggccacgcccacgccgtcttccccggtaaagattttgccgacatcaaaggcgcggatatcgccaaaggtacgcttaacggcattcctgcggtaatgcctggcatgtggggcgaccatctgggagtggtcgatctggtgctcaataacgacagcggcaaatggcaggttacgcaggcgaaagcggaagcgcggcctatttacgacgccgccgctaaaaagtcgctggcggcggaagacagtaggctggtcggtattctgaaagccgatcacgatgccaccagcgagtttgtcagcaagcccatcggtaaatccgccgataatatgtacagttatcttgctctggtgcaggacgatcctaccgtacaggtggtgaataacgcgcaaaaagcgtatgtggaacactttattcagggcgatccggatctggcgaaactgccggtgctgtccgccgccgcgccgtttaaagttggcgggcgtaagaacgatcctgccagctttgtcgaagtggaaaaaggccagttgaccttccgtaacgccgccgatctttatctctatccgaatacgctggtggtggtgaaagccagcggcaaggaggtaaaagagtggctggaatgttctgccggacagtttaatcaaattgatattcacagcaacaaaccgcaatcgttgatcaattgggatggctttcgcacctataatttcgatgtcattgacggcgtgaattatcaaatcgatgtgtcacagcccgcccgctatgatggcgaatgccagatggtgaatccgcaggcggaacgtattaaaaacctgacctttaacggtaagcctgtcgacccgaacgctacgttcctggtcgccacgaataactatcgcgcttacggcgacaagtttgccggcacgggcgacagccatatcgcctttgcgtctccggatgaaaatcgcgccgtgctggcggcatggattggcgcagagtcaaaacgcgcgggcgaaatccatccggcggcggataataactggcgtctggcgccaatccacagcgatacgacgctggatatccgctttgaaacatcgccaggcgataaagccgctgccttcattaaagagaaagggcagtatccgatgaagaaggttgctgtcgatgatatcggttttgccatttatcaggtggatttgagcaagtaa

SEQ ID NO: 371266 - DNA, 387 bp, Salmonella enterica
atgcgcgctcatactctttcccggcagttgcgtgaaggtaatctctttgctgaacagtgcccgtcccgtgaggtgttaaaacatgtcaccagtcgctggggcgtactgattctggtcgcgttacgcgacggtacacaccgttttagcgacctgcgccgcaagatgggaggcgtgagtgaaaagatgctggcgcagtcgttacaggcgcttgaacaggacggatttcttaaccgggtgtcatatccagttgttccgccgcatgtggagtacagcctgacgccgcttggcgagcaggtgagcgataaagtcgccgcgctggcggactggatagaactgaatttgccgcaggtattggcgcagcgggagcgtttatcagatggcggctag

SEQ ID NO: 371267 - DNA, 849 bp, Salmonella enterica
atgattgctatcactggcgcaacaggccaactgggccaacacgttattgaaaacctgctaaaaacgacgcccgccagtcacctcgtcgcgatcgcccgtaacccgaaaaaagccgccccgctcagtcagcgcgggatcgccgttcgccaggcggattacgctaacgaagccgcgctgaccaccgccttacagggcgttgataaactgctgcttatatcatccagcgaagtgggacaacgcaccgcgcagcaccgcaacgttattcaggccgccattgccgcgaaggtgaaattcatcgcctataccagcctgctacatgcggataaatcgccgctggcgctcgccgatgaacatattgaaacggaaaagatgctggctgagtcaggtattcctcacacgctattacgtaacggctggtatacggaaaactacctggcgagcgtccctgccgcgctgaagcatggcgtctttattggcgcagcgggacaagggaaaatcgcctccgcaatgcgcgctgactatgccgccgccgccgcgcgcgtcatcagtgaagagggtcacgccgggaatgtctacgagctggcgggtgatgacgcctggacattacgccagttggcggatgaacttactcatcagagcggaaaaaaaatcgtctaccagaacctgagcgaagtcgattttgccgccgcgttaaaaggcgcaggcctgcctgacggactggcggatatgttggccaattctgacgctggcgcggcgaaaggcggcttgtttgatgacagccatacgctgcgtaaactcatcggtcgcccgacgacgacgctcacagaaagccttcgctccgtactgtaa

SEQ ID NO: 371268 - DNA, 966 bp, Salmonella enterica
atgattagcggcgtgctatacgccctgctggcagggctaatgtggggattgattttcgtcggcccgttaatcgtgccggattacccggccctcttacagtcaatgggacgctacctggcgctggggctgattgccctgccgattgcctggttaggccgcacgcggttacgccagttgacgcgcaaagactggttcaccgccctgtcgctgactctgatgggcaatgtaatctattacgcctgcctcgccagcgctattcagcgaaccggcgcgccggtttcgacgatgatcatcgggacattgccggtcgtcattccgcttttcgctaacgttctctatagccaacgagacggcagattatcctggcggcgtttagcgcccgcgctggcgcttatcggttttggcctgctgtgcgtcaatattgctgaacttagtcagggattgtccgatgttagcggctggcgctatggttcaggcattgtgctggcgctgatttccgtagcgtgctgggcatggtatgcgctgcgcaacgcccgctggctgcgggaaaatcccgacaaacatcccatgatgtgggcaacggcgcaggcgctggttacgctgccggtctcgttaatcggctatgcggcggtctgtctgtggctgagtatccagaaaccgttgtttaccctgccctttggcccgcatcccgcgctgtttatcggtctgatgatcgccatcgcggtgctgtgttcctgggtgggcacgctgtgctggaatatcgccagccaaaaattgccaaccgttattttagggccgctgattgtttttgaaacgctggcgggactgctctataccttcattctgcgccaagaaatcccgccattcctgacgttaagcggcattgcgctcctggtggcgggcgtggtcattgccgtgagagcgaaaccggaaaaagcgaccgtcgttccggtcacggaacgctaa

SEQ ID NO: 371269 - DNA, 663 bp, Salmonella enterica
atggcttatcgcgatcaacctttaggcgaactggcgctctctattccccgcgcatcggcgctgtttcgccagtacgatatggattactgctgcggtggaaaacagacgctggcacgcgccgccgcgcgtcacgacgtcgatattgacatcattgaagcgcaactggcgcaattggctgaacagcccatcgaaaaagactggcgcgccgttccgctggcggacattattgaccatatcgttgttcgctatcatgaccgacatcgcgaacaactgccggagcttattctgcaggcaaccaaagtggaacgcgttcacgcggataagccaaacgtcccacgcggcctgacaaaatatctcaccgcgctgcatgaagagctttccagccatatgatgaaagaagaacagatcctgttccccatgatcaaacagggtatgggtcgccaggcaacgggcccgataagcgtaatggaaagcgagcatgacgaggcgggagagctggtagacgtcatcaaacacgtcacccaaaatgtaacgccgccgccagaagcctgcaccacctggaaagcgatgtataacggcattaatgagatgattgatgatctgatggagcacatcagcctggagaataacgtgctgttcccacgcgcgctggccggggaataa

SEQ ID NO: 371270 - DNA, 1011 bp, Salmonella enterica
atggttacgctttggggaaattatgaggggatctctcagcgctttgccgctgataaagatagtctttacttcgacggcgagcgcacagatgataatcatggtgaaaaaagggtcgatatagattcgttgcagcaggtcggcggcaacatcaaattaaacgactccggcgatgtgcttaaagacaggcgcaacctctactttcagggacgctggctggctagtgcgcagggatattccatcctgggcgttaaatcctgggagcagcgtaatattctgttttcgccgaccagctgcgatactacatctaatcctggcccgtgggacactattctgcgtaccgccacgcaggtttttgttaatggtgtggcaattgatgccgatccgaactcttttcatgttgtgcgctgggtcgctggcgtgcagttactctatcgcgacaaagcaggcgtaaaacgctattacttcggcaaagactgtctcaatacgtttaatgtacagcgggataaggtgacatggatgacgcgagaggcatcgcgccgaggcgatgactgccgaatagcgactattcccaatgttgatccagaatatttccatcccattcattacaattggacggtagcacagtacaaagatctattgtaccaggtgaagtatgtctctccggtcgacagggtattaaccatcacccgcttgcctgatccgcaggtacagctgaaagctggcgctaatttggtgggtaaacagatctattttatcggcgatgggggcgtgcagattatcgaccctattggaccattggtgtggtttaaaaatcccgatggttcattttctgatgtttttgctcatgacgatcgttatctctatttcttcggtgatacgctggtggatagcgggcaacggcgtaacgtaacgcggacgctggatactgcgcatatcgacaagagcggttattatctggtcactgaggaggggaaatatgaggttattaataatgcattcacctctcgctaa

SEQ ID NO: 371271 - DNA, 810 bp, Salmonella enterica
atgggcagcgttaacttcataactcacgccgatgttctgcaacttattgcgaaaagaacggctgaagattgtattatttttctttctggtcctacgtccagaaagacgccgctgtccttgttacgaatgaaagatgtcattgcagtcaatggttctgttcaatatttgctaaacaataacgtcaagccatttttgtaccttctgacggatgttcgcttcctccatcgccggcgcgaagatttttataactttagccgtaacagtcagtttactatcgtcaatcttgatgtgtacgaacaggcttcagtggatgatcaaaaatatattgaagaaaactgtttaattattcgctccttttatcgccgagaaaaagggggctttttaaagaaaattaaatttaatatcctcaagcgggttcataaagcattacttatttcagttcccctttcgaaaagagggcgactggctggattttgcaaggatatcagcatcgggtattgctcttgccatactattgcttataccgctattcaggttgcttattccctcaagtatggccgtattatatgttctgggcttgacttaacagggagttgcccacgtttctatgacgaatctaccagccctatgccatctgagcttagtaaagacctgtttaaaatactgccattttttacttttatgagaaaaaatgtgagtgatttaaatatctttaatttatcagatgatactgcaattcattacgatattattccatatattacagcctcggaacttgaggatgaaatatattacgataaaattgtctag

SEQ ID NO: 371272 - DNA, 1146 bp, Salmonella enterica
atgattaaaaaaatcatatttactgttactcctatattttcaattcctccacgtggcgcggctgcggtagaaacctggatttaccaggttgcaaaacgactatcaataccgaatgctattgcttgtataaagaatgctggctatcctgaatataataaaataaacgataactgtgatattcattacatcgggtttagtaaagtttataagcgtctttttcagaaatggactcgtctcgacccactaccctattcccagcgcgtccttaatattagagataaagtgactacccaggaagatagcgtcattgttattcataatagtatgaaactgtatcggcagatcagagagcgcaatccgaatgcaaaactggttatgcacatgcataacgcatttgaaccagaacttcctgataaggatgcaaaaattatcgtgcccagtcagtttcttaaagcgttttatgaagaaagattgcccgccgctgctgttagtattgtgcctaatggtttttgtgctgagacttataaaagaaacccacaaaataacctccgtcagcaattaaatattgcggaagatgccaccgttctcttatatgccgggagaatttcgcctgataaaggcatcctgttgcttttgcaggcgttcaaaaaattacgtaccttaagaagtaatattaaacttgtcgttgttggcgatccttatgcaagccgcaagggtgaaaaagcagagtatcaaaagaaagtactggacgccgcaaaagagattggaactgattgtattatggctggggggcaatctcctgaccagatgcataacttctatcatatagccgatctggttattgtgccatctcaggttgaagaagcattttgcatggtggctgtagaagcgatggcagcaggaaaagcggttcttgccagcaaaaaaggggggattagcgaatttgtgttagatggcataacgggctatcacctcgcagaacctatgtcgagcgacagtataattaatgatattaaccgtgcgcttgctgataaggaacgccaccagattgccgaaaaagcaaaatccctggtgttttcaaaatacagttgggaaaatgtagctcagcgtttcgaggaacagatgaaaagctggtttgataagtga

SEQ ID NO: 371273 - DNA, 1215 bp, Salmonella enterica
atgctaaccacatcattaacgttaaataaagagaaatggaaaccgatctggaataaagcgctggtttttctttttgttgccacgtattttctggatggtattacgcgttataaacatttgataatcatacttatggttatcaccgcgatttatcaggtctcacgctcaccgaaaagtttcccccctcttttcaaaaatagcgtattttatagcgtagcagtattatcattaatccttgtttattccatactcatatcgccagatatgaaagaaagcttcaaggaatttgaaaatacggtactggagggtttcttattatatactttattaattcccgtactattaaaagatgaaacaaaagaaacggttgcgaaaatagtacttttctcctttttaacaagtttaggacttcgctgccttgcagagagtattctgtatatcgaggactataataaagggattatgccattcataagctatgcgcatcgacatatgtccgattccatggttttcttatttccagcattattgaatatttggctgtttagaaaaaatgcaattaagttggtttttttggtgcttagcgccatctaccttttctttatcctgggaaccctatcgcgaggggcatggttggcggtgcttatagtaggtgttctgtgggcaatactgaaccgccaatggaagttaataggagttggtgccattttattagccattatcggcgctttggttatcactcaacataataacaaaccagacccagaacatttactgtataaattacagcagacagatagctcatatcgttatactaacggaacccagggcaccgcgtggatactgattcaggaaaacccgatcaagggctacggctatggtaatgatgtgtatgatggtgtttataataaacgcgttgtcgattatccaacgtggacctttaaagaatctatcggtccgcataataccattctgtacatctggtttagtgcaggcatattgggtctggcgagcctggcctatttatatggcgctatcatcagggaaacagccagctctaccttcaggaaagtagagataagcccctacaatgctcatctcttgctatttttatctttcgtcggtttttatatcgttcgtggcaattttgaacaggtcgatattgctcaaattggtatcattactggttttctgttggcgctaagaaatagataa

SEQ ID NO: 371274 - DNA, 954 bp, Salmonella enterica
atgcgggttttgatcgttaaaacatcatcgatgggcgacgtattacataccctgcctgcgcttaccgacgcgcaacaggctattccagggattcaatttgactgggttgtcgaagaagggtttgcgcaaattccgtcctggcacagtgctgtcgatcgcgtgattcccgtcgctattcgccgttggcgcaaagcctggttttccgcgcccattaaagcggaacgcacagcctttcatcgggcggtatgcgcataccaatacgacgctgtgattgatgcgcaggggctggtgaaaagcgcggcgctggtgacgcgtctggcgcatgggataaagcacggtatggactggagtactgcccgcgaaccgctggccagcctgttttataaccgtaaacaccatatcgcaaagcaacaacatgcggttgagcggacgcgcgagctgttcgccaaaagcctgggatacgataaaccgcagtcgcagggcgattatgccatcgcaaaacattttctgcattgccagcaggcggtcagcgatccatatgcggtatttttacatgccacgacccgcgatgataaacactggccggaagcaaactggcgcgagcttatcggtatggtgggcaacaccggattacggataaaacttccctggggcgcgcctcatgaggaggcccgggctaaacgactggccgaaggctttgactatgtggatgtgttaccgcgcatgagcctggaggaggtcgccagagtgctggctggcgcaaaatttgtcgtatcggttgataccggcctgagccatctcaccgccgcgctcgacagaccgaatattacgctatatggcccaacggaccctgggttaattggaggttatgggaagaaccaaatggcatgctgctcaccagaaaaaaacctggcgaatttagatgccacaagcgtatttggaaagattcattaa

SEQ ID NO: 371275 - DNA, 1047 bp, Salmonella enterica
atgaaaattttggtcattggcccgtcctgggtgggcgacatgatgatgtcgcaaagtctctatcgcacgcttaaagcgcgctatccccaggcgataatcgacgtgatggcgccagcctggtgtcgtccgttgttatcgcgtatgccggaagttaacgaggcgatacccatgccgctgggccacggcgcgctggaaatcggcgagcgccgtagattgggccatagcctgcgtgagaagcgctacgatcgcgcctgggtgctgccaaatacgtttaaatcggcgctggttcctttctttgccaatatcccgcaccgtaccggctggcgcggcgaaatgcgctatggcctgctgaacgatgcgcgcgtccttgataaagacgcctggccgctgatggtggagcgctacgtggcgctggcctatgacaagggggtgatgcgcacggcgaaagatctgccgcagccgctactctggccacagctcctggttagcgagggtgaaaagtcgttgatacgcagcgacttttcgctatcttctgaacgtcctctgatcggcttttgccccggcgcggaatttggcccggcaaaacgttggccgcactatcactacgccgaactggcaaagcagctcattaacgaagggtaccaggtcgtactgtttggctcggcaaaagaccatgaagccggaaatgagatcctggcggcgctgaatagcgagcagcaggcatggtgtcgcaacctggcgggggaaacccagctggaacaggccgtcattctgatagccgcctgtaaagccatcgtcaccaacgattccgggctgatgcacgtcgcggcggcgctcgaccgcccgctggtcgccttgtatggcccaagtagcccggatttcacgccaccgctgtctcataaggcccgggtgattcgtctcattacgggttatcacaaagtgcgtaaaggcgatacggcgcaaggctatcaccagagcctgatcgatatcacgccgcagcgggttctggaagagcttcattcgctgttgtcggaagagggcgtttaa

SEQ ID NO: 371276 - DNA, 933 bp, Salmonella enterica
atgatcatcgttaccggcggcgcgggctttatcggcagcaatatcgttaaggccctgaatgataaaggtatcaccgatattctggtggtggataacctgaaagacggcaccaagtttgtaaacctggtggatctgaacattgctgactatatggataaggaagatttcctgatccagattatgtccggagaagagctcggcgatatcgaagctattttccatgaaggcgcctgctcttccaccaccgagtgggacggcaagtatatgatggataataactatcaatactccaaagagctcctgcactattgtcttgaacgcgaaatcccgttcctctacgcctcttctgccgccacctatggcggtcgcacgtctgatttcatcgaatcgcgcgaatacgaaaaaccgcttaacgtttacggctattctaaattcctgtttgatgaatatgtgcgccagatcctgccagaagcgaactcgcagattgtcggtttccgctatttcaacgtctatggaccacgtgaaggccataaaggcagcatggcaagcgtggcatttcatctgaatacacagttaaacaacggcgaaagcccgaaactgtttgaaggcagcgaaaacttcaagcgcgacttcgtttacgtgggcgatgtggccgccgttaacctgtggttcctggaaagcggcaagtccggcatctttaacctgggcacaggccgtgcggaatctttccaggccgtcgccgacgcgacgctggcataccataaaaaaagcagcattgaatacattccgttcccggataagctgaaaggtcgctatcaggcgtttacgcaggcggatttaaccaatctgcgcaacgcgggctacgacaaaccctttaagaccgtcgccgaaggcgtcacggagtatatggcctggctgaaccgcgacgcgtaa

SEQ ID NO: 371277 - DNA, 1197 bp, Salmonella enterica
atgcgtggggatttttacaaacagttaaccaacgatctggaaaccgcccgggcggaaggattgtttaaagaagagcgcattattacgtctgcgcagcaggcggatatcaccgtggcggatggaagccacgttattaacttttgcgccaataactatctcgggctggcgaatcaccctgagctgattaatgccgcaaaagcgggtatggacagccacggtttcggtatggcgtccgtgcgttttatctgcggcacccaggacagccacaaagcgctggagcaaaagctggcaagcttcctcggcatggaagatgcgattctgtattcctcctgtttcgacgctaacggcggcttgtttgagacgttgctgggcgcggaagacgccattatctccgacgcgctgaaccacgcgtctatcattgacggcgtgcgtttgtgtaaagcgaagcgctatcgctatgccaacaacgatatggcagagctggaagcgcggctgaaagaggcgcgtgaggccggcgcgcgtcatgtcctgatcgccaccgacggggtgttctcaatggatggcgtcatcgccaatctgaaaggcgtctgtgatctggccgataaatacgatgcgctggtgatggttgatgattctcacgcggtaggctttgtcggcgaaaacggtcgcggttcccatgaatactgcgacgtaatgggccgcgtagatattattaccggtacgctgggcaaagcgttaggcggcgcatccggcggttataccgcggcgcgtaaagaggtcgttgagtggttgcgtcagcgttcccgcccatatctgttctccaactccctggcgccggcaatcgtggcggcttctattaaagtgttggagatggtggaagcgggcgcagaactgcgcgatcgcttgtgggcgaacgcccggcagttccgtgagcagatgtctgccgcgggatttacgctggcaggcgcggatcacgccatcatcccggtaatgctgggagatgcggttgtcgcgcagaaatttgcccgcgaactgcaaaaagagggcatttacgttaccggtttcttctatccggtcgtaccaaaaggtcaggcgcgtattcgtacccagatgtctgcggcgcatacgcctgagcaaattacgcgtgcggtagacgcgttcacgcgtattggtaaacaactgggcgtgattgcctga

SEQ ID NO: 371278 - DNA, 1026 bp, Salmonella enterica
atgaaagcgttatccaaactgaaagcggaagagggcatctggatgaccgacgttccggaaccggaagtcggccataacgatttgctgattaaaatccgtaaaacagccatctgcggtactgacgttcacatctataactgggatgactggtcgcaaaaaaccatcccggttccgatggtcgtggggcatgaatatgtcggcgaagtggtcggcatcggtcaggaagtgaaaggctttaaaatcggcgatcgcgtctccggcgaaggtcatatcacctgcggtcattgccgcaactgccgtggtggtcgtactcacctgtgtcgcaacaccaccggcgtgggcgtcaaccgtcccggctgcttcgcggaatatctggtcatcccggcgttcaatgcgtttaaaatcccggataacatttctgatgatttagcctctattttcgacccgtttggtaatgcggtgcatacggcgctgtctttcgatcttgtcggcgaagatgtactggtatcgggggcggggccaatcggcgtaatggccgccgcggtggcgaaacatgttggcgcgcgtcatgtggtgattactgacgtcaatgaataccgtctggagctggcgcgcaaaatgggcgtcacccgcgcggtcaacgtcgcgaaagagagcctgaacgacgtcatggcggagctgggaatgaccgaaggattcgatgtgggtctggagatgtccggcgcgccgccggcgtttcgtaccatgctggacactatgaatcacggcggtcgtattgcgatgctggggattccgccatcagatatgtctatcgactggacaaaagttatctttaagggcttgttcattaaaggtatttatggtcgtgagatgttcgaaacgtggtacaaaatggcggcgctgatccagtccggtctggatttgtcaccgattatcacccatcgtttctctattgatgatttccagaaaggttttgacgccatgcgttcaggccagtcaggaaaagttattctgagctgggattaa

SEQ ID NO: 371279 - DNA, 1035 bp, Salmonella enterica
atgaaaaatagtaaaaccaaagtgagtatcattgtcccgttatataatgcgggagcggattttaatgcttgcatggcgtcattaatcgcgcaaacgtggtcggcgctggaaattattattgtgaatgatggatcgacggatcattccgttgagatagcaaaacattacgcggaacattacccgcatgttcgactgcttcatcaggccaatgctggcgcatctgtcgcccgtaatcttggcctgcaagcagcgaccggcgattatgtcgcctttgtcgatgcagatgacctggtctacccgaagatgtatgaaacgctgatgaccatggcgcttaacgatgatctggacgttgcgcagtgcaacgcggactggtgcgtccgaaaaaccgggcacgcctggcaatctattccgaccgatcgcctgcgctccaccggggtattaagcggaccggattggttgcgtatggcgttggcctcgcggcgctggacgcatgttgtctggatgggcgtttatcgacgtgcgttaattaccgataacaatattactttcgttcccggactacatcatcaggacatattatggtcgacggaagttatgtttaatgccacgcgcgtacgttataccgaacaatcattatataaatatttcctgcatgataattcggtaagccgtttgcaaagacaaggcagtaaaaatcttaattatcagcggcattatattaaaattacgcggttattagaaaagctcaatcgtgattatgcccggcgtattccgatttacccggagtttcgccagcaaattacctgggaagcgttacgcgtttgtcatgcggtacgtaaagagcctgatattttgacccgccagcgtatgattgccgaaatttttacttctggcatgtatagacggatgatggctaacgtccgcagcgcgaaagcggcttatcagacgctgctctggtctttccggctgtggcaatggcgcgacaaaaccttgtcacaccgtcgtatggcccgtaaggcgctcaatctgtcttag

SEQ ID NO: 371280 - DNA, 963 bp, Salmonella enterica
ttgcctcagtttcgtcgctccattctcacgctggccactttgctggcgtttgcacatcccgttttcgctggcaagctcgccatcgtgattgatgattttggctatcgcccgcacacggaaaaccaggttctggcgctgccgccaaacatctccgtcgccgtactgcccaacgcgccgcacgcgcgcgaaatggcaactaaagcgcacaatagcgggcatgaggtgttaatccatctgccgatggcgccgctaagcaaacagccgctggagaaggatacgctgcgaccagatatgagcagcgatgagatcgagcgcattatccgcgaggcggtaaacaacgtgccgtatgccgtcgggcttaataaccacatgggcagcgcaatgacctccagcctgttcggtatgcaaaaagttatgcaggcgctggaacattacaatctctattttctcgacagcatgacgattggcaatagccaggcgatgcgcgcggcatccggtacgggtgtgaaagtgatcaagcgtaaagtgttcctcgacgatacgcaaaacgaggcggatatccgccgtcagtttaatcgcgctatcgaactggcccgtcgcaacggttccgctatcgcgattggtcatccgcatcccgcaacggttcgcgtgctgcaacagatggtttatcgcctgccggcggatatcaccctggtacgtccaggcagcctgctcaacgaaccgcaggtagatacgtcccgacctggtgtgacgccgcagaaaattgacgcgccgcgcaatcccttccgcggcgtgaagatgtgcaagccgaaaaaaccgctgcaaccggtctacgctacgcgctttttcagcgtcatcggcgagagcattacgcaaagttccgtggttgtctggtttcagcaccagtggcaaggctgggggaaaatcgccgcgcctaaaaacgtgagcgctaagacagattga

SEQ ID NO: 371281 - DNA, 1284 bp, Salmonella enterica
atgaggggaaaggcgattaacaccattcaacaggccgtgaaactaaaaacgttttcagtcaggcctttgttctacgccagcgtacttagcgctggcgtattgttgtgcgccttttccgcccacgcggatgaccgtgatcaactcaaatctattcaggccgatatcgccgcgaaagaacgcgacgtacgccagcagcagcaacagcgcgccagcctcctggcacaactgaaagcccaggaagaggccatctcggccgcagcgcgtaagctgcgcgaaacgcaaagcactctggatcagttaaacgcgcaaattgatgagatgaacgcctcaattgccaaactggagcagcaaaaagccagccaggagcgtaatctcgccgcgcagttggacgccgctttccgccagggcgaacacaccggcattcagcttattcttagcggagaagagagccagcgtgggcaacgcctgcaggcctacttcggctatctgaaccaggcgcgccaggagactatcgccgaactgaagcagactcgcgaacaggtcgccacgcaaaaagccgagctggaagagaagcaaagccaacaacaaacgttgctgtatgagcagcgcgcccaacaggcgaagctggagcaggcgcgtaatgaacgtaagaaaacgcttgccggactggagtcgtctattcagcaaggccagcaacagttaagcgaactgcgcgccaacgaatcacgcctacgcaacagtatcgcgcgggcggaagcggcggccaaagcgcgagcggagcgtgaagcccgcgaagcgcaggcggtacgcgataagcagcaggaagcctcgcgtaaaggcagcacctataagccgacggaaagcgagcgttcgctaatgtcccgcaccggcggtctgggcgcgcctcgcggtcaggcatactggccggtacgcggcccgatattgcatcgctatggcgaacggctgcagggtgagctacgttggaaggggatggtgatcggcgcgtcggaaggcaccgaggtcaaagccatcgccgacggcagggtgattctggcggactggctgcaaggctatggcctggtggtggtcgtggagcatggtaaaggcgatatgagcctttacggctataatcagagcgcgctggtcagcgtaggcgcgcaggtacgcgccggacaacctatcgcccttgtgggcagtagcggcggtcagggcagaccttcgctttatttcgaaattcgtcgccagggtcaggccgtcaatccacagccgtggttgggaagataa

SEQ ID NO: 371282 - DNA, 1545 bp, Salmonella enterica
atgtcggtttctaaaaaacctatggtactggtgattctggatggctacggctaccgtgaagaacagcaggataacgctatcttaaacgccaaaaccccggtgatggatgctctgtgggcaaaacgtccgcataccctgatcgacgcatccggtctggaagtgggtctgcctgaccgccagatgggcaactccgaagtgggccacgttaacctgggcgcaggccgcatcgtttatcaggacctgacgcgtctggacgttgaaattaaagaacgtactttctttgctaacccagtcctgaccaatgcggtagaccaggcgaaaaacgccggtaaagcggttcatattatgggtctgctgtccgcgggcggcgtccacagccacgaagatcacattatggcgatggtggagctggccgcagagcgcggcgcagaaaaaatctatctgcacgccttcctcgatggtcgcgacacgccgccgcgcagcgctgaagcctcgctgaaaaaattcgaagacaaattcgccgcgctgggcaaaggccgcgtggcgtctatcgtcggtcgttactacgctatggaccgcgacaaccgttgggatcgcgtggaaaaagcgtatgatctgatgaccctggcgcagggcgaattccaggcagataccgctgtggctggcctgcaggccgcttacgctcgtgatgaaaacgatgagtttgtcaaagcgaccgttatccgcgccgagggccaggctgatgcggcgatggaagacggcgacacgctgattttcatgaacttccgcgctgaccgcgcgcgcgaaattacccgcgctttcgttaatgctgatttcgacggctttgcgcgtaagaaagtggttaatctgaacttcgtgatgctgaccgaatacgccgccgacatcaaaactgccgttgcctacccaccagcgtcgctggcgaatacctttggcgaatggatggcgaaaaacgacaaaactcagctgcgtatttccgaaacggaaaaatatgcgcacgtaacctttttctttaacggcggcgtagaagaaccgtttgctggcgaagagcgcattctgatcaactccccgaaagtggccacttatgacctgcaaccggaaatgagctctgcagaattgactgaaaaattggtcgcggcgatcgaaagcggtaagtacgacaccatcatttgtaactatccaaacggcgatatggtcggtcataccggcgtgatggaagccgccatcaaagcggtggaagcgttggataactgcattgaacaggtaacaaaagcggttgagtccgttggtggacaactgttgattaccgcggaccacggcaacgcggagcagatgcgcgatccggcgaccggtcaggcgcataccgcccacaccaacctgccggtgccgctgatttatgtcggcgagaaaaacgtgaaggcggttgaaggcggcaaactttcagacattgcgcctaccatgctgtcgctgatggggatggaaatcccgcaagagatgactggtaagccgctgttcatcgtggaataa

SEQ ID NO: 371283 - DNA, 432 bp, Salmonella enterica
atgcaagaaattatgcaatttgttggccgtcatcccatactgagtatcgcctggattgcgttactggtggcggttttatttaccacgttcaaaggtctgacttcaaaagttaaggtgattacacgcggcgaagccacgcgccttatcaacaaagaggacgccgttgttgtggatttacgtcaacgtgacgatttccgtaaaggccatatcgctggcgcgaccaatttgctgccgagcgaaatcaaagccaacaatgttggcgaactggaaaagcacaaagacaagccgattatcgtggtcgacggttctggtatgcagtgccaggaatccgctaacgcgctgacaaaagccggctttgaaaaggtctttgtgttgaaagaaggcgtagcaggctggagcggcgagaatctgcctctggtgcgcggtaagtga

SEQ ID NO: 371284 - DNA, 252 bp, Salmonella enterica
atggccaatattgaaatctacaccaaagcaacctgcccgttttgccatcgtgcaaaggcgctgttaaacagcaagggcgtgagtttccaggaaattgcgattgacggcgacgccgtgaagcgtgaagagatgatcaaacgtagtggccgaacgacggttccgcaaatttttattgatgcacagcacattggcggttgtgacgacttgtatgcgctggatgcgcgtggtggactggatccgctgttgcgttaa

SEQ ID NO: 371285 - DNA, 468 bp, Salmonella enterica
atgtcagaacaaaataacactgaaatggctttccagatccaacgtatctataccaaggatgtttctttcgaagcgccaaacgcaccgcatgttttccagaaagattggcagccagaggttaaactggatcttgatacggcatcttcccaactggcggatgacgtttatgaagttgtgctgcgtgttaccgtaacggcttccctgggggaagaaaccgcgttcctgtgcgaagttcagcaggccggtattttctccatcagcggtattgaaggtactcagatggcgcattgcctgggtgcatactgcccgaacattctgttcccgtatgctcgcgagtgcatcaccagcctggtttcacgcggtacgttcccgcaactgaaccttgcgccggtcaactttgatgcgctgttcatgaactatttgcagcagcaggctggcgaaggtactgaagaacatcaggatgcctga

SEQ ID NO: 371286 - DNA, 1020 bp, Salmonella enterica
atgaaccaaagtaatgcgtcaatgacagtcatcggtgccggctcgtacggcaccgctcttgccatcactctggcgagaaacggccaccaggttgtcctgtggggccacgacccaaaacatatcgcgaccctggagcacgatcgctgcaacgtcgcgttccttcccgatgtgccttttcccgatacgttacacctggaaagcgacttagcaaccgcgctggcggccagtcgtaacattctggtggtggtgccaagccatgttttcagcgacgtgctgcggcagattaaaccgctgatgcgtccggatgcgcgtctggtatgggcgaccaaaggcctggaagcggaaacggggcgcctgttgcaggatgtcgctcgcgaggcgttaggcgatcaaatcccgctggcggtgatttccggtccgacgttcgctaaagagctggcggcgggtttgccgacggcaatctcgctggcctcaaccgatgagacctttgccgacgatctccagcaactgttgcactgcggaaaaagttttcgcgtctatatcaatgcggattttatcggcgtgcagcttggcggcgcggtgaaaaacgtgattgcgattggcgcggggatgtctgacggcatcggcttcggcgcgaacgcccgcacggcgctaatcacgcgtggactgaccgaaatgtcgcggcttggcgcagcgcttggtgccgatcccgccacctttatggggatggcgggtttaggcgatctggtgctgacctgtaccgacaaccagtcgcgcaaccgtcgttttggcatgatgcttggccagggcatggacgttaaaggcgcgcaggataagattggccaggtggtcgaaggctatcgcaatacgaaagaagttcgtgaattggcgcaccgttttggtgttgaaatgccaataaccgaggaaatttatcaagtattgtattgcggaaaaaacgcgcgcgaggcagcattaacgttattaggtcgcgcccgcaaggaagagctgagtcgccactag

SEQ ID NO: 371287 - DNA, 822 bp, Salmonella enterica
atgccgtgtgaagaactggaaatcgtctggaagaatattaaagctgaagcccgcgctttagctgactgtgagcctatgttggccagtttttatcacgccacgctactcaagcatgaaaatctgggcagtgcgctgagctatatgctggcaaataaactggcttcgcccatcatgcccgctatcgctatccgtgaagtagttgaagaagcctatgccgccgacccggaaatgatcgcgtcggcagcctgcgatattcaggccgtgcgcactcgcgatccggcggtggataaatactccacgccgctgttatatctgaaaggctttcatgcgctacaggcctaccgcattggtcactggttgtggaataaaggtcgccgcgcgctggctatcttcctgcaaaatcaggtttcggtctcgtttcaggtggatattcacccggcagcgaaaattggccgcgggattatgctcgaccatgccaccggtattgtggtgggggagacggcggttattgaagatgatgtgtcgatcttgcaatccgtcaccctgggcggtaccgggaaaacgagcggcgatcgtcatcctaaaatccgcgaaggcgtgatgattggcgcgggcgcgaaaattcttggcaatatcgaggtggggcgcggcgcgaaaattggcgcaggttccgtcgttttacagcctgtcccgccgcacactaccgccgcaggcgttccggcgcgtattgtcggcaagccgggcagcgataagccgtcgatggatatggaccagcatttcaacgggctacaccatacgtttgagtatggcgacggcatctga

SEQ ID NO: 371288 - DNA, 1311 bp, Salmonella enterica
atgaacacaataataaagcgcacaaaagtgcgtcataccattcttatatttttatttcttgctaccgtatttaattatgcggatcgcgcaactctatccgtagttgccccaataatgaataaagaattaggttttgatccggaagcgatgggcctggccttctcctcatttggtattgcctatgtcattatgcaactacccggcggttggctattagaccgctacggttcacgactggtttacggttgcgcattgattggctggtcgttagtaaccatgtttcagggaacgatctatctgtatggcagcccattaattgtactggttattctacgtctgctgatgggcgcgattgaagcgcctgcctttccggcgaacagtcgtttaagcgtacaatggtttcccaataatgaacgaggtttcgttacttcagtttatcaggctgcgcaatatatctcgctgggcattatcaccccgctaatgacgatcattctgcataatttaagctggcattttgtcttctattatattggcgctattggcgtgatgctcggtatattctggttaatgaaagtcaaagatccgatgcaccatccaaaagttaatcaagcggaaattgactatattcgtagcggtggtggcgagccctctctgggctgtaaaaaggagccgcagaaaataacgttcgcgcagattaaaaccgtctgtgttaaccggatgatgatcggtgtttatatcgggcaattctgcgtcacctctatcacctggttcttcctgacctggttcccgacctatctgtaccaggcgaaaggcatgtcgattctgaaagtcggttttgtggccagtattccagccattgccggttttattggcggcctgctcggcggcgtgttctccgactggctactcaaacgcggctatagccttaccgtcgcgcggaaactgcctgttatctgcggtatgttgctctcttgcgtaattgtgatcgccaactacacctcttcagaatttgtggtcattgcggcgatgagtctggtcttttttgccaaagggtttggtaacctgggctggtgcgtactcagcgacacctcgccgaaggaagttctgggtattgccggcggcgtatttaacatgtgcggcaatatggcaagcatcgttacgccgctggtcatcggcgtgattcttgccaatactcagtcgttcgactttgccattttatacgttggctcgatgggacttattggtctcatttcatatctgtttatcgtcggcccgctggatcgcattacgctgacatcatccgcagcctga

SEQ ID NO: 371289 - DNA, 1197 bp, Salmonella enterica
atggctttaagcgcgaattccgacgccgtaacgtatgcaaaagcggcgaataccagaaccgcggcagaaaccggcgatcgtatcgaatgggtgaagctatcactggcttttctaccgctggcgacgccagtgagtgacgcgaaggtactgaccgggcgccagaaacctttgaccgaagtggcaatcatcattgccgaaatccgcagtcgcgacggctttgagggcgttggttttagctactccaaacgtgctggcggccagggtatttatgctcacgccaaagagatagccgataatctactgggcgaagatcccaatgatatcgacaaaatatacaccaagctgctgtgggccggagcctcggtggggcgtagcgggatggcggtacaggctatctcccctatcgatatcgccctatgggatatgaaggctaaacgtgccggtctgccactggcaaaactgttgggcgcgcaccgcgactccgttcagtgttacaacacctcaggggggttcttgcatacaccgctcgatcaagtgctgaaaaatgtggtgatttcccgcgaaaatggcattggcggtattaagttgaaagtcggacaacccaactgcgctgaggatattcgccgcttaaccgcagtacgtgaagcgcttggggatgagttcccgttaatggttgacgctaaccagcagtgggatcgcgaaacggctatccgcatggggcgtaaaatggaacagttcaatcttatctggattgaagaaccattagatgcctacgacattgaaggccacgcccagcttgccgccgcgctggatacgcctatcgccaccggggaaatgctgaccagtttccgggaacacgagcagttgattctgggcaatgccagcgatttcgttcagccagatgcgccgcgtgtcggcggtatctctccgttcctgaagattatggatctggcggcgaaacacgggcgtaagctggcgccgcactttgcgatggaagtacacctgcacctttccgcagcgtatcccctggagccgtggctggaacatttcgagtggctgaacccattattcaacgagcaacttgagctgcgcgatggccgcatgtggatttccgatcgtcatggtctgggtttcacgctcagtgaacaagcgcgccgctggacacaattaacatgtgaatttggcaaacgcccttaa

SEQ ID NO: 371290 - DNA, 1005 bp, Salmonella enterica
gtgaagagaaccaaatcacctcgtgcgccgacgctggaagatgtagcacgtagcgccgggctgtctccgatgacagtcagccgggcattgaattcgccacaactggttcgccccaaaacggttgagaaagtcatgcaggcggttcgcgtcacaggctacatacccaacgcgttagccggtggtctggcgtcgcgacggagtaaattaatcgctgtcgtcgtgccgcaaattaacaacaacatgtttgtcgataccatccagtcactgagcgatgaactggcccgacgcggatatcacatattgctgtgcgtggcgggatataccgaacaaacggaagcggagttggtggcgacactgctttcccgccgccccgatggcgtggtgcttaccgggatccatcacacgatagaactgaaaaaggtcatcctgaacgcggctattccggtggtggaaatttgggacttaacgcccacgccgcttgatatgctggtcggtttttcccatgaaaaagtcgggcaggcgacgggggagtatcttttgagtaagggctatcgtcgtcccggcttgttgtggaccgccgatcgccgagccgcgcaacgtaagcaggggttatgtagtgttcttcaacgccacgctattcatgccgtaccgcaggtagatgtcccccttccggcatcgctttcgctggggcgcagcggtttaagccagctttttgacgaagggacgtttgatgtcattgtttgcagttctgataccctggcccagggggcgatgatggaggcggaaagccgtggtttgcgcatcccgcatgatttagcggttattggttttggcgaccttgattttgccgccagcaatcgaccgtcaattactaccgtaagcgttgacagacgcgccattggccagcgcgccgctacgctgttggccgatcgtattgaacagaaaccgtgcgcagaagctattgtggatattggctttcatttgattgagcgagagtccgcataa

SEQ ID NO: 371291 - DNA, 474 bp, Salmonella enterica
atgcttaacatcgtactcttcgaaccagaaatcccgccgaataccggcaacatcattcgtctttgcgccaataccggctttcgtctgcacatcatcgaaccgatggggtttacctgggatgataagcgcttacgccgcgcagggctggactatcacgaattcgccgcggttcagcgccatcacgattatgccgcctttgtcgccgccgaaaacccgcagcgcctgtttgcgttgacgacaaagggcacgcccgcccatagcgccgtaagctatcaggatggcgattatttgatgtttggcccggaaacgcgcggcctgcccgccagcattctcgatgcgttgcctaaagagcagaagattcgcattccgatgatgccggatagccgtagcatgaacctgtcgaatgcggtgtcggtggtggtgtatgaagcgtggcgccagttaggatactccggcgcggtattacggtcgtaa

SEQ ID NO: 371292 - DNA, 1191 bp, Salmonella enterica
atgattatttcagcagccagcgattatcgcgccgcagctcagcgcacgttgcctcctttcctcttccactacatcgacggcggcgcgtatgcggaatataccctgcgccgaaatgtggaagacctgtcgcaagtcgctctgcgccagcgcgtgctgaaaaatatgtccgatttaagcctggaaacgaccctgtttaacgaaacgttgtcgatgccggtggcattagcgccggtaggcctgtgcggcatgtacgcccgtcgcggcgaagtacaggccgccgccgccgcagacgcaaagggcattccgttcaccctttccaccgtctccgtctgtccgatagaagaagttgcaccaaccattaagcgcccgatgtggttccagctttatgtgctgcgtgaccggggctttatgcgcaacgcgcttgaacgtgcgaaagcggcgggttgctccacgctggtctttaccgtggatatgccaacgccgggcgcgcgctaccgtgacgcccactccgggatgagcggcccaaacgccgccatgcgccgttactggcaggcggtgatgcaccctaaatgggcgtgggatgtcggcctgaacggtcgcccgcatgatttaggcaatatttccgcctatctgggtaaaccgaccggccttgaggactatatcggctggctggcaaataacttcgatccgtccatctcctggaaagatctggagtggatacgcgaattctgggacggcccaatggtgatcaaagggatcctcgatccagaagatgcccgcgatgcggtacgtttcggcgctgacggtatcgtggtgtcgaatcacggcggccgccagctcgatggcgtgctctcttccgcccgcgccctgcccgccattgccgatgcggtgaaaggcgatatcgccattctggcggatagcgggatccgtaacgggctggatgtcgtgcgtatgattgcgttgggggccgataccgtactgctgggtcgggcctatctctacgcgctggcgacggcaggaaaagcgggtgtcgccaatctgctggacctgatcgagaaagagatgaaagtcgccatgaccctgaccggcgcgaaaaccattagcgaaatcagtggcgattcactggtgcaggaactggggaaaagtttgcccgccgcgctggcgccaatgagcaaaggcgataccgcctga

SEQ ID NO: 371293 - DNA, 777 bp, Salmonella enterica
gtgattgtgatgccaaaacgcctgtcagacgagattgcctctcgcgtgcgggcgctgattgaagaacaaaacctggaagcgggcatgaaattgcccgccgagcgccagttggctctacagcttggcgtatcacgcaactctttacgcgaagcgctggcgaagctggtcagtgaaggcgtgctggtgagtcgtcgcggcggcgggacatttgtccgctggcagcacgaaacctggtctgaacagaatatcgtgcaaccgctgaaaatgctgatggcgaacgatccggactacagtttcgacattctggaggcccgccacgccattgaagccagtacggcctggcacgccgccatgcgtgccaccgctgccgacaaagagaaaatcagactctgctttgatgcgacgctcagcgaagacccggatctcgcctcccaggccgacgtgcgctttcatctggcgatcgcggaagcctcgcacaatgtggtgctgttgcaaaccatgcgcggtttcttcgacgtcctgcaatcctccgtcaaacagagtcgccagcgtatgtatctcgttccgcccgtattctcaaagctgacggaacaacaccaggcagtgatggacgccattctggacggtaacgccgagggcgcgcgtaaagcgatgatggcgcacctcagttttgtccacaccacgattaaacgatttgatgaagaccaggcccgccaggcgcgtattacccgcctgcccggcgaccataatgagatgaccagggagaataaatcatga

SEQ ID NO: 371294 - DNA, 1656 bp, Salmonella enterica
atgaacctctggcaacaaaactatgacccggcgggtaatatctggctttccagcctgatcgcatcgctcccaatcctgttcttctttttcgccctgattaaactcaagctgaaaggctatgttgccgcttcgtggacggtggttatcgcgctcgccgtcgcgctgctgttctataaaatgccggtcgatcacgcgctggcatcggtcgtgtatggcttcttctacgggctatggccgatagcctggataatcatcgccgcggtctttgtctataaaatttcggtcaagaccgggcagtttgacattattcgctcgtcaattctgtcgattacccccgaccagcgtctgcaaatgctgattgtcggcttctgcttcggcgcgttccttgaaggcgcggcaggtttcggcgcgccggtggcgataaccgccgcgctgctggtgggtctgggctttaatccgctgtatgcggcagggctgtgcctgattgtaaacaccgcgccagtcgcctttggcgcgatggggatcccgattctggttgccggacaggtcacgggcctggacagctttgaaatcggtcagatggtcggtcgtcagctaccgttcctgaccattatcgtcctgttctggattatggcgattatggacggctggcgcggcgtgaaagaaacctggcctgcggtgatggtcgctggcggctcgtttgctatcgcccagtatctcagctccaactttatcgggccggaactgccggacatcatctcttcactggtgtctctggtgtgtctgacgctgttcctcaaacgctggcagccggtacgcatcttccgcttcggcgatatgggcgcgtcgcaggtcgatcagacgctggcccgcacccgctatacgacagggcaaattgttcgcgcctggtcgccgtttctgttcctgaccgccacggtcactctctggagcgtaccgccgtttaaagcgttgtttgcccccggcggcgcgctgtatgactgggtaattaacgttccggtaccgtatctcgataaactggtcgcccgtatgccgccggtcgtacacgaagcgaccgcttacgcggcggtgtataaatttgactggttctccgccaccggcacggcgatcctgtttgccgcgctgttgtctatcgtctggctgaaaatgaagccctcagccgcaatccagacctttggcagcacgctgaaagagctggcgttgccgatttactccatcggcatggtgctggcgttcgcgtttatctcgaactattccgggctttcctccacgctggcgttagcgctggcgcacaccggcagcgccttcacgttcttctcgccgttcctcggctggctgggtgtcttcctgaccgggtccgacacctcatctaacgcgctgtttgcctctctacaggctaccgcggcgcagcaaatcggcgtctctgatgtgctgatggtggcggcgaacaccactggaggcgtaaccgggaagatgatctcgccgcagtctatcgccatcgcctgcgcggcggtgggactggtagggaaagagtccgatctgttccgttttaccgtcaaacacagcctgatcttcacctgtatggtgggcgtgatcactacgcttcaggcctatgttttaacctggatgattccgtga

SEQ ID NO: 371295 - DNA, 4386 bp, Salmonella enterica
atgaatagaatatttaaagtcctctggaatgccgctacgggaacatttgttgtcaccagcgaaaccgcaaaaagccgcggcaaaaaaaacggccgcagaaagctggcggtttccgcactcatcggtcttagcagcattatggtttctgcggatgcactggccaacgcaggaaacgatacaggcgacggcgttactccaacgggtacccagactggaggaaaagggtggattgcaattggtaccgatgccacagccaatacttacaccaacgttgatggcgcaagcgccgcaatgggttataaagcctccgcgatggggaaatggagtaccgccattggttcctacagccagtccaccggcgactcttcgttagcgcttggcgtaaaatcggtttctgccggtgaccgggccattgcaatgggcgcctcatcctcagccagtggaagttattcaatggcaatgggtgtgtatgccaattcgagcggcgcaaaatcggttgcgttaggttataaatctgtcgcgagcggagcaacttcctctgcattaggttatcaagctactgcgagcggcgacgacagcgctgcttttggtaatggcgcaaaagcggtaggcaccaactcagttgcccttggctcgggctctattgcccaggaagacaattccgtcgccgtgggtaacagcaccactcagcggcagatcacctacgttgctaaaggcgacatcaattccaccagtaccgatgccgttacaggtgcgcaaatttattctttaagtcaatccgtcgccgatcgactcggcggaggggcttccgttaattctgatggtacagtgaatgcgcccctctacgaggtaggcacaggcatctacaataacgtaggcagtgcattaagcgcacttaacacgtctatcactaacacagaggcctctgtcgcaggattagccgaagacgcgctgttgtgggatgacagcaccagcgcctttagcgctagccacacgggaaacgccagcaaaatcaccaatctggcggcaggcaccctggccgcagacagcaccgacgccgttaacggctcccagttgtttgatacgaacgagaaagtggatcagaacactgctgatatcaccgccaataccgacagcattaaccagaacaccgctgatatcaccgccaataccgacagcatcaatcagaacacaaccgatatcgccgccaatacgaccagcatcaatcagaacaccactgatatcgccaccaacaccaccaatatcaacagtctgagcgactccgtcaccacgctcaccgatgatgcactgctttgggatgcagcctctggcgcattcagcgctaagcacaacggaaacgacagcaaaatcaccaatctggcggcgggtaccctggccgctgacagcaccgacgccgttaacggctcccagttgtttgatacaaatgagaaagtggatcagaacaccgctgatatcaccaccaataccaacagcatcaatcagaacaccactgatattgccaccaacaccaccaatatcaacaacctgagcgattccatcaccacgctcaccgatgatgccctgttgtgggatgcagcctctggcgcattcagcgctaaccacaacggaagcgccagcaagatcaccaatctggcggcgggcaccctggccgcggacagcaccgatgcggttaacggctcccagttgtttgccaccaacgaaaatgtgtctcagaacaccgctgatatcaccaccaataccaacagcatcaatcagaacaccactgatattgccaccaacaccaccaatatcaacaacctgagcgattccatcaccacgctcaccgatgatgccctgttatgggatgcagcctctggcacattcagcgccagccgtagcggaagcgccagcaagatcaccaatctggcggcgggcaccctggccgcggacagtacagacgcggtaaacggctcccagttgtatgaaaccaaccagagggtggatcaaaacacctctgctatcgcagatattaatacgtccatcaccaatcttagctctgacaacctgagctggaatgagacaacgagttcgttctctgccagccacggaagtagtacgacaaacaaaatcaccaacgttgctgccggagagctgtctgaagaaagtaccgacgccgttaacggatcgcagctgttcgaaaccaatgaaaaagtggatcagaacacgaccgatatcgccgccaataccactaacatcactcagaacagcaccgcgattgagaacctgaatacttctgtctccgacattaatacgtccattaccggcctcactgataacgctctgttatgggacgaagacatcggcgctttcagcgcaaaccacggtggaagcaccagtaaaataaccaatgtcgccgccggggcgctttctgaggacagtacagacgcggtaaacggctcacagttgtatgaaactaaccagaaggtggatcaaaacacctctgctatcgcggatatcaatacgtccatcaccaatcttggtaccgatgcactgagctgggatgacgaagaaggcgcgttcagcgccagccacggtaccagcggtaccaataagataaccaatgtggctgcaggtgaaatcgccagtgacagtactgacgctgttaatggctctcagctctatgaaactaacatgctgatttctcagtatagtgaatctattagccaactagccggcgataccagcgaaacctatatcacggaaaatggtaccggcgtgaaatacatccgtacgaatgataatgggcttgaaggccaggatgcatacgcaacgggtaacggcgcaacggcagtaggttacgacgccgtcgcctctggcgctggcagtctggctcttggccaaaacagcagcagcagcattgagggcagtatcgctttgggcagtggctccacctctaaccgcgctattacaaccggtatacgagaaacgagcgcaacaagcgatggcgtcgtcattggctacaatacaacagacagagagttgctgggcgcgttgtcattggggacggatggagaaagctatcgtcaaattaccaacgttgctgacggctctgaagcgcaagatgcggtaacagttcgtcagttacaaaatgccattggtgcggtcactactacaccgaccaagtactaccacgcaaactcaacggaagaagattcactggctgtcggaactgactcactggcaatgggtgcgaagaccatcgtcaatgctgatgcaggtattggtattggtctgaatacactggtgatggctgatgccatcaacggtattgctatcggttctaacgcacgcgccaatcatgcaaacagtattgcaatgggtaatggttctcagaccactcgcggcgcacagactgactacaccgcctacaacatggacacaccgcagaactctgtcggtgagttctctgtcggcagtgaagacggtcaacgtcagatcactaacgtcgcggcgggttcggcagataccgatgccgttaacgtgagtcaattgaaagtaacggacgcgcaggtttccaggaatacccagagcattactaacctgaatactcaggtatcgaatctggatacccgcgtcaccaatatcgaaaacggcattggcgatatcgtcactaccggtagcaccaagtacttcaagaccaacaccgatggcgcagatgcaaatgcccagggtgcggacagcgtcgcgattggctctggctctattgctgccgctgaaaacagcgtggcgttaggcacaaattccgtcgcagatgaagctaatactgtgtctgttggctcttctactcaacaacgccgtattaccaacgttgccgcaggggtgaacaacactgacgcggttaatgtggcgcaactgaaagcctcagaagcaggctccgtgcgttatgaaaccaatgcagatggctcggttaactatagcgtgctcaacctgggagacgggagtggcggcaccactcggatcggcaatgtttcagcggcggtgaatgatacggatgcggttaactatgcgcaattgaaacgcagcgtcgaagaagcaaacacctataccgaccagaaaatgggggaaatgaacagcaaaatcaaaggagtagaaaacaagatgagcggcggtatcgcttcagcgatggcgatggccggtctgccacaagcctacgccccgggcgccaacatgacctcgattgctggcggtacgtttaatggtgaaagtgccgtcgccattggtgtctccatggtaagtgaaagcgggggctgggtgtataaattgcaaggaaccagcaacagccagggcgattactctgcggccattggcgcgggcttccagtggtaa

SEQ ID NO: 371296 - DNA, 684 bp, Salmonella enterica
atgcacaaaaatggaaaatttatccccctgcttgcgttgggattcacattctttttatctggttgtgattacttcgcagataaacaccttgttgaagaaatgaaagaacaacaaaaagaacaagaaacaaagataaacctgttagaaaaacaacaaaaagaacaagaagcaaagataaatctgttagaaaaacaacaagctacgattatcaacacaaccaaaaaggtcaccgaagtcgttggccgcgttgaacgcaaacaacggctattcgactatacagaactggacccatcacaaacgcactattttattattaacaacggcaatatcggattagccgggcgtattctatctattgagccaatagataatggaagtgttattcatcttgatttagttaacttactcagcattccggtatcaaaccttgcgtttaatatgacatggggtacgaaaaaaccttccgaggcaaaagatctgcctcgctggaaacaactcctgctcaacacgaaaatggactcgacaatcgaactcttaccgggagcatggacaaacgtcacgctaacattaaaaggcgtatcgcccaataatcttaagtatctaaaaataggtattgacatggagaatgtcatattcgacagcatacaacctattaacgatacaaaaaagaagccaaaaaaataa

SEQ ID NO: 371297 - DNA, 363 bp, Salmonella enterica
atgaaagaagttgaaaaaaacgaaattaaacgcctgagcgatcgtcttgacgctattcgccaccagcaggcaggtctctctctggttgaatccgccgataaatacgcggagctggaaaaagaaaaagagacgctggaagcagaaattatccgtctgcgcgaagtacacagccagaaactgagtaaagaagcgcagaagctgatgaacctgccgtttcgccgcgcgatcactaaaaaagagcaggccgacatgggcaagttgaagaaaagcgtgcgtggcctgattgttgtccacccgatgacggcgctgggccgggaaatggggctcaaagagatgacaggtttcgcgaagagcgagttctaa

SEQ ID NO: 371298 - DNA, 210 bp, Salmonella enterica
atggcaaaaataggtgagaacgtaccacttcttattgataaagccgtcgattttatggcgtccagccaggcgttccgtgaatacctgaataaaacgccgccgcgtgattatgttccttccgaggtgccgtcggagagcgcgcccatttatttgcagcgtctggaatattaccggcggctgtaccgaccaaaagaagaagaaagaggttaa

SEQ ID NO: 371299 - DNA, 591 bp, Salmonella enterica
atgacgcagaatccggcgcaggttagcctgcgcccaaataacagattgtcagatatgcaggcaataatggaacaaacccaggcctttgaaaatcgtgtgcttgagcgtctgaatgctggcaaaaccgtacggagcttcctgattaccgccgtcgagttattgaccgaggcggtgaatattctggtgctccaggtgtttcgcaaagacgactatgccgtgaaatacgctgtggaaccgttgctggatggcgacgggccgctgggcgatctttcggtacgtctgaaacttatctatggcctgggcgtactcagccgcaccgaatatgaagatgcggagctgttaatggcgctgcgcgaagagctgaatcacgacggcaatgagtacgcctttaccgacgatgaaatcctcgggccgtttggcgaactgcactgcgtcatggcgctaccgccgccgccgcattttgatacgtccgacgcggcgctatacgccatgcaaattcagcgctaccagcaggcggtgcgttcgacgatggtcctctctctgaccgagctgatttctaaaatcagcttaaaaaaggcctttcaaaagtaa

SEQ ID NO: 371300 - DNA, 1149 bp, Salmonella enterica
atgaaagcattacattttggcgcaggtaatatcggtcgtggctttatcggcaaactgctggctgacgcggggatacaactgacgtttgcggatgtaaatcaggtcgtactcgatgccctgaatgcccgtcatagctatcaggttcatgttgtgggtgaaaatgagcaggtggataccgtttccggcgtcaacgctgtcagcagcatcggcgatgatgttgtcgacctgattgcccacgttgatttaatcactactgccgtgggtccggttgtgcttgagcgtatcgctccggccatcgctaaagggctggcaaaacgtaaggcgcagggcgtggatgccccgctgaatatcatcgcctgtgaaaacatggtgcgcggcaccacacagctgaaaggccacgtaatgaatgcgctggcggatggcgataaagcctgggttgaacagcacgtcggttttgtcgattccgccgttgaccgcatcgtgccgccatctgcttctgcgacccatgacccgctggaagtgacggtagaaaccttcagcgagtggatcgtcgataaaacccagtttaaaggcgcgttgccaaacatcccggggatggagttaacggataacctgatggcatttgtcgaacgtaaactcttcacgctgaacacaggtcatgctataaccgcgtacctcggcaaattagccggtcatcaaaccattcgcgacgctattctcgatgagagtattcgcgcggtggtgaaaggcgcgatggaagaaagcggcgcggtgctgatcaaacgctacggttttgatgccgacaaacatgcggcatacattcagaaaatcctcggtcgttttgaaaacccgtatctgaaagatgacgtcgaacgcgtaggtcgtcagccgctacgcaaactcagcgcgggcgaccgtctgatcaaaccgctgcttggcaccctggaatatggtctgccgcatgtgaatctggtcaaagggatcgcggcggcgatgcatttccgtagcgatgaagatccgcaggcgcaagagttggcggcactgattaccgaaaaaggcccgcaggccgcgctggcgcaaatttccgggctggatgccaatagcgatgtggtggcggaggcggttaacgcatataacgcgaccaaatga

SEQ ID NO: 371301 - DNA, 1917 bp, Salmonella enterica
atgtcatccgatattaagatcaaagtgcaaagctttggtcgattcctcagcaatatggtgatgcctaatatcggcgcgtttatcgcgtggggtattatcaccgcattatttattccaacagggtggttgcctaacgaaacgctggcgaaactggttggtccgatgatcacctacctgctgccgctgctcatcggttataccggcggtcgtctggttggcggcgaacgcggcggcgtggtgggcgctatcactaccatgggcgttattgtcggcgcggatatgccgatgttcctcggctcgatgatcgccggtccattaggcggctactgcattaagaaattcgacagttgggtagacggtaagatcaaatccggttttgagatgctggtgaacaacttctccgctggcatcatcggtatgatcctcgccatcctggcgttcctcggtattggtccggcggttgaagtcctgtccaaaattctggcggcgggcgttaacttcatggtggcgcacgatatgctgccgctggcgtccatttttgttgaaccggcgaaaatcctgttcctcaataacgcgattaaccacggcatcttctcaccgctgggtatccagcagtcccatgagatgggtaaatccatcttcttcctgattgaagctaacccgggtccagggatgggcgtcctgctggcgtacatgttcttcggtcgcggcagcgctaaacagtctgcgggcggcgcggcaattatccacttcctgggcggtatccatgagatctacttcccgtacgtgctgatgaacccacgcctgattctggcggtgattctcggcggtatgactggcgtattcaccctgaccatcctgaacggcggtctggtttctccggcttctcctggctccattctggccgtactggcgatgacgccaaaaggcgcttacttcgctaacatcgctgccatcgtggcggcaatggcggtctccttcgtggtttctgcaattctgctgaaaaccagcaaagtgaaagaagaagatgacattgaagcggccacccgtcgtatgcaggacatgaaagcggaatctaaaggcgcctctccgctggcggctggcgacgtgaccaacgacctgagccatgtgcgtaaaatcatcgtggcttgcgatgccggtatgggttccagcgcgatgggcgcaggggtactgcgtaagaaagtacaggatgcgggcctgagccagatctccgtcaccaacagcgccattaacaatctgccgccggatgtggatctggtcattactcaccgtgaccttaccgagcgcgcgatgcgtcaggtaccgcaggcgcagcatatttcgctgaccaacttcctggatagcggcctgtacaccagcctgaccgaacgtctggttgccgcacagcgccacaatactaatgaagagaaagtacgcgatcatctgaaagacagctttgaggagggtgataacaacctgttcaaactgggtgcggagaatatcttcctgggccgtaaagccgctaacaaagaagaggcgattcgctttgccggtgaacaactggtgaaaggcggctatgttgagccggaatacgtcgaggcgatgctggaccgcgaaaagctgacaccgacttacctcggtgaatccatcgcagttccgcacggtacggtagaagcgaaagaccgcgtgctgaaaaccggcgtggtgttctgccagtatccggaaggcgtacgcttcggtgaagaagaagacgatattgcccgtctggtcattggtatcgccgcacgtaacaatgagcacatccaggtcatcaccagcctgaccaacgcgctggatgatgaatccgtgatcgaacgtctggcgcacaccaccagcgtggatgaagtgctggaactgctggcaggtaaaaaagcttaa

SEQ ID NO: 371302 - DNA, 609 bp, Salmonella enterica
atgaaactcatcggtagctacaccagcccttttgtgcgcaaaatctctgttctgctgctcgaaaaaggcattaccttcgaatttattaatgaactaccctacgaggcggataacggcgtggcgcaatacaaccctctgggtaaggtgccagcgctggtgacggagaaaggggagtactggttcgattcgccgatcatcgcggaatatattgagctgctggatatcgcgccagcgatgctcccgcgtgacccgatggcagcgcttaaagttcgccagcttgaagcgttggctgacggcattatggatgcagcgttggtttctgtacgcgaacaggcgcgcccggcggcgcaacaatcggaaacggaactgttgcgccagcgggaaaaaatcaaccgcagcctggatatgctcgaaagttatctgagcgacgggacgctaaaaacggatacggtcaatctggcgactatcgcgattgcctgtgcggtaggctatctcaacttccgccgggtcgcgcctggctggtgtgttagccgcccccacctggtcaaactggtcgaaacgctttttcaacgcgaaagctttgcccgcaccgaagcgccaaaggcttga

SEQ ID NO: 371303 - DNA, 1392 bp, Salmonella enterica
atgacaagcgaaacgcgtacactctacagccagcttcctgctatcgatcgtttattgcacgatagcgcctttctttctctgcgcgatcggtatggccatacccaggtggttgatctgcttaggcggatgcttgacgacgcgcgcgacgtcatccggaatacgcaaacgcttcccgactggtacgcagactgggcgcaagaggcgaaactccggctggaaaatgcggcgcaaagcgcgctgcgcccggtgattaacctgacggggacggtgttgcacaccaatcttggccgcgcattgcaggcgcaagaagcggttgaggcggtaacgcaggcgatgcgcgcgccggtgacgctggaatacgatttagatggcgccgggcgggggcatcgcgaccgggcgctggcgacgctgttatgccgaatcaccggggcggaggacgcctgtatcgtcaataacaatgcggcggcggtattgctgatgttggcggcgaccgccagcggcaaagaggtggtagtttcgcgtggcgagctggtcgaaatcggcggcgcgtttcgtattccggatgttatgcgccaggcgggctgtacgctgcatgaagtgggcaccaccaaccggacgcacgcgaaagattaccgtcaggcggtaaatgaaaataccgggctgttgatgaaggtgcataccagtaattacagcattgagggctttaccaaaacggtagaggaagcggaactggcggaaatcgggcgagagctggatattccggtggtggcggatctgggcagcggttcgctggtggatttaagtcaatatggcttacccaaagagccgatgccgcagcagctcattgccgcaggcgtcagcctggtaagcttctccggcgataagttgctgggcgggccgcaggccgggattatcgtcggcaaaaaagcgatgattgcccaactgcaaagccatccgctgaagcgcgctctgcgcgctgataaaatgacgctggcggcgctggaggcaacgttacgtctgtatctgcacccggaagcgttggcggagaaattacccaccctgcgtctgttaactcgcagtgaagcgtcgattcgcgaacaagcgcagcggttacaggcgcggctggcggcacgttacggcgatgaatttgcgctggaggttaaaccctgcctgtcgcaaatcggcagcggttcattaccggtagaccgccttcccagcgccgccatgacctttaccccgcacgacgggcgcggtagtcggctggaggcgctggcggcccgctggcgcatgctgcctgtaccggtcattggccgaatttatgatggccgtttatggctggatatgcgctgtcttgaagacgaaagccggtttatggagatgatgctgaaatga

SEQ ID NO: 371304 - DNA, 1851 bp, Salmonella enterica
atgattattgcaactgccggacacgtagaccacggtaaaacgacgttgctccaggcgattaccggggtcaatgccgatcgcctgccggaagagaaaaaacgcgggatgactatcgatctgggctacgcctattggccgcagccggatggtcgtgtgctgggctttatcgatgtgcctgggcatgaaaaattcctctctaacatgctggcgggcgtaggcggtatcgatcacgctttgctggtggtcgcctgtgatgacggcgtcatggcgcaaacgcgcgagcatttacagatcctacaactgacgggtaatctccagctcaccgtcgcgctgaccaaagccgatcgcgtggacgaggcgcgtatcggtgaagtacgtgaagaggtgctggcggcgctcgacaactatggcttcgccgataccgttttatttgtcaccgccgccaatgaaggacgcggtattgcagaacttcgcgctcatttacagcagcttcctgcacgtttacacgccgcgcagcatcgcttccgtctggctatcgaccgtgcgtttacggtgaaaggggcgggactggtggtgaccggaacggcgttgagcggagaggtaaacgtgggcgatacgctatggttgaccggcgttaatacgccgatgcgcgtacgaagtctacacgcgcaaaatcagcccaccgaccatgcgtatgccgggcaacgtattgcgctcaatattgcgggcgatgcggagaaggagcagcttaaccgcggcgactggctgctttccgatgcgccggtgggggaagctttttcccgggtgatcgtttctctggcgcttcatgcgccgctttcccaatggcaaccgctacatattcaccatgccgccagccatgtgaccggtcgcgtctctttgctggaaggcgggctggccgagctgatctttgatacgccgttgtggctggccgataatgacagactggtgctgcgtgatatttccgcacgcgccacccttgccggcgcacgcgtggtgacgcttaaggcgccgcgtcgcggtaaacgtaagccagattatttgcactggctttcaacgcttgccgccgcgcaggacgatagcgcggcgttggccattcatctggaacgcggcgccgtcaacctgccggatttcggttgggcgcgtcagcttaatcctgtcggtatgcgtcagcttattgagcaacatggttttatccaggccggagacaatctgttaagcgcgcccgtcgccgcccgctggcagcgtaagattcttgatacgctggcgacctaccacgaacagcaccgcgatgaaccggggccgggacgcgagcgtttacgccgcatggccctgccgatggaggatgaagcgctggttctgatgctgatcgagcggatgcgcgacgacggcctgattcatagccatcacggttggttgcatctgccggatcataaagcaggatttagcgatgagcagcaggccgtctggcaaaaagtcgaaccgctatttggcgatgagccctggtgggtacgcgatctggcgaaagagaccggaacggaagaacaattgatgcggctggtgctgcggcaggcggcacagcaaggcatcattaccgcgatcgtaaaagatcggtactatcgtaacgatcggattgtcgctttcgccaatatgatccgcgagctggatcaagagagaggatcaacgtgtgcggcggattttcgcgacaggctgaatgtagggcggaaactggccattcagatccttgaatattttgaccggattgggtttacacgacgtcgtgggaatgatcatttattacgtgatgcgttattatttccgcaaaaagaatga

SEQ ID NO: 371305 - DNA, 882 bp, Salmonella enterica
atgcagcaatatatcggtattgatgtgggaggaactcacgtcaaatatggcgtgattaacagtgacggcgaagaattaacccatcatcaattcgatacgccagaggacgcctccacgtttacccgcaaatggcaggatgtggtggcgcgttgccaacaggactatgacattgcggcaatcggggttagtttccccggccatattaatccccataacggtcatgcggcaaaagcgggcgcgctggcttacctggatgacgtcaacctgatggagttgttcagcgggctgaccgatctgccgctggtcgtggagaacgacgcgaactgtgcggcgctgggcgaaatgtggcgaggtgccgggcagcattatgacaatctggtctgtattaccattggaaccggcattggcggcggtattatcgtcggacgagaactgtatcgcggcgcgcattttcacgccggtgaattcggcgtcatgccggtcgggaataatggcgaaagtatgcataaaatcgcgtcaaccagcggattaatggcgtcgtgccgccaggcgctggcgctgcctgccgaagagatgccgcctgcggatgtgatcttcgaacgaatggcgaccgatgttcatctgcgtgaggcggtcaatgactgggcgcgttatctttcacgcggcgtttacagcgtgatctctatgtttgatccgggcgtggtgctgatcggcggaggaataagcgaacaggaaaagctctacccgctcctgacgcggcatcttgaaacgtttgaaatgtgggaggcgctccaggtgccgattcagccctgccaactgggaaatcaggcgggcaggctgggcgccgtctggctggcgcagcaaaagctcgcccgaagctaa

SEQ ID NO: 371306 - DNA, 1539 bp, Salmonella enterica
atgacgaacaatcccccttcaacacgtattcagccaggtgaatacgggtacccactgaagttaaaagcccgctatgacaattttattggtggtgactgggttgcgcccgccgacggcgaatattatcaaaacctgacgccagtgaccggccagccgctatgtgaagtcgcttcctccggtaaaaaagatatcgatttagcgctcgacgccgcgcataaggcgaaagataagtgggcgcatacgtcagtacaagaccgtgccgctatcttgtttaagatcgccgatcggatggaacaaaacctcgaactgttggcgacagcggaaacctgggataacggtaaaccgattcgtgaaaccagcgccgccgacgtaccgctggcgatcgatcatttccgctatttcgcctcctgtatacgtgcgcaggagggcgggatcagcgaagttgatagcgaaactgtggcctaccattttcacgaaccgcttggcgtcgtgggacagataatcccgtggaactttccgttgttgatggcaagctggaaaatggcgcccgcgctggcggcgggtaactgcgtggtgcttaaaccggcacgcctgacgccgctttccgttctgctgttaatggaagtcattggcgatctgttaccgccgggcgtcgtcaacgtcgtgaacggcgcgggcggcgagattggcgaatatctggcgacctcgaaacgtatcgcgaaggtggcgtttaccggttcgacggaagtgggtcaacagatcatgcagtacgccacgcagaatattattccagtgacgctggagttaggcggcaagtcgcccaatatcttcttcgccgacgtgatggatgaggaagatgcgttctttgataaagcgctggagggatttgccctgtttgcctttaaccagggcgaggtgtgtacctgtccaagccgtgcgctggtccaggagtccatctatgagcgctttatggagcgcgctattcgccgggtagagagcattcgcagcgggaacccgctagatagcggtacacagatgggggcgcaggtctcccacggccagcttgagactatcctcaattatatcgatatcggtaaaaaagagggggccgatattctgaccggtgggcgacgcaaggagctggatggcgaacttaaagagggctattaccttgagcctaccattctgtttggtaagaacaatatgcgcgtctttcaggaggagatctttggcccggtgctggcggtaaccacctttaaaaccatggaggaggcgctggaaatcgctaacgatacccaatacggcctgggcgctggcgtctggagccgcaacggcaatctggcctataagatggggcgcggcattcaggccgggcgcgtatggaccaactgctatcacgcctatccggcacatgctgcgttcggcggctataagcagtcgggcatcgggcgcgaaacgcataagatgatgctggaacactaccagcaaaccaagtgcctgctggtgagctattccgataagccgctggggctgttctga

SEQ ID NO: 371307 - DNA, 1956 bp, Salmonella enterica
atgaacgtactggaagtcgatctgcataaactgacggtcagcgatccgttcctcggacagtatcaacaactggttcgcgatgtggttattccttaccagtggaatgcgttaaacgatcgtattccagaggctgaacccagccatgccattgaaaatttccgcattgccgcaggccagcagacgggcgacttttacggcatggtctttcaggacagcgacgtggcgaaatggctggaagcggttgcctggtcactgtgccagaagcccgatccagcgcttgagaaaaccgccgatgaggtgattgaactggtggccgccgcgcagtgtgacgatggctatctcaatacgtactttacggcaaaagccccgcaagaacgctggagcaacctggcggagtgccacgagctttattgcgccgggcacctgattgaagcgggcgtcgccttctttcaggccactggcaagcgtcggctgctagacgtcgtttgtcgcctggccgatcatatcgacagcactttcggccctggcgaaaatcagctgcacggctatccgggccacccggaaattgagctggcgctgatgcgtctgtatgaggtaacagagcagccgcgctatatggcgctggcaagctactttatcgggcagcgcggcgtccaaccgcacttctacgacgaagagtacgaaaaacgcggccagacctcgtactggcatacctacggcccggcgtggatggtcaaagacaaagcctacagccaggcgcatctgccaatttcgcagcagcagacggccattggccacgcggtacgttttgtctatctgatgactggcgtggcgcatctcgctcgcctgagcaacgatgaaggcaaacgccaggactgcctgcgcctgtggaaaaatatggcgcagcgtcagctgtatatcaccggcgggattggctcgcagagcagcggcgaagcctttagcagcgattacgatttaccgaatgattcggtctatgcggaaagctgcgcttcaatcggcctgatgatgttcgcccgccggatgctggaaatggaagccgatagccagtacgccgacgtgatggagcgcgcgctgtacaacaccgtcctcggcggtatggcgctggatggcaagcatttcttctacgtcaacccgctggaagtgcatccaaaatcgttaaaattcaaccatatttacgatcacgttaagcccatccgccagcgctggtttggctgcgcctgctgcccgccgaatatcgcccgcgtgctcacctcccttggtcactacatctacacgccgcgtgcggatgcgctgtacatcaatatgtacgtgggtaacagcatggaaataccggttggaaatggcgcgctcaaactgcggattggcgggaactacccgtggcaagagcaggtgaagatcgccatcgactctgtgcagccggtacgtcacacgctggcgctacgtctgccggactggtgccctgaggcaaaagtgacgctcaacgggctggaagtggagcaggatattcgcaaaggttatctgcatatccgtcggacctggcaggagggcgatacgataaccctgacgctgccgatgccggttcgccgcgtgtatggcaatccgctggcgcgtcacgtcgccggtaaggtcgccattcagcgcgggccgctggtctattgccttgagcaggccgataacggcgaagaactgcataatctgtggttaccgaaagagagtgagttccgggtctttgagggcaaagggctttttgcgcataagatgctgattcaggctgaaggcgagaagcaaagcgccccagatgcgcagcatcaggcgttgtggcactacgataacgcgccgtcatcgcgccagccgcagacgctaacgttcattccgtggtttagctgggccaaccgtggcgagggcgaaatgcggatttgggttaacgagcggtaa

SEQ ID NO: 371308 - DNA, 816 bp, Salmonella enterica
atgctcgaattatccatgacattaccgattaaagtccaaaacggcggattatttatttctcgcggcattgggcgtcatcctgccaggcgtctgcaatcgtgggaaattatatttgtggaaaaaggctgcctgaaaattcaggaagaagaatgtgttttctgtgtcgaagccggggaaagcctgttgctttggccgcatcgccgccatattggcgttgaggagtttcccgccgatcttaaattttactggctccattttgaggtcaaagcgccggacagcaacccgcgctggctgacgcatctttccgtgccgcagcatacccaggttgccgatccgcaggcgctgattgcgctttttcgccagtttatgaacgagcaggaaaagcaccagcgcagcccggcgctggagttcatcgtgctgctgattttgcagcagctcaccgttgacgcccggcagaatgaaaacgccgaggccgctggcgtgtcgctggcctggaaagtacagcagttgattcgaacgcactatcacctgccgctttccagctcggttctggcgaaagaactgcattgcaatgtggattatctgggacgcgtttatcggcgggtatttcaccttacgctaacggaagccatccaccgccagcgggtgcgcgaggcggaaaagttgctgattagcgacgcgcgttcgttaaaagaggtggcggaacggtgcggttttaatgacgttggttactttcgccagatcttccgcaagcacaccggcctgacgcctaccgcctggaagcggcgctacagtaaggaacacgttaattcttga

SEQ ID NO: 371309 - DNA, 696 bp, Salmonella enterica
atgttagagcaactgaaagccgaggtgctggcggccaacctggccctcccggcgcacgggctggtcacctttacctggggcaacgtcagcgcggtcgatgagacgcgcaagctgatggtcattaagccttccggcgtcgaatatgaggtgatgaccgccgacgatatggtggtggtagagatcgccagcggtaaggtcgttgaaggcaacaaaaaaccctcgtccgataccgcgacccatctggcgctctatcgccgctatccgcagatcggtgggatcgtgcatacccattcccgccatgcgacgatctggtcgcaggccgggctcgatctgcccgcctggggcaccacccacgccgactatttctatggcgcgatcccctgtacccgactgatgaccgttgaggagattaacggcgagtacgagtatcagaccggcgaggtgattattaaaacctttgaagagcgcggtctggatccggcgcaaatcccggcggtattagttcattcacacggcccgtttgcctggggtaaaaatgccgccgatgccgtccacaacgccgtggtgcttgaggagtgcgcctatatggggctgttctcgcgccagctggccccccagctgccggatatgcagcctgaactgctcgataagcactatctgcgtaaacatggcgcgaatgcctattacgggcagtaa

SEQ ID NO: 371310 - DNA, 861 bp, Salmonella enterica
atgcgtaatcatccattaggtatttacgagaaagcactggcgaaagatctcagttggccagagcggctggtgctggcaaaaagctgcggttttgattttgttgagatgtcggtggatgaaaccgacgaacgtctctcacgcctggagtggacctcggcccaacgcgcttcgctggtgaacgcgatgctggaaagcggcgtcgccatcccgtcgatgtgcctctccgcccatcgtcgcttcccttttggcagccgcgacgaagcggtacgccagcgggcgcgtgaaatcatgaccaaagccattcgcctggcgcgcgatctcggtatccgcaccatccagttggcaggttacgacgtctattacgaagagcacgacgaaggcacccagcaacgtttcgccgaagggctggcgtgggcggtggaacaggccgcagcggcgcaggtgatgctggcggtggagatcatggataccgcgtttatgaactccatcagcaagtggaaaaagtgggacgagatgctttcgtcaccgtggttcaccgtttatccagacgtcggcaacctcagcgcctgggggaacaacgtgaccgccgagctgaagctgggtatcgaccgtatcgccgcaattcatctgaaagatacgctgccggtgaccggcgatagccccggccagttccgcgacgtgccgtttggcgaaggatgcgttgattttgtgggcatttttaaaacgctgcatgagctgaattatcgcggttcatttctgattgagatgtggacagagaaagccagtgagccggtgctggaaattatccaggcccgccgctggattgaatcacggatgcaggaaggaggtttcacatgttag

SEQ ID NO: 371311 - DNA, 663 bp, Salmonella enterica
atgagccgaccattactgcaactggcgctcgaccacaccagtctggaagcagcccaacgcgatgtcgccctgctacaggatcatgtcgatatcgttgaggccggaaccatcctttgtttaaccgaaggccttagcgcggtgaaagccctgcgagcgcagtgcccggaaaaaatcatcgtcgccgactggaaagtggccgatgctggtgaaaccctggcgcagcaggcttttggcgctggcgccaactggatgactatcatctgcgccgcgccgctcgcgaccgtcgagaaaggccacgccgtcgcgcaatcctgcggcggtgaaattcaaatggagctgttcggcaactggacgctggacgacgcccgagactggtatcgcaccggcgtgcgtcaggcgatttatcatcgcggacgcgatgcgcaggccagcgggcaacagtggggagaagcggacctggcacgcatgaaggcgttgtccgacatcggccttgaactatcgattaccggcggcattaccccagcggatctgccgctgttccgcgacattaacgttaaggcatttatcgccggacgcgcgctggcaggtgccgcccatccggcgcaggtcgccgccgaattccacgcccaaattgacgccatttggggagaaaagcatgcgtaa

SEQ ID NO: 371312 - DNA, 1497 bp, Salmonella enterica
atgagcaactactggctggggttagattgtggtgggagttggctaaaagccgggttgtacgatggcgcaggccgggaagtagcggtgcaacgcctgccgctgcacgctttaagcccgcagccaggctgggttgaacgcgatatgaccgaactgtggcaacagtgcggctcggtcatcagcaaactgctgacgcacacgggggtgagcggctcacaaatccgcggtctgggtatttccgctcagggtaagggcctgttcctgttagataaaagcgatcggccattaggtaaagcgatactctcttccgaccgtcgcgccatggaaattgtccagcgctggcaaaaagaagcggttccgcaaaaactctacccgctgactcggcaaaccctgtggaccgggcatccggtctcccttttacgctgggtaaaagagaatgagccgcagcgctacgcgcagataggcagcgtcatgatgacgcatgactatctgcgctggtgcttaaccggcgtgaaaggctgtgaggagagcaacatctccgagtccaacctctacaacatggcgacgggccagtacgacccgcgtctgaccgagtggctgggcatcagtgaaatcgacagcgcgctgccccccgtggtgggttcagccgaaatctgcggggagatcaccgctcaggcagccgccatcaccggtctggcggcgggcacccccgtcgtcggcggcctgtttgatgtggtttccaccgccctttgcgccggtattgaggatgaatcaacgctcaatgcggtgatgggcacctgggccgtcaccagcggcatcgctcacggcctgagcgaccatgaggcccatccttacgtctatggccgctacgtcaatgacgggcagtatatcgttcacgaagccagcccgacctcctccggcaacctcgaatggtttaccgcccagtggggcgacctctcttttgacgagatcaaccaggcggtcgccagcctgccgaaagccggtagcgacctcttttttctgccgtttctctacggcagcaatgccggactggagatgacctgcggcttttacggcatgcaggcgctgcacacccgcgcccacctgctgcaggcgatttatgaaggcgtggtcttcagccatatgacccacctcaaccgcatgcgtgaacgctttaccgacgtttgcgccctgcgcgttaccggcggcccggcccactccgacgtctggatgcagatgctggcggacgtcagcggtttacgcattgagctgccgcaggtggaggagaccggctgcttcggcgcggcgctggctgcccgcgtcggcaccggcgtatatcgcgatttccgcgaggcccaacgcgacctgcagcacccggtgcgcacgctgctgccggacatgaccgcgcacgccctctaccagcgcaaataccgccaataccaggatttgattgaagcactacagggctatcacgcccgtattaaggagcacgcattatga

SEQ ID NO: 371313 - DNA, 987 bp, Salmonella enterica
atgaaattacacgttattgctcgttcattattgatagctggtctgacggttttcagcgtgtcgtctctggcggcgcaatctttacgttttggttatgaaacaccgcaaactgactcccaacatattgccgcgaaaaaatttcacgaattattaaaagaaaaaactaacggcgaattaacgctaaaactctttcctgacagcacattaggtaacgcccaggcaatgatcagcggggtgcgcggcggaactattgatatggaaatgtccggttcgaacaatttcaccggcctggcccctgtattcaacttacttgatgtccccttcctgtttcgcgataccgcgcatgcgcataaaacgctcgacggcaaagtcggcgatgaactgaaaaaatcactcgattcaaaagggttaaaagtgctggcctactgggaaaacggctggcgcgacgtcaccaactcccgcgcgccggtaaaaacgccgggcgatttgaaaggcttaaaaatccgcactaacaacagcccaatgaatatcgcggcctttaaaatcttcggcgcgaaccctattccgatgccgttctccgaagtctataccggcctcgaaacccgtacgattgatgcccaggaacaccctatcaacgtcgtgtggtcagcgaaattctatgaggtacagaaatacctctccctcactcatcacgcctattcgcctctgctgctggtgatcaataaagccaaattcgacgctttaagcccgcagttccaggaggcactgctgagttccgccaaagaagcgggtgactatcagcgcaaactggtcgccgaagatcagcaaaaaattatcgatggcatgaaagaagccggagttgaagtcctgaccgatatcgaccgtaaagccttcagcgatgcgctgggcagccaggtgcgcgatatgttcctgaaagacaacccgcagggcgccgatctcctgaaagccgtggacgaggtgcaataa

SEQ ID NO: 371314 - DNA, 1278 bp, Salmonella enterica
atggccgtggtgatatttctctgctgcctgctcggcgggatcgcgataggtttacccatcgcctggtcgctgctgctttgcggcgctgctctgatggcatacctggatatgtttgacgtgcagattatggcgcaaaccctggttaacggcgcggacagtttctccctgctggctattcccttttttgttttggccggtgaaatcatgaacgcgggcggcctgtcaaagcgaattgtcgacctgccgatgaagctggtcggccataaacccggcggcctgggctacgtgggcgttattgcggcaatgattatggccagcctttccggctctgcggtagcagataccgctgcggtcgccgcgctgctggtgccgatgatgcgctccgcaaactacccgatcaaccgctccgttgggttaatcgcttccggcgggatcattgcgccaattattccaccctcgattccttttattatcttcggcgtttccagcggcttgtcgatcagcaagctgtttatggccgggatcgcaccgggcatcatgatgggcgcggcgcttatgctcacctggtggtggcaggccgggcgattaaatctcccttctcagcctaaagcaacaccgcgtgaaatctggcaatcattggtttcaggtatctgggcgctgtttttaccggtgattattatcggcggcttccgttccggacttttcacgccaacggaggcaggggcggttgccgcgttttacgccctctttgtcgccgttgttatctatcgggaattaacgttttccagtctctaccacgtgctggtcaatgccgccaaaacgacgtcagtcgtcatgtttctggtggccgcggcccaggtatccgcctggctgattacgatcgcggaattacccatgatggtgtcagatttgctgcagccgctggtcgactctccgcgactcttatttatcgtcattatgatctcaattatggtcgtcggtatggtgatggatttaacgccaacggtgttaattcttacccctgtattattgccattagttaaagaagccaatattgacccgatttatttcggcgtcatgttcattattaactgctctattggattaatcacaccgcccgttggcaacgtcctcaacgttatttccggggtagcaaaattgaaatttgatgacgcggtaagaggcgtattcccttacgttgtcgtactgatgtcgctgctggttttatttatttttattcccgagctaattatcacaccgcttaaatggattaattaa

SEQ ID NO: 371315 - DNA, 474 bp, Salmonella enterica
atgaagcgggtacttgagggcatacttgcggtattaattgccgtactttcctgcattgtatttattaacgttattttacgttacggttttgagagcagtattttgtcggtagatgaactatcacgttatctatttgtatggctgacgtttattggcgccatcgttgcatttatggataacgctcacgttcaggtcacttttgtggtggaaaaactttcgccagcgaatcagcgtcgactctcgctgctgacacattcgctgattttattgttatgcctcgcattaggctggggcagcctgcaaaaagcgttgcaggactggagcgatcactcgccaatcctcggtttaccgatcggcctgatgtatatcgcctgtctgcccacaagcgttgccatcgcgttaatcgagctgcgtcggctttatcacttaataacgcgtaacgattcctttcaacaaccacagcaaggagcctaa

SEQ ID NO: 371316 - DNA, 933 bp, Salmonella enterica
atgaaaaataataccggttatattatcggtgcgtacccttgtgcaccctcatttcaccagaagagtgaagaggaagagacggaattctggcggcaactctctgatactccggatatccgggggctggagcagccttgtcttgaacatcttcacccgctcggcgacgagtggttattgcgccatacaccagggaactggcaaatcgtggtcaccgcgataatggaaaccatgcgccgccgtagcgaaaacggcggttttggattagcgtccagtgacgaggaacagcgtaaagcctgcgtggagtactatcgtcatctgcatcagaagatcaataaaatcaatgggaacaataccggcaaagtcatagcccttgagcttcatgccgccccgctggggggcaatccgaacgtggcgcaggcaaccgacgcctttgcgcgctcattaaaagagattgccaactgggactggtcctgcgacctggtgcttgaacactgcgacgcgatgaccggccccgcaccgcgcaaaggattcttaccgttagtaaacgtactggaaactattgccgactatgacataagcgtctgcattaactgggcgcgctcggctattgaagggcgggatacctctctaccgctgatccatacgcagcaggccaaacaggctggaaaactcggggcgctgatgttctccggtacaacgctggatggagaatacggcgaatggcaggacctccatgctccgtttgcacctttctgtccacaaagcctgatgacggagaaacatgttcaagaactcattaccgccgccgctcccgaactgttgcagtttaccggtattaaattgttggaaatcaatgccagtgccgatattaatcaccgcataaatatattacgcgatggtattaacataatgaaaaaggccacacgccgctaa

SEQ ID NO: 371317 - DNA, 465 bp, Salmonella enterica
atgatttttggacatattgcgcagcctaatccgtgccggctaccgtcggccatagagcaggcgctcgatttcctgcgcaatacggactttcgcacgctggaacctggcgtagtggaaatcgacggcaaaaatatcttcgcgcagattatcgatatgaccacccgcgatgctgctgaaaatcgtccggaagtccatcgccgctatctggatattcagtttctggcatggggcgaagagacaattggggttgccattgataccggtaataatcaaatcagcgagtcattattagaacagcgcgatattattttttatcacgacagtgaacatgaatcattcattgaaatgataccgggaagttatgccctgtttttcccgcaggatgttcatcgtcccggttgtaataaaagcattgctacgccgatacggaaaatagtcgtaaaagtcgccatagacgttttataa

SEQ ID NO: 371318 - DNA, 999 bp, Salmonella enterica
atgaaagtaactttcgaagagttaaaaggggccttctaccgcgtcttgcggtcgcggaatattgcggaagataccgccgacgcctgcgcggaaatgttcgctcgcaccaccgagtccggtgtctattcccacggcgtgaaccgctttccccgcttcatccagcaactggataacggcgacattattcctgatgctaaaccgcagcgagttaccagcctcggcgccatcgaacagtgggatgctcagcgcgctatcggcaacctgacggcgaaaaagatgatggaccgggccatcgagctggcttccgatcatggtattggcctggtggcgttacgtaatgctaaccactggatgcgcggcggcagctacggctggcaggcggcggaaaaaggctatatcggcatttgctggaccaactccatcgccgtcatgccgccgtggggggcgaaagagtgccgtatcggtaccaatccgctgatcgtcgctatcccttccacgccgatcacgatggtggatatgtcgatgtcgatgttctcctacggaatgttagaagttaaccgtctggcgggccgcgaactgccggtggatggcggtttcgacgataacggtcagttgaccaaagaaccgggcgttatcgagaaaaatcgccgcattttaccaatgggttactggaaaggatctggtctgtcgattgtgctggacatgattgccaccctgctttccaacggctcttccgttgccgaagtgacccaggaaaacagcgatgagtatggcgtctcacagattttcatcgccatagaagtggataagctgatcgatggcgcaacccgcgatgccaaactgcagcggattatggatttcatcaccactgctgaacgcgccgacgacaacgtcgcgattcggctgcccggccacgaatttaccaaattgctggatgacaaccgccgtcacggtatcaccattgacgacagcgtctgggccaaaattcaggcgctgtaa

SEQ ID NO: 371319 - DNA, 801 bp, Salmonella enterica
atgagccagaacaacgataaagagaagcctgcggggagtcagagcctgtttcgtggcctgatgttgatagaaattttgagtaactacccgaacggttgcccactggcgcacctgtcggagctggcggggttgaacaagagtaccgtccatcgtttgttgcaggggcttcaatcctgcggatacgtgacgccagcgccggcggccggaagctaccgtctgacgacaaagtttattgccgtcggccaaaaagccctgtcatcgctgaatatcatccacgttgcggcaccgcaccttgaggcgctcaacctggccaccggcgagacggtgaatttttccagccgtgaagatgaccacgctatcctgatttataagctggaaccgaccaccggtatgctgcgcacgcgtgcctacattggccagcatatgccgctgtactgctcggcgatggggaaaatttatatggcgtttggtcagccggattatgtggcgtcttactgggaaagccataaagatcagatccagccgctgactcgtaataccattaccgatttaccagcaatgtacgatgagctggcgcaaattcgtgaaaccagcatggcgatggatcgcgaagaaaatgaactaggcgtttcctgtattgctgtgcctgtgtttgatattcaccatcgagtgccttacgccatttctatttcactgtcgacgtcacggctaaaacagatcggcgagaaaaatctgctcaaaccgttgcgtgaaaccgcacaggctatctctaatgagctgggatttaccgttcgcgaataa

SEQ ID NO: 371320 - DNA, 474 bp, Salmonella enterica
atgaaccggtttattatggcggatgcgtcggcgtgtatcgggtgtcgtacctgcgaggtcgcctgcgtggtgtcgcaccaggaacagcagaatagcgcggcggtgacgacggcggactttgtgccgcgtatccgggtgataaaagaggatagcttcaccacggccacggtctgccatcagtgtgaggacgcgccgtgcgcgaatgtctgcccggtacaggcgattcgccgtgatcgggggcatatcttcgtgacgtcatcgcgctgcattggttgtaaaagctgtatgctggcttgcccgtttggcgcgatgactgtggtggcgtccgcgtcaggcgcgcaggcgattaaatgcgatctttgctggcatcgggaagcggggccggcgtgcgtggaagcctgcccgaccagtgcgttacagtgcgttgacgcaacaaatgtgcagcgccagcgcctctattctcaacctttctga

SEQ ID NO: 371321 - DNA, 1251 bp, Salmonella enterica
atgacattttcacttttcggcgataaatttacccgccattcaggcattacccgcctgatggaggatctcaacgacggcttacgcacgccaggcgccatcatgcttggcggcggtaacccggcacacatccctgcaatgcaggattatttccagacgctactgacagatatggtagaaagcggcaaagccgctgatgcgctttgtaattatgacggtccccagggaaaaacggcgctactgaatgcactggccgtactgctacgtgaaacgctgggatgggatatcgaaccacagaatattgcgctgacaaatggcagtcagagcgcgtttttctacttatttaatctcttcgccggacgtcgcgccgacggcagtacgaaaaaggtactattcccgcttgcgccggaatacatcggctatgcagattccggtctggaagacgacctcttcgtttcggcgcgcccgaatattgagctgctgccggaaggccagtttaagtatcacgtcgattttgagcatctgcacatcggcgaagaaacggggatgatttgcgtctcgcgcccgaccaacccaaccggtaacgttatcaccgacgaagagctgatgaagctggacagactggcgaatcagcacaacatcccactggtgattgataacgcttacggtgtaccgtttccgggcattatctttagcgaggcgcgcccgctgtggaaccccaatattatcctatgcatgagcctctcgaagctggggctgcccggttcccgctgcgggattatcatcgccaatgataagacgattaccgccattgccaacatgaacggcatcatcagccttgcgcccgggggcatgggcccggcgatgatgtgcgaaatgattaagcgtaacgatctgctgcggctgtcggaaacggttatcaaacctttctactatcagcgcgttcaacagacgatcgcgatcattcgtcgctatttatccgaagaacgctgcctgattcataaaccggaaggcgcaatatttttgtggctgtggtttaaagatctgccgattaccaccgagctactctatcaacgcttgaaagcgcgcggcgtgctgatggtgccaggccactatttctttcccggactggataaaccctggccgcacacacaccagtgtatgcggatgaactacgtgcctgaaccggacaaaatcgaggcgggcgtaaaaattctggcagaagagattgaacgcgcctggcgtgaaggctga

SEQ ID NO: 371322 - DNA, 2028 bp, Salmonella enterica
atgaaacttgccgccttcgctctgacgctgatacccggtatcgcgatcgcctcatcatggacctcacccggttttccgacgttctcgacgcaggaaaccgggcgctttaccagccatgctgcattaacaaaaggtacacgcgcgttaacgctccatattgaccagcagtgctggcagccctccggcgccataaaactcaaccaaatgttgtcgttaaaaccctgcgaaggcgcgccaccgcaatggcgtttgtttaaagatggcgactatacgataacggtagatacccgctccggtacgccgaccctgttgttatcgataaaaactgaacctgagcgcaccgcgcagctcgcctaccagtgtcccgtctgggatggttcgccgctcacgctggatgttcgccagacctttccggaagggacggtagtgcgcgattattacagtggtcaaaccgataccgtccaaaacgggcaaatcacgctgcaacctgccgacagccacgggcttttattgctggaacgcgcggaaacccatgcgtcagcgccttttaactggcgcaacgccaccgtttattttgtgcttacggatcgctttcgcaatggcgatccaaccaatgaccacagctatggtcgccataaggatggtatgcaagagattggcactttccacggcggcgatttgcgtgggttgacgagtaaactggactatctacagcaattaggcgtgaacgccttgtggataagctcgccgtttgaacagatccacggctgggtcggcggcggagcaaaaggcgattttcctcattacgcctatcacggctattacactcaggactggacgacgctggatgccaatatgggcaacgaagccgatctccgcgcgctggtcgacggcgcgcaccagcgcggcatccgtattttatttgacgtagtaatgaatcatgccggttacgctacgctggaggatatgcaggagtatcagtttggcgcgctctatttatccggcgcggaacggcaaaaaattctcggcgatcgctggacaaactggcgacccgccgccggacaaagctggcacagctttaacgactacatcaacttcagcgacagcgccgcctgggaaaaatggtgggggaaaaagtggattcgtaccgatattggcgactacgacagtccgggatttgacgatttaaccctgtcgctggccttcctgccggatataaaaacggaatctaccacgccttccggtctacccgcgttctatgccaacaaacccgatactaaagcaaagttcattgaaggctatacgccacgggattatctgactcactggttaagccagtgggtgcatgattacggcattgacgggttccgggtcgatactgccaaaaacgttgagcttcctgcctggcaacagctaaaaacccaggccagcgcggcgttacatgaatggaagcaggccaatccggacaaagcgctggatgatagcccgttctggatgactggcgaagcgtggggccacggcgtcatgaaaagtgattattatcgctatggtttcgacgcgatgatcaattttgattatcaggagcaggcggcgaaagcggtcgattgcctggcggaaatggggccagtctggcagcagatggcggataaaatgcaggatttcaacgtattaagttacctctcctcgcatgatacgcgccttttccgtgagggcggtgataaggcggcggaactgctgctgctttcgccaggcgcggtgcagatcttttacggcgatgaatccgctcgtcccttcggccccaccggctccgacccgctgcaaggcacccgttcagatatgaactggcaggacgtgagcggaaagtcagccgcagccgtcgcgcactggcagcgtattagccagttccgcgccagacatcccgccatcggcgcaggccaacaaaccacgctgacgctaaaacacgggtacggttttgtacgccagtacggcgacgatacggtgatggtcgtctgggcgggccgccgctaa

SEQ ID NO: 371323 - DNA, 825 bp, Salmonella enterica
atgatattgactcccatgcgacgatatggggcaatgattcttatgttactcaccatcgcattttcgggtgaggtgctggcaaagacgcacgcaacacaaacgagtcaaaagtcccacataactgagacaagttataaacaggttagcagtaaacaagagtattctcgcaatagtgcaaagagcagttcacttcctgatttgcgaaaatacccttccggaacccccagaaaaaaagcgtttctccggaccgttatgccttacatcaccagccaaaatgccgcgattaccgcggaccgtaattggctgatctcaaaacagtaccagaaccgctggtcgccgtctgaacgcgcgcgtatgaaagatatcgcgaagcgctataaagtgagctggtccggcaacacgcgtcgtattccgtggaatacgttgctggagcgcgtcgacattatcccaaccagcatggtggcgacgatggcggcggcggaaagcggctggggaacctctaaactggcgcgtagcaacaataacctgttcggcatgaagtgcacgaaagggcgttgtaccaatacgccgggtaaggtgaaaggttactcgcaattcgcgtcggttgaggagtcggtgagcgcgtatgtcgctaacctgaacacgcatccggcttattcctctttccgcaagtcgcgcgcccaactgcgtaaggcggatcaggaagtcaccgccacggcgatgattcataagctgaagggttactctacccaggggtcgcgctataacaactacttgttcgcgatgtaccaggacaaccagcgtctgatcgccgcgcatatgtaa

SEQ ID NO: 371324 - DNA, 1179 bp, Salmonella enterica
atgtttgataaacgtcaccgtatcactctgttatttaacgcgaataaagcctatgaccgtcaggtagtggagggggtgggtgaatatttacaagcctcgcaatccgaatgggatatatttattgaggaagatttccgtgcccgtatcgataacattaaagagtggttaggcgacggcgttattgccgattacgatgatgacgatatcgcgcaattattggccgatgtcgacgtacccattgtcggggtcggcggttcttaccatcttgctgaaaattatcccgccgttcattacatcgccaccgataatcatgcgctcgttgaaagcgctttcctgcatttaaaagaaaaaggcgttaaccgcttcgcgttttacggtttgcccgactccagccgcaaacattgggcggcggaacgggaatacgcctttcgccagctggtcgccgaggaaaaataccgcggcgtagtctatcaggggctggaaaccgcgccggaaaactggcagcacgcgcaaaatcgcctcgccgactggcttcagacgctgccgccgcaaaccggcatcattgccgtaacggatgcccgcgcccgtcacgtattgcaggcctgtgaacacctgcatattccggtgccggaaaaactttgcgttatcggtattgataacgaagagttaacccgttatctgtcgcgcgtcgcgctttcctccgtcgcgcagggggcgcggcaaatgggctatcaggcggcgaagctgctgcaccgtttgctggcgcgcgaagagatgccgttacagcgcattctggtgccgccggtgcgcgtcattgcgcgccgctcgacagactatcgctccctgaccgatccggcggttatccaggcgatgcactttattcgtaaccatgcctgtaagggcattaaagtcgagcaagtgctggacgcggttgggatttcacgttcaaacctggaaaaacgttttaaggaagaagttggcgagacgatacatgcgctgatccacgccgaaaagctggaaaaagcgcgtagtttgttgatttccaccacgttggcgataaacgaaatttcgcaaatgtgcggctacccgtcactgcaatatttctattcggtgtttaaaaaggagtacgtcactacgcctaaggagtatcgcgaccagcatagtgaagcgttgttgtag

SEQ ID NO: 371325 - DNA, 1323 bp, Salmonella enterica
atgcaggcttattttgaccaactcgatcgtgttcgctatgaaggccctcaatcgactaacccgctggcatttcgtcattacaatcccgacgagctggttttaggtaaacgtatggaagatcacctgcgtttcgcggcctgttactggcataccttctgctggaacggcgcggatatgtttggtgtaggcgcgtttaatcgtccgtggcagcaaccgggcgaagcgctggagctggcgaaacgcaaagcggacgtggcgtttgaatttttccacaaactgaatgtgcctttttattgcttccatgacgtggatgtgtcgccggaaggcgcgtcgttgaaagaatataaaaacaacttcgcgcagatggtggatgtgctggcggcgaaacaggagcagagcggcgtaaaactgctgtggggaacggcgaactgctttaccaacccgcgctatggcgcaggcgccgccactaacccggacccggaagtctttagctgggcagcgacgcaagtggttacggcaatgaacgccacgcataaactgggcggcgaaaattacgtcctgtggggcgggcgcgaaggttatgaaacgttgctgaataccgatctgcgccaggaacgcgaacagattggccgctttatgcaaatggtggtcgagcacaaacataaaatgggcttccagggcacgctgctgattgaaccgaaaccgcaggaaccgacaaaacatcagtatgattatgacgttgcaacggtctatggcttcctcaaacagttcggcctggaaaaagagatcaaagtgaacattgaggcgaaccacgcgacgctggcgggccattcgttccaccatgaaatcgcgaccgctatcgcgctgggtatttttggctccgttgacgccaaccgcggcgatgcgcaactgggctgggataccgatcagttcccgattagcgttgaagagaacgcgctggtgatgtacgaaatcctgaaagcgggcggattcacgacgggcggtctcaacttcgacgccaaagttcgtcgccagagcaccgataaatacgatctgttctacggtcatatcggcgcgatggatacgatggcgttgtcgctgaaaatcgccgcgcgtatggttgaagacggcgagctggataaacgcgtggcgaagcgctatgccggctggaatagcgagctgggtcagcagattctgaaaggacaactctccttaggcgaactggcgcagtatgcggagcagcataatctggcgccagtacatcaaagcggtcatcaggagctgttagaaaatctggttaaccgttatctgtttgataaataa

SEQ ID NO: 371326 - DNA, 1455 bp, Salmonella enterica
atgtatatcgggatcgatcttggtacatcgggtgtaaaagctatcctgttgaatgagcagggcgatgtgctggctacgcatactgaaaaactgaccgtatcgcgtccgcatcccttatggtcggaacaggaaccagagcagtggtggcaggcgacggatcgtgcggttaaaggtttaggtcggcaacagtcgttaagtggcgttcgggcgttgggcatcgccggacaaatgcatggcgcgacattgcttgatagccgtcagcaggttctgcgaccagcgattttatggaatgacggacgctgtagcgaagagtgcgcctggctggaaaaacaggtgccgcagtcgcgtgcgataaccggtaatctgatgatgcccggttttaccgcgcccaaattagtctgggtgcagcgccacgaaccggatattttctaccagatagacaaggttctgctgccgaaagattttctgcggctgcgaatgacaggcgtctttgccagcgatatgtcggatgcggcgggaacgatgtggctggacgtgaaaaagcgcgactggagcgacgttatgctcaacgcctgtcatttaacccgacagcagatgccagcgttatttgaaggtagtgacattaccggaacgttgctgccggaggtagccagcgcatggggaatgccaacagtacccgtggtggcgggcggcggcgacaatgcggcaggcgcggtcggcgtaggaatgatcgatgccggacaggcgatgctctcgctcggaacatcgggcgtctattttgccgtcagcgacggctttctgagtaaaccggagagcgcagtacacagtttttgccatgcgctgccggaacgctggcatttaatgtctgtgatgttgagcgccgcctcttgtctggactgggcggctaaactcaccgggcaggagaacgtcccggcgctgattgccgccgcacagcaggcggatgagcatgccgattcgatctggtttttgccgtacctgtccggcgagcgcacgccgcacaataatccgcaggcaaaaggcgttttctttggtttaacccatcagcatggcccggcggaactggcgcgggcggtactggagggcgtgggatatgctctggcggacggtatggatgtggttcacgcctgcggcgtcaaacccgccagcgtgacgcttatcggcggcggggcgcgcagcgaatactggcgtcagatgctatctgatattagcgggctacagcttgattatcgtactggcggcgatgtagggccagcgctgggcgcggcgcgtctggcgcaaattgcggtgaataaacagactccgctcgccgatgtattgccgcagttgccgctggagcaggcgcattatcctgatgcgcagcatcatgcggtttatcaacaacgtcgtgaaaccttccgtcgactttatcagcagctgttgccgttgatgtcataa

SEQ ID NO: 371327 - DNA, 354 bp, Salmonella enterica
atggacgatcacgttgcgcgcaggaaacggatattcggcctgggaatgttagttgtcggtgcagtggtatacctggtgggactgtggccaggctgtcatacattaagcgaaaagggatatttttttgcggcaatcgtcatgtgtggttttccagtcttaattcgccaggaacacacgggaaatggccgcttgctttctcgttgcaaatctttgctgttgcttggcatcggcatggtcgcggtcggcgtatttaacctggcgctggcgggcgcgctgaaaatactgtgtctggtggcgctgggggtcagtatatatggaaccgatctttacgcttcctacagtgatgatgaatga

SEQ ID NO: 371328 - DNA, 996 bp, Salmonella enterica
atgcagcctaaaattaactggattgataacctgcgagggatcgcctgtttaatggtagtgatgatccatactacaacgtggtacatcaccaacgcccacagcgtcagcccgctaaactgggatattgcgaatgtcctgaattcggcttcgcgcgttagcgttcccctgttttttatgatttcaggctatcttttttttggcgagcgctgcgcgcaaccgcggcattttttacgtatcgccctgtgccttatcttttacagcgttgtcgccctggcttacatttcactttttacttcgatcaacgtcgagctttcgctaaaaaatgtgctgcaaaaacccgtgttttaccacctgtggtttttctttgcgattgcggtgatctacctggtatcgccattaatccaggtaaaaaacgtgagcggcaaaatgctcctgatgctgatggtgatcattggtattattgctaacccaaatactgtgccgcaaaaaatcggcggcgttgaatggttgcccatcaatctgtatatcagcggcgacacgttctactacattctctacggtatcctgggccgcgccattggcatgatggagacgcaaaagccatcgctgacgcttatctgcgctgccctgttcatcatcgcggtatttgttatttctcgcggcacattgcatgaattacgctggcgcggaaattttgccgatacctggtatctgtattgcggtcccatggtgtttatttgcgccgtctcactgttcacggtagttaaaaataagctgaatgcgcggacgttacctggactagggcttatctcccgccactcgttgggcatttatggtttccacgcactgattatccatgcgctacgtactaatggtctggagttaaaacgttggccgccgttagatatcgtgtgggtttttgccgcgacggtgacaggaagcctgctactttccatgctgttacagcgtattgataaacggaaatgggttagctaa

SEQ ID NO: 371329 - DNA, 303 bp, Salmonella enterica
atgataatgaagtatttctgtactgtgatgatagccatcgctctggtgggatgcactgcgacaccgccaccgacgcaaaaagcccagcagagtaaagtgagcccaacacgcacgctggatatggaagcattgtgtaaagctcaggcggcgcagcgttacaatactggcgcacagaaaattgctgttaccggtttcgaacagtttcaggggagctatgagatgcggggtaataccttccgtaaagagagttttgtctgctcttttgatgcagatgggcagtttttacatctttctatgcggtaa

SEQ ID NO: 371330 - DNA, 912 bp, Salmonella enterica
atgcaaaagtttgataccaggaccttccagggcttgatcctgaccttacaggattactgggctcgccagggctgcaccattgttcaaccattggacatggaagtcggcgcgggaacttctcatccaatgacctgcctgcgcgcgctggggccagagccgatggcgactgcctatgtgcagccttctcgtcgtccgaccgatggccgctacggcgaaaacccgaaccgcttacagcactactatcagttccaggtagtgattaagccgtctccggacaacattcaggagctgtacctcggttctctgaaagagctgggtatggacccgaccattcacgacatccgtttcgtggaagataactgggaaaacccgacgctgggcgcctggggactcggctgggaagtgtggctgaatggcatggaagtgacgcagttcacctacttccagcaggtcggcggcctggagtgcaagccggtgaccggtgaaatcacctacggtctggaacgtctggcgatgtatatccagggcgtggacagcgtttacgacctggtctggagcgatggcccgctgggtaaaaccacctacggcgacgtgttccatcaaaacgaagtggagcaatccacctataactttgaatacgccgatgtggatttcttattcacctgcttcgagcagtatgaaaaagaagcccagcagctgctggcgctggaaaacccgctgccgctgccggcctacgagcgtattctgaaagccgcccatagcttcaacctgctggatgcgcgtaaagctatctccgtcaccgaacgtcagcgctacattttgcgtattcgcaccctgaccaaagcagtggcagaggcttattatgcttcccgtgaagccctcggcttcccgatgtgcaacaaagacaagtaa

SEQ ID NO: 371331 - DNA, 2070 bp, Salmonella enterica
atgtctgagaaaacttttctggtggaaatcggcactgaagagctgccaccaaaagcactgcgcagtttggctgagtcctttgctgcgaacttcactgcggagctggataacgccggcctcgcgcacggtaacgttgaatggtttgccgccccgcgccgtctggcgctgaaagtggcgaatcttgctgaatctcagcccgatcgcgaagtcgaaaaacgtggtccggcgattgctcaggcgtttgacgccgaaggcaaaccgagcaaagcggcagaaggctgggcgcgcggctgcgggatcaccgttgatcaggccgagcgtctgaagaccgacaaaggcgaatggctgctgtatcgtgcccacgtgaagggcgaaagtaccgaagcgctggtgccgaacatggtagccacctcgctggcgaaactaccgatcccgaaactgatgcgctggggcgcgtctgacgtacacttcgtgcgtccggtgcacaccgtgaccctgctgttgggcgataaggtcattccggcgactattctgggtattcagtctgaccgcgtcattcgcggccaccgctttatgggtgagccggagttcactatcgacaatgctgaccagtacccgcaaattctgctggagcgcggtaaagtcattgccgactacgaagcgcgtaaagccaaaatcaaagcggacgctgaagaagcagcacgtaagattggcggtaatgccgacctgagcgaaagcctgctggaagaagtagcttcgctggtggaatggccggtggtattgacggcgaaattcgaagagaaattcctctccgtgcctgccgaagcgctggtgtacaccatgaagggcgaccagaagtatttcccggtttatgacaacgcgggcaagctgctgccgaactttatcttcgtcgccaacatcgagtcgaaagatccgacccagattatctccggtaacgagaaagtggtgcgtccgcgtctggcagatgctgaattcttcttcaataccgaccgtaaaaaacgtctggaagaccatctgccgcgtctacaaaccgtgctgttccagcaacagctgggcacgctgcgcgacaagaccgaccgtattcaggcgctggcgggctggattgccggtcagattggcgctgacgtcaaccacgccactcgtgcgggcctgctctccaagtgcgacctgatgaccaacatggtcttcgagttcaccgacacccagggcgtgatggggatgcactacgcgcgccatgatggtgaagcggaagatgtggccgtggcgctgaacgaacagtatcagccacgctttgccggtgatgacctgccgtctaacccggtggcctgcgcgctggcgatcgccgataagatggatactctggcgggtatcttcggtattggtcagcatccgaaaggcgacaaagacccgtttgcgctgcgtcgtgccgcgctgggcgtgctgcgcatcatcgttgagaagaacctcgctcttgatctgcaaacgctgaccgaagaagcggtgcgtctgtatggcgacaagctgaccaatgccaacgtagtcgatgatgtgatcgattttatgctgggtcgcttccgcgcctggtatcaggatgaaggttacaccgtcgacactatccaggcggtactggcgcgtcgtccgacccgtccggcagattttgatgcccgcatgaaggcggtgtctcatttccgcaccctggaagaagcctctgcgctggcggcggcgaacaagcgcgtctccaacatcctggcgaaagccactgagccgctgaacgatatcgtccacgcctccgtactgaaagaagcggcggaaattgagttggccagacatctggttgtgctgcgtgataagcttcagccgtactttgccgatggtcgttatcaggaagcgttgattgagctggctgctctgcgcgctccggtggatgaattcttcgaaaatgtcatggttaacgcggaagagaaagatatccgtatcaaccgcctgacgctgttgtcgaaactacgcgaactgttcctgcaggttgcggatatttcgttactgcaataa

SEQ ID NO: 371332 - DNA, 468 bp, Salmonella enterica
atgaaaatcagaaggttcagtaatggggatgaaatatcgttattcagagtttttttctcatctgtacatacgatcgcatcacactactacacacgtgaacaaattgatgcctgggccccagcagatatcgacctggagcgatgggccaatcacattaaggaattacaaccttttgttgtagagctggatggtgaaatagctggatatgcagatgttcaaccaaatggatacattgatcatttctttgtatcaggaacctattcaagacagggggtagggacactactgatgaattgcattcatgaggaagccagacagcgtggaattagtgaacttacttcaaatgtaagtaaggctgcggaagtgttctttctacgacacggctttcatatagtggagcgaggctttcctatttgccgtggagtgacattacaaaatgctctgatgaggaaatgtttggcgaaataa

SEQ ID NO: 371333 - DNA, 267 bp, Salmonella enterica
atgaaatcagatgttcaacttaaccttagagctaaggaatcgcagcgggcgctcattgatgcagctgcggaaatccttcacaagtcacgtacagatttcattctggaaacggcctgccaggctgccgagaaagtgatccttgaccgccgtgtatttaactttaacgatgagcaatatgaggagttcatcaatctgcttgatgcaccagtcgcagatgatcccgttatcgaaaaactgctggcaaggaaacctcagtgggacgtgtaa

SEQ ID NO: 371334 - DNA, 486 bp, Salmonella enterica
gtgggacgtgtaacagcaccagaacctttgtccgcttttcatcaggtagctgagttcgtcagcggtgaagctgtgctcgatgactggttgaagcaaaagggcctcaaaaaccaggctctcggagcggccagaacatttgtggtgtgcaagaaagacacgaagcaagtagccggtttttactctctggccaccggtagcgtcaaccatacagaagtgacaggcaaccttcggcgtaacatgccagatcccatccctgtcattatacttgcccgtcttgctgtcgatctctcattccatggaaaagggcttggtgctgatttacttcatgatgcagtgcttcgttgctatcgggttgccgagaatattggtgtacgtgcaatcatggttcatgcacttaccgaagaagccaaaaatttctacattcaccatggtttcaaatcatcacaaactcagcagcgaacattgttccttaggctccctcaatag

SEQ ID NO: 371335 - DNA, 540 bp, Salmonella enterica
atgtcgaaatcatcatggttattacttttgggtttatgcgccagcggctccgcgcttgcggcatcctcagaatccgcttttctggcgcaacatgggctggcgggaaaaacggttgagcagatcgtggatacgattgatcagacgccgcagagccgtcctttgccttactccgcgtcgattaccagtaccgagctcaaattatctgacggagagcagatttatacgctgccgttaggcgacaaattctatctctcttttgcgccctatgaatggcggacacacccctgttttaaccacagcctttccggctgtcagggagaaatgccgaataaaccgttcactgtaaaagtgacagacagtaaaggcgctgtcatcgtacaaaaagagatgcaaagctatcgaaacggatttatcggtgtttggctaccgcgcaatatggaagggacgctggaagtaagctacaacggtaaaacggcgtcacatgccattgccaccaaagatgacagccagacctgtctgacggaattaccattacgttaa

SEQ ID NO: 371336 - DNA, 213 bp, Salmonella enterica
atgtccggtaaaatgactggtatcgtaaaatggttcaacgctgataaaggcttcggctttattactcctgatgacggttctaaagacgtgttcgtacacttctccgctattcagaacgatggttacaaatctctggacgaaggtcagaaagtttccttcaccatcgaaagcggcgctaaaggcccggcagctggcaacgtaaccagcctgtaa

SEQ ID NO: 371337 - DNA, 333 bp, Salmonella enterica
atgcatttcacgatcccgctgtgtgatttacaggagttctcaatggaatataaagatccgatgtttgagctgctgagcagcctggaacaaattgtttttaaagatgaaacgcgaaagatcaccctgacgcaaaaacccaatccttttaccgaatttgaacagttacggagaggaacgggactaaaaacagatgaattcgccagagcgctgggcgtaacggttgccatggttcaggaatgggaatcgaaacgcgaaaaacccacgccagcagagcttaaattgatgcgcctgatacaggcgaacccacgcttaagtaagcaattgatggagtaa

SEQ ID NO: 371338 - DNA, 711 bp, Salmonella enterica
atggcgacaggtaagtcctgctctcgctggtttgcgcctgttgtggcgttattaatggtgtttagcctgagcgggtgttttgataaagaaggcgatcagcgcaaagcgtttgtcgatttcctgcagaatacagcaatgcgtagcggagagcgtttaccaacgctgacggccgatcagaaaaaacagtttggtccgttcgtgtctgattacgcgatactgtatggctactcgcagcaggtaaaccaggcgatggattccggtctgcgcccggtggtcgatagcgttaacgccatccgcgttccgcaggattatatgacgcaacgcgagccgctgcggcaggcaaatggttcgttaggcgtgctggcgcaacagttgcagaatgcaaaactgcaggctgatgccgcgcatggcgcgttaaagcaggccgatgacctgaaacctgtgtttgatcaggtctacaaaaaagtagtcaccgtgccggcagatgctttgcagccgctgatcccggcggcgcagatctttacgcagcagttggtacaagtgggcgattatattgcgcaacagggcgagcaggtgagcttcgtcgcgaacggcattcagttcccgacctcacagcaggccagccaatataatgcgctgattgggccgttggcctcgcagcatcaggcgtttaatcaggcctggacggcggcggtaaacgcaacccagtaa

SEQ ID NO: 371339 - DNA, 975 bp, Salmonella enterica
atgaagccgtccatcattctctacaaaaccctgcctgatgatttgctgcatcgcctggaggcgcattttaccgtcacccaggtaccgaacctgcatccggaaacggtagcgcgacacgcgcaggcatttgccagcgcgcaaggccttctgggcgccagcgaaaccgttaaccgcgcgctgctggaaaaaatgccggcgctacgcgcggcgtcaaccatctcggtgggatacgataatgtcgaggtggacgcccttactgcccgcaaaatagtcctgatgcacacgcctgccgttttgacggaaaccgttgccgatacggtgatggcattgatgctggccactgcccgccgcgtggtggacgtcgcagaacgggttaaggcgggtgaatggacagaaagcattggcccggcatggtttggcgtcgatgtgcatcacaaaacactcggtatcgttgggatggggcgtatcgggatggcgctggcgcagcgagcgcactttgggtttaccatgccggttctctatcacgcccgtcggcggcatcaggaggcggaggaccggtttaacgcccgctactgcgatctggatacgttgttgcaggaggctgattttgtctgcgtgatcctgccgctaacggcagaaacgcgacatctgtttggcgcaacacagtttgccagaatgaaatcgtccgccatttttattaatgccggacgcggcccggtggtcgatgaaaacgcgctgattgccgcgctgcaaaacggtgaaatatatgcggcaggtctggatgtctttgaacaggaaccgctatctgtggattcgcccctgctgaacatgtctaatgtcgtcgcggtgccgcatattggctcggcaacgcatgagacgcgctacaacatgatggcctgtgcggtggataatttgattgatgcgctgcagggaaaaatagagaagaactgcgtcaacccgcaggcggcgggatag

SEQ ID NO: 371340 - DNA, 663 bp, Salmonella enterica
atgaaaaaacgtgtatttgtgattgctgccatcgtgagcggcgccctggcagtatctggctgcacaacaaacccttacaccggcgaacgcgaagcaggtaaatccggcattggcgcgggtattggatcgctggtcggcgcaggcatcggcgcgctctcctcctccaaaaaagatcgcggtaaaggcgcgctgattggcgcggcggctggcgcggcgctgggcggcggcgtgggttactacatggacgtacaggaagcgaaactgcgtgacaaaatgcggggcacaggcgttagcgtgacgcgaagcggcgataatatcattctgaatatgccgaataatgtcaccttcgacagcagcagcgcgacgctgaaaccggcaggcgctaacacgctgaccggcgtggcgatggtgctgaaagagtatcccaagaccgccgtcaatgtggtgggctacaccgacagcaccggtagccacgatctgaatatgcgtctgtcgcagcagcgtgctgactccgtcgccagttcgctgatcacccagggcgttgacgccagccgtatccgtaccagcggaatgggtccggcgaacccgatcgccagcaacagtacggcagaaggtaaagcgcaaaaccgccgcgtcgaaattaccttgagtccattgcagtaa

SEQ ID NO: 371341 - DNA, 2334 bp, Salmonella enterica
ttgacccacgcaccatcgcgtcattcggtattgaccgccgcacactgggggccagtccgcgttgaaaccgacggagaacgcatttttgcctcgtatggcgaactcccgacggcacaccagaactccctgcaaaccgttgtgcatgaccaggtgcacagtaaaacgcgggttcgcttcccgatggtgcgtaaagggttcctggcttctcccgataagccgcaaggcatacgcgggcaggatgagtttgttcgcgtaagttgggatgacgcgctggacctgatccacgctcagcacaaacgtattcgcgaaagttatgggccatcgtccatcttcgccggctcctacggttggcgttcgaacggcgtattgcataaagcggctacactattgcagcgttacatggcgctggcgggagggtataccggccatcttggcgattattccaccggcgcggcgcaggctatcatgccttatgtggtgggtggcaacgaggtttaccagcagcagactagctggccggtggtgctggaacacagcgaggtggtggtgctctggagcgcgaacccgctgaatactctgaaaattgcctggaatgcctcggatgaacaggggctcgactattttgcggcgttgcgacaaagcggcaagcgcctgatctgcatcgatccgatgcgatcggaaagcgtcgacttttttggcgataagatggagtggatcgccccgcatatgggcaccgatgtggcgttaatgttggggatcgcccatacgctggtggaaaacggttggcaggatgaagcgttccttgcccgctgcacaacgggttatgaccgcttcgccgactatcttttgggcacgaccgacggtacggccaaaacagcggaatgggcggcggaaatttgcggcgtttctgcggtgaaaatccgcgaactggcggaaatatttcatcataacaccaccatgttgatggccggttggggaatgcagcgtcagcagttcggcgagcaaaagcactggatgatcgttacgctggccgcaatgctggggcagattggtacgcctggcggcgggtttggtttttcttatcattttgctaacggcggaaacccgacgcgccgcgccgccgtgttagcctcgatgcagggaagcatccctggcggggtcgatgcggtagataaaataccggtggcgcgtattgtcgaggcgctggaaaaccccggtgggttttaccaacacaatgggatggatcgccgcttcccggatattcgttttatctggtgggcgggcggcgcgaactttacccatcatcaggataccaaccgtctgattcgcgcgtggcaaaaaccggaactggtcgttatctcggaatgtttctggacggccgccgcgaaacacgcggatattgttctgcctgcgaccaccagctatgagcgtaacgatttaaccatgaccggcgactatagcaatcagcatttggcgccgatgaagcaggtcgtgtcgccccggtgggaggcgcggaatgattttgacgtttttgctgaactgagcgaacggtgggaagccggcggttacgctcggttcaccgaaggaaaaagcgagctggcgtggctggagactttctacaatattgccgcccagcgtggcgccagccagggggtgacgctgccgccgtttgccgcattctggcaggctaaccgtttactggagatgccggaaaatcccgccaacgcgcagtttgtgcgcttcgcggattttcgccgcgatcctgataaccatccgctaaaaacggccagcggcaaaatcgaaatctattctgcgcgcattgccagctatggttatgcggattgtcccggtcatccgatgtggctggcgccggatgagtggcacgggaacgccgatgcggggcaggttcagctactttccgcgcatccggcgcaccgtctgcatagccagcttaactacagttcgttacgggagcggtatgcggtggccggacgcgaaccggtgacgattcatccgcaggatgcgacaacgcgcggaatcgtcgatggcgatacggtacgcgtctggaatcatcgcgggcaggttctggcgggcgcggtcgttaccgacggaattcggcctggcgttatctgtattcacgaaggcgcatggccggaccctgaacctaccgcaggcggcatatgcaaaaacggcgcggtaaacgtcctgacaaaagatcttcccagttcccggctggggaacggttgtgcgggcaacaccgcgctggtctggtttgagaaatataccggcccggcgctaccgcttacggcgtttgatccgcctgccaactcataa

SEQ ID NO: 371342 - DNA, 441 bp, Salmonella enterica
atgattcgcaaatcccagagtgaagacatggcgtctattctggcgctgtggatgaaaagtaccatttatgcccatccctttatcgaagaacgttactggcacgagagcgaagcaattgtacgcgacgtctatttacccgccgcacaaacctgggtatgggaggaaaatggacaactgaaaggcttcgtcagcgtactggaagcccgttttgtcggggcgctgtttgtcgcccccgacgcgttaagacacggcattggcaaagcgcttctggaatatgtccagcaacgttttcctctgctgagccttgaggtttaccagaaaaatcaatccgccgtaaacttctaccatgcgcttggttttcgtattgaagatagcgcctggcaggaggataccgcccaccccacctggattatgagttggcaggcggatcaaacgccgtaa

SEQ ID NO: 371343 - DNA, 582 bp, Salmonella enterica
atgcagcgttgcgactgggtcagccaggaccccctttatattgcctatcatgataacgagtggggcgtaccggaaactgacagcagaaagctgtttgaaatgatctgtcttgaaggtcaacaggccggtttatcctggatcaccgtgcttaaaaagagagagaactatcgcgcctgttttcatcagtttgacccggtacgcatcgcagctatgcaggaggaggatgttgaacgcctgctgcagaacacgggcatcatacgacatcgcggtaaaattcaggccattatcagtaacgcccgcgcctggcttgcgatggagcaaaacggcgagtctttcgccgattttgtctggtcattcgttgatggccagccgcagatcacccaggcggccagcctggataagatccccacctcaacacctgcgtccgatgcgcttgctaaggcattgaaaaaacgtggtttcaagtttgtcggtacgactatctgttactcctttatgcaggcgtgcggactggtcaacgaccatattaccggctgtttttgccatccgggagaaaaacatgattcgcaaatcccagagtga

SEQ ID NO: 371344 - DNA, 705 bp, Salmonella enterica
atgattgtaagaaaacgccgtggtcgccggacgttgtgttgtctggcgggccttatggcctgctcgttttttatcaataccacgtatgcctggcaacaagaatatatcgctgaagcggctccggggcatacgacggaacgctatacctgggacagcgatcaccaaccgaattacaacgacatactggccgaacgtattcagtctacgcaaaatacagtggggccggtgcttagcctggcggatgaaaccccgcttgatgcgaccagcggtatcagtatgggctggaattttccgctttcccgacgcgtgaccactgggccggtcgcggcgctgcattacgacggttcgacgtcatcaatgtataacgaatatggcgatagcgcgacgacattagcgtttaccgatccgttatggcacgccagcgtcagtacgttaggctggcgggtaaactcgcagttcggcgatgtccgtccctgggcgcaaatcagctataaccaacagtttggggagaatatctggaaagcgcagtccgggttgagtcgtatgaccgcaggaaatcaggcgggaaactggctggatgtcaccgtaggcgcggacgtgttacttaacccgcacctggcggcgtatgcggcgttttcccaggcggaaaatagcgctacggatagcgattatttgtataccctgggggtgagcgccaggttttaa

SEQ ID NO: 371345 - DNA, 189 bp, Salmonella enterica
atgggtgcgctgtacgcctggtgttgcatgtgttacgcagacgcttcgctaaccccctcccactgcggctggcgaatagtggtggaaagtgccagcgagataattaacagcgcaaagataacgcagaaggttagcaccctacttccgccacaagagctgttatcactgcgtttcgattataatttttaa

SEQ ID NO: 371346 - DNA, 408 bp, Salmonella enterica
atgaaatggttaactcagtccgcagagcaaaatcatcccggcgcgcttctctttttggcctatgcgtacaacgacggtgatggcgtaacgcaagacagcaaaaaatatctctcctatttattcaaagcggcagagcttggcgaaagtgatgcgcagttagaagtgggatatttaaatcttatcggcgaaggaatgccgaaaaacctgccggaagcctataagtggattaaaaaatccgctgaccagggaaatgctcaggcgcactataaccttggactcatgtacaggaatggtgatggcgttgagaaagacctcaacaaagccaaacttcatcttacagcggcggtaaaaggcggcgtcaaacctgcactggcagccttaaaggaattaacgcctcaaactaagtaa

SEQ ID NO: 371347 - DNA, 1731 bp, Salmonella enterica
atgaaatttaaattcgccacattactcacagccgccacggttttttactcttatcagagcgttgcacaaagtcagcaatcgcctgatgtctggtcagttgtcgaacagaaactgcaaaatgccgtccctttaaatgaaaacaccacttttaaatcgcaggcagcctggtttgaattacacagggaactgtttatgtacggcccgatgagccgtgcggatgcattactgaaaaagctggacacacaatcgaatgatgcgaagttttcgctaaaccatgaggcctcgtggatcgctgaaaataatagcccggatgccgcgatggttttcctgtccaaaattggtctcgataaaccgtcgagcattaccgcctacgagagctacgttgatggctgggttaatcgcaaacagcctgaaaaagccttagcccttcttagcaaaaatgccgacgcgaggaatttttatttagccacggttttaaaatcctggcactcagatcctgataaaaccgccgctatttataatgaaaattacgctgataaaattgttgttccttatactcagctaaaaatgctgcttattattgcgaagcagtaccatgccaagggcgacaccgcaaaggcgttggtttacgcagatagcgcgctgaaaatgtttgatacggctattgctcaacaaccgagtgctgaagcctaccgttatcaggagtatctcgacctgatggagatctattacgccacgggtaataaagagaaggcgatggcgttgtctgcgagattgcgcaaagcaaccggcaataaaggaagctatttccagtattcattaccgggattgctctctttttataagaaaaacgagctgacacagaattatcaggagacgctttcaacctatgtgacgcaggtcgataaaatattcaattttgccccttcgccgcgcattgaaatggagctgattgatttattaagcaagcttgatgatgttgcgctgatgaataagcgtatcgatttgctgatgagcgcgccggaatatacctgctacgacgacaggtattgctacgagtacaaaatcaaagcgctgaagaatctctttcagcataagcagaatgctgtggcggaaaagcatatcgcaaccctctccgccgaggcgcaaaccctgacgttcgccgaatgggaagatgcaacaaatgaaataggtgaagtactcaaagaaattggccatcctgaggcagcgcaaaaattagccgtcagcgccgaggcgatttacctcagccaagcaaaagcctggcctgatgaagatatgtcgcgttcctttcaaagacttgcagagctttacggctatggcaacgacacggtgaatgccaaacgggtgttacaccagcacgttccctctctcgaagaggaggcgatgatcgaccactacatgaatgcaaaacagtggagtcaggcaagggaattgatgattaacgcagatagggtcgataataaaaacctgatgctgttacgccagatttgttctgaaaacacgcccgagtgtcaggaacatattacctttacgctgaaaaaattaaccacgcaggcgtcgattacccgccaggacgacaccggtaatcagcagctttatcagattgggaatatttttcacagattgggtatcataccgggagcggaacagcaggcgctgattcaggcgttgtataacaaggccgcagagcctaaaaaagccacgccttaa

SEQ ID NO: 371348 - DNA, 174 bp, Salmonella enterica
atgttgacccaacaccgcctgccggaagacccgcgctggaacgccctgcacgaggagttcagctttgacgacgacgacaacctgctgggcatgaacatgccgcccgaaggtggcgagcatcaggcgaaagtcaaaggcgaccgcctgctgctacagggcagaccaccactatga

SEQ ID NO: 371349 - DNA, 1455 bp, Salmonella enterica
atggaaaataaaggcacaaacctaacgcccgagcaggcgctggatcgcctggaggagctatacgagcagtcggttaacgcgctccgtgaagccatcgctgactatgttgataacggtacgctgcccgatccccacgccaggcttaacggactgtttgtttatccttcgctgtctgtaagctgggatggcgcgacaccgaacccgcctaaaacacgcgcttttggacgctttactcatcccggctgttataccactaccgttacgcggcctgcgctatttcgcgcttatcttctggaacagcttaacctcgtttaccatgattatggcgcgcatattgcggtagaggcctcgcaccatgagatcccgtatccttatgtgatcgatggctcggctctgacgctggatcgttctatgagcgccgggctaacgcgccattttcctaccacagaactggcgcagattggcgatgagacggcagacggtctgttccaccccggcgaattctatccgctatcgcacttcgacgcgcgtcgtgttgacttctcgttggcccggttacggcactataccggtacgccggttgaacattttcagcccttcgttttgtttaccaactacacccgctatgtcgatgagtttgtgcgctggggatgcagccaaattcttgatcctgacagtccctatatcgcgctttcctgtgccggcggaatttggatcacggcagaaacggaagcgccggaagaggctatttccgatctggcctggaagaagcatcagatgcccgcctggcacctggtaacggcagatgggcaggggattacgctggtaaatatcggtgtcggcccttcaaatgctaaaacgatttgcgaccatttggccgtgttgcggcctgacgtctggcttatgattgggcactgtggagggttacgagaaagtcaggcgattggtgattatgtgctggcccatgcctacttacgcgatgatcatgtgctggatgccgttctgccgcctgatattcctattccaagcattgcggaagtacagcgtgcgctgtacgacgctaccaaagcggttagcggaatgcccggtgaagaggtgaaacagcgactgcgcacgggaacggtcgtcaccacggatgatcgtaactgggagcttcgttattccgcatcggcgctgcgattcaaccttagccgcgcggtcgcgattgatatggagagcgcgacgattgcagcccagggctatcgcttccgcgtgccttacggcacgctgctttgtgtttctgacaaacctttacacggtgaaattaaactgcccgggcaggcaaaccggttttatgagggggctatttcagaacatttgcaaattggtattcgtgctattgatttactacgcgcagaaggtgatcgtttgcactcacgtaaattacgcacgtttaatgagccaccgtttcgctaa

SEQ ID NO: 371350 - DNA, 327 bp, Salmonella enterica
atggtagacaatattgaacagcaagtttacgagcttgtacggccttatgctggcacatatctgttcaacattaagcaagtggaattaacaccagagattgaccttgatactgatctgagcattgatgaacttgaagccgaagatctcatgaataaattcttcgagaaactcaatgtcgagcgaggtaacttcagaatagaaacctattttcctaatcaccctttttcatggcatccgttcaagaaaacggaacctgtacccgtcccagatttcactatcagcatgctgatcgagtcagcaaaagccgggaaatggttatatgactaa

SEQ ID NO: 371351 - DNA, 1527 bp, Salmonella enterica
ttgttgcatttgcagacattttttctgcaaaaagctttgcagccttacgatttctcgctcattattgaaatgtggtttcaactctcttctttaaggtccattttgaacgtctccactgccttacgccaggctgtcgtccgtacgccctggtatgccaaacgcaagagctacaaagtgttgttctggcgtgaaatcaccccacttgctatccctatttttctggaaaatacctgtgttttgctaatgggcgtgctcagtacttttctcgtcagttggctgggcaaggaagcaatggcgggcgtggggcttgccgacagttttaatatggtaattatggctttttttgcggctatcgatcttggtactacggtggtggttgcctttagcctgggcaagcgcgacaggcgacgggcaagggcggcggcgcgccagtcgctggtgattatgacgctatttgccgttgtgctggcagtggtcattcattatttcggcagtgaaattattaatattgtcgcaggcgaggcgacgtcagaagtaaaggggctggcgttaacgtaccttgaactgacagtgctgagttatccggctgcggcaattgcgctaatcggtagcggcgcgctgcgtggggcagggaatacgaaaatcccgttgatgattaacggcgggatgaacattctcaatattatcatcagcagcatcctgatttacggggctttctcctggcaagggctgggttttgccggcgcggggctgggattaaccatttcgcgctacatcggcgcagtagcgattatttgggtgctgatgattggttttaatccggcgctgcgcattccgctgaaaagctatctgaagccgctgaatttcggcattatctgggaagtgatgggtatcggtattccggcgagcattgaatcagtgctgttcaacggtggcaagctactgacgcaaatgtttgtcgccggaatgggcactaacgttattgcgggtaactttattgccttttccgtggcggcgcttatcaacctgccgggtaacgcccttggttcggcgtcgactattatcaccggtaagcgtcttggtaccggacaaattggtcaggcagagcgtcaattgcgccatgtattctggatgtcgactatcgtacttacggcaatcgcctgggggacagcgccgttcgcgggtctgtttgcctcattttatacccaggagcaggacgtaaaagaggtagtgaaagttctgctctggcttaatgctgtctttatgccaatttgggcggccgcgtgggtgttgccgtcgggttttaaaggcgcgcgcgatgtgcgatttgcgatgtgggtatcgatgctggggatgtggggctgtcgcgttgtggcagggtatacgcttggtattgtgctgggtatgggggttgtaggggtttggctggggatgtttcttgactgggccgtgcgcggcgcgctgttttactggcgtctggtaagcgggcgctggctgtggagatacccgcgcgtaaagagggagtaa

SEQ ID NO: 371352 - DNA, 930 bp, Salmonella enterica
atgcgtcgtatcacacctttttttccgtttttcgtcttgttggtaagccatttctcgctggctataagctatccgttgccgcccgaaggcagtcgtctggtaggacagcctgtcacaatcgccgtaccgcagaacaatactcagcccttagagtcatttgccgcccgctacggtcaggggctgagtaatatgcttgaagcgaatcccggcgtggatgtgtttttacctcagtctggttccacactggtggtgccgcagcagttgattctgcctgacaccgttcgtgaaggtattgtggtaaacgtcgccgagatgcgcctttattattatcccgcaggcacgaatacggttgaggtgctacctattggtattggtcaggctggccgtgaaacgccgcgcaactgggtaactgcggttgaacgcaaacaagatggcccggtttgggtgccaacggctaatacgcgtcgggaatatgctaaagagggaaaaacgctgcccgcgatggtgcctgcggggccggataaccctatggggctatacgcaatatatatcggcaggttatatgccatccatggcactaacgctaactttggcattggccttcgcgtcagtcagggctgtatccgtttacgcaatgacgatattaaatatttattcgaccatgttcctgtaggaacccgcgttcagattatcgacaggcccgttaaattttcggtagagccggatggcagtcgttggctggaggtacacgaaccgctttctcgcaaccgtgctgaatttgagtcagacaaaaaagttccattgcccgttacgccagtgctgcgcacgtttatcaaaggggatgacgttgatacttcgcgggttaatgaggtgctggagcgccgttccggaatgccggtcaacattagcgcgggcaggcctggcctttaa

SEQ ID NO: 371353 - DNA, 1071 bp, Salmonella enterica
atgcagacactacacgctttactccgtgacattcctgcgccggacgccgaggcgatggcgcgtgcgcagcaacatattgacggcctgctcaaaccgccgggcagcctgggcagactggaaaccttagccgttcagctcgcgggtatgccgggtcttaacggtacgccgcaggtaggtgaaaaggcggtgctggtgatgtgcgccgaccatggcgtctgggatgaaggcgtagcggtttcgcccaaaatcgtgacggcgattcaggcggcgaatatgacgcggggaacaaccggcgtatgcgtgcttgccgctcaggccggtgcgaaggtgcatgtcattgatgtcggtattgatgccgaacctattcctggcgtagttaatatgcgcgtcgcgcgcggctgcggaaatattgccgttggcccggcgatgagtcgcttgcaggctgaggcgcttttgctggaggtttcccgctacacctgcgacctggcgcaacgcggcgtgaccttatttggcgtaggggagctgggaatggcgaacactacgccagccgccgcgatggtcagcgtttttacaggaagtgatgcaaaagaggtggtggggattggcgcgaatcttccgccttcccgcatcgataataaagtggacgtcgtgcggcgggcgattgcgattaatcagcccaatccgcgcgacggcattgatgtgttgtcgaaggtgggtggttttgatctggtcgggatgaccggcgtgatgcttggcgcggcaaggtgtggcttacccgtattgctggatggctttctttcctactcggcagcgctggcggcctgtcagattgcgcctgcggtgagaccttatctgatcccgtcgcacttttcggcggaaaagggcgcccgcatcgcgctcgcgcatttgtctatggaaccctatttgcatatggcgatgcggttaggtgaaggaagcggcgcggcgctggcgatgccgatcgtggaagccgcgtgcgccatgttccacaacatgggggagttggcggccagtaatattgtcctgccggaggggaacgcaaacgcaacataa

SEQ ID NO: 371354 - DNA, 744 bp, Salmonella enterica
atgagtaagctgttttgggccatgctcgcttttattagccgcttgcccgtgccgtcacgctggtcgcagggactggatttcgagcagtattcgcgtgggatcgtgatgtttccctttatcgggttgattctgggaggggtaagcggcctgattttcatcctcctgcaaccctggtgcggtattccgctagcggcgttgttctgtattctggcgctggcgttgctgaccggtggttttcacctggatgggttggccgatacctgcgatggtattttttccgcgcgccgccgtgagcgaatgctggagattatgcgtgatagtcgtctgggaacccatggcgggctggcgcttatttttgtgctactggcaaaaattctggtggtcagcgaactggcgttacgtggaacgccaatgttggcggcgttggcggcggcctgtgcggccggacgcggcagcgccgttttattgatgtaccgtcatcgctacgcccgtgaagaggggcttggcaatgtatttatcggtaaagtcagcggacggcaaacctgcattactctgggattggcggtaatcgtcgccacggtattactgcctggtatgcaagggttggccgcaatggtggtcacatgcgcggcgattttcatccttggccagttgcttaaacgtacgcttggcggtcaaaccggcgatacgctgggcgcggcgatcgaacttggtgaattgatctttctgctggctctgttatga

SEQ ID NO: 371355 - DNA, 546 bp, Salmonella enterica
atgatgattctggtgacgggcggggcgcgtagtggtaaaagccgtcatgctgaagccttaattggcgatgcgccgcaggtactgtatatcgccacctcgcagattcttgatgacgagatggcggcgagaattcagcatcataaagatggcaggccggcacactggcggaccgcagaatgctggcggcatcttgatacgttgattaccgcggatcttgcccctgacgacgcgattttgctggaatgtattaccaccatggtgacgaatctgctgtttgcgctgggaggcgaaaacgatcccgaacagtgggattacgcggcgatggagcgcgccattgacgatgaaattcagattttaattgcagcctgccagcgctgcccggcgaaagtggtactggtgacaaatgaggtgggaatggggatcgtcccggaaaaccgtctggcgcgccattttcgtgatattgccggtcgggtcaaccaacgactgtcggcagcggcggatgaggtctggctggtggtctcaggtattggagtcaaaattaaatga

SEQ ID NO: 371356 - DNA, 1521 bp, Salmonella enterica
atgacgcaggcagttatgttgcaggggacggcatccgacgtcggcaaaagtgtgctggcggcgggtttatgccgcattttttatcaggatggtctgcgtaccgcgccgtttaaatcgcaaaatatggcgcttaattctggtattacgtcggatggtaaagagatggggcgggcgcagatttttcaggcggaagccgcggggatcacgccagatgtgcgtatgaacccggtgctgctcaaaccgaccagcgatcgccaggcgcaggtcgtgctgatggggaaagtggcgaccaatatggatgcggtgagttaccatgactataaaccgcgtttgcgtgagcaaatccttgcggtctataacagcctggcgcaggaatatgacgttattgtgctggaaggcgccggaagcccggcggaaatcaatctgcgcgatcgcgatatcgtcaatatgggaatggcggaaatggcccagtgtccggttattctggtggcggatatcgaccgaggcggcgtattcgccgctatttatggcacgctggcgctgctgcataaacaggagcgtgacagagtaaagggcgtcattatcaacaaattccgcggcgacgtggcgctactctattccggtatcgaacaaatcgaatcgcttaccggcgtcccggtcctgggagtgatgccgtggctggatgtggatctggaagatgaagatggcgtcgcgctgcaaaacgataaatatcgcggtaacgccccccgtgatatcactattgccattgtgcaactgccacatatttctaactttacggattttaacgctctggcggcgcagccggatgtgcgcatacgctatattcgccgcccggaagcgttgactgacgctgatctggtgatcctgccgggcagtaagaatacgctgagcgacctcgcctggctgcgcgaaagcgggatggcggatgcgctattgcagacacatcggcagggcgtgccggtgatgggaatttgcggtggctaccagatgctgggcgacactattgtggatgaggtggagtcggggctgggtacgcagccgggcctggggctgcttaatacgatcactcgctttgcacaggataaaatcacgacgcaggttaacgcgacaatgtcaggcgagctgcccagctggctggctgccgcggcggggctaccggtacgcggttatgaaatccacatgggggaaacggtgctgcaggaaggatgctgtacggccatgacgttacagaaaaatggatgctctgtggcggatggcgcggtcaccgccgacggactggcgtttggcacttaccttcacggcctgtttgacagcgatgcgtttacccgtgcggtggtcaatgggttacgggcacgaaaagggcttgcgccgtgggaaacgactttttgttatgcggagcataaagcgcggcaatttgatctgctggcggaagcgatgcggcaacatattgatattgataaaatttataccatcatgcaacagcatcaggagccggtatga

SEQ ID NO: 371357 - DNA, 816 bp, Salmonella enterica
atgcttgccacttcagacctgtggttccgatatcaggatgagccggtacttaaagggttaaatctggatttttcgctctcgcctgttaccggtttggtgggcgcgaacggctgtgggaagtctacgctttttatgaacctgagcggcctgttgcgtccgcaaaaaggggccgtgttgtggcagggaaaaccgctggattacagcaagcgcggactactggcgctgcgccagcaagttgcgacggtttttcaggaccctgaacagcagattttttatactgatatcgatagcgacattgcgtttagtttacgtaatttgggggtgccggaggcggaaatcacgcgccgcgtcgacgaggcgctaacgctggttgacgcccaacattttcgccatcagcccattcagtgtttgagtcatgggcaaaaaaaacgtgtggctatcgccggagcgctggtgctacaggcgcgctatctattgctggatgaacccactgctggtctcgatcccgcagggcgcactcagatgcttgctatcatcaggcggattgtggcgcagggcaatcatgtcattatctccagccatgatatcgatcttatttatgaaattagcgatgccgtatacgtgttacgccagggccagatcctgacgcatggcgcgcctggcgaggttttcgcgtgtacggaagcgatggaacaagcggggctaacccagccctggctggtcaaacttcatactcaactgggactgccgctgtgtaaaacagaaacggagttttttcatcgaatgcaaaagtgcgcattcagggaggcgtcatga

SEQ ID NO: 371358 - DNA, 678 bp, Salmonella enterica
atgaccgggcttgatcgactcagctatcaaagccgctgggcacacgttgcgccgcagcgcaagtttttgctgtggctggcgatgataatactggcgtttgttctgccgcctgtagggcagggcattgagctgctgatcattgccggattgagctgttggctattgcgcatatccctctggcgctggtgtcgatggatggcgataccttttggatttttgttggtcggcgtgataacgattatcttcagcatcagccgcgagccgcaaatgctgctggctggcatatctgttgggccgtactggatcgggattacccgtgcgggcgtggttacggcgaatgaaacgttctggcgtagcctgacggcgctgtccgcgacgttgtggctggtgatgaacctaccgtttccgcagttaattagcttgcttaagcgcgcgcatattccacgcctgcttaccgagcaaatcctgttaacgtggcgctttctctttattcttctggatgaggcggcggcaattcgtcgctcgcaaacgctgcgttttggttattgcagcctgccgaacggctatcgatctctggcaatgctgactggactcctgtttacgcgggtgttaatgcgttatcagcaaatgactaccacgctggatatcaaactgtatcagggtgattttcacctgtaa

SEQ ID NO: 371359 - DNA, 282 bp, Salmonella enterica
atgaaaaaaacgttgatgttgttagcgatggtggtggcgttggtgattctgccgttttttattaaccatggcggtgaatatggcggttcagacggcgaagcggaaagccagattcaggctattgcgccgcagtataaaccctggtttcagccgttatatgaacctgccagcggtgaaattgaaagcctgctgtttacccttcagggctctcttggcgcggcggtgattttttatatcctggggtattgcaaaggtaaacaacgccgtgatgaccgggcttga

SEQ ID NO: 371360 - DNA, 738 bp, Salmonella enterica
atgaaacttgaacagcagcttagacagttgtctttcagtggactggctgcagcgctattgctgatggttgtcccgcaacaggcgtttgcgatgcatatcatggagggctttttaccgccagtgtgggcgctggcctggtggttactgtttttaccctgcttgtggtatgggctggtacgcttacggcgtattgtgcaggaggataatcatcagaaggtactgctggcgctgtgcggcgcgtttatttttgtcctgtccgcgctcaaaattccgtcggtaacggggagttgttcacatccgaccggcgttggtctggcggttatcttgttcgggcctggggtggtggcgattctcggcgcggttgtgctgttgtttcaggcgctattgctggcgcatggcggcctgacgacgcttggcgcaaatggaatgtcgatggcggtgattggcccggttgtcggttatctggtgtggaaaatggcctgccgtgccggactgcgccgcgatgtcgccgtttttctgtgcgcgatgctggcggatttggcgacctattttgtgacttcagtccagcttggcgttgcgtttccagatccccatgccggagcgacagggtctgttgtgaagtttatggggattttctgcctcacacagattcctgtcgctattgctgaaggtttattaaccgtcatgatttatgaccagttaaccaaacggcaagtgattaccgtacaaggacattaa

SEQ ID NO: 371361 - DNA, 714 bp, Salmonella enterica
atgaacggtaaattatacgcattaagtaccgggccaggcgcgcccgacctgataaccgtccgcgcagcgcggattcttggctcgctggacattctgtatgcgcccgccggtcgtaaggggggcgatagcctggcgctgtcgattgtgcgcgactatctcggcgagcagacggaagtacgttgttgccatttccctatgagcgctgacggcgccgagaaagaagcggtctggaacgaggttgccgccgcgcttaccacagaggtggaagcgggtaaacaggtcggttttattaccctgggcgatgcgatgctattcagtacctggatttttttactccagagaatcggctgcccggagtggctggagattgtccccggcgtcacgtccttcgccgcgatagccgcccgcgcgaaaatgccgctcgccatagaacggcaatcgctggcggttatttcttgtaccgcgccggaggcggaaatagcccaggcgctacaacagcatgatagcctggtgttgatgaaagtgtatggccgattcgcccgtattaaagcgttgctggcgcaggctggcctgctggaatgcgccttaatgatgtccgaggccacgctgctcggcgagcagtgctggcgccacctccacgaggtcaacgatgatcgagcgttgccctatttttcgaccattctggtcaataaacagtgggagtatgcagaatga

SEQ ID NO: 371362 - DNA, 795 bp, Salmonella enterica
atgaaaaaagcgcttctggtggtcagttttggcaccagctatcacgacacctgtgaaaaaaacattgtggcgtgcgaacgtgatctggcggcgtcctgtcccgatcgcgacctgtttcgcgccttcacttccggaatgatcattcgcaagcttcgccagcgtgacggtatcgacatcgatacgccattacaggctttgcaaaagcttgccgcacagggatatcaggacgtggcgattcagtcgttgcacattattaacggcgacgaatatgaaaaaattgtccgtgaagtacaactcttgcgtccgttattcactcgcctgacgctgggcgtgccgttgctgagcagccataacgattatgtgcagctaatgcaggcgttgcgacaacagatgccatcgctcagacaaacggagaaagtcgtttttatgggccacggcgccagccatcacgcattcgcagcttatgcctgtctcgatcatatgatgaccgcgcagcgctttccggcgcgcgtcggcgccgtagaaagctacccggaggtcgacatcctgatcgacagcctgcgtgacgaaggcgtcaccggcgtacatttgatgccattaatgctggtggcgggcgatcacgccattaatgatatggcttcagacgacggcgactcatggaaaatgcgctttaacgcggcgggcattccggcgacgccgtggctgagcgggctgggagaaaacccggctatccgggcgatgtttgtcgcgcatttgcgccaggcgctgaacatgacggtagaggaggcggcatga

SEQ ID NO: 371363 - DNA, 792 bp, Salmonella enterica
gtgaatgagggggaggtgctggtggtgggcggcaccagcgatgcgcgcgcgttatgccgacaactggatgcggcgaacgtcgcgtacaccttatccgtggcgacgccagccggaaaagcgctggctggcgacattaaaggacaggtgcgctgtggtcgtctggagtacgggcagatggtcgcctggctaaaagaaaaccgtactcgctgggtaatagatgcatcgcatccttatgcagaaatggtcagccataacctccttcgcgcctgtgaaacggcgggcgtgttgttaagtcgttatcagcgtccggagcagcttagcaatctgacgcatccgcttctctatacggcgcgcagtattgccgatgcctgcgagatagcgaggcgttttggtccgcgcgtgttactgacgaccggcagtaaagatctggccgtctggcgtgccgggctggcggaaaaaacgttgctggcgcgcgtactgcccgtggcggaggtgattcaacgctgcagcgaactggggttcggcgttggagaaattttcgcactgtgtgggccgttcagcgctgattttaacgccgcgttttaccaccagtgccgggccgacgtagtcattaccaaagcatccggcgcggaggggggatatcaggaaaaagttcagccctgtctggatgcgggcattccctgcatcgttattgcgcgcccgacgccgcttgtgacgggtgatgagttactggaaagccaggccgcctttgcgcagcgtttatcgcgctggctggccgcagctaaggagtaa

SEQ ID NO: 371364 - DNA, 726 bp, Salmonella enterica
atgttaagcgtaatcggaattggccctggctcacagtcaatgatgaccatggaagcgattgaggcgttacaggcggcggaaatcgtcgtgggctacaaaacctatacccatctggttaaagcattcaccggcgataagcaggtgatcaagaccggcatgtgtaaggaaattgaacgctgccaggcggctattgaactggcgcaggctgggcataacgtagcgctcatcagcagcggggatgcgggaatttacggcatggcgggtctggtgctggaactggtcggcaagcaaaaactggacgtcgaggtgcggctcattcctggcatgaccgccagcatcgccgccgcctctttactgggcgcgccgttgatgcatgacttctgtcatatcagcctcagcgacctgctgaccccgtggccggttattgaaaaacgtattgttgccgccggagaggcagactttgttatctgtttttacaacccgcgcagccgcgggcgcgaagggcatctggcgcgcgcgtttgacctgcttgccgccagtaaaagcgcgcaaacgccggttggcgtggtgaaatccgccggacgtaagaaagaggaaaaatggctgactacgctcggcgatatggattttgaaccggtagatatgaccagtctggtcatcgttggtaataaaacgacctatgttcaggatgggctgatgataacgccgcgaggttacacgttgtga

SEQ ID NO: 371365 - DNA, 1056 bp, Salmonella enterica
atgaataccgtaaagcctgaatccattgcgttgttttgcctgacgcccggcggcgtggcgctggcaaagagactctccgcgatgctgccgttaacctgctttaccagtgaaaaactgcgggaagagggatttattcccttcgatggcggattcgctaataccgcccggcaggcttttaccacttataccgcgcttatttttatcggcgcgaccggcattgccgttcgtgtcctggcgccgttagtgaacgacaagttcagcgatccggcggtggtcgtcattgatgaacgaggtcagcatgtcattagcctgctttccggtcatgcgggcggggccaatgccttgacgcgctacctggcaggaatgttaggcgccgatccggtgattaccacggcaacggatgtcaatgagatgtccgcgttggacaccttagctttccagcttaacgcccgcatgtccgatcttcgcacggcggtaaaaaccgttaaccagatgttggtcagtcatcaacgtgtggggttatggtgggatgccgaactaacggaagagatcggccagtgcgatattcgcggttttatccctgttgatgatttgcagcggttgcctgagctggatgcgcttatctgcgtctctttgcgtaatgacctccctgagcttcccgtactgcactggaaactggtgccccagcgtgtggtggcgggaattggctgtcgccgcgatacgccatttcccctgttagcgacattactggcgcgtcagcttgaagcgcagaaactcgatccgctggcgttaaaagcgattggcagcgtcacgctcaaaaaaggggagccggggcttattcagctcgcctcctgctgccgcgtgccttttaaaacctttaccgccgaagcgttgcgtgaattcgaacaccattttcccggttctggcttcgtcagaaaaacggtgggcgttggcagcgtatccggcccggcagcgtggttattaagccagggacaattgttaggcgagaccctgcgagaacagggcgtcactattactttgggagtttcacactga

SEQ ID NO: 371366 - DNA, 774 bp, Salmonella enterica
atgtcagagacatttgatccacgctgtgtatggttcgtcggcgccgggccgggcgatcgcgagctgatcacgcttaaaggctaccgcctgctgcaacaggcgcaggtagttatctatgccggttcgctgatcaataccgaactgctggattactgccccgcgcaggcagaacgctacgacagcgccgaactgcatcttgagcagattatcgagctgatggcggcgggcgtgaaagcgggaaaaacggtggtgcgtttgcaaacgggcgatgtctcgctgtacggctccgtacgtgagcaaggcgaagagttaacccgccgtggtatcgactggcaggtagtgcctggcgtcagcgcgtttctcggcgctgcggcggagctgggtgtggaatataccgtaccggaggtatcgcagagtctcattattacccgtctggaagggcgtacgccagtaccggcgcgcgagcaactggaggcgttcgccagtcaccagacgtcgatggcgatttatctctccgttcagcgtattcaccgagtggcggaacgtctcattgccggcggttatccggcagctacgcctgtcgcggtcatctataaggctacctggccggaaagccagaccgttcgcggcacgttagcggatattagcgacaaagtacgtgatgctggcatccgtaagacggcgctgattctggtcgggaattttctgggtaaggagtatcactactcaagactttatgcagcggactttagccatgaataccgtaaagcctga

SEQ ID NO: 371367 - DNA, 579 bp, Salmonella enterica
atgaaagatgagctttttctgcgcggcgagaacgtgccaatgaccaaagaggcggtacgggcgctggcgctgtcgaaacttgagctccaccgcgccagtcacctgattgacgtcggggcgggaacgggaagcgtctcaattgaagcggcgctgcaatttccttcgttgcaggtgacggctatcgagcgtaatcctgccgcgctacggctgcttgatgagaatcgtcagcgctttgcctgcggcaatatcgatattctccccggcgaagcgccaatgaccataaccgggaaagccgatgcggtgtttatgggcggcagcggcggacatctgacggcgctgattgactgggcgatgggccatctgcatcccggtggccgtctggtgatgacctttatcttgcaggaaaaccttcatagcgcgctggcgcatcttgcgcacatcggcgcatgtcgaatggactgtgtacagcttcagctttcatcgttaacgccgctgggggcggggcactatttcaaaccgaacaatcctgtttttgttatcgcctgtcagaaggaagaaaaccatgtcagagacatttga

SEQ ID NO: 371368 - DNA, 606 bp, Salmonella enterica
atgctaacggtcgtgggaatggggcccgccggacggcatttgatgacccctgcggcgctggaagcgatagaccacgccgatgcgctggcaggcggtaaacggcatttggcgcagtttccggcgtttggcggcgaacgatttacgctgggcgcggatattggcgcgttgttgtcctggattgccgcccgctgggataaagggatcgtggtgctggcctccggcgatccgctgttttatggcatcggtacacgcctggtggcgcattttggtatcgaacaggttcgcattatccctggcatcagcgccgtacagtatctgtgcgcgcaggctggaattgatatgaatgacatgtggttgaccagtagccacggtcgttgcgtcagcttcgatcagttggcgagccatcgcaaagtggcgatggtcacggatgcccgctgcgggccgcgagaaatcgcgcgggaactggtcgcgcggggcaaagggcatcgcttaatggtgattggtgaaaatctggcgatggaaaatgagcggatccactggctacccgtcagtgcggtcaacgccgactatgaaatgaatacagtggtgatcctggatgaaagatga

SEQ ID NO: 371369 - DNA, 1140 bp, Salmonella enterica
atgagcgagctttcttttgacgcgccggtctggcaccacggtaaagcgttacgtaaaggatataccaccggttcctgcgcgacggcggcggcaaaagtcgccgcgctgatggtattacgtcaacatctgattcatcaggtctccatcgtcacgccgtcgggcgtcacgctatgcctgaacgtggagtcgccgcacattgaaggccagcaggcgatagccgcaattcgtaaagatggcggcgatgacgtggatgccacgcacggaatgctgatttttgcccgcgttacgctcaacgacagcggtgagattacgctcactggcggcgaaggtattggtacggtaacgcgtaaagggattggactgccgctcgggagcgccgccatcaatcgtacgccgcgccataccattgagtcagcggtgcgcgaagcgataggcccggcgcgtggggccgatgtggagatttttgccccggaaggcgaagtgcgggcgcaaaaaacgtataactcgcggcttggcatccttggcggcatttccattattggcactaccggcattgtgacgccgatgtcggaagaaagctggaaacgctcactatcgctggaactggagatcaaacgggcgtcaggattaacgcgggtgatactcgtgccgggcaaccacggcgaacggtttgttcgcgaacaaatgggcgtcgacacacaggcagtcgtcaccatgagcaattttgtcggctacatgattgaagaggcggtacggctgggattttgccagatagtgctggtggggcatcctggaaaactgatcaaaatcgccgccgggatctttcatacccatagccatattgccgatgcgcgcatggaaacgctggtcgcgcatttagctttactgggcgcgccgctggagttactcaccctggtcggcgattgcgataccactgaagcggcaatggagcacattgaagcatatggcttcgggcatatctataaccatcttgccaggcgtatttgtttgcgagtcatgcagatgctgcgttttaccaaaacgccgcctgtctgcgacgccatcctgttttcttttgataaccatattctcggcagtaatcgtcccgtcgacgagattgctaaggagctgcaatgctaa

SEQ ID NO: 371370 - DNA, 633 bp, Salmonella enterica
atgcattatatccagcagccccaaaccattgaggccaacagtttcaccattattagcgacattattcgcgaaacgcgtcctgattaccgtttcgccagtccgctccatgaggccattatcaagcgggttattcataccaccgccgatttcgactggctggacattttgtggttctctgccgatgcgctggagcagctttgtgatgcgttacgccatccgtgcattatttataccgataccacgatggcgctgtccggcattaataaaagattactggcgacgtttggcggcgagtgtcgctgttatatcagcgatccgcgcgtggtgcgcgccgcacaaacgcaggggattacccgttcaatggccgccgtcgatatcgctatcgccgaggaggagaaaaacaagctctttgttttcggtaatgcgccgacggccctgttccgtttgcttgaacataacgtgacggtgagcggcgtggtgggcgtaccggtaggctttgtcggcgcggcggagtccaaagaggcactcacccatagccatttccccgcggttgccgcgttagggcgtaaaggcggcagtaacgtggctgccgctatcgtcaatgcgctgctctatcatctccgggaggcctga

SEQ ID NO: 371371 - DNA, 960 bp, Salmonella enterica
atgacgatccttgcctggtgtatcgcctgggtgctggattttatcatcggcgaccctcaacactggccccatccggtacgctggataggccgattaattacgtttgtgcagcgtattgtgcgtcgctattgtcccggcgataaagcgctgcggattggcggcggcgtaatgtgggttgtggttgtcggggcgacctggggcgtggcatggggcgtactggcgctggcgcagcggattcacccctggtttggctggagcgtcgaagtctggatgatctttaccacgctggccggacgctctctggcccgcgccgcgcaggaggttgaacgaccgttgcgggagaacgaccttgcggaaagccgaataaaactctcctggatcgtcgggcgcgatacgtcgcaacttcagccagcgcagatcaatcgcggcgtggtggaaacggttgcagaaaacaccgttgacggcattatcgcgccgctctttttcctctttctcggcggcgcgccgctggcgatggcctacaaagccgtcaataccctggattcaatggtgggctacaaacatgaaaaataccgggcgattggtatggtcagcgcccgtatggacgacgtagcgaactatcttcctgcccgactgagctggctgttgctgggcattgcggcaggactgtgtcgcctgagtggttggcgtgcgctgcgtattggctggcgtgaccgttataaccacagtagcccaaattgcgcctggtcggaagcgtgtgtggccggcgccttaggtatccagctcggcggcccaaataactactttggcgagcgtgtggacaagccctggataggcgacgcgcagcgcgatatttccgtggacgatatttcccgaacgattcgattgatgtgggtcgcttcaaccctggcgctggcgctgtttattgcggcgcggtgcgggttatctggcgtggcctga

SEQ ID NO: 371372 - DNA, 1380 bp, Salmonella enterica
atggcggcaaggcatcacgcatttattcttgcaggcacaggaagcggttgcggcaaaaccacggtgacgcttggtttgttgaggctgctgcaaaaacgcgcgctgcgcgtacagccgtttaaagttgggccagattaccttgataccggctggcataccgctatctgtggcgtggcgtcccgtaatcttgacagtttcatgcttcctcctcctgttctcaacgccttattttgcgaacaaatgcggcaggcggatatcgctgtcattgaaggcgtcatggggctgtatgacggctatggcgtcgaccccaattactgcagcacagccgcgatggccaaacagcttggttgcccggtcatcctactggtggacggcaaggctgtttcaacgtcgcttgcggctaccgttatgggatttcagcacttcgacccgaccctcaacctcgcgggcgtgattgtgaatcgcgtcactagcgacgcccactatcagctcctcaaaaatgccattgaacattattgctcactgccggtactggggtatgttcctccttgcgacggcgtcgcattacctgaacgccacctggggttgattaccgccagagaatccctcgtcaatcagcaatcatggcatgattttgccgcctcgctggaacaaacagtggatgtggatgcgctactctcgctgagcgtgttatcagcgcttccgacgggaatgtggcctgagcgccccgataacacagcgggggcagggctgacgcttgctctggcggatgatgaggcctttaacttttattatcccgataacatcgattttctggagcgtgccggcgttaacattgtgcgttttagcccactgcatgaccgcgcattgcctgattgtcagatgatctggctgggcggtggatatcctgaattatacgccgcggatctggcggcaaatacggcgatgttaaaacatttgcgggcggcgcatcagcgcggcgtggcgatttacgcggagtgtggcggtctgatgtatctggggagcactctggaggatagcggtggggaaattcatcagatggcgaatattatccccggtcacagcaaaatgggtaagcgacttacccgctttggctactgtgaggcgcaggctatgcagccaacgctattggcggcgcctggcgagatagtgcgcggccatgaatttcactactcagattttatccccgaaacacccgccgttatggcctgtcgtaaggttcgcgatggccgcgtgttacaggaatggactggcggctggcagacaggcaacacgtttgccagctatctgcacgtccatttcgcccagcgtccggaaatgttgcagcactggctggcggcggcgaggcgcgtattatga

SEQ ID NO: 371373 - DNA, 912 bp, Salmonella enterica
atgatttctgcgagcgctctgaactcagaactcattaataaaatcgcacaggattttgcacaagccaccggtctggcggttgtggttgtcaatattcatggtgatgaaatatctgagctattcaatttcacgccgttttgtcagttgatgcggcagcatccccagcatagtacacgttgtcgtatgagcgatcgctgcgggggactggaggcatcgaagtccgatcaaccctgtatttatcgttgtcatgccggtctaacggatttttctattccgctggtaatcgcagggcatttagttggctttgttttatgcgggcaggttcgtttaagtaatgacgtggagctggtaaacattcttaatgtcgacgatcgctggcaggctgatcctgagctcttgaatgaatttcggaatgtgccagagatggactattcacgcgttatcgcttccgccgatcttcttaaactgatagttgagaattgcctgaaaaaacagctcaatttcgtggttatcaaagacaatccgcagcaatcggaggcaaataaaaccactcgtggtcccactccgcatgacagtaaaatgaaaaaagcgcttcgctatattgatgcgcatttgtccgacgatcttcgtcttgaggatgtcgcctcacatgtctatctcagcccctattacttcagtaagctattcaaaaaatatcagggaatcggatttaatgcgtgggtaaaccgccagagaatggttagcgccagagaattgctttgccatagtgactggagtattgccagtattgcgcgtaatttaggcttttcgcaaaccagctatttttgcaaagtcttccgccagacctatcaggttacgccgcaggcttatcgccagcagataaatgagaattctcatcctccatcgttatga

SEQ ID NO: 371374 - DNA, 795 bp, Salmonella enterica
atgaatgattctctaaaggcgcaatgtggtgcggaatttttaggcaccggactctttttgttttttggtatcggttgtttgagcgcgctcaaagtcgcaggcgccagcctcggattatgggagatttgcattatttgggggcttggaatttcactggccgtttaccttactgccggaatctccggcggacatcttaaccctgcggtgacgattgcgctgtggctgtttgcctgctttcccaaacagaaagtattgccttatattattgcccagtttgccggcgcttttggcggcgctctgctggcgtatgtgctttatagtagcctttttactgaatttgagactgcgcatcatatggtgcgcggtagcgtcgaaagtttgcaattagccagcattttcagtacctatccggccgcagcgctaaatgtatggcaggctgcgttggtggaagtggtcattacgtcgattctgatgggcatgatcatggcattgacggatgatggcaatggcattcctaaagggccgcttgcgcctttgcttattgggatattggttgccgttatcggcgcgtctactggaccccttaccggttttgcaatgaacccggcgcgtgatttcggtcccaaactgttcacatggttagcggggtgggggaacatggcgatgagcggtgggcgagagatcccttattttatcgtgccgattgtcgcgcctgttatcggcgcctgtgccggagcagccatatatcgctattttattggtaagaatttaccttgtaaccgctgtgaactgtaa

SEQ ID NO: 371375 - DNA, 285 bp, Salmonella enterica
atgcaacaagaagcactaggaatggtagaaaccaaaggcttaaccgcagccatagaggccgctgatgcaatggttaagtcagccaatgtgatgttagtgggctatgaaaagattggctccgggctggtaaccgtcatcgtgcgcggcgatgttggcgcggtcaaagcggccaccgatgcaggtgccgcagccgcacgcaacgtgggtgaagtgaaagccgtacacgtcatcccacgccctcacaccgatgtagaaaaaatcttaccgaagggaattagccaatga

SEQ ID NO: 371376 - DNA, 813 bp, Salmonella enterica
atgagcagcaatgagctggtggaacagatcatggcgcaggtgattgcccgtgtggcaacgccggaacaacaggccatccctggtcaaccccaacctatacgagagacggctatggcagaaaaaagctgcagtttaacggaatttgtcgggaccgccattggcgataccctgggcctggttatcgccaacgtcgataccgccctgctggacgcgatgaagcttgagaagcgctatcgttccatcggtattctcggcgcccgcaccggcgcaggcccgcacattatggcggcggacgaagcggtgaaagccaccaacaccgaagtggtcagcattgagctgccgcgcgataccaaaggcggagcgggccacggttcgctgattattttaggcggtaacgatgtatccgacgtcaagcgcggtatcgaagtcgcgctgaaagagctggaccgcaccttcggtgatgtttacggcaacgaagccggacatatcgagctgcagtacaccgctcgcgccagctatgcgctggaaaaagcgttcggcgcgccgattggccgcgcctgcggcattatcgtcggcgctccggcttccgtcggcgtactgatggccgataccgcgctgaagtcagccaacgttgaagtcgtggcgtacagctctccggcgcacggcaccagctttagtaacgaagctattctggtgatttccggcgactccggcgcggtccgtcaggcggtgacctccgcccgcgaaatcggcaaaaccgtccttgcgaccctcggttctgaaccgaaaaacgatcgcccgtcctacatctga

SEQ ID NO: 371377 - DNA, 1665 bp, Salmonella enterica
atgagatcgaaaagatttgaagcactggcgaaacgccctgtgaatcaggacggctttgttaaggagtggatcgaagaaggctttatcgcgatggaaagcccgaacgacccaaaaccgtcgataaaaatcgttaacggcgcggtaaccgagctggacggaaaaccggttagcgaattcgacctgatcgaccactttatcgcccgctacggcatcaacctgaaccgcgccgaagaagtgatggcgatggattcggtcaagctggctaacatgctgtgcgatccgaacgtcaagcgcagcgaaatcgttccgctaaccaccgcgatgaccccagcgaaaattgtcgaagtggtttcgcatatgaacgtggttgagatgatgatggcgatgcagaaaatgcgcgcccgccgtactccatctcaacaggcgcacgtcaccaacgttaaagacaacccggtgcaaattgccgccgatgccgccgaaggcgcatggcgcgggtttgacgaacaagagacgacggttgcggtagcgcgctatgcgccgttcaacgccatcgcgctgctggttggttctcaggtaggtcgtccgggggtactgactcaatgctcgctggaagaagccaccgagctgaagctcggcatgctgggccacacctgctacgccgaaaccatctccgtttacggcaccgagccggtcttcaccgacggtgacgataccccatggtcgaagggcttcttagcctcttcctacgcctctcgcggcctgaaaatgcgcttcacctccggctccggctccgaagtgcagatgggctacgccgaaggcaaatccatgctgtatctggaagcgcgctgcatctatatcaccaaagccgcgggcgttcaggggctgcaaaacggctccgtaagctgcatcggcgtaccgtctgccgtgccgtcaggcattcgtgccgtgctggcggaaaacctgatctgctcttcgctggatctggaatgcgcctccagtaacgaccagaccttcacccactccgatatgcgtcgtaccgcgcgcctgctgatgcagttcctgccgggtaccgactttatctcctctggttattccgcggtgccgaactacgacaacatgttcgccggttccaacgaagatgcggaagactttgacgactacaacgttatccagcgtgacctgaaagtggacggtggtctgcgcccggttcgcgaagaggacgttatcgccatccgtaacaaagccgcccgcgcgctgcaggccgtgtttgccggaatgggactgccgccgattaccgatgaagaagttgaagctgcgacctatgcccacggttcgaaagatatgccggagcgtaacatcgtcgaagacatcaagttcgcccaagaaatcatcaataaaaaccgcaacggtctggaagtcgttaaagcgctggcgcagggcgggtttaccgacgtggcccaggacatgctcaacatccagaaagccaagctaaccggcgactatttgcacacctccgccattatcgtcggcgacggacaagtgctctctgcggttaatgacgtcaatgactatgccggtccggcaacaggttatcgcctgcagggagaacgctgggaagagattaaaaacatccctggcgctcttgatcccaacgagattgattaa

SEQ ID NO: 371378 - DNA, 399 bp, Salmonella enterica
atggaaattaatgaaaaattgctgcgccagataattgaagacgtgcttcgcgatatgaagggcagcgataaacccgtctcgtttaatgcgcctgcggtatccacagcaccacagaccgctgcgcctgcgggcgacggctttctgaccgaagtgggcgaagcgcgccagggcactcagcaggacgaagtcattatcgccgtcggcccggcatttggcctggcgcaaaccgtcaatatcgtcggcttaccgcataagagcattttgcgcgaagtcattgccggtattgaagaagaaggtatcagggcgcgcgtgattcgctgctttaaatcttccgacgtggcgttcgtcgccgtggaaggtaaccgcctgagcggctccggcatctccatcggcatctag

SEQ ID NO: 371379 - DNA, 522 bp, Salmonella enterica
atgaataccgacgcaattgaatcgatggttcgggacgtattgagccgcatgaacagcctgcagggcgatgcgccagcagcggctcctgcggcaggcggcacgtcccgcagcgcaaaggtcagcgactacccgctggcgaacaaacacccggaatgggtgaaaaccgccaccaataaaacgctggacgactttacgctggaaaacgtgctgagcaataaagtcaccgctcaggatatgcgcattaccccggaaaccctgcgcttacaggcgtctatcgccaaagatgcgggccgcgaccggctggcgatgaacttcgaacgcgccgccgaactgaccgcggtaccggacgatcgcattcttgaaatctacaacgcccttcgtccgtatcgttcaacgaaagaagagctgctcgctatcgccgacgatctcgaaaaccgttatcaggcaaagatttgcgcagctttcgttcgtgaagcggcagggctgtacgttgagcgtaaaaaactcaaaggcgacgattaa

SEQ ID NO: 371380 - DNA, 1833 bp, Salmonella enterica
atgcgatatatagctggcattgacatcggtaactcatcaacggaagtcgcactggcgcggcaagatgagactggcgcactgacgattacgcacagcgcgctggcggaaaccaccgggatcaaaggcacgttgcgtaacgtgttcggcattcaggaagcgctcgccctcgtcgcaaagcgcgcggggatcaatgtcagcgatatttcgctcatccgcattaacgaagccacgccggtgattggcgatgtggcgatggaaaccattaccgaaaccatcatcaccgaatcgacaatgatcggccataacccaaaaacgccgggcggagcaggccttggtgtgggtatcacgattacgccggaggagctgttaacccgccctgcggactcgtcctatattctggtggtatcgtcagcattcgattttgccgacatcgccaatgttatcaacgcctcaatgcgcgccggataccagattaccggcgtcattttgcagcgcgacgatggcgtgctggtcagcaaccggctggaaaaatcgctgccgatcgttgacgaagtgctctacatcgaccgcattccgctggggatgctggcggcgattgaagtcgccgtgccggggaaggttatcgagaccctctccaacccttacggcatcgccaccgtattcaacctcaacgccgatgagacgaaaaacatcgtcccgatggcgcgcgcgctgattggcaaccgttccgccgtggtggttaaaacgccatccggcgacgtcaaagcgcgcgcaatacccgccggtaacctggagctgcaggctcagggtcgtaccgtgcgcgtggatgttgccgccggtgccgaagctatcatgaaagcggtggacggctgcggcaagctcgacaacgtcaccggcgaggccgggaccaatatcggcggcatgctggagcacgtacgccagaccatggccgagctaaccaataagcccagcagcgagattttcattcaggatcttctggccgttgacacctcggttccggtgagcgtcaccggcggtctggccggggagttctcactggagcaggccgtcggcatcgcctcgatggtgaaatcagaccgtctgcagatggcgatgattgcccgtgaaattgagcagaagcttaatatcgacgtgcagatcggcggcgctgaggctgaagccgccattctgggcgcgctgaccacgccgggtaccacccgaccgctggcgatccttgacctcggcgcgggctccaccgatgcctccatcatcaaccctaaaggcgaaatcatcgccactcacctcgccggtgcaggcgacatggtgacgatgattattgcccgcgagctggggctggaagaccgctatctggcggaagagatcaaaaaatacccgctggcgaaggtcgaaagcctgttccacttacgccacgaggacggcagcgtccagttcttcccgacgccgctgcctcccgccgtgttcgcccgcgtctgcgtggtgaaaccggacgaactggtgccgcttcccggcgacttagcgctggaaaaagtgcgcgccattcgccgcagcgctaaagaacgcgtctttgtcaccaacgccctgcgcgcgctgcgccaggtcagtccaaccggcaacattcgcgatattccgttcgtggtgctggtcggcggctcgtcgctggatttcgaagttccgcagctggtcaccgatgcgctggcgcactaccgcctggtcgccgggcgaggaaatattcgcggcagcgaaggcccaagaaacgcggtggccaccggcctgattctctcctggcacaaggagtttgcacatggacagtaa

SEQ ID NO: 371381 - DNA, 351 bp, Salmonella enterica
atggacagtaatcacagcgccccggccatcgtcattaccgttatcaacgactgcgccagcctctggcacgaagtgctgctgggtatcgaagaggaaggcatccctttcctgcttcagcatcacccggctggagatgtcgttgacagcgcctggcaggcggcgcgcagctcgccgctgctggtcggcattgcctgcgatcgacatacgctggtcgtacattacaagaatttacccgtatcggcgccgctttttacgctgatgcatcatcaggacagtcaggcccaacgcaacaccggtaataacgcggcacggctggtcaaagggatcccctttcgggatctccatgcttaa

SEQ ID NO: 371382 - DNA, 276 bp, Salmonella enterica
atgaataacgcactgggactggttgaaacaaaagggctggtcggcgccattgaagccgccgatgcaatggttaaatccgccaacgtacagctggtgggctacgaaaaaattggttctggcctggttaccgtcatggttcgcggcgatgtcggcgcggttaaagcagccgtagatgccggcagcgcggcggcaagcgtcgtgggtgaagtgaaatcctgccacgttatcccgcgtccgcacagtgatgttgaggccattttaccgaaatcagcctaa

SEQ ID NO: 371383 - DNA, 462 bp, Salmonella enterica
gtgaagcaatcactgggattacttgaagtttgtggtctggcactggctatcagctgcgccgatatcatggcgaaatccgcttctatcacgctgctcgccctcgaaaagaccaatggttcaggctggatggtgattaaaattaccggtgatgtggcctccgtgcaggcggccatcaccaccggtgcgcaatttgccgaacagcggaatggtctggtggcccacaaggttatcgccaggcccggagaagggatcctgctcgcagagacaccctccccctccgtcattgaacctgagcctgaagcgtcagagatagctgatgtcgtttctgaagcgccagccgaagaggccccgcaggaatcagaactggtcagctgcaatctgtgtctggatccaaaatgtccgcgccagaagggcgaacctcgtacgctttgcattcattccggcaagcgaggtgaagcgtaa

SEQ ID NO: 371384 - DNA, 633 bp, Salmonella enterica
atggataaagagcttttgcaatcaacggtccgtaaagttctcgacgagatgcgccagcggcctattccgctgggcgtctcaaaccgtcatatccacctgtccgcgcaggattatgagcggctgtttcccggccatcccatcagcgaaaaaaaagcgctactgcagccgggacaatatgctgcggagcaaaccgtcaccctggtagggccgaaaggacagctcaacaatgtgcgcctgctcggcccgctgcgctcggtaagccaggtggaaatttcgcgtaccgatgcgagaacgctggggattgccgcgccgctgagaatgtccggcaacctgaagggcacacctggcatccgcctggtcagcccctttggcgaactggagctaccttccggggttatcgtcgcgcagcggcatattcatatgtcgccgcttgatgcgctgatcctgaaggtctcccacggcgatagggtttcggtagcgattgaaggcgacgagcgcgggctgattttcaacaatgtggcgattcgcgtttcaccggacatgcgcctcgaaatgcacattgataccgatgaagccaacgccgctggtgccgataacccgcaggcctttgcccggctggtaggcccgcgatga

SEQ ID NO: 371385 - DNA, 492 bp, Salmonella enterica
atgaacggcgaaactctgcagcgcattgtcgaggagattgtctcccgactgcagcgccgtgcccagagcacggtgacgctgagcgttgcgcagcttcgcgatgccgactgcccagcgctgttctgtcagcacgcgtcgctgcgcatcctgctcgtcgacctgccgctgctgggtcagcttgcggatgcagaaaccgacgataccgccgcccggaaaattcacgacgcgctggcgtttggcatccgcgtacagctcagcctgcacagccagctgctgccggttatcccggtaaaaaaactggctcgtctgccgctggtattcaccgatgagcgcggactgccgctggttctgcacgcgggttcggtgctgagctatcgcgatgtcgcgctgctaagccgggggcgtgtggttgtccaccgcaaatgcatcgtgacggccctggcgcgcgaagcagctaatgcgcggaatattcaattaattaagcaggagtaa

SEQ ID NO: 371386 - DNA, 276 bp, Salmonella enterica
atgcatctggcacgagtcacgggcgcggttgtctccacgcaaaaatcaccttctttgattgggaaaaagctgctgctggtgcgtcgggtcagcgccgatggcgaactccccgcctcgccaacctccggcgatgaagtggccgtggattccgtcggcgcaggcatcggcgagctggttctgctcagcggcggctccagcgccaggcacgttttttccgggccaaatgaggccatcgacctcgccgttgtcggcattgtcgatacgctttcacgttaa

SEQ ID NO: 371387 - DNA, 1011 bp, Salmonella enterica
atggcgatttatacccgaacaggtgacgcaggcaccacatcactgtttaccggccagcgggtgagcaaaacgcacccgcgggttgaagcctacggcacgctggatgagctgaatgccgcgctgagcctgtgcgcctgcgccgctgcggatgaaaatcaccgcaccttactcgaggccatccagcagcaacttttttggtttagcgcagagctggccagcgacagcgagcagccatcgcccaaacagcgctacatcagcagcgaagagatttcggccctggaagccgctatcgatcgggcaatggcccgcgtcgaaccgctgcacagctttattttacccggacgctgcgaagccgcgagccgcttacattttgcccgcacgctggcgcgccgcgccgaacgccgtctggttgaactggcaactgaagtcaacgtacgccaggtgctgatgcgctacatcaaccgcttatcggactgcctgtacgccctggcccgcgcggaagatagcgatgcgcaccaggccaacatcatccgcgaagttagcaagcgctatctggctgccagccagccgacccgcagcaaggagacaacgcccgtggccctctcattccacgatctgcaccagctcacccgcgccgccgttgaacgcgcgcagcaactgcaggttccggtagtcgtcagcatcgttgacgcgcacggcacggaaactgtgacctggcggatgccggacgccctgctggtcagcagcgaactggcgccgaaaaaggcctggaccgcagtggcaatgaaaacggcgacccatgagctgagcgatgttgttcagccaggcgccgcgctttatggcctggaaagtcatttacagggaaaagtggtcacctttggcggcggttacgccctatggcgcgacggcatattaattgggggtcttggcatcagcggcggcagcgttgagcaggacatggacatagcacagaccgccatcgcggctattaacgtgggaacacatcaatga

SEQ ID NO: 371388 - DNA, 1395 bp, Salmonella enterica
atgaatacttctgaactcgaaaccctgattcgcaccattcttagcgagcaattaaccacgccggcgcaaacgccggtccagcctcagggcaaagggattttccagtccgtgagcgaggccatcgacgccgcgcaccaggcgttcttacgttatcagcagtgcccgctaaaaacccgcagcgccattatcagcgcgatgcgtcaggagctgacgccgctgctggcgaccctggcggaagagagcgccaatgaaacggggatgggcaacaaagaagataaattcctcaaaaacaaggctgcgctggacaacacgccgggcgtagaagacctcaccaccaccgcgctgaccggcgacggcggcatggtgctgtttgaatactcaccgtttggcgttatcggttcggtcgcaccgagcaccaacccgacggaaaccatcatcaacaacagcatcagcatgttggcggcgggcaacagcgtctactttagcccgcatccgggggcgaaaaaggtctctctgaagctcatcagcctgattgaagagattgccttccgctgctgcggcatccgcaatctggtggtgactgtagctgaacccaccttcgaagcgacccagcagatgatggcccacccgcgaatcgcagtactggccattaccggcggccccggcattgtggcaatgggcatgaagagcggtaagaaggtgattggcgctggcgcgggtaacccgccctgcatcgttgatgaaacggcggacctggtgaaagcggcggaagatatcatcaacggcgcgtcattcgattacaacctgccctgcattgccgagaagagcctgatcgtagtggagagtgtcgccgaacgtctggtgcagcaaatgcaaaccttcggcgcgctgctgctaagcccgaccgataccgacaaactccgcgccgtctgcctgcctgaaggccaggcgaataaaaaactggtcggcaagagcccatcggccatgctggaagccgccgggatcgctgtcccggcaaaagcgccgcgtctgctgattgccgttgtcaacgccgacgatccgtgggtcaccagcgaacagctgatgccgatgctgccggtggtaaaagtcagcgatttcgatagcgcactggcgctggccctgaaggttgaagaggggctgcatcataccgccattatgcactcgcagaacgtgtcacgcctgaacctcgcggcccgcaccctgcaaacctcgatattcgtcaaaaacggcccctcttatgccgggatcggcgtcggcggcgaaggctttaccaccttcactatcgccacgccaaccggtgaagggaccacgtcagcgcgtacttttgcccgttcccggcgctgcgtactgaccaacggcttttctattcgctaa

SEQ ID NO: 371389 - DNA, 1113 bp, Salmonella enterica
atgaataccttctcactacaaacgcggttgtacagcggtcagggcagcctggcggtgctcaagcgctttaccaataagcacatctggataatctgcgatggctttctggcgcgctctccgctgctggataccctgcgtaatgcgctgcccgcagataaccgcatcagcgtctttagcgagataacgccggaccccaccatccacacagtggttcagggcattgcgcaaatgcaggctctgcaaccgcaggtggtgatcggttttggcggcggctcggcaatggacgcggcgaaagcgattgtctggtttagccagcagagcgggatcaacatcgaaacctgcgtggcgatcccgaccaccagcggcaccggctcggaagtgaccagcgcctgcgtaattagcgacccggataaaggcatcaagtatccgctgttcaacaatgcgctgtatccggatatggcgatcctcgacccggagctggtggtcagcgtaccgccgcagattaccgccaacaccggcatggacgtgctgacccacgccctggaggcctgggtgtcaccgcgcgccagcgactttaccgacgcgctagcggaaaaagccgccaaactggtgttccagtatctgcccacggcggtggaaaaaggcgactgcgtggcgacgcgcgggaaaatgcacaatgcctcaacgctcgccgggatggccttcagccaggcggggctggggcttaaccacgcgatagcccaccagcttggcgggcagtttcatctgccgcatggcctggccaacgccctgctgttaaccacggttatccgttttaacgccggcgttccgcgcgccgccaaacgctacgcgcggctggccaaagcctgcggtttttgcccggcagaagccaatgatatcgcggcgatcaatgcgctgattcagcaaatcgaactgcttaagcaacgctgcgcccttccctcactggccgttgcgcttaaagaaggaagatccaacttttccgcacgcattccggcgatggtgcaggccgcgctggcggacgttacgctgcgcaccaacccgcgcccggccagcgccgaagaaattcgtgaactgctggaggaactgctatga

SEQ ID NO: 371390 - DNA, 1356 bp, Salmonella enterica
atgagcaccgccatcaacagcgttgaaatgtcccttagcgccgatgaaattcgtgagcgcgtccgcgcagcgggcgttgtcggcgcaggcggcgcaggttttcccgctcacgtcaaactacaggcgcaggtagagatttttctggtgaacgccgccgagtgtgaaccgatgctcaaagttgaccagcaactgatgtggcagcaagctgcgcgccttgtgcgcggcgtacagtacgccatgacggcgaccggcgcgcgcgaaggggtgattgccctgaaagaaaaataccgctgggccatcgacgcccttaccccgctactgcccgccggtatccgcctgcatattctgccggatgtttatccggcgggcgatgaggtgctgactatctggatggcaaccggccgccgggtcgccccggctgcgctaccggccagcgtcggcgtggtcgtcaataacgtgcaaacggtgctgaatattgcccgggctgtcgagcagcagtttccggtcactcgtcgcacgttgaccgtgaacggcgcggtcgccagaccgttgaccgttactgttcccattggcatgtcgctgcgggaagtactggcgctggcgggcggcgcaacggtcgacgaccctggttttattaacggcggcccgatgatgggtggcctgattacctctcttgataatccggtgacgaaaactaccggcggcctgctggtgctccccaaaagccatccgcttatccagcggagaatgcaggacgagcgcacggtgctttccgtcgcgcgcaccgtctgcgaacagtgccgactgtgtaccgatctctgtccgcgacacctgatcggccacgaactctctccgcacctgctggtgcgggcggtgaactttcaccaggctgccacgccgcagctgctgctgagcgcccttacctgctcggaatgcaacgtttgcgaaagcgtggcctgtccggtggggatctcgccgatgcgcatcaaccgcatgttaaaacgcgagctgcgggcgcaaaaccagcgctacgaagggccgctgaatccgtccgacgaaatggcgaaatatcgcctggtgccggtgaagcggctgatcgccaaactgggactaagcccctggtaccaggaagcgccgctggttgaagaagagccgtcagtagaaaaagtcactttgcagctgcgccagcatattggtgccagcgcggtagcgaacgttgcggtgggagaacgcgtgacgcgcgggcaatgcgttgccgatgtcccgcctggcgcgctcggcgcacctattcacgccagcatcgacggcattgtttcggccatcagcgaacaggccatcacggttgtaagaggttaa

SEQ ID NO: 371391 - DNA, 555 bp, Salmonella enterica
atgtctcaggctataggaattttagaactcaccagcatcgccaaagggatggagcttggtgatgcgatgctgaaaagcgccaacgtcgatctactggtcagcaagaccatctgcccggggaagtttttactgatgctgggcggcgatatcggcgctatccagcaggccattgaaaccggtacgtcgcaggccggcgaaatgctcgtcgacagcctggtgctggcgaatattcatcccagcgtacttccggccatcagcggcctgaacagcgtcgataagcgccaggcggtaggtatcgtcgaaacctggagcgtggcggcctgcattagcgccgcagaccgggcggtgaaaggctcaaacgtcaccctggtgcgggtgcatatggccttcggtatcggcggtaaatgctacatggtggtggcgggcgacgtttctgacgtcaataacgccgtgacggttgccagcgaaagcgcgggcgagaaagggttgttggtttaccgttcggtgatcccacgcccgcatgaagccatgtggcgacagatggtggagggataa

SEQ ID NO: 371392 - DNA, 351 bp, Salmonella enterica
atggaaagacaaccgacaacggatcgcatgattcaggaatacgtgccggggaaacaggtcactctcgcgcacctgattgctaatccagggaaagatctctttaagaagctgggcctgcaggatgcggtgtccgccattggcatccttaccatcacgccgagcgaagcatctattattgcttgcgatattgctaccaaatccggcgcggtggagattgggtttcttgaccgctttaccggcgcggtggtgctgactggcgatgtttctgccgtcgagtatgccctcaagcaggtaacgcgcacgctgggcgaaatgatgcagttcaccacttgctcgatcacccggacgtaa

SEQ ID NO: 371393 - DNA, 453 bp, Salmonella enterica
atgaagcgtttgatgtttatcggccccagccagtgcggaaaaacctcgctgacccaaagcctgcgcggcgaagcgctccattataagaaaactcaggccattgaatggtcgccgatggccatcgatacgccgggcgaatatctggagaaccgctgcctgtacagcgccctgctgaccagcgcctgcgaggccgacgtcatcgccctggtgctgaatgccgacgcccagtggtcgcccttttctccgggttttaccgccccgatgaaccgcccgacgattggcctggtcaccaaggccgatctcgccgagccgcagcgtatttcgctggttgcggagtggcttacgcaggctggcgcccggcagatttttattaccagcgcgttgaataattcgggtctcgacgccgtgctggattttctgaattcgaaggaacctttatgtcttacaaaataa

SEQ ID NO: 371394 - DNA, 1215 bp, Salmonella enterica
atgtcttacaaaataatggccattaacgccggcagctcatcgttaaaattccagctgctggagatgccgcagggcgacatgctctgtcaggggctgattgagcgtatcggtatggcggatgcgcaggtgacaattaagacgcacagccaaaaatggcaggaaaccgtccccgttgccgatcatcgcgatgcggtaacgctgcttctggaaaagctgctgggttatcaaatcattaacagtctgcgggacattgacggggtgggccatcgtgtggcgcacggcggtgagttttttaaagactcgacgctggtcacggatgaaacgttagcgcaaatcgaacgtcttgctgaactggccccgcttcacaacccggtaaacgcgttgggtattcacgtttttcgtcaactgttgcctgatgccccttccgtagccgtgtttgatacggcatttcaccagacgctggatgaacccgcctatatttacccgcttccctggcattattacgcggaactggggattcgccgttatggctttcatggcaccagccataagtatgtcagcggcgttctggcggaaaagctgggcgtaccactcagcgcattacgggtgatttgttgtcatcttggaaacggtagcagcatctgcgccatcaagaacgggcgttcggtcaatacgtcgatgggctttacgccgcagtcaggcgtgatgatgggcacccgtagcggagatattgatccctctattctgccgtggatagcccagcgcgaaagcaaaacgccgcaacagttgaatcagttattaaataatgagtcaggcttgctgggcgtttctggcgtgtcgtctgattaccgcgatgtcgaacaggcagccaataccggtaaccggcaggctaaactcgctctcactctgtttgccgaacgcattcgcgccaccattggcagctatattatgcaaatgggaggactggatgcgctggtattcactgggggcattggcgagaactcagcgcgcgccagatcggcggtgtgccataatttgcaatttttgggcttagccgttgatgaagagaaaaatcagcgtaatgcgacatttatccagacggagaatgccctggtgaaagtcgccgtcatcaacaccaacgaagagttaatgatcgcacaagacgttatgcgcattgcgctaccggccacggaagggctttgtgtaccagcctga

SEQ ID NO: 371395 - DNA, 903 bp, Salmonella enterica
atgcgcgcacactattcgtacctgaaaggtgataacgtggctgttgcgcaatgccccgcctcatgcggggaacttatccagggatggattctgggcagtgagaaactggtctcctgccccgttgactggtacagcaccgtagcagtcacggctgcgccgccgttggtaaacgagcgtccattgtcgcgggcgatggtggagcgcgttctggcgcactggcagtatcctgcgcactggagtaacgagattcgcgtcgatgtgcgttcgtcaattcccgttgccaaaggcatggccagcagcaccgcagatatcgccgctacggcggtggcaacggcgcatcatcttggccattcgctggatgaaactacccttgcacagctttgcgtctcaatcgaacccactgatagcaccgtttttcatcagttaacgctgtttgatcataataatgcggtcacgcaaatcgcctgcgagccaccgccgccaatcgatttgctggtactggaaagcccggtcaccctgcgcacgcaagattaccaccgtctccctcgccagcagaaattaatagcaagttcagcaaccttgcagcaggcctggaatctggtgcaggaagcctgtataacgcaaaatccgctccgactgggtgaggcggctacgcttagcgctatcgccagccagacgctgttacctaagccgggctttaccgccctgctgtcgctggtcgaagagtgtgatttatacggattgaacgtggcgcatagcggtagcgtggtgggtctgatgctggaccgaaaacgtcatgatattgcgcgcctgaaaggtaagctggcagagaaaaaacttacccgacactggccaaaacaacatttactcaagatggtcacaggcggggtcaaactgcagtga

SEQ ID NO: 371396 - DNA, 336 bp, Salmonella enterica
atggaaacaaccaagccttctttccaggacgtgctggagtttgttcgtctgttccgtcgcaaaaataaactgcagcgtgaaattcaggacattgagaagaagatccgtgacaaccagaagcgtgtgctgctgctggacaacctgagcgactacatcaagccaggtatgagcgttgaggcgattcagggtatcatcgccagtatgaaaagcgactatgaagatcgcgttgatgactacatcattaaaaatgccgaaatctccaaagagcgtcgcgacatttccaaaaagctgaaagcgatgggcgaaatgaaacacgccgatgtaaaagccgaataa

SEQ ID NO: 371397 - DNA, 1059 bp, Salmonella enterica
gtgcgtgccgataagtcattaagcccttttgaaatacggttgtaccgtcattatcgcatcgtgcatggcatacgtatcgccctggcgttcattcttacctttctgctggttcgtctgttttctattcccgagggcacatggccgctaatcacgttagtggtgattatggggcccatctcattctggggaaatgtagtgcctcgtgcttttgagcgcataggcggtacgattctgggcgcggcgttagggctggtggcgctacgcctggagctcttttccttaccgctgatgctggtgtggtgtgcgatagcgatgtttttgtgcggctggctggccttagggaaaaaaccgtatcaggcgctactgataggcataacgcttgccgttgttgtcggcgctcccgctggtgatatggatacggcattatggcgtggcggggatgtgattttggggtcgctactggcaatgttgtttaccggcatctggccccagcgcgcctttttgcactggcgcatccaactggctcattgcgtcacggcgtataatcgggtgtatcaggcagcgctgtcgccgaatttgctggagcgcccccggttggataaacatttgcaacggttgctgaacgatgtcgtcaaaatgcgcgggctgataacgcctgccagtaaagaaacccggatacaaaaatctattttcgaggccattcagaccatcaaccgcaacctggtttgtatgcttgaattacaaatcaatgcccactgggcgacgcgcgccagccattttgtgatgcttaacgcgcacacattgcgtgaaacccagcagatgacgcagcaaaccttgctaacgatcgcccacgcgttgtttgaaggcaacccgcagccggtactggcaaacaccggtaaactgaatgatattgctgccgagttgcggcagctaatgaacgagcagcagggcgacgcggtggctgaaacccccatccacggctatgtttggctaagtatggaaactgcccgacagttggaactgctttcacatttgatctgccgggctttgcgcaaataa

SEQ ID NO: 371398 - DNA, 468 bp, Salmonella enterica
atggattacgaaatcaggcaggaacaaaaacgcaagatagccggtttccacatggtcggtccatgggaacacaccgtgaagcagggttttgaacaactgatgacgtgggtggatcgacagcggatcgtgccagttgaatggattgccgtctattacgacaatccagatgtcgtacctgcagaaaaactccgctgcgataccgtggtgtccgtggcagagaatttcatcctgccggacaatagcgaaggcgtaatcgtgaccgccattgaaggcggcgaatatgccactgctgtcgcgcgagtggaagaccgtgactttgcgaagccgtgggaacggttttttgatgtcctggagcaggatagcgcttatcagatagcctctgcgccctgttttgaaacctatctgaataacggcatggaagatggatactgggatattgaaatgtatattccggtacagcggaagtga

SEQ ID NO: 371399 - DNA, 1167 bp, Salmonella enterica
ttgaaacgccgtttgtttattgccgcttctttattcgcgatgcacctttctcctgcgcttgcggccgatgccgtaagttttgctccccaaccgccagccattgatgcaggcgcctgggtgttgatggattacactacggggcaggttcttaccgccggtaatgaacaccagcaacgtaatcccgccagccttaccaagctaatgacgggctacgtcgtcgatcgcgccatcgatagtcatcgtatcagccctgacgatatcgtcacagttgggcgcgacgcctgggcgaaggataatccggtgtttgtcggctcctcgttgatgtttttaaaagaaggggatcgcgtgtcggtacgcgatttaagccgtggcttaattgtggattccggtaacgatgcctgtgtggcgctggcggattatatcgcgggcgggcagccgcagtttgtggcgatgatgaacagctatgtgaaaaaactcaatttgcaggatacccattttgaaaccgtccacggtctggatgcgccgggacaacatagctccgcgtatgatctggccgtactctcccgggcgattattcacggcgaacctgaattttatcacatgtacagcgagaaaagcctgacctggaacggcatcacgcagcagaaccgcaacggcttgttgtgggataagaccatgcatatcgatgggcttaaaaccggacacacatcgggggcgggatttaatcttatcgcatcggcggtggacgggcagcgtcgacttatcgccgtcgtgatgggggcgaaaagttcgaaaggccgtgaggaacaggcgcgaaaactgttgcagtggggccagcaaaactttgcgacggtgcagattttgcacagcggtaaaaaagtgggcagcgagcgaatctggtatggagataaagaaaagattgcgctgggtacggaacaggatttctggatggcgctgcctaaagcggaaattccgcatatcaaagcaaaatatgtgctggatagaaaagagctggaggcgccaatcgccgctcatcaacgggtaggtgaaatagagctatacgatcgggataaactgatcgctcagtggccgctggtcactctggagtcggtgggtaaaggcggtatgttctctcgtctgagcgactattttcagcataaagcgtaa

SEQ ID NO: 371400 - DNA, 765 bp, Salmonella enterica
atgaatactatctggggagcggaactacattatgcgccagattattggccgctgtggttaatttatgcaggcgtcgtggtgctgctcatgcttgttgggctggttatccatgcgttattgcgccggatgctggcgccaaaaacggcgggcggcgaagagcatcgtgactatctctactcgctggcgattcgccgttggcattggggaaatgcgttactgtttgttttattactgttaagcggtttatttggtcatttttctctcggccctgtagcgctaatggtacaagtgcatacctggtgtggttttgccttactggctttctgggtcgggtttgtgctgatcaacctcaccacaggtaacgggcgtcactatcgggtaaatttttccggactggtaacgcgctgcatacgccagacgcgtttttacctttttggcattatgaaaggggaagcgcatccgttcgcggcaacagagcagaataagttcaatccactgcaacaactggcatatctggcgattatgtacgcgctggtaccgctgttaatcatcaccggtttgctgtgtctctatccgcaggttgcgggtctgggccctgtgatgctggtgctgcatatggcgcttgctatcatcggcttactgtttatttgcgcgcatctctatctgtgtactcttggcgacacgccgggacaaattttccgtagcatggttgacggctatcatcgtcatcgtaccgcgccgcgcggggataagtccgccgtctga

SEQ ID NO: 371401 - DNA, 579 bp, Salmonella enterica
atgaatcatttaacgaatcagtacgtcatgctgcatgatgaaaaacgttgtatcggctgccaggcgtgtaccgttgcctgcaaagtgcttaatgacgtaccggagggatttagccgcgtacaggtacaaattcgcgcccctgaacaggcatccaacgcactaatccattttcaatttgtccgcgtctcctgtcagcactgtgaaaatgcgccatgtgtcagcgtttgtcctaccggagcgtcatatcgtgatgaaaacgggatcgtgcaggtggataaatcgcgctgtattggctgcgattattgtgttgccgcgtgtcctttccatgtgcgctatttgaatccgcaaaccggcgtcgccgacaagtgtaacttctgtgccgacacgcggttggcggctggccagtctccggcgtgcgtatccgtttgcccaacggacgcgctgaaattcggcagactggatgagagcgagatccagcgctgggtcggtcagaaagaggtctatcgccagcaggaagcgcgtagcggcgcggtcagtctgtaccgtcgtaaagaaatccatcaggagggtaaagcatga

SEQ ID NO: 371402 - DNA, 2277 bp, Salmonella enterica
atgagcattagtcgtcgttcttttttgcagggggtaggcataggctgctctgcctgcgcgctgggcgcttttccgcccggggcgctggcgcgcaacccgattgccggcattaacggtaaaaccacgctaacgccaagtttgtgcgagatgtgttcctttcgttgccctattcaggcgcaggtagtcaataacaagaccgtttttatccagggcaatccttctgcgccgcagcaggggacgcgcatatgcgccaggggcgggagcggcgtcagcctggtcaatgacccgcaacggattgtaaaacctatgaaacgcaccgggccacgcggcgacggtgaatggcaggtgattagctggcaacaggcttaccaggaaatcgcggcgaaaatgaatgccatcaaagcgcagcatggccccgagagcgtggctttctcttccaaatcgggctcgctctccagccatcttttccatctggctacggcctttggttcgcctaatacctttactcacgcctcaacatgccctgccgggaaagccattgcggcaaaagtgatgatgggcggcgatctggcgatggatatcgctaacacgcgctatctggtttcgtttggccacaatttgtatgaagggattgaagttgccgatacccatgagttaatgaccgcgcaggagaagggggccaaaatggtgagcttcgatccgcgtttgtctatattttccagcaaggcggatgagtggcacgctattcgtcccgggggggatttagcggttctgctggcgatgtgccacgtcatgattgatgaacagctctacgatgcgtcttttgttgagcgttataccagcggatttgaacagttagcacaggcggtaaaagagacgacgccggaatgggccgccgcgcaggccgatgtcccagccgacgttattgtccgggtgacacgcgaactggctgcctgcgcgcctcacgctattgtcagtcctggtcatcgcgcgacgttctcgcaggaagagatcgatatgcggcgtatgatttttacgcttaatgtgctgctcggtaatattgagcgcgaaggcgggctatatcagaaaaaaaacgcgtctgtttacaataaactggccggagaaaaggtcgcgccaacgctggcgaaactcaacattaaaaatatgccgaaaccgacggcgcaacgcatcgatttggtcgcaccgcagtttaaatatatcgccgctggcggcggcgtggtgcaaagcattattgactcggcgttaacccagaagccttacccgataaaggcgtggattatgtcgcggcataatcctttccagaccgtcacctgtcgttcggacctggtaaaaaccgttgagcaactggatctggtggtcagctgcgatgtctatttgagcgagagcgcggcatatgccgactatctgctgccggaatgcacctatctcgaacgggacgaagaggtatccgatatgtcgggactgcacccggcttacgctctgcgccaacaggtcgtagagccgattggcgaggcgcgtccgagttggcaaatctggaaagaacttggcgagcagttgggattagggcagtactatccgtggcaggatatgcagacgcgccaactctatcagttgaacggcgaccatgccttagcgaaggaactgcgacagaaagggtatctcgaatggggcgttccgctgctattacgcgaaccagaatccgttcgtcagtttacggcgcgttaccccggcgctatcgcgacggacagtgacaacacctatggcgaacagcttcgcttcaaatcgccctccggcaaaatcgaactttattccgcaaccctggaggaattgctccctggctacggcgttccgcgcgttcgtgactttgcgctgaaaaaagagaatgagctttacttcattcagggcaaggtggccgtgcataccaatggcgcgacgcagtacgtacctttactcagcgagctaatgtgggataacgcggtctgggttcatccgcaaacggcgcaagaaaaaggcattaagaccggcgatgagatctggctggaaaatgccacgggtaaagagaaaggtaaggcgctggtgacgcccggtatccgcccggacacgctttttgtctatatgggatttggcgctaaagctggggccaaaacggcggcgacgacacacggtatccactgtggcaatttactgccgcacgtgacgagtccggtatccggtacggtagtgcataccgcaggcgtgacgctgagccgggcatga

SEQ ID NO: 371403 - DNA, 2349 bp, Salmonella enterica
atgaagatatcatcaggcgcaattaatttttctactattcctaaccaggttaaaaaattaattacctctattcgtgaacatacgaaaaacgggctcgcctcaaaaataaccagtgttaaaaacacgcatgcttctttaaatgaaaaacttaaaacaggaaagagctcatcgattgagttcgcgttaccacaaaaaataaaagacttctttcagccgaaagataaaaacaccttaaacaaaacattgattactgttaaaaatattaaagacacaaataatgcaggcaagaaaaatatttcagcagaagatgtctcaaaaatgaatgcagcattcatgcgtaagcatattgcaaatcaaacatgtgattataattacagaatgacaggtgcggccccgctccccggtggagtctctgtatcagccaataacaggcccacggtttctgaaggtagaacaccaccagtatccccctccctctcacttcaggctacgtcttccccgtcatcacctgccgactgggctaagaaactcacggatgcagttttacgacagaaagccggagaaacccttacggccgcagatcgcgatttttcaaacgcagatttccgtaatattacattcagcaaaatattgccccccagcttcatggagcgagacggcgatattattaaggggttcaacttttcaaattcaaaatttacttattctgatatatctcatttacattttgacgaatgccgattcacttattcgacactgagtgatgtagtctgcagtaatacgaaatttagtaattcagacatgaatgaagtgtttttacagtattcaattactacacaacaacagccctcttttattgatacaacattaaaaaatacgcttatacgtcacaaagccaacctctctggcgttattttaaatgaaccggataattcatcacctccgtcagtgtcagggggcggaaattttattcgtctaggtgatatctggctgcaaatgccactcctttggactgagaacgctgtggatggatttttaaatcatgagcacaataatggtaaaagtattctgatgaccattgacagcctgcccgataaatacagtcaggaaaaagtccaggcaatggaagacctggttaagtcattgcggggtggccgcttaacagaggcatgtatccggccagttgaaagttcgctggtaagcgtactggcccaccctccctatacgcaaagtgcgcttatccgcgagtggctcgggcctgttcaggaacgtttttttgcccaccagtgccagacctataatgacgttcccctgccgactcctgacacatattatcagcagcgcatactgcctgtgttgctggattcgtttgacaggaacagcgccgccatgaccactcacagcggactctttaatcaggtgattttacactgtatgacaggcgtggactgcactgatggcacccgccagaaagctgcagcgctttatgaacagtatcttgctcacccggcggtgtctccccacatccataatgggctcttcggcaattatgacggcagcccggactggacaacccgcgctgcagataatttcctgctgctttcctcccaagattcagacacggcgatgatgctctccactgacacgctgttaacaatgctaaaccctactcctgacactgcatgggacaacttttacctgctgcgagccggagagaacgtttccaccgcgcaaatctctccggtagagttattccgtcatgactttccggtgtttctcgccgcatttaatcagcaggccacgcagcgacgctttggggagctgattgatatcatcctcagcactgaagagcacggggagctgaaccagcagtttattgccgccacgaaccagaaacattccaccgtgaagttgattgatgatgcctcagtgtcgcgtctggccaccatttttgcccccttgcttcctgaaggcaaactcagcccggcacactaccagcacatcctcagtgcttatcacctgacggacgccaccccacagaagcaggcggaaaccctgttctgtctcagtaccgcattcgcacgctattcctccagcgccattttcggcactgagcatgactctccgccggccctgagaggctatgcggaggcgctgatgcagaaagcctgggagctgtctccggcgatcttcccgtccagcgaacagtttaccgactggtccgaccgttttcacggcctccatggcgcctttacctgtaccagcgttgtggcggatagtatgcaacgtcatgccagaaaatatttcccgagtgttctgtcatccatcctgccactggcctgggcctag

SEQ ID NO: 371404 - DNA, 1431 bp, Salmonella enterica
gtgacagttaaaaacgacagcatacagagcacattcctcttccacgattacgaaaccttcggtacgcatccggccctcgacagacctgcgcaattcgccgcgctccgtacggataacgacttcaacgttatcggcgagccggaggtgttttattgcaaacccgccgatgattatctaccgcagcccggcgcggtgctgattaccggcatcacgccgcaggaagcgcgtgagaaaggagaaaacgaagccgctttcgccagacgcattcatgcgctgtttaccgttcctaaaacctgcgttgtgggctacaacaatgtgcgttttgatgatgaagtcacgcgcaatattttttatcgcaacttttacgatccctatgcctggagctggcagcatgataattcacgttgggatctattggatgtcatgcgcgcctgttatgcgctgcgcccggagggaattaactggccggaaaacgacgacggcctgcccagctttcgtctggaacatttaacccaggcgaacgggatcgaacacagcaacgcgcatgatgcgatggcggatgtctacgccactattgcgatggcgcaactggtgaaaacacgccagccgcggctgtttgattatctttatagccaccgcagtaaacataaactggcggcgctgattgacgtcccgcaaatgaagccgctggtgcatgtctccggcatgtttggcgcgtggcgcggtaatacaagctgggtcgcgccgctggcgtggcatcctgaaaaccgtaacgcggtgatcatggtcgatttagcaggcgatatttctcctcttcttgagctggacagcgacacccttcgcgagcggctttatacggccaaagccgatcttggcgatcacgccgcagtgccggtaaagctggtgcatatcaataaatgtccggtactggcgcaggcgaataccttgcgcccggaggatgccgaccggctgggaattaaccgccagcattgcctggataacctgaaagtgttgcgtgaaaacccgcaggttcgcgacaaagtggtggcgattttcgccgaagccgaaccttttgccgcctcggataacgttgatgcccagctctatgatggttttttcagcgatgccgatcgcgcagccatgaaaatcgtactcgaaaccgagccacgtaacctgcccgcgctggacattacctttgtcgataagcgcattgagaagctgctgtttaattaccgcgcacgcaattttcccggtacgctggatgacgcagagcagcagcgctggctagagcatcgccgtcaggtgctgacgccggagtttttacaacaatatgccaatgaattgcagatgctttctcagcagtatgcggaagataaaacgaagctggggttgctgaaatcactgtggcagtacgcaactgagattgtgtaa

SEQ ID NO: 371405 - DNA, 1359 bp, Salmonella enterica
atgtcgcataacgttactccaaacacctctcgcgtggaattacgtaaaacgcttacgttagttccggttgtaatgatgggtcttgcctatatgcagccgatgacgctgttcgatacatttggtatcgtttcaggcctcactgacggtcacgtaccgacggcgtatgcattcgcgttaatcgcgattctgtttacggcgttgagctacgggaaactggtgcgtcgctatccttccgcgggttcggcgtacacctatgcccagaaatccatcagcccgaccgttggctttatggtgggttggtcttctctgctcgattatctgttcgcgccgatgatcaacattctgttggcgaaaatttattttgaagcgctggtgccctccattccgtcatgggtgtttgtcgtggcgctggtggcctttatgacggcctttaacctgcgcagcctcaaatcggtcgctaacttcaacaccgtgattgtagtgctacaggtggtgctgattgcggtcattctgggcatggtggtttatggcgtatttgaaggcgaaggcgccggtacgctggcgagcacccgtccgttctggtccggcgatgcgcacgttatcccgatgattacgggagcgacgatcctgtgcttctcctttaccggctttgacggcatcagtaacctgtcggaagagaccaaagatgctgagcgcgtgatcccgcgtgcgatttttctgaccgcgctgattggcggcctgatcttcatctttgcaacctatttcctgcaattgtacttcccggatatctctcgctttaaagatccggatgcgtctcagccggaaatcatgctgtacgtggcgggtaaaaccttccaggtgggcgcgctgatcttctctactatcaccgtactggcttccggtatggcggcgcatgcaggcgtagcgcgcctgatgtacgtaatggggcgcgacggcgtattcccgaaaagcttcttcggttacgttcatccgaaatggcgtacgccagcgatgaacatcatcctggtcggggcgatcgcgctgctggcgattaattttgacctggtgatggcgacggcgctgattaactttggtgcgctggtcgcgtttacctttgttaacctgtcggtgatttcgcagttctggatccgtgagaagcgtaataaaacgttgaaagatcacttccagtatctgttcctgcccatgtgcggcgcgctcacggttggcgcgttgtgggttaacctggaagagagctcaatggtactgggcctgatctgggcaggtatcgggctgatttatctggcgtgcgtaactaaaagcttccgcaacccggttccacagtacgaagacgtcgcgtaa

SEQ ID NO: 371406 - DNA, 915 bp, Salmonella enterica
atgaaaccactgctggacgttctgattattcttgatgcgttagaaaaagaaggcagcttcgcggcggcgtcggcaaaattatttaaaacgccgtccgccctcagttataccgttcataagctggaaaacgatcttaatatccaattgctcgaccgtagcgggcatcgcgcgcgatttacgcgaaccggtaagatgctactggaaaaaggccgtgaagtgctgcacaccgttcgcgagctggaaaagcaggcgattaaactgcatgaaggctgggagaacgaactggtcatcggtgtggatgatacctttcccttttctcttctggccccgcttatcgacgctttttatcaacgccacagcgtgacgcgccttaaatttgtcaatggcgttctcggcggttcatgggagacgctgacgcagggaagggcggatattattgttggcgccatgcgcgcgccgccgcctgacaccggctttggctttgcaagactgggcgatcttgaactggtgtttgctgtcgctccgcatcatccgctggttcatgaagaggaaccgcttagccgccagacgatcaaacgttttcgcgcgattgtggttggcgatagcgtccattcctcgcgatcaatagggtctgaactgctcgacgctcaggaagcgattaccgtgtttgattttaaaaccaagctggagctgcaaattagcggcctgggatgcggctatttaccgcgttatctggcgcagcgatttttggaaagcggcgcgcttatagagaagaaagttgtggcgcaaatcgtctatgaaccggtgtgggttggctggaatgaacagaccgccgggctggccagcggctggtggcgggatgaaattttagcaaataatgctattgctggggtgtatgcaaaatcgacggtttaa

SEQ ID NO: 371407 - DNA, 825 bp, Salmonella enterica
atgaaaaaggtcgcaattgtcggtttaggttggttaggcatgccgctggcaatgtcgctggcagcgagaggctggcaggttaccggcagcaaaaccacccttgacggggtggaagcggcccgtatgagtggaattgaaagctatccgctgcgtctggagccggagctggtctgtgaggcggacgatcttgacgctctgctggatgtcgatgcgctggtgataacactgcccgcgcgccgtagcggtccgggagaggatttttatctgcaggcgatgcaggagctggtcgacagcgcgctggcttatcgtatcccgcgtattatttttaccagttcgacgtctgtttacggcgatgcgcaaggcgtggtgaaagagaatacgccgcgtaatccggtcacggccagcgggcgtaccctgaaggaactggaagattggctgcataatctgccgggcacgtcagtagatattctgcggctggcggggttggtcgggcctggacgccatcccggtcgtttctttgccggaaaaaccgcgccggatggtcaacacggggtcaatctggtgcatcttgaagacgtggttggcgcaattacccttttgctacaggcgccaaaaggggggcacatctataatatatgtgcgccggcgcatccagcccgcaacgtgttttatccgcaaatgacgcgcttgctgggaatggcgccgccgcattttcgtaacgcaccggacaacggcaaagggaagattatcgacggtagccggatttgtaatgagctgggatttgaatatcaatatcccgatccgctggtgatgccgatggagtga

SEQ ID NO: 371408 - DNA, 900 bp, Salmonella enterica
atgttagacaacacccgcttacgcatagctattcagaaatcaggccgtttaagcgatgattcacgagaattgctggcccgctgcggcataaaaattaatttacacactcagcgcctgattgcgatggcggaaaacatgccgattgatatcctgcgcgtgcgtgatgatgacattccgggtctggtgatggatggcgtggtcgatctcggcattatcggcgagaacgtgctggaagaagagctactcaaccgccgcgcgcagggtgaagatccgcgctattttaccctgcgccgtcttgacttcggcggctgccgtttatcgctggcaacgccggttgacgaagcctgggacggcccggccgcgctggacggtaaacgtatcgctacctcttatccgcacctcctcaaacgctacctcgaccagaaaggcgtctcttttaaatcgtgtctgttaaatggttctgtcgaagtcgcgccgcgcgcggggctggccgacgctatctgcgatttggtctctaccggcgcgacgcttgaagctaacggcctgcgtgaagtcgaagttatctaccgctctaaagcctgtctgattcagcgcgacggtgagatggcacagagcaagcaacagctgatcgataaattgctgacccgtattcagggcgtgattcaggcgcgcgaatcgaaatacatcatgatgcacgcgccaagtgaacgcctggaagaggttatcgccctgctgccaggcgccgaaaggccgacaattctgccgctggcaggcgagcaacagcgcgtggcgatgcacatggtcagcagcgaaacgttgttctgggaaaccatggagaaactgaaagcgcttggcgccagctcgattctggtactgccgatcgagaagatgatggagtga

SEQ ID NO: 371409 - DNA, 1305 bp, Salmonella enterica
atgagcttcaataccctgattgactggaacagctgtagccctgaacagcagcgtgcgctgctgacgcgtccggcgatttccgcctctgacagtattacccggacggtcagcgatattctggataatgtaaaaacgcgcggtgacgatgccctgcgtgaatacagcgctaaatttgataaaacagaagtgacagcgctacgcgtcacccctgaagagatcgccgccgccggcgcgcgtctgagcgacgaattaaaacaggcgatggccgctgccgtcaaaaatattgaaacgttccattccgcgcagacgctaccgcctgtagatgtggaaacccagccaggcgtgcgttgccagcaggttacgcgtcccgtcgcgtctgtcggtctgtatattcccggcggctcggctccgctcttctcaacggtgctgatgctggcgacgccggcgcgtattgcgggatgtcagaacgtggttctgtgctcgccgccgcccatcgctgatgaaatcctctatgcggcgcaactgtgtggcgtgcaggaaatctttaacgtcggcggcgcgcaggcgattgccgctctggccttcggcagcgagtccgtaccgaaagtggataaaatttttggccccggcaacgcctttgtaaccgaagccaaacgtcaggtcagccaacgcctcgacggcgcggctatcgatatgccagccgggccgtctgaagtactggtgatcgccgacagcggcgcaacaccggatttcgtcgcttctgacctgctctcccaggctgagcacggtccggattcgcaggtgattctgctgacgcctgatgctgacattgcctgcaaggtggcggaggcggtagaacgtcaactggcagaactgccgcgcgcggacaccgccaggcaggccctgagcgccagtcgtctgattgtgaccaaagatttagcgcagtgcgtcgccatctctaatcagtatgggccggaacacttaattatccagacgcgcaatgcgcgcgatttggtggatgcgattaccagcgcaggttcggtatttctcggcgactggtcgccggaatccgccggtgattacgcttccggaaccaaccatgttttaccgacctatggctatactgctacctgttccagccttgggttagcggatttccagaaacggatgaccgttcaggaactgtcgaaagcgggcttttccgctctggcatcaaccattgaaacattggcggcggcagaacgtctgaccgcccataaaaatgccgtgaccctgcgcgtaaacgccctcaaggagcaagcatga

SEQ ID NO: 371410 - DNA, 1080 bp, Salmonella enterica
atgagcactgaaaacactctcagcgtcgctgacttagcccgtgaaaatgtccgcaacctggtaccgtatcagtctgcccgccgtctgggcggtaacggcgatgtctggctgaacgcgaatgaattcccgacagcggtggagtttcagctcacccaacaaacgcttaaccgctacccggaatgccagccaaaggccgtgattgaaaactacgcgcaatatgctggcgtaaagccggagcaggtgctggtcagccgcggcgcggatgaagggatcgagctggtgatccgcgccttctgtgaaccggggaaagacgctattctctactgtccgcccacttacggtatgtacagcgtcagcgccgaaaccattggcgtagagcgccggacggttcccgcgcttgaaaactggcagctggatctacaggggatttccgacaaccttgacggcacaaaagtggtgttcgtttgtagccccaataatcctaccggacaacttatcaacccgcaggatctgcgcacgctgctggagttgacacgcggtaaagcgatagtcgtcgccgacgaagcttatattgagttttgcccgcaggccacgctgacaggctggctggttgaatatcctcatctggttatcctgcgcacattgtcgaaagcttttgcgctggcgggtctgcgctgcggctttacactggctaatgaagaggtgatcaacctgctgttaaaagtgatcgccccttatccgctttctacgccagtggcggatatcgccgcccaggcgctgagcccgcagggaataaacgcaatgcgcgatcgcgtggcgcagacagtgcaggaacgtcagtatctggtgaatgccctgcaacagaccgcctgcgtagaacacgtctttgactctgaaaccaactatattctggcgcggtttaccgcctccagcagcgtgtttaaatccttatgggatcagggcattatcttacgcgatcagaataaacaaccttctttaagcggctgcctgcggattacggtcggcacccgccaggaaaaccagcgcgtcattgacgccttacgtgcggagccagtatga

SEQ ID NO: 371411 - DNA, 1068 bp, Salmonella enterica
atgagtcagaagtatcttttcatcgaccgggacggaaccttaatttccgaaccgccgagcgattttcaggtagaccgctttgataaactggcctttgagccagaggtgattcccgtattgctgaagctgcaaaaagccggttttaagctggtgatgatcactaaccaggatggacttggcacgcaaagcttcccgcaggcggacttcgacggaccgcacaacctgatgatgcagattttcacctctcagggcgtatgctttgatgaggtgctgatctgccctcacctgcccgcagacgactgcgactgccgcaagcccaaagtgaagctggtggagcgttatcttgcggaacaagcgatggatagcgccaacagctatgtgattggcgatcgtgcgaccgatatccagctcgctgataacatgggcattactggtttacgctatcaccgtgaaacgctgaactggacgatgattggcgaacagctaacgaaacgcgatcgctatgcgcatgtgatccgtaacaccaaagaaacacagattgatgtcagtgtctggctggatcgcgaaggcaacagcaagattaataccggcgtcggcttctttgaccatatgctcgatcaaatcgccacccacggcggctttcgcatggagattaccgttaagggtgatctctatatcgacgatcaccacacggtagaagatactggactggcgctcggtgaggcattaaaactggcactcggcgacaagcgcggtatctgccgttttggctttgtactaccgatggatgaatgtctggcgcgctgcgcgctggatatttccggtcgtccgcatctggaatataaagctgaatttacctaccagcgtgtgggcgatttgagcacagagatgattgaacactttttccgctcactctcttacacgatgggcgtcactctgcatctcaagactaaaggtaaaaacgatcaccaccgtgtcgaaagtttgtttaaagcctttggtcggacgctacgccaggctattcgcgtggagggcgatacattaccgtcctcgaaaggagtgctgtga

SEQ ID NO: 371412 - DNA, 591 bp, Salmonella enterica
atgaacgtcgtcatccttgacaccggctgcgccaatttaagctcggtaaaatccgccgtggcgcgccacggttacaccccggtggtcagccgcgaagcggaaatcgtattacgcgctgacaaactctttctgcccggcgtcggcacggcgcaggccgctatggatcaactgcgcgaacgtgaactgatcgacttaattaaagcgtgtactcagccggtactgggtatctgcttagggatgcaactgctgggtcgtcgcagcgaagagacgcgcggcgtggatctgctgaacattatcgaacaagacgtgccgaaaatgaccgactttggtctgccgctgccgcacatgggctggaatcgcgtgtatccgcaggcgggcaaccggctgtttcagggcattgaagatggcgcctatttttactttgttcacagctacgcgatgccggtcaacccgtggactatcgcccagtgcaattacggcgagccgtttaccgcggcggtacagaaagataatttcttcggcgtacagttccatccggaacgttcgggcgcggcgggcgcacagttgctgaaaaacttcctggagatgtaa

SEQ ID NO: 371413 - DNA, 738 bp, Salmonella enterica
atgattattccggcattagatttaattgacggcaccgtggtgcgtctccaccagggcgactacgcccggcagcgggattacggtaacgatcccctgccccgtttgcaggattacgccgcccagggcgccggggtgctgcatctggtagatctgaccggcgctaaagatccggctaagcgacagataccgctgattaaaaccctggtcgcgggcgtgaacgtgcctgttcaggtcggcggcggcgtgcgtaccgaagaagacgttgcggcattactgaaagctggcgttgcccgtgtggtcatcggttcaacggcggtgaaatctcctgacgtggtgaaaggctggtttgaacgttttggcgcgcaggcgctggtactggcgctggacgttcgcatagacgaacacggcaacaagcaggtggcggttagcggctggcaggaaaattccggcgtctcgctggaacaactggtggagacctatctccccgtcggcctgaaacatgtactgtgtaccgatatttctcgcgacggcacgctggcgggctctaacgtttcactgtacgaagagatatgcgccagatatccgcagatcgcctttcaatcctccggcggtattggcgatatcgatgatattgccgccctgcgcggcaccggcgtgcgcggcgtgattgtcggacgcgctctgctggaagggaaatttaccgttaaggaggccatccaatgctggcaaaacgtataa

SEQ ID NO: 371414 - DNA, 777 bp, Salmonella enterica
atgctggcaaaacgtataattccgtgtctggatgttcgtgatggtcaggtggtgaaaggcgtacagtttcgcaaccatgagatcattggcgatatcgttccgctggccaaacgctatgccgacgaaggcgcggacgaactggtgttctatgacattaccgcctccagcgatggtcgcgtagtcgataaaagctgggtggcgcgcgttgccgaggtgatcgacattccgttttgtgtagcgggcggcatccggtcaattgacgacgccgccaaaattctttctttcggggcggataagatctctatcaattcccctgcactggctgacccaacgctgattacccgtctggctgaccgttttggcgtacagtgcattgtcgtcgggattgatacctggtttgacgacgccacggggaaatatcatgttaaccagtataccggcgatgaaaaccgtacccgcgtgacgcagtgggagacgctggattgggtgcaagaggtacaacagcgcggcgcgggggaaatcgtcctgaatatgatgaaccaggacggcgtgcgtaacggttacgatctgacgcagttgaaaaaagtccgtgacgtttgccgcgtgccgctgatcgcctccggcggcgcgggcacgatggaacactttcttgaggcattccgtgatgccgatgtcgacggcgcgcttgccgcctccgtttttcacaagcaaatcatcaatattggcgaattaaaagcgtacctggcaggccagggcgtggagatcaggatatgttaa

SEQ ID NO: 371415 - DNA, 612 bp, Salmonella enterica
atgttaacagagcaacaacgccgcgagctggactgggaaaaaaccgatggcctgatgccagccatcgtgcaacatgcggtatccggcgaagtattgatgctgggctatatgaacccacaagcgctggacaaaaccattgaatccggccatgtcacgttcttctcacgcacgaaacagcgtttatggaccaaaggcgaaacctcaggccatgtgctgaatgtcgtcagcattgcgccggattgcgacaacgatacactgctggtgctggcaaatcctgtcgggccgacctgccacaaaggtaccagctgctgctttggctacgccggccatcagtggttattcctgtatcaactggagcagctactggcagagcgcaaaaccgccgatccggccagctcttacacggcgaaactgtacgccagcggtaccaaacgtattgcgcaaaaagttggcgaagaaggtgtagaaaccgcgctggcggccaccgtcaatgatcgttttgaattaaccaatgaagcgtctgatttgatgtaccacctgctggtgctgttgcaggatcaggatctcaacctcaccaccgtgatcgacaatcttcgtaagcgtcatcaataa

SEQ ID NO: 371416 - DNA, 984 bp, Salmonella enterica
atgacagtggatagtaatacgtcttccgggcgtgggaacgatccggaacagattgatttgattgagttattgctacagttatggcgtgggaagatgaccattattgtagccgttattatcgccattttgctggccgtaggctacctgatgatagccaaagaaaaatggacatccacggcgattattacccaacctgatgccgcgcaggttgccacctataccaatgcgctcaacgtcttgtatggcgggaatgcccccaaaatctctgaagtgcaggcgaattttataagccgctttagctctgcgttttccgcattatcggaagcgctggataatcagaaagagcgggaaaagctcaccattgaacagtcggtaaaggggcaggcgctgccactctcggtttcttatgtgagtactaccgctgaaggggcgcagcgtcggctggcggaatatatccaacaggtggatgaagaggtcgctaaggaactggaagttgacctgaaagataacatcacgctgcaaaccaaaacgttgcaggagtcccttgagacgcaggaagttgtggcgcaggagcaaaaagatctgcgtattaagcaaatcgaagaagcgttgcgctatgcggatgaggccaaaatcacgcagccgcagattcagcaaacccaggatgttacccaggacacgatgttcctgctggggagcgatgcgctaaaatcgatgatacagaacgaagcgacgcgtccactggtcttttctccggcctattaccagacgaagcagacactgctggacattaaaaatctgaaagtgactgccgatacggtgcacgtctatcgttatgtgatgaagccgacgctgccggtccgtcgcgatagcccgaaaaaagccattacccttgtgctggctgtattgctgggcgggatgatcggtgccgggattgtgctggggcgcaatgcgctacgtagctataagccaaaagccttgtaa

SEQ ID NO: 371417 - DNA, 1167 bp, Salmonella enterica
atgaaaatcacgatatccgggacgggttatgttggcttgtctaatggtttgcttattgcacaacatcatgatgtggtggcgttagacattgttccttcccgtgttgaactgttaaatgatcggatatctccgattgttgataaagaaattcagcaatttttaaaggaagataacatcagattcagggcaacgctggataagtttgatgcgtaccagaatgcagattacgtcattattgctacgcctacggattacgatcccaaaaccaactattttaatacgtccagtgtggaatcggtcattcaggatgtgatcagcatcaaccccgcagccgtgatgattattaagtctacggtgccggttggcttcacggcggcaatgcgtcagaagtttgcgacagaaaatatcattttctctccggagtttttacgtgaaggtaaagccctttacgataacctttatccctcccgtatcgtgattggggaacagtctgagcgcgccagagaatttgccgcattactccaggaaggcgctattaaacaggagattccaacgctgtttacggactccactgaggcggaagctattaaacttttcgccaatacttatctcgctatgcgagtcgcttattttaatgaattagacagctatgctgaaacgttaggattaaatacccgacaaattattgaaggggtgtgcctcgacccgcgtattggcaatcattataataatccctcttttggttatggcggatattgtttgccaaaagataccaaacagttgctggccaattatcagtcggtgcctaataatattatctccgctatcgttgaagcaaaccgtacgcgtaaagattttattgccgacgctatcctcgccagaaagcctaaagtggtgggcatttatcgcctgattatgaagagtggctccgataacttccgcgcctcatcgattcaggggattatgaagcgcattaaagcgaaaggcgtagaggtcatcatctatgagccggtaatggaagaagatactttctttaactcacgtcttgaacgtgatttgcactgctttaaacagcaggcggatgtcattatttccaacaggatggcggcagagcttttggatgttgctgaaaaagtgtatacccgcgatcttttcggtagtgattaa

SEQ ID NO: 371418 - DNA, 1407 bp, Salmonella enterica
atgtccaagcaacagatcggcgtcgtcggtatggcagtgatggggcgcaacctcgcgctcaacatcgaaagccgtggttataccgtctccgttttcaaccgctcccgtgaaaagaccgaagaagtgattgccgagaatcccggcaaaaagctggtgccttattacacggtgaaagagtttgttgaatccctcgaaacgcctcgtcgtatcctgttaatggtgaaagcgggtgcaggtactgatgcagctatcgattcgctgaaaccgtatctggaaaaaggcgatatcattattgatggcggtaacaccttcttccaggacacaatccgtcgcaatcgcgagctgtctgcggaaggttttaactttatcggtaccggtgtttccggtggtgaagagggcgcgctgaaagggccatctatcatgcctggcggtcagaaagatgcctatgaactggtggcgccgatcctgacgaagattgctgctgtggcggaagatggcgaaccgtgcgtgacctatatcggcgccgatggtgctggtcactacgtcaagatggtccacaatggtattgaatatggcgatatgcagcttatcgctgaagcttactccctgctgaaaggcggcctgaatctcagcaatgaagagttggcgaacacttttactgagtggaataacggcgagctgagcagctatctgatcgacatcactaaagacatcttcactaaaaaagatgaagacggaaactacctggtggatgtcattcttgatgaagccgccaacaaagggaccggtaaatggaccagccagagcgcgctggatctgggtgaaccgctgtcgctgattaccgaatccgtctttgcgcgttacatctcttcgttgaaagcgcaacgtgttgccgcatctaaagtactctccgggccgaaagcgcagccggcaggcgacaaagctgaatttatcgagaaagtgcgtcgcgcgctgtatcttggcaagatcgtctcctatgcgcagggcttctcgcagctacgcgccgcgtctgatgaatatcactgggatctcaactacggcgagattgctaagattttccgtgcgggctgtatcattcgcgctcagtttctgcagaagatcactgatgcttacgcagaaaacgctggtatcgctaacttgctgttagcgccttacttcaagaaaattgctgatgagtaccagcaggcgctgcgtgatgttgtggcttacgcggtgcagaacggcattccggtgccgacattctctgcggcagtggcctactatgacagctatcgcgccgcagtactgccagctaacttaattcaggcgcagcgtgactactttggtgcgcacacctataaacgtactgataaagaaggcattttccataccgagtggttggaataa

SEQ ID NO: 371419 - DNA, 1431 bp, Salmonella enterica
atggataatattgataataagtataatccacagctatgtaaaatttttttggctatatcggatttgattttttttaatttagccttatggttttcattaggatgtgtctattttatttttgatcaagtacagcgatttattcctcaagaccaattagatacaagagttattacgcattttattttgtcagtagtatgtgtcggttggttttggattcgtttgcgacattatacataccgcaagccattttggtatgagttaaaagaaatttttcgtacgatcgttatttttgctatatttgatttggctctgatagcgtttacaaaatggcagttttcacgctatgtctgggtgttttgttggacttttgctctaatcctggtgcctttttttcgcgcacttacaaagcatttattgaacaagctaggtatctggaagaaaaaaactatcatcctggggagcggacagaatgctcgtggtgcatattctgcgctgcaaagtgaggagatgatggggtttgatgttatcgctttttttgatacggatgcgtcagatgctgaaataaatatgttgccggtgataaaggatactgagattatttgggatttaaatcgtacaggtgatgtccattatatccttgcttatgaatacaccgagttggagaaaacacatttttggctacgtgaactttcaaaacatcattgtcgttctgttactgtagtcccctcgtttagaggattgccattatataatactgatatgtcttttatctttagccatgaagttatgttattaaggatacaaaataacttggctaaaaggtcgtcccgttttctcaaacggacatttgatattgtttgttcaataatgattcttataattgcatcaccacttatgatttatctgtggtataaagttactcgagatggtggtccggctatttatggtcaccagcgagtaggtcggcatggaaaactttttccatgctacaaatttcgttctatggttatgaattctcaagaggtactaaaagaacttttggctaacgatcctattgccagggctgaatgggagaaagattttaaactgaaaaatgatcctcgaatcacagctgtaggtcgatttatacgtaaaactagccttgatgagttgccacaactttttaatgtactaaaaggtgatatgagcctggttggaccacgacctatcgtttcggatgaactggagcgttattgtgatgatgttgattattatttgatggcaaagccgggcatgacaggtctatggcaagtgagtgggcgtaatgatgttgattatgacactcgtgtttattttgattcctggtatgttaaaaactggacgctttggaatgatattgccattctgtttaaaacagcgaaagttgttttgcggcgagatggtgcgtattaa

SEQ ID NO: 371420 - DNA, 1434 bp, Salmonella enterica
atgaacgtagttaataatagccgtgatgttatttattcatcaggtattgtgtttggaacgagtggggctcgcggtcttgtaaaagattttacacctcaggtatgtgctgcttttacggtttcatttgttgccgttatgcaggaacatttttcctttgataccgtagcattggcaatagataatcgtccaagtagttatgggatggctcaggcgtgtgctgctgcattggcggataaaggcgttaactgtattttttatggagtggtaccaaccccagctttggcctttcagtctatgtctgacaatatgcctgcgataatggttacgggaagtcatattccattcgagcggaacggcctcaagttttatcgtcctgatggtgaaatcacgaaacatgatgaggctgcgatccttagtgttgaagatacgtgcagccatttagagcttaaagaactcatagtttcagaaatggctgctgttaattatatatctcgttatacatctttattttctactccattcctgaaaaataagcgtattggtatttacgaacattcaagcgctgggcgtgatctttataagcctttatttattgcattgggggctgaagtcgttagcttgggtagaagcgataattttgtacctatagatacagaggctgtaagcaaagaggatcgggaaaaagctcgctcatgggctaaagagttcgatttagatgccatattctcgacagatggggatggtgatcgccctcttattgctgatgaggccggtgagtggctaagaggcgatatactaggtctattatgttcacttgcattggatgcagaagccgtcgctattcctgttagttgtaacagcataatttcttctggccgcttttttaaacatgttaagcttacaaaaattggctcgccttatgttatcgaagcttttaatgaattatcgcggagttatagtcgtattgtcggttttgaagccaatggcggttttttattaggaagcgacatctgtattaacgagcagaatcttcatgccttaccaactcgtgatgctgtattaccagcaataatgctgctttacaaaagtaggaataccagcattagcgctttagtcaatgaactcccaactcgttacacccattctgacagattacaggggattacaactgataaaagtcaatccttaattagtatgggcagagaaaatctgagcaacctcttaagctatattggtttggagaatgaaggtgcaatttctacagatatgacagatggtatgcgaattactttacgtgatggatgtattgtgcatttgcgcgcttctggtaatgcacctgagttacgctgctatgcagaagctaatttattaaatagggctcaggatcttgtaaatacaacgcttgctaatattaaaaaacgatgcttgctgtaa

SEQ ID NO: 371421 - DNA, 645 bp, Salmonella enterica
atgagcgctggctggtcggatgtgggttcctggtcctcactttgggatatatcgaataaagatcatcagagaaatgttttaaaaggagatatcttcgcacatgcttgtaatgataattacatttattccgaagatatgtttataagtgcgattggtgtaagcaatcttgtcattgttcaaacaacagacgctttactggtggctaataaagatacagtacaagatgttaaaaaaattgtcgattatttaaaacggaatgataggaacgaatataaacatcatcaagaagttttccgcccctggggaaaatataatgtgattgatagcggcaaaaattacctcgttcgatgtatcactgttaagccgggtgagaaatttgtggcgcagatgcatcaccaccgggctgagcattggatagtattatccgggactgctcgtgttacaaagggagagcagatttatatggtttctgaaaatgaatcaacatttattcctccgaatactattcacgcgctggaaaatcctggaatgacccccctgaagttaattgagattcaatcaggtacctatcttggtgaggatgatattattcgtttagaacaacgttctggattttcgaaggagtggactaatgaacgtagttaa

SEQ ID NO: 371422 - DNA, 519 bp, Salmonella enterica
atgatttttaccaaaatcattaggggattcatcagtgctgcgcagtccagtatctccagcagcttaaacagcatttccagttgttttaattccgatatctatcagcgtttgagtcataaaaaaagaacgcctgaaaaccgtatgaaaatagctaagttagttattctggtcgcgggcctgataagtagcgcggcctcagtatggctggtcatggccgatgaatcagaaatctgggatgcatttaatagtctgataggtctgatgggagggccaatgaccggtctgttcatgctgggcattttctttaaacgagcaaatgccgggagtgcggttttaggaattattatcagcgtcattaccgtgctgggcgcacgctatgccactgaccttaacttcttcttttatggggtcattggctcgctaagcgtggtgatcagcggcgttattttcgccccgttatttgccccggcaccgccattgacgctggatgaaaaacctgagccaaaggtgacattatga

SEQ ID NO: 371423 - DNA, 882 bp, Salmonella enterica
atggagcctcaacccccacgtcttaaacccggaaaaatccttgacactctgggtgctatgcaaaaaagcctgacacgtgcctcccagcgtattgcgcaatatattttagccttccccagacaggtgacacagtcatctattgccgatttgtcgcgcgacacacaggccggagaagccacggttattcgcttttgtcgcaccctgggctataaaggttttcaggattttaaaatggacctggccattgaacttgccactaccgagtctgatgacagtagtcctctactggatgccgaagttagcgaatccgacgatgcccacgccattggtttaaaattgcagaacaccattagtaatgtattgtctgaaacgctaaatctgcttgatatgcaacaggttctcggtgtcgtggacgccctacgtcactgtcactcagtttatatctttggtgtgggctcatcggggatcacggcgctggatatgaaacacaagctaatgcgtattggtttacggggcgatgcggtaagcaataaccattttatgtacatgcaggctacgctattaaaagcaggcgatgtcgcgatgggtgtcagtcactcgggcacatcgccagaaacagtgcattcactccgattggcccgacaggctggcgccaccacagtcgccattacccataatctgggttctccattatgtgaagaggccgatttttgcctgatcaatggtaatcggcaaggaatgttgcagggtgactcgatcggtacgaaagccgcgcagcttttcgtctttgacctgctctatacccttcttgtacagtcctcgccggaacaggcccgagaaagcaaattacggacaatgaatgccctggacatgacaaaataa

SEQ ID NO: 371424 - DNA, 789 bp, Salmonella enterica
atgggaagacaaaaagcagtgatcaaagctcgtcgtgaagcaaagcgtgtgttgagacgagattcgcgtagtcataagcaacgtgaagaagaatcggtcacgtcactggtacagatgggcggagtagaagccattggcatggcgcgcgatagtcgcgatacctcgcctgttaaggcgcgaaatgaagcacaggcgcattatctgaacgctatcgacagtaaacagcttatttttgcgaccggcgaagccggctgtggaaaaacatggatcagtgcggcaaaggcggcagaagcattgattcataaggacgtcgagaggatcattgtgacgcgtccggtattgcaggctgatgaagatcttggttttttgcccggtgatatcgctgaaaaatttgcgccttattttcgtcccgtctacgatgtcctgcttaaacggttgggcacgtcctttatgcaatattgtttgcgcccggaaatcggtaaggtagaaattgccccgttcgcctatatgcgtgggcgtacttttgaaaatgcggtcgtgatcctcgacgaggcgcaaaatgtgactgcggcgcaaatgaaaatgtttttgacgcgactaggcgaaaatgtcacggtcattgtcaatggcgatattacgcaatgcgacctgccgcgcggcgtgcgttccggattgagcgatgcgttggaacgctttgaagaagatgaaatggtagggattgtgcatttcaacaaagacgactgcgtgcgctcggcgctttgtcagcgaacgctccacgcatacagctaa

SEQ ID NO: 371425 - DNA, 297 bp, Salmonella enterica
atggtaatgtccgcaccaggacacattgtttacagtagttacaacaccctgtacggacattctctctccggtggtggtcttgtcatcttaaaagctctcatcatttctcttactgtccatacccatgacgtcatatgtggtgcgcgtagccgtgtgtggcgtcgtttcaaaaagcaagctaaggcttacaaggaagccaaccctcagatgtgtgtgcgcataatcgcgttcaagagaacgcgggtgatgtatacctacaactcaaggtgctatccatgggaagacaaaaagcagtga

SEQ ID NO: 371426 - DNA, 1509 bp, Salmonella enterica
atggctattagcacaccgatgttggtgacattctgtgtctatatttttggcatgatattgattgggtttatcgcctggcgctcaaccaaaaactttgatgactatattcttggcggtcgcagcctggggccgtttgttacggctttatcagccggcgcgtcggatatgagcggctggctgttaatggggctgcctggcgctatctttctgtcggggatctctgaaagctggatcgccattggcctgacgttaggcgcatggattaactggaagctggtggccgggcgcctgcgcgtgcataccgaatttaacaataacgcgctcacgctaccggactattttaccggtcggtttgaagataagagccgagtcctgcgtattatttccgcgctggtcattctgctgtttttcactatctattgcgcatcaggtattgtcgctggggcacgactgttcgaaagcaccttcggtatgagctatgaaaccgcactgtgggcgggggccgcggcaaccattatttatacctttatcggcgggtttcttgccgttagctggacggataccgttcaggccagcctgatgatttttgcgttaatcctgacgccggtgatggttattgtcggcgtaggcggttttagcgagtcgctggaggtgatcaagcaaaagagcatcgagaatgtcgacatgctcaaggggctgaattttgtcgctattatttctctgatgggctggggactgggttacttcggtcagccgcatatcctggcgcgctttatggcggcggattcccatcacagtattgttcatgcgcgtcgtatcagtatgacctggatgattctgtgtctggcgggcgcggtggcggtgggcttctttggcattgcgtactttaacaataaccccgcgctggccggggcggtgaaccaaaactcagaacgcgtatttattgaactggcgcagatcctgtttaacccgtggattgccggtgttctgctgtctgctatcctggcggcggtgatgtcgacgttgagctgtcagttgctggtatgctccagcgcgattacagaagatttatataaggcttttctgcgtaaaagcgccagccagcaagagctggtatgggtagggcgagtgatggtgctggtggtagcgctgatcgccattgcgctggcggcgaaccccgataaccgtgtgctggggctggtgagctacgcctgggctggattcggcgcggcatttgggcctgttgtcctgttttctgtgatgtggtcgcgtatgacacgtaacggcgcgctggcgggaatgattattggcgcggtgacggttatcgtctggaaacaatatggctggctggatctgtatgagattatccctggcttcattttcggcagcctggggatcgtaatctttagcctgcttggcaaagcgccgacagcagcgatgcaggaacgctttgcaaaagcggacgcgcattatcattccgcgccgccgtcgaagctacaggcggaataa

SEQ ID NO: 371427 - DNA, 3981 bp, Salmonella enterica
atgggaaccaccacgatgggggttaagctggacgacgccacgcgcgaacggatcaaaatggccgcgtcgcgtatcgatcgcacgccgcactggttaataaaacaggcaatctttagctatctggacaagctggaaaatagcgatacgctaccggagctacctgcgctgtttgccggcgcggcaaatgaaagcgaggagccggtcgcgccgcaggatgagccgcatcagccctttctggagtttgccgaacagattcttccccaatccgtctctcgcgccgccatcaccgccgcctggcgccgcccggaaaccgatgcggtgtcaatgctaatggaacaggcgcgcctgtcgccgcctgtcgctgagcagacgcataaactggcgtatcaactggcggagaaattgcgcaatcaaaaatccgccagcggtcgcgcgggtatggtgcaagggctgttgcaggagttttccctctcttcgcaagaaggcgttgcgctgatgtgtctggcggaagcgctgctgcgtattcccgacaaagctacgcgcgatgcgttaattcgcgacaaaatcagtaatggcaactggcagtcgcatattggccgtagcccgtcgctgtttgtaaacgccgccacctgggggctgctctttaccggccgactggtctcaacgcataacgaagccaatctttcgcgctcgctgaaccgcattatcggcaagagcggcgaaccgttaatccgcaaaggcgtcgacatggcgatgcgtttaatgggcgagcagttcgtgactggcgaaaccattgctcaggcgctggcgaatgcccgaaaactggaagagaaagggttccgctattcttacgatatgctgggcgaagccgcgttaaccgccgccgatgcgcaggcctatatggtctcttaccagcaagcgattcatgccatcggcaaagcgtctaacggtcgcggtatttacgaagggccaggcatctcgattaagctgtccgccctgcatccacgctatagtcgcgcgcaatacgatcgggtaatggaggagctttatccgcgcctgaaatcactgacgctgctggcgcgccagtatgatatcggtctcaatatcgacgccgaagaggcggatcgtctggagatctcgctcgatctgctggaaaaactctgcttcgaacccgaactggcgggctggaacggcattggctttgtgatccaggcttaccagaaacgctgcccgctggtcattgattatttagtcgatctggcctcccgtagccgccggcggctgatgattcgtctggtgaaaggcgcctactgggatagcgaaatcaaacgcgcgcaaatggaagggctggagggctatccggtttatactcgcaaagtgtataccgatgtctcttatctggcctgcgcgaaaaaactgctcgccgtccctaatctgatctacccgcagttcgcgacccataacgctcacacactggcggcgatttatcatctggccgggcaaaattactatccgggtcagtacgaattccagtgcctgcacggcatgggcgaaccgctgtatgaacaggtcaccggtaaagtggcggacggaaaacttaaccgtccctgccgtatttacgcgccggtgggaacacacgaaaccctgctggcctatctggtacgacgcctgctggaaaacggcgccaacacctcttttgtcaaccgtatcgccgatgccaccctaccgctcgatgaactggtggcggacccggtcgaggccgtggaaaaactggcgcagcaggaaggtcaggctggcataccgcatccgaaaattccgctgccgcgcgatctgtacggcgaaggtcggataaactccgccggacttgatttagcgaatgaacatcgcctcgcctcgctttcttctgccctgttaagcaacgccatgcagaaatggcaggccaaacctgtgctggaacaaccggtggccgacggtgagatgacgccggttatcaacccggcggaaccgaaagatattgtcggctggggacgcgaagcgacagaaagcgaggttgaacaggcattgcaaaacgcggtcaatcaggcgccggtttggtttgcgacgccgccgcaagaacgcgccgccattttgcagcgggcggcggtattaatggaagaccaaatgcagcagttgattggcctgttggtgcgtgaagcggggaaaacgttcagcaacgccattgccgaagtgcgcgaagcggtagacttcctccattattatgccggtcaagtgcgtgacgatttcgataacgaaacgcatcgcccgttagggccggtagtctgcatcagtccgtggaacttcccgctggccattttcaccggccaaatcgccgccgcgctggcggcaggtaacagcgttctggcgaaaccggcagagcagacatcgctgattgccgcccagggcattgccattttgctggaagcgggcgtaccgccgggcgtcgtgcaactgttgccgggacggggagaaaccgtcggcgcccagcttaccgccgatgcgcgtgtacgcggcgtgatgtttaccggttccacggaggtcgcgacgttgttgcagcgcaacatcgccacgcgtcttgacgcccagggccgccctattccgttgattgcggaaaccggcggtatgaacgctatgattgtcgactcttccgcgctcaccgagcaggtggtcgtggatgtgctggcttcctctttcgacagcgccggacaacgctgttccgcgctccgcgtgctgtgtttgcaggacgatatcgccgaacatacgctgaaaatgttacgcggcgcgatggcggagtgtcggatggggaatccaggccgtctgacgaccgatatcgggccggtgatcgatagcgaggccaaagccaacattgaacgtcacatccagacgatgcgcgccaaaggccgcccggttttccaggccgcacgtgaaaacagcgatgatgcgcaggaatggcagaccggtacgtttgttatgcccacgcttattgagctggaaaacttcgcagaactggaaaaagaggtcttcgggcccgtgctgcacgtcgtgcgttataaccgtaaccaactggcggagcttatcgaacagattaacgcttccggctacgggctaacgctgggcgtacatacccgtattgatgaaaccattgcgcaagtcaccggttccgcccatgtcggcaacctgtacgttaaccgtaatatggtgggcgcggtcgtcggcgtccagccgtttggcggcgaaggcctgtccggcaccgggccaaaagcgggaggaccgctctatctctaccgcctgctggcacaccgcccgcccaatgcgctcaatacgacgctgactcgtcaggatgcgcgttacccggtggatgcgcagcttaaaaccacgctactcgcgccgttgaccgctctgacgcaatgggcggcggatcgcccggcgctacagacgctctgccgacaattcgccgatctggcgcaggccggcacgcagcgcctgctaccgggaccgaccggcgagcgcaatacctggacgctgttgccgcgtgaacgggtattatgcctggctgatgacgaacaggacgcgttgacgcagcttgccgccgttctcgccgtcggcagtcaggcgctatggtcagacgacgccttccaccgcgatctggcgaaacgtctccccgccgccgttgcggcgcgtgtccagtttgcgaaagcggaaacgctgatggcgcagccgtttgacgcggtgattttccacggcgactccgacaagctgcgaaccgtgtgcgaagccgtcgccgcccgcgaagccgtcgccgcccgcgaaggcgcgatagtgtcggtacaggggttcgcccgcggcgaaagcaatatactgctggaacggctctatattgaacgttcgctgagcgtaaacactgccgccgctggcggtaatgccagcctgatgacaattggctaa

SEQ ID NO: 371428 - DNA, 396 bp, Salmonella enterica
atgaaacaaattttccttacctgcgcggcgttgtggttcagcagtcaggcgttggccgatgagtgtgccagcgccagtacgcagctggaaatgaatcgctgcgccgccgcgcaataccaggcggcagataaaaagctgaacgaaacctatcaaagcgcgattaagcgtgcgcaaccgccgcagcgcgagctgttgcaaaaagcgcaggtggcatggattgcactgcgggacgccgattgcgctctgattcgctcaggtacggagggcggcagcgtgcaacccatgatcgccagccagtgcctgaccgataaaacgaacgaacgcgaagcgtttttagcctcgctgctgcaatgtgaagagggtgatttgagctgcccactgccgccagccggttaa

SEQ ID NO: 371429 - DNA, 639 bp, Salmonella enterica
atgtcgcaacgcacagagaaaaaaatcgggaaacgctcgcaggccaccggtgcaaaacggcagcttatcttaactgccgcgcttgctgttttttcccagtatggcattcatggcgcgcgtcttgagcaggtcgccgagcgggcaggcgtctccaaaaccaatctgctttattattatccctcgaaagaggcgctgtatgtcgcggtaatgcgacagattctggatgtctggttggcgccgctcaaggcgtttcgcgcagaattttcccctctggaggccatcaaagagtatatccgtctcaagctggaggtttcgcgtgattatccgcaggcgtcgcggctcttctgcatggagatgctggcgggcgcgccgctcttaatggaggaactgaccggcgatctaaaagcgttgatagatgaaaaatccgcgctgattgccggatgggtgcacagcgggaaactggcgcccgtctccccgcaccatttgatcttcatgatttgggccgccacgcaacattacgccgattttgcccctcaggttgaggcggtaaccggcgcgacgcttcgcgatgaagcctttttcaaccaaacggtcgaaagcgttcagcgcattattattgaagggattcgcgtgcgttaa

SEQ ID NO: 371430 - DNA, 168 bp, Salmonella enterica
atggcaaaccatcgtggcggttccggtaattttgcggaagaccgcgaaagagcatcagaagcaggtcgtaaaggtggtcagcacagcgggggcaattttaagaatgacccgcagcgtgcatccgaagcaggcaaaaaagggggcaaaagcagtaaccgtaatagctag

SEQ ID NO: 371431 - DNA, 597 bp, Salmonella enterica
atggcaaagattctggtgctctattattccatgtacggacacattgaaaccatggcgcacgcggtggcggaaggggcaaagaaagtcgacggcgcagaggtcattataaagcgtgtgccagaaacaatgccgcctgaaatcttcgcaaaagctggcggtaaaacgcaaaacgcaccggttgccaccccacaggagctggcggattacgatgccattatttttggtacgccaacccggtttggcaatatgtcaggccagatgcgtaccttcctggatcaaaccggtggactgtgggcatccggcgcgctatacggcaagctcggcagcgtgttcagttctaccggaacgggcggtggccaggagcagaccatcacctcgacctggactacgcttgcccatcatgggatggtgattgtcccgataggctatgccgcacaggaactgtttgacgtctcccaggttcgcggcggcacgccttacggcgcaacgactatcgccggaggcgacggttcacgtcaaccaagccaggaggaactctctatcgctcgctatcagggggaatacgtcgccggtctggcagtcaaactcaacggctaa

SEQ ID NO: 371432 - DNA, 228 bp, Salmonella enterica
atgccaactcaagaagcaaaagcgcaccgcgtcggcgaatgggcaagcctgcgtaatacgtcgccggaaattgccgaagccatttttgaagtcgctcactatgacgagaaactggcagaaaaaatatgggaagaaggtagcgatgaggtgctgatcaaagcctttgagaaaacggacaaagactcgctcttctggggcgaacaaatcatcgaacgtaaaaacgtataa

SEQ ID NO: 371433 - DNA, 819 bp, Salmonella enterica
atgggcactatggaccctaccttcaatccggtgattaccgatgattccgccgcgttccggcaacaggccgtacaggcgatggaaaaggcgcgtagtcagctacatcttgatgagagttataaactgcttgagcagataacgcattatcaggactcgccgtcctgcaaagagaagcatcagtgttcgctaatcgacgcgaaagataccttcagtgcgaactatcagcaagagcctggcgtgcaggggccgctgaaagtagggaactcgctggtggatgcgtttaccctgcaatattacgaagggtttccgatggatcaggtcgcctggggcgggatccacaccgatcggcagtggaaggtgctgtcaaaactgaaaaacggctaccaggacagcctgtttacctcacccacggtggcacgcaatgtcgctgcgccgctggtgaaatatatcgataaggtgctggttgccgatcgcgttagcgcgccgaaggttaccgtgctggtggggcatgattccaatatcgcgtcgctgctgacggcgctggattttaaaccctatcagctccatgaccagtatgagagaacgccgattggcggtcagcttgtcttccaacgctggcatgacggcaacgctaaccgggatttgatgaaaatcgagtatgtctaccagagcgcccggcagttacgcaatgcggaagcgttaacgctcaaatcgcccgcgcaaagggtaaccctggaactgaaaggatgtccggtggatgcgaacggcttctgtccgctggataagttcgataacgtcatgaacactgctgcaaaatag

SEQ ID NO: 371434 - DNA, 417 bp, Salmonella enterica
atgaaaaaatcattactcgctgttgctgtggcaggggctgttttgttgtcatccgccgtacaggcgcagacaacgccggagggttatcaattacaacaggtgctgatgatgagccgccataatctgcgggcgccgctggcgaataatggcagcgtactggcgcagtcgacgccgaacgcctggccggcgtgggacgttcccggcgggcaactgacgacgaaaggcggcgtgctggaagtctatatgggacattacacacgtgaatggctggtcgcgcaggggctgataccgtcgggagaatgtccggcgcccgacacggtatatgcctatgcgaatagtttgcagcgcaccgtcgccaccgcgcaatttttcattaccggcgctttccccggctgtgatattcctgttcatcattag

SEQ ID NO: 371435 - DNA, 507 bp, Salmonella enterica
atggcggctaaactgcggcgttggctgcgtgaagccgcggtttttctggcgctcctcatcgcgataatggtggtcatggacgtctggcgcgcgccgcaggcgcctccggcgtttgccgcgacaccgttacatacgctgacgggagagtcgacaactctggcgaccttgagcgaagaacgccccgtactgctctatttttgggccagctggtgcggggtatgccgctttactacgcctgcggtcgctcgcctggcggctgaaggggaaaacgtcatgaccgttgcgctccgctccggcgatgacgctgaggttgcccgctggctggcgcgcaagggcgttgacttcccggtcgtcaatgatgctaaaggcgccttatccgctggctgggaaatcagcgtgacaccaacgctggtggtggtttcacaaggtcgggttgtgttcaccaccagcggctggaccagctattggggcatgaagcttcggctgtggtgggcaaaaacgttctga

SEQ ID NO: 371436 - DNA, 624 bp, Salmonella enterica
atgaaatacatgattgttttactgctggcgctgttttcaacgctgagcatcgcgcaagaaaccgctccttttacgcccgatcaggaaaagcagattgaaaatctgatccatgcggcgttgtttaacgatcctgccagcccgcggataggcgctaaacaccctaagctgacgctggtgaactttacggattacaactgcccgtactgcaaacagctcgatccgatgctggaaaagattgtgcagaaatatcctgacgttgcggtcattattaaaccgctgccattcaaaggagagagttccgtactggcggcgcgtattgcgctgaccacctggcgcgagcatccgcaacagttcctcgcgctacatgaaaaactcatgcaaaagcgcggttaccatacggatgacagtattaaacaggcccagcagaaagcaggggctacgccagtgactctggatgaaaaaagcatggaaacgatacgcactaatttgcagttggcaaggctggtcggcgtgcaaggaacgccagcgacgatcattggcgacgagctgattccgggcgcggtgccctgggatacgctggaagcggtggtgaaagaaaaactggcggctgccaatggcggctaa

SEQ ID NO: 371437 - DNA, 1887 bp, Salmonella enterica
atgatgattttattcaggcggatactgttctgcctgttatggctttggctgcccgtctcctgggcggcggaaagcggctggctgcgttcgcccgataacgaccatgccagcatacggctacgtgccgatacgtccgctaacggtgagacccggctgttgcttgacgtcaaactggaaaacggctggaaaacctactggcgcgcgccgggggaagggggcgtggcgccctctatcgcctggaaaggtgacatgcctgaggtaagctggttctggccaaccccctcgcgctttgatgtggcgaatatcaccacccagggatatcacgacgaggtgacctttccgatgatcgtgcgcggtacgccgcccgcgaccttgagcggcgtgttgacgttatcaacctgcagcaatgtttgtctgttgaccgattaccccttttccgtgacggccactgtgcagaatgccgattttgcccatgactatgcgcgggcgatgggtaaagttccgctccgcagtggactaacggactcgcttgacgtcggctatcgcccgggagaactggtggtcactgctacgcgagcggcgggctggtcatcgcccgggctctatcttgacaccatagatgacgtcgattttgcgaagcctcgcctgcgcgtagagggcgacaggttacaggcgacggtgccggtgacggacagttggggcgaaaaggcgcccgatttgcgcaacaaatcgctgaccctcgtgttagccgatggcgctatcgcccaggagagcacgcaaaccattggcgctgcgccagcgcaaacgccggacaatgcggcgctacctttctggcaagttgtaatgatggcgctgatcggcggactgattcttaatttaatgccctgcgtactgccggttctgggcatgaaacttggctctattttattggtagaggaaaaaagccgctctcacatcaggcgacaatttttggcttcggtcgccggtatcattgcgtcatttatggcgctggcggcgtttatgaccctccttcgcctgtcaaaccatgcgctggcttggggagtccagttccagaatgtatggtttattggttttatggcgctggtgatgttgttgtttagcgccagcctgttcgggctttttgagttcaggcttccctcatctatgaccacgaaactggccacttacggcggtaacggtatgtcgggacatttctggcagggggcattcgccacgctgctggcgacgccttgtagcgcgccgtttctgggcacggcggtcgcggtggcgctcacggcgtcgttgccgacgctgtgggggctgttccttgcgctaggcctggggatgagcgcgccgtggctactggtcgcgatacgaccagggcttgcgctacgtttaccgcgccccgggcgttggatgaatgtcctgcgtaggatcctcggtctgatgatgctggggtcggctatctggctggcgacgttactcctgccgcatttcggcttcactgcgtcaaagagcgcgcaagacacggttcagtggcaaccgttgagtgaacaggcaatccagtcggcgctggcgcagcataagcgggtatttgtcgatgtcactgcggactggtgtattacctgtaaagtgaataaatacaacgtcctgcaaaaagaggatgtgcaggccgccttgcaacaaccggatgttgtggcgctgcggggagactggacgctgccgtccgatgccattacagattttctgaaaacgcgtggccaggtcgccgtgccgtttaatcaggtatatggccccggcttgccggaaggggaggcactgcccactttgctgacccgcgatgcggtattacaaacgttgaaaaaagcgaaaggaataacccaatga

SEQ ID NO: 371438 - DNA, 363 bp, Salmonella enterica
atggcgaaacaacaacggatgggctggtggtttctttgccttgcatgtgtcgtggtaatggtttgtaccgcgcaacgcatggcgggcctgcacgccttgcagatgcaggcgacggcctctgctgcggtgatcagcgctccctcctcgacagatgacggctcgccggtcaccccctgcgaattaagcgccaagtcgctgctggcggcgcctccggtactctttgaaggcgctatccttgcgctttgtctactgctttccttactggcgcctgtccgggtcatgcgcctgccgttttcgcctccacgggctatttcgccgcccacattacgggtacatctacgattttgtgtcttccgtgaatga

SEQ ID NO: 371439 - DNA, 921 bp, Salmonella enterica
atggaacttaaggattattacgccattatgggcgtgaaaccgacggacgatctcaagacgattaagaccgcctatcgccgactggcccgcaagtaccatccagatgtcagcaaagaacccgatgccgaagcccgtttcaaagaggttgctgaagcatgggaagtgctgagtgatgagcaacggcgcgccgagtatgaccagttatggcaacaccgtaacgatccacaatttaatcgccagttccagcaacacgaaggccagccgtataacgctgaagattttgatgatattttctcgtctatttttggtcagcacggtcgccattcgcatcaccgccacgccgcacgcggtcatgatatcgaaattgaagtggcggtattcctggaagaaacgctggaagagcaccagcgtacgattagctattccgtccccgtttataacgcgttcggcctggtggagcgggaaattcccaagacattgaatgtgaaaatcccggctggcgtcagcaacgggcaacgaatcagactgaaaggccagggcacgccgggggaaaacggcggacctaatggcgatttatggctcgttatccatattgccccgcatccgctctttgatattgtcaatcaggatctggaagtcgtccttccgcttgccccatgggaggcggcgctcggcgctaaggtgtctgtgccaacgcttaaagagcgtattttgctgaccattccccccggtagccaggcaggtcagcggctgcgtatcaaaggaaaaggattagccagtaaaaagcacactggcgatctctatgccatcatcaaaatcgttatgccgccgaaacctgacgagaaaacagctgccctgtggcaacaactggcggacgcgcagtcgtcctttgacccacgccagcaatgggggaaagcataa

SEQ ID NO: 371440 - DNA, 306 bp, Salmonella enterica
atggctaacatcactgtcacctttaccatcaccgaattttgtttgcacaccggcgtgacggaagaggagctaaacgaaatcgtcggacttggcgtaattgagccttacgaagacgataacgccgactggcaattcgacgatcgcgcagcgagcgtggtacaacgcgcgctacgcttacgtgaggagctggcgctcgactggcctgggatcgcggtcgcgttaacgctgctggaagagaattcacggctgcgcgaagaaaaccggttactactgcaacgcctttctcgctttatctcgcatccctaa

SEQ ID NO: 371441 - DNA, 363 bp, Salmonella enterica
atggaatggaaggtcgttgatacagttataagtccctctaccggagtgtcgttctcatgcatacatagcctaaaaaatcttagattgaccttatggtatcaggcagatgtttacatgcctccaggtagcattatcatcccctttaataagggggtcttaataaacgataaactttatcccgttactgtttacaacgttaccaggtttaatcctgttctatggaaatcgcttaaagaaaatagccactgtcctggtaactgcaatcctaaaccagaagcctgcagttatcctttcgagtgtctggtatccgtttgtccatttggtttaaccagaaatattcaaatagataataagaaagtttag

SEQ ID NO: 371442 - DNA, 939 bp, Salmonella enterica
atgatgaaaaaaagcgtcgctatgctggcggtttgtatgctggcgcaaagccaccttgccattgctgccagtgctcctgcgcctcaagagatcaacattgttttactgggcaccaaaggcgggccttctttgctcaatacagccagactaccgcaagcgacagcgctcactatcggcgataaaatatggctgatagatgccggctacggcgccagtctgcaactggtgaaaaacggcattccactgcgcaacatcaatactattttgctcacccatctgcacagcgaccacatactggattatccttccttgctgatgaatgcctgggcaagtggcctgaaagaccataccatacaggtgtatggcccgccgggaacccaggcgatgacgaaggctagctggaaggtctttgacagggatatcacgctacgcatggaagaagaggggaaacccgatccgcgcaacctggttaaggcgaccgatattggtcagggcgtcatctataaagatgaactggttacaataagcgcgctgaaagtgcctcattcccctttcccggacggtgaagcgtttgcttaccgttttgatacccagggtaagcgaatcgtcttctctggcgatacgtcctggtttccgccgcttgcaacgtttgcccaaggggcggatatcctggtacatgaggcggtacatgtcccctcggtagcaaaactggctaatagtattggcaacggaaaaacgctggctgaagcgattgcgtcgcatcacaccacgattgaagatgtcggtaagattgctcgcgaggcccacgtgaaaaaactggtgttaagtcatctggtgcctgcgacggttgcggatgacgtctggcaacaggaagccatgaaaaattacccgggccctgtcattgtcggtcatgacaatatgacgataagcgtaccgtaa

SEQ ID NO: 371443 - DNA, 897 bp, Salmonella enterica
atgtgccaacgtgcgatcgccaatattgatatcagcaaagagtatgacgaaagcatgggcagtaacgatgtgcattatcagtcgtttgctcgtatggcggatttctttggtcgtgatatgcaggcgcatcgccacgaccagttttttcaaatgcactttcttgataccgggcagattgagctacagctcgacgatcatcgctattcggtgcaggcgccgctatttgtgctaacgccgccctcggtgccgcatgcttttattaccgaatcggatagcgatggtcatgttctgacggtacgcgaagagctggtttggccgctgctggaagtgctttatcccggcaccagagaggccttcggcctgccgggaatctgtctgtcgctggcggataaacccaacgagctggcggcgctcaaacattactggcagctaattgagcgggagtccacggaacaactggctggctgcgaacataccctggtgctactggcgcaggcggtatttaccttgctgttgcgtaatgcgaagctggacgatcacgccgcaaccgggatgcgcggtgaactgaaactttttcagcgctttaccctgttaattgacaaccacttccatcagcactggacggtgcccgattatgcctgtgagttgcatattaccgaatctcgtttgaccgatatttgccgccgttttgctaatcgcccgcctaaacgcctgatttttgatcggcaattacgcgaggcgaaacgactgctgcttttttccgacaatgctgtcaacgagatcgcctggcaattaggttttaaagatccggcttatttcgcccgtttctttaatcgccttgctggctgttctccttcgcagtttcgccaacgtgaagttccctcttttctcaactaa

SEQ ID NO: 371444 - DNA, 1377 bp, Salmonella enterica
atgagcgacacatcatctgcacttccggaaagccccgagtctgtccgttcgcacaacgcgctcagcacgggtcaacaaaccgtcataaataaactgttccgccgactgatcgtatttttattcgtgttgtttatcttctcgtttttagaccgtatcaacatcggttttgccgggttgacgatggggcaggatctggggttaagcgccaccatgtttggccttgccacgacgctgttttacgccacctacgtcattttcggcattcccagcaacgtgatgttgagcattgtcggcgcccgccgctggattgcgaccattatggtgctatggggcattgcatctaccgccacgatgttcgcggtgggaccgaaaagcctgtatgtgctgcgaatgctggtgggcattaccgaagcgggctttttgccaggaatactgctctatttaacctactggttcccggcatttttccgcgcccgcgccaacgcattatttatgattgccatgccggccactaccgcgttggggtcgattgtctccggctatattttatcgctggacggcatattcaatctgcatggatggcagtggttattcctgttggaaggatttccgtcagttttgttaggcattatggtctggttttacctggatgataccccggcaaaagccaaatggctgacggcagaggataaaaaatgtttgcaggagatgatggataatgaccgcctgacgctggttcagccggagggggccatcagccataacgccatgcagcagcgtagtctgtggcgcgaagtattcacgccaattgtactgatgtatacgttggcctatttttgccttaccaatacgcttagcgccattagtatctggacgccgcaaatcctgaaaagttttaatgaaggcagcagcaatatcaccatcggcctgctggcggcgatcccgcagatttgtactattctgggcatgatttactggagccgccattcggacaaacatcaggaacgtaaacatcacacggcgttgccgttcctgtttgccgccgcgggctggctgctggcgtcggcgaccgaccataacctgatccagctcctggggatcgtgatggcatccacgggttcctttagcgcgatggcgatcttctggaccacgccggatcagtcgatcagtttacgcgccagggcgataggcattgcggtcatcaatgccaccggcaatattggctccgcgctcagcccgtttatgattggctggctaaaagatatcaccggtagcttcaatagcggcctctggtttgtcgcttctctgttagtcgtcggcgccgccattatctggcttattcccatgaaagcatcgcgtccgcgcgccaccccttga

SEQ ID NO: 371445 - DNA, 792 bp, Salmonella enterica
atgaaaaatgctttcaaagacgcgttaaaagcggggcgcccgcaaatcggtttgtggctggggcttgccaacagttacagcgctgaactgttagcgggcgccggcttcgactggctactgatcgacggtgaacacgcgccaaacaacgtgcagacggtgttgacccagttgcaggcgattgcgccttatcccagccagccggtggtgcgtccgtcatggaacgatccggtacagattaagcaactgctcgacgtcggcgcgcaaacgctgctgataccgatggtgcagaatgccgatgaagcgcgaaacgccgtagcggctacgcgttatccgcctgccggtattcgcggcgtgggcagcgcgctggcgcgggcatcgcgctggaaccgcattccggactatctccaccaggccaacgacgccatgtgtgtactggtgcagattgaaacgcgtgaggcgatgagcaatctggcgtcaattctcgacgtggatggcattgacggcgtgtttattggtccggcggatctcagcgccgatatgggctttgccggcaatccgcagcacccggaagtgcaggcggcgattgagaacgccatcgtgcagatacgcgcggcggggaaagcgccggggattctgatggccaatgaagcactggcgaaacgttatctggaactgggggcgctatttgtcgccgtcggcgttgacaccacgctgctggcgcgcggagcggaggcgctggcggcgcgctttggcgcagaaaaaaaactgtccggtgcgtccggcgtctattaa

SEQ ID NO: 371446 - DNA, 804 bp, Salmonella enterica
atgctcgataaacagacccataccctgatcgcccagcgacttaatcaggctgaaaaacagcgtgaacaaattcgcgcagtgtcgctggattatcccaacatcactattgaagatgcctatgccgtacagcgtgaatgggtcaatatcaagatcgccgaagggcgcacgctcaaaggccacaaaatcggcctgacctcaaaagcgatgcaggccagctcgcaaatcagcgaaccggattacggcgcgctgcttgacgatatgttcttccatgacggcggcgatatccccaccgaccgttttatcgtcccgcgtattgaagtggagctggcgttcgtgctggcgaaaccgctgcgcggccctcactgcacgctgttcgacgtctacaacgccacggattatgtgattccggcgctggaactgattgacgcccgcagccacaacatcgacccggaaacccagcgcccgcgcaaagtgttcgacaccatttccgacaacgccgccaacgccggggtgatcctcggtggtcgccccatcaaaccagacgagctggatctgcgctggatctccgcgctgctctatcgcaacggcgtgatcgaagaaaccggcgtcgccgcaggcgtgctgaatcatccggccaacggcgtggcgtggctggcgaacaagcttgccccctacgatgtccagcttgaagccgggcagatcatcctcggcggctcgttcacccgcccggtgccggcgagcaagggcgacaccttccatgtcgattacggcaacatgggcgcgatcagttgccggtttgtgtaa

SEQ ID NO: 371447 - DNA, 381 bp, Salmonella enterica
atgccgcactttattgctgaatgtactgaaaatattcgcgagcaggctgatttacccggcctgttcagcaaggtaaacgaggcgctggccgccagcgggattttccccatcggcggtatccgcagtcgcgcccactggctggatacctggcagatggctgacggtaagcatgattatgcgtttgtgcatatgacgctgaaaatcggtaccgggcgcagcctggagagccgtcaggaagtcggcgaaatgctgtttgggctgattaaagcccacttcgccgacctgatggagaaccgctatctggcgctgtcgtttgagattgccgagctacatccgacgctcaattacaaacaaaacaacgtacacgcgttatttaaatag

SEQ ID NO: 371448 - DNA, 852 bp, Salmonella enterica
atgggcaagttagcgttagcagcaaaaattacccacgtgccgtcgatgtatctttctgaactgccgggaaaaaatcacggttgtcgtcaggcagccattgatgggcatattgaaattggcaagcgttgccgcgaaatgggcgttgacaccattatcgtattcgacacccactggctggtgaatagcgcttaccacattaattgtgccgaccatttccagggcgtctataccagcaacgaattgccacactttattcgcgacatgacctatgactatgacggcaatccggagctcggccacctgatcgccgacgaggcagtcaaactgggcgtgcgcgctaaagcgcataacatcccgagcctgaagctggagtatggcacgctggtaccgatgcgctacatgaacagcgacaagcacttcaaagtggtctccatctcggcgttctgcactgtgcatgattttgccgacagccgcagactgggcgaagccattctcaaggcgattgagaaatatgacggtaccgtagcggtattcgccagtggttctctgtcgcaccgttttattgacgaccaacgggcggaagaggggatgaacagctacacccgcgagttcgatcatcaaatggacgagcgtgtggtcaagctgtggcgcgaaggaaaattcaaggagttttgcaccatgttgccggagtacgccgactactgctacggcgaaggcaacatgcacgacacggtcatgctgctgggaatgctgggttgggacaaatacgacggcaaggtggagttcatcaccgacctgttcgccagctccggtaccggccaggtaaacgctgttttcccgctgcctgcgtaa

SEQ ID NO: 371449 - DNA, 1467 bp, Salmonella enterica
atgaagaaaataaatcattggattaacggcaaaaacgttgcaggtaatgactacttccagaccactaacccggcgaccggtgacgtgctggcggaagtagcctccggcggtgaagcagaagtgaaccaggctgtcgcggcggcaaaagaggcgttcccgaaatgggccaacctaccgatgaaagagcgcgcgcgcctgatgcgccgccttggcgacctgattgaccagaacgtaccggaaatcgcggcgatggaaaccgccgacaccggtctgcctattcaccagactaaaaacgtgctgatcccgcgcgcctcgcataacttcgaattcttcgccgaagtgtgccagcagatgaacggcaagacctatccggttgacgataaaatgctcaattatacgctggtgcagcccgtcggcgtctgcgcgctggtgtcgccgtggaacgtgccgtttatgaccgcgacctggaaagtcgcgccgtgcctggcgctgggcaacaccgcggtgctcaaaatgtccgagctgtcgccgttgactgccgacaggttgggcgagttggcgctggaggcaggaattccggcaggcgtgctgaacgtggtgcagggctacggcgcgacggcgggcgatgcgctggtacgccaccatgacgtgcgtgcggtgtcgtttaccggcggtaccgccaccggtcgcaatatcatgaaaaatgccggcctgaaaaaatactcgatggagctgggcggcaaatcgccggtgctgatttttgaagatgccgacattgagcgcgcgctggacgccgcgctgttcaccatcttctcgatcaacggcgaacgctgcaccgccgggtcgcgcatctttatccagcagagcatttaccctgagttcgtgaagcgctttgccgaacgcgcgaatcgcctgcgtgtcggcgatccgaccgacccgaacactcaggtcggcgcgctgattagccaacagcactgggaaaaagtctctggctatattcgcctcggcattgaagagggcgcaacgctgctggcgggcggtgcggaaaaacccactgacctgcctgcgcatctgaaaggcggtaacttcctgcgcccaaccgtgctggccgatgtcgacaaccgtatgcgcgtcgcgcaggaagagatctttgggcccgttgcctgtctgctgccattcaaagacgaagcggaagggttacgcctggcgaacgacgtcgaatacggtctggcctcttatatctggacccaggacgtgagcaaagtattgcgcctggcgcgtgggattgaagccggcatggtcttcgtcaacacccagaacgtccgcgacctgcgccagccgttcggcggcgtgaaagcctccggtaccgggcgcgaaggcggcgaatatagcttcgaagtgtttgcggaaatgaaaaacgtctgcatctcaatgggcgaccatcctatcccaaaatggggagtttga

SEQ ID NO: 371450 - DNA, 1290 bp, Salmonella enterica
atgaagggtactgttttcgccgttgcgttaaaccatcgcagtcagcttgatgcctggcaagaggctttctctcagcctccctataatgcgccgcctaaaaccgcagtgtggttcatcaaaccgcgtaatacggtgattcgtcacggcgaacccattccttatccgcagggagaaaaggtactgagcggcgcgacagtggcgctcattgtggggaaaaccgccagccggatacgccctgaagcggcggcggactatatcgccgggtatgcgctggctaacgaggtcagcctgccggaagagagcttttatcgcccggcgattaaagcgaaatgtcgcgatggcttttgcccgctgggtgaaatggcaccgctgagtgatgtggataacctcaccattatcacggaaatcaacggacgagaagcggaccactggaatactgccgatttacagcgtagcgccgcacaactacttagcgcgttaagtgagttcgctacgcttaaccctggcgatgcgatcttactcggtacgccgcagaatcgcgttgcgctgcgtcccggcgatcgggtgcgtattctggcgaaaggtttacccgcgctggaaaatccggttgtcgcagaagatgaattcgcccgccaccagacgtttacgtggccgctgtcagcgacgggtacgttatttgcgctggggttgaactacgccgatcacgccagcgagctggcatttacgccgccgaaagagccgctggtatttatcaaagcgccaaacacctttaccgaacatcaccaaacgtcggtgcgcccgaacaacgtcgaatatatgcactacgaagccgagttggtcgtggtgattggcaaaacggcgcgtaaggtgagcgaagccgaagccatggagtatgtggccggttacaccgtctgtaacgactacgcgatccgcgactatctggaaaactactaccgtccgaatctgcgggtaaaaagccgcgacggcctgacgccgataggcccgtggattgtggataaagaggcggtttctgatccgcacaacttgacgttacgcacctttgttaacggtgagctgcgccaggaagggacgaccgccgatctgatcttcagcatcccgttcctgatttcttatctgagcgaatttatgacgttgcaaccgggcgacatgattgccaccggtacgccgaaagggctttccgatgtggtgccgggggatgaagttgtcgtggaagtagaaggcgtgggccgcctggttaaccgaatcgtcagtgaggagagcgcaaaatga

SEQ ID NO: 371451 - DNA, 441 bp, Salmonella enterica
atgcatgattcattaaccatcgccttgcttcaggcgcgcgaagcggcaatgacctatttccgccccatcgttaaaagccacaatctgaccgaccagcaatggcgcattgtgcgaatcctggccgatagcccctctatggattttcacgagctggcctttcgtacctgcattttgcgtccaagtctgaccggaatattgacgcgcatggagcgagacggactggtgttgcgactcaagccggttaacgatcagcgtaagttatatgtcatgttgacggagcagggacaaacgttgtacgcccgtgcccgaagccaggtagaagaggcttatcgaaaaattgaggccgatttcacgcccgaaaaaacacagcaattgatgctgctgctggacgatcttattgccctgggacgccagcatcctgatagcgaagcggaagcatag

SEQ ID NO: 371452 - DNA, 1563 bp, Salmonella enterica
atgaaacctgaagattttcgtactgataacaagcgtccgttaacgggcgaagagtatttaaaaagcctgcaggacgggcgggaaatttatatttacggcgaacgcgttaaagatgttacgacacatccggcattccgcaatgccgcagcctctgtcgcacaactgtatgacgcattacataaaccgtcgatgcaagataccctatgctggaataccgataccggcagcggcggttatacgcataaatttttccgcgttgcgaaaagcgcagacgatctgcgccaacagcgtgatgctatcgccgagtggtcacgcctgagttacggctggatgggacgcacaccggattacaaagccgcctttggttgcgccctgggcgctaacccagccttctacggccagtttgagcagaacgcccgcaactggtacacccgtattcaggagaccggcctgtactttaaccatgcaatcgtcaacccgcccattgaccgccacaaacctgccgacgaagtgaaagacgtctatatcaagctggagaaagagacggacgccgggattattgtcagcggggcgaaagtcgtcgccactaactccgccctgactcactacaacatgattggtttcggctcagcccaggtgatgggcgaaaacccggatttcgctctgatgtttgtcgcgccaatggatgccgaaggcgtaaaacttatttcgcgcgcctcgtatgaaatggtcgcgggcgcgacgggctcgccgtttgattatccactctccagccgctttgatgaaaacgatgccattctggtgatggacaaggtgttgatcccgtgggaaaacgtgttgatttaccgtgatttcgatcgttgccgtcgctggacgatggaaggcggctttgcccgtatgtatccactgcaagcctgtgttcgtctggcggttaaacttgatttcattaccgcgctgctgaaaaaatcgctcgaatgtacgggtaccgtagagttccggggcgtgcaggccgatctcggagaagtcgtggcgtggcgcaatatgttctgggcattgagcgattctatgtgttctgaagcaaccccgtgggtaaacggcgcctggctaccggaccacgccgcgctgcaaacctatcgtgtcatggccccaatggcctacgcgaaaattaaaaatattattgaacgtaacgttaccagcggcctgatttacctgccttccagcgcccgcgatctgaataatccgcaaatcgaccagtacctggcgaaatacgtacgcggctctaacggaatggaccatgttgaacgtatcaaaattcttaaattgatgtgggatgccatcggcagcgagtttggcggtcgccatgagctgtacgagattaactactcgggcagccaggatgaaattcgtctgcagtgcctgcgtcaggcccagagctccggcaatatggataagatgatggcaatggttgatcgctgcctctccgaatacgatcagaatggctggacggtttcgcatttgcacaataacgacgacatcaatcaactggataagctgctgaaataa

SEQ ID NO: 371453 - DNA, 513 bp, Salmonella enterica
atgcaagtagatgaacaacgtctgcgttttcgcgatgcgatggcaagtctggcggcagcggtcaacatcgtaaccacggcgggtcacgccggacgctgcggtatcaccgcaacagcggtctgttccgtcaccgatacgccgccctccgtgatggtatgtattaatgccaatagcgccatgaaccccgtctttcagggcaacggcaagctgtgcattaatgtacttaaccatgagcaggagctgatggcgcgccactttgccggtatgacggggatggcgatggaagagcgttttcaccagccatgttggcaaaacgggccgctgggccagccggtacttaacggcgcgctggccggtcttgaaggcgagatcagcgaggtacaaaccattggcacgcatctggtgtatctggtggcgatcaaaaatattattcttagccaggatgggcatggcctgatttatttcaaacgccgttttcatccggtcagacttgagatggaagcgcctgtttaa

SEQ ID NO: 371454 - DNA, 411 bp, Salmonella enterica
atgaaacgacatatactggctaccgtgatagcatctcttgttgcagccccggcaatggcgctggccgctggcaacaatattctcagcgtacatattctcgatcagcaaacaggcaaaccggcgcccggcgtggaggtggtactggagcagaaaaaggataacggatggacgcaattaaacaccgggcataccgaccaggatggacgtattaaagcactgtggcccgaaaaagctgccgcgccgggggattatcgcgttatttttaaaaccggccagtattttgaaagtaaaaaactggatacgtttttcccggagattcccgtcgagtttcatatcagcaaaacgaatgagcactatcatgtgccgctgttattaagtcagtatggttattcaacctatcgcgggagctaa

SEQ ID NO: 371455 - DNA, 738 bp, Salmonella enterica
atgtcatcttgttggagatttacggattcgctaacaagcctatggcatactgcgttgatgaagattttattgattgaagataaccagaaaaccattgagtgggtacgtcagggactcacggaagcaggctatgtggttgattatgcctgtgatggacgagacggattacacctggcccttcaggaacattattcattgattattcttgatattatgctgccggggcttgatggatggcaggttttacgcgcgttacgcactgcgcatcagtcccctgttatttgcctgacggcgcgcgactcggttgaggatcgcgtcaaaggtcttgaggcgggcgctaatgattaccttgttaagcctttttccttcgccgaactgctggcccgggtgagagctcaactcagacagcatgtccctgtctttacccgactgacgatcaatggtctggacatggatgccacaaagcaatcggtgtcacgaaatggcaaaccgatttccctgacccgcaaagaattcctgctcctctggttactggcgtcccgggcaggagaaatcgtgccccgaaccgcgatcgccagcgaagtttggggaattaactttgatagtgaaaccaacaccgttgatgtcgcgattcgtcggctgcgcgccaaagtagacgatccatttgaaaagaagctcattatgaccgtccgggggatgggttatcgattacaggcggaaacgtcgcagaatggttaa

SEQ ID NO: 371456 - DNA, 1365 bp, Salmonella enterica
atggttaagttatcaatgacgctgcgcctgacaatttcttttatcgccatccttatcctcgcctgtaccggcattagctggacgctctataacgcgctgagcaaagaattaacgtatcgtgatgatatgacgctaataaatcgggcggcgcaaatgcagcaactgttactggatggcgccaggccggaaaatctgccgctctatttcaatcggatggtggatacgaagcaggatatcttattgatccattcagcaacaggccacaatgttgcgattaatcatagcggcatccccgaccaacgctttaacgagattccgctggctaaaaacatcacccgcgaaaccttatttcgccaggcggtacaaggcacggaacttaccgcggtacgagtaaacgccagaagcggcgatgacccgctgacccttactattgccaggctggcgacggaaaggcggcaaatgctgacgcaatatcgccgcaacagtttgctgatgagccttatcgcgatcctcgtctgttcggcgctcagtccattagtcatcagaaacgggctgcgggccattacgtcgctcagccgactcaccgcggcgacagatagcggcacacttcgccagccgttggcggaacaggcgttacccgttgagctcaggccgcttggacaagcgctaaataccatgcgccagaagctttccgacgattttgaacgcctgaaccaatttgccgacgatctggcgcatgagctgcgcacgccggttaatattttactggggaagaatcaggtgatgctgagtcaggaacgcagcgccgaagagtatcaacaagcccttgtcgataatattgaagagctggagggactgtcgcgactgacagaaaatattctctttctggcacgcgcggagcaccagaatatagcggtaaaaaaacagcctgtttcgctcaatgcgctggtcgaaaatatgctggattatcttagcccccttgccgaggagaagcgcatctgttttataaatcaatgtcagggaacggtatgggctgacgaaatattattacaaagagtgctctcaaacctgctgacgaatgccatccgttattctgatgaaaacgccgtgatacgtattgaaagcgcttatgatgataacgttgcagaaattcgggtcgctaatccgggcagccacccagccgatgcggataagcttttccggcgtttttggcgaggagataatgcccgccacactgccggtttcggcctggggttatcgttagttaacgcgattgctctattacacggtggttcggcatcttaccgctatgccgatgaacataatatcttttcggttcgtctgcccgatagcggtgatagctaa

SEQ ID NO: 371457 - DNA, 1563 bp, Salmonella enterica
atgccggcaaagaatattgctggctcgatcactttctcggtttccaatccagggtcaattcatcccataacgcgttattcagtgggaacctttatgaaaaagtatcttgcattcgccgttacgctgctgggtatgggtaaagtcatcgcctgtactacccttttggtaggcaatcaggcttcggctgacggctccttcattatcgcgcgcaacgaagatggctcggcaaataacgccaagcataaggttattcatcccgtcgcgtttcatcaacaaggcgagtataaagcacatcgcaacaattttagctggccgcttccggagacagcgatgcgctatacggcgattcatgactttgatactaacgataacgccatgggtgaagccggtttcaattcggcgggcgtcggaatgagcgcaacggaaaccatttataacggcagagcggcgctggctgccgatccttacgtgacaaaaacaggaatcacggaagacgccattgagtccgtgatcctgccagtggcgcaatcggcgcgtcagggcgccaaattactgggagacattattgaacaaaaaggcgctggcgaaggtttcggcgtcgcgtttattgatagcaaagagatatggtatctggagacgggaagcggtcatcaatggctggcagtacgacttccggcagatagctatttcgtttccgccaatcagggacgtttacgccattacgatccgaatgataacgcgaattatatggcgtcaccaacgttagtaagctttgcgaaaaagcagggattatatgatccggcccgcggcgaattcgactttcatcaagcctattcgcaggataacaaaaacgataccacctataattatccgcgcgtctggacgctacaacaccagtttaatccgcatctggatacggccgttagcgaaggggaaacatttcctgtttttttaacaccaataacaaaaattagcgtggcggcagtaaaaaacgcgttacgaaatcactatcagggaacgtcgcacgacccttatgccagtcataatccacaagaaccatggcgacccatatccgtttttcgtacccaggagtcgcatattttacaggtcagaccgaaattaccgcaggctatcggcaacgtagaatacatcgcctatggaatgccatctcttagcgtctatctcccctattatcaggggatgcgtcattatcaacccggagatgataaaggaaccgatcgggcgagcaacgactctacctactggacattccgcacgctgcaaacgctggttatgcaggactacaatgcgtttgcgccagatgtgcaacacgcctggaaaacatttgaacagcaaacagctaagcagcagtataagatggagcagagctatctgagattatatgcgtcgcatccgaaagaagcgcaacgcttactgcaaaattttgaagataaaacgatgcaaaatgcgcagacgctcgcccgtcgcctgaccaataatattattacgacaatgacttaccgtacagatatgaaatatcacttttcaagtacgcaaccataa

SEQ ID NO: 371458 - DNA, 1686 bp, Salmonella enterica
atgcaaatacagagcttctatcactcagcttcactaaaaacccaggaggcttttaaaagcctacaaaaaaccttatacaacggaatgcagattctctcaggccagggcaaagcgccggctaaagcgcccgacgctcgcccggaaattattgtcctgcgagaacctggcgcgacatgggggaattatctacagcatcagaagacgtctaaccactcgctgcataacctctataacttacagcgcgatcttcttaccgtcgcggcaaccgttctgggtaaacaagacccggttctaacgtcaatggcaaaccaaatggagttagccaaagttaaagcggaccggccagcaacaaaacaagaagaagccgcggcaaaagcattgaagaaaaatcttatcgaacttattgcagcacgcactcagcagcaggatggcttacctgcaaaagaagctcatcgctttgcggcagtagcgtttagagatgctcaggtcaagcagcttaataaccagccctggcaaaccataaaaaatacactcacgcataacgggcatcactataccaacacgcagctccctgcagcagagatgaaaatcggcgcaaaagatatctttcccagtgcttatgagggaaagggcgtatgcagttgggataccaagaatattcatcacgccaataatttgtggatgtccacggtgagtgtgcatgaggacggtaaagataaaacgcttttttgcgggatacgtcatggcgtgctttccccctatcatgaaaaagatccgcttctgcgtcacgtcggcgctgaaaacaaagccaaagaagtattaactgcggcactttttagtaaacctgagttgcttaacaaagccttagcgggcgaggcggtaagcctgaaactggtatccgtcgggttactcaccgcgtcgaatattttcggcaaagagggaacgatggtcgaggaccaaatgcgcgcatggcaatcgttgacccagccgggaaaaatgattcatttaaaaatccgcaataaagatggcgatctacagacggtaaaaataaaaccggacgtcgccgcatttaatgtgggtgttaatgagctggcgctcaagctcggctttggccttaaggcatcggatagctataatgccgaggcgctacatcagttattaggcaatgatttacgccctgaagccagaccaggtggctgggttggcgaatggctggcgcaatacccggataattatgaggtcgtcaatacattagcgcgccagattaaggatatatggaaaaataaccaacatcataaagatggcggcgaaccctataaactcgcacaacgccttgccatgttagcccatgaaattgacgcggtacccgcctggaattgtaaaagcggcaaagatcgtacaggaatgatggattcagaaatcaagcgagagcacatttctttacatcagacccatatgttaagtgcgcctggtagtcttccggatagcggtggacagaaaattttccaaaaagtattactgaatagcggtaacctggagattcagaaacaaaatacgggcggggcgggaaacaaagtaatgaaaaatttatcgccagaggtgctcaatctttcctatcaaaaacgagttggggatgaaaatatttggcagtcagtaaaaggcatttcttcattaatcacatcttga

SEQ ID NO: 371459 - DNA, 342 bp, Salmonella enterica
atggaaagtctattaaatcgtttatatgacgcgttaggcctggatgcgccagaagatgagccactgcttatcattgatgatgggatacaggtttattttaatgaatccgatcatacactggaaatgtgctgtccctttatgccattgcctgacgacatcctgactttgcagcattttttacgtctgaactacaccagcgccgtcactatcggcgctgacgcagacaatactgctttagtggcgctttatcgcttgccacaaaccagtaccgaagaagaggcgctcactggttttgaattattcatttcaaacgtgaagcaattgaaagagcattatgcataa

SEQ ID NO: 371460 - DNA, 876 bp, Salmonella enterica
atgccaataactaacgcgtccccagaaaatatattaagatatttgcatgcggccggtaccggtacgaaagaagcaatgaaaagtgcaacttcaccacgcggtatactggaatggtttgtcaatttttttacctgtggtggagtaagaagaagcaatgaaagatgctttcaggaggtaattggaaaactgaccacatcattattatatgtaaataaagatgctttcttcgatggtaataaaatatttctggaggatgtcaacgggtgtactatatgtctgtcatgtggagcagcatccgaaaatacggctcccatggtcattattgaagtgaacaaaaatggaaaaactgtaacggataaagttgatagtgagagattttggaatgtatgccgaatgttaaagctgatgagtaaacataatatacaacagcctgattcacttataaccgaggatggttttctgaacctgcgcggagtaaatctggctcataaagatttccagggggaagatttgtcagacatagatgcttctgatgcagatttccgtgaaacaactctatctaatgtaaatttagtcggtgcaaatttgtgttgtgcaaatctacacgctgtaaatctaatgggttcaaacatgactaaagcaaacctgactcacgcaaacctgacttgcgctaacatgtccggtgtaaacttaaccgctgcaattctattcggctcagacttaactgacaccaaactaaatggtgcgaaattagataagatagctctaactttagcgaaatcattaacaggagccgatctgacaggtagtcaacatacccctactccactcccggattacaatgatagaactcttttcccccatccgatattttag

SEQ ID NO: 371461 - DNA, 681 bp, Salmonella enterica
atgcttccggtcacctacagattaatacctcaaagcggagtatccacatatggattaaataccgcagatacacctgttttccccgatattcccgaacatgcaccaaacccctcacggctacgccttgctcatgacagccttgccataaacagtgaattccgtctggagccagagtgtgtggtggaataccttatctcaggcgcgggtggaatagaccctgatacagaaattgatgacgacacttatgacgaatgctacgatgaactatcctccgtacttcaaaatgcgtatacccaaagcgaaacattccgcagactgatgagttacgcatatgaaaaagaactacatgatgtggagcagcgctggctactgggggcaggcgaagcctttgaaactaccgtggctcaggaacacttcaaactttcagaaggcaggaaagttatttgtctcaatctggacgattctgatgattcatataccgaacattatgaaagtaacgaaggaagacaactttttgacacaaaacgttcatttattcatgaagttgtacatgcactgacccatcttcaggataaagaagaaaatcatccaagaggccctgttgtcgaatataccaacattattctgaaagagatggggcatccttcacctcccagaatggtctacatcttcaataaatag

SEQ ID NO: 371462 - DNA, 660 bp, Salmonella enterica
atggatcgtatcattacatcatcgcgtgatcgtagctcgctactgagtacgcacaaagtactgcgcaacacctattttctgttgagcctgacgctggctttctccgcaattaccgcgacagccagtacggtactgatgctgccctcccccggcctgattctgacgctggtcggtatgtatgggctgatgttcctgacctataaaaccgccaataagccggtcggtatcctgtctgcttttgcgtttaccggcttcctcgggtatatcctgggcccgattcttaacgcctatctgtcagcaggcatgggcgatgtcattggcctggcgctgggtggtaccgcgttagtatttttctgctgctccgcttacgttctgaccacccgtaaggatatgtctttcctgggcggtatgttaatggccgggatcgtcgtcgtgctgattggtatggtggcgaatattttcctgcaactgcctgcattgcacttggcgattagcgcggtgtttatcctgatttcctcgggcgctatcctgtatgaaaccagtaacatcattcacggcggtgaaaccaactatattcgtgcgaccgtcagtctgtacgtttcgctgtacaacatctttgtcagcctgctcagcattctgggcttcgccagccgcgactaa

SEQ ID NO: 371463 - DNA, 330 bp, Salmonella enterica
atgttgatctttgaaggtaaagaaatcagtactgatagcgaaggctatctgaaagagacgacgcagtggagtgaaacgctggcagtcgctatcgccgccaatgaaggcattgagctctctgcggaacactgggaagtcgtgcgcttcgtgcgcgaattttacctggagtttaatacctctcccgccatccgaatgctggtaaaagcgatggcgaataagttcggcgaagaaaaaggcaacagccgctatctgtatcgtctgttcccgaaaggcccggcaaagcaagcgaccaaaatcgccggtctgcccaagccggtaaaatgtatctaa

SEQ ID NO: 371464 - DNA, 282 bp, Salmonella enterica
atgtcgaacgtctgcattatcgcctgggtttatggtcgcgttcagggcgtcgggtttcgctataccacgcagcatgaggcgcagcggctggggttaaccggctatgcgaagaatatggatgacggaagcgtagaagtggtggcctgtggcgacgcggcgcaggtagaaaagctcatcaagtggctgaaagagggcgggccgcgctctgctcgtgtggacaaaatcctcactgaaccgcacagccctcgcgagacgttaacaggcttcagtattcggtattag

SEQ ID NO: 371465 - DNA, 789 bp, Salmonella enterica
gtgcaggagatgcatattcgacatcaggatcttacgacggcagaggtgcgttccagtcatctgcaccgtttgcatcgtgttacgcttttttccgccgctatctgccatattacgcagggcagtaaagtcatcattcaggatgatagccgccttgtcgccgggccgggcgagttgattattattccggcgaacacgccgctggagattattaatcagcctgcgcagaacggttttcgctccgacctgttgttactttcaccggagattattgctcgctttaaaacgatgtacgttcaggattatccaccggcaaacctgacatcgctgtgtaccccgatgagccgtagcctgacatttatgtgggagaacgtgttggatgctgtgcgccagggcttacctgtcgggctacaggaacatcaggcgatggggttactgttagcgcttttgcatgatggcgcggcgggaccgctgcttattgaacggcgttacaccctcacggagcaggtgcggcaactgattatgctctcacctgctaagctatggacagcccaggagatagcccgccgtcttgctatgggaacatcgacgctgcgtcggcgtttgcagcgcgaatcgcagagttatcggcaaattattgaagaggtacgcatgtcctgcgcgctttctcaactgcaatcgacgacgctgccgatcggcgaaatagcgctacggtgcggctacctgtcggggtcgcgatttacggccagattccgccaacattatgggtgtctgcctagtcaggtacgttaa

SEQ ID NO: 371466 - DNA, 549 bp, Salmonella enterica
atgaaaacagtcttctctttgaccgcagccgcaatgatggcattgagtggcggcgtatctgccgcgtcggcgtttagcctcagtagcgcggatattccggcggattttcgtttaacgcaacagcacgtctttaaaggatttggttgtagcggagaaaatatttcgccgcagctgagctggcgcaatccgcctgccggaaccaaaagctacgctattaccgtcttcgatcctgatgcgcccaccggaagcggctggtggcactggacgatggtgaatattcctgcgcagattcacgacctgccgacgggggctgataaaaaaacgttacccgctggagtggtgcagggacggaatgatttcggttatgctggttttggcggcgcctgtccgccgccgggcgataagcctcatcgctatcagtttactgtgtgggcgctgaatacggcaacactgccgctcgacagtgagtcgagtggcgcgttggtagggtttatgcttaacgcgcatgtgattgcgaaagcaaaattcacggccacatacggaagataa

SEQ ID NO: 371467 - DNA, 1212 bp, Salmonella enterica
atgactgaatctacatttccgcaatatccccgtttagtcctcagcaaagggcgagaaaaatctttactccgccgccacccatgggtcttttccggcgccgtatcccgtctggaaggcaaagccaacctcggtgaaactatcgatatcgtcgaccatcagggaaagtggttagcacgcggcgcctggtcaccagcctcccagatccgcgcgcgcgtctggacatttgataaagcagaatccattgatattgcgtttttcacccgccgcctgcgccaggcgcagcagtggcgcgactggctggcgaaaaaagacggcctggatagctatcgtctgatcgccggtgagtccgatggcctgcctggcgtcactatcgatcgttttggtcattttttggtgctgcaactgctcagcgccggggccgaatatcaacgcgccgcattaattagtgcgctgcaaacatgcgatccggattgcgctatttacgatcgcagcgacgtcgccgtgcggaaaaaagaagggatggcgctgacgcaaggtccggtcactggcgaactgccgcctgcgcttttgccaattgaagaacacggtatgaaattgctggtcgatatccagggcggccacaaaaccggttattatcttgatcagcgcgacagtcgtctggcgacgcgccgctacgtggaaaatcagcgggtactgaactgcttctcttataccggcggttttgccgtgtcggcgttaatgggcggttgtcgccaggttgtcagcgtggatacctcacaggatgcgctggatatcgccaggcaaaacgttgaactgaaccaactggacttgagcaaagccgaattcgtgcgcgacgacgtgtttaagttgctgcgcgcttaccgtgaacacggcgaaaaattcgacgtcatcatcatggacccgcccaaattcgttgaaaataaaagccagttaatgggcgcctgccggggctataaagacattaacatgttagcgattcaactgctcaatccgggcggcatactgctgacattctcttgctccggactgatgaccagcgatttatttcagaaaatcattgccgatgccgcaatagatgccggtcgtgatgtacaatttatagagcagttccgtcaggccgccgatcacccggtgatcgccacctacccggaagggctgtatctgaaagggtttgcctgtcgcgtcatgtaa

SEQ ID NO: 371468 - DNA, 318 bp, Salmonella enterica
atgatagccagcaaattcggtatcggccaacaggtccgccattccctgttaggttacctcggagtggtcgtcgatatcgacccggaatattcgcttgatgagccgtcgcctgatgaactggcggttaacgacgaacttcgcgccgctccgtggtaccacgtggtaatggaagatgatgatggtcagccagtgcatacttatctggccgaggcccagttgcgaagcgaaatgcgggacgagcatccagaacagccatcgatggatgaactggcgcgtaccattcgcaagcagcttcaggcgccgcgactacgtaactga

SEQ ID NO: 371469 - DNA, 414 bp, Salmonella enterica
atgaaagagaccgatattgctgatgttttgacgtccactcgcactatcgcgctggtaggtgcgagcgataaacccgatcgtccaagttatcgggtaatgaaatacctgcttgaacagggctaccatgtgattccggttgcgccaaaagtcgcgggtaagacattgctggggcaacaggggtatgacacgctggcggacattcccgaaaaagtcgatatggtggatgtttttcgcaactctgaagctgcatggggcgtcgcgcaggaagctatcgccatcggcgcaaaaacgctatggctacagcttggcgtgatcaacgaacaggcggcggtgctggcgcgggatgcaggcatgaccgtggtgatggatcgctgcccggcgattgagatccctcgcctggggctggcgaaataa

SEQ ID NO: 371470 - DNA, 663 bp, Salmonella enterica
atgaaaaccggcgcgctagccaccttccttgctctctgtttgccggtgactgtttttgccacaacgctccgtttgtctaatgaggttgatctgctggtgctggacggcaaaaaggtgtccagctctttattacgcggcgcagagagcattgaactggaaaacgggccgcatcaactcgttttccgggtggaaaaaaccatccgcctgcccggtaatgaagagcggctttatatttctccgccgctggtgataagtttcgatacccaactgataagtcaggtcaatttccagctcccgcggctggaaaacgagcgcgaagcctcgcattttaacgcggcgccgcgtctggcgcttttggacggcgacgccatgcccattccggtaaaactcgatattctggccattacttctacggctaaagtggtcgattatgaaatagagaccgagcgttataataaatcggcgaaacgcgcctcgcttcctcagttcgccacgatgatggcagacgacagcacattactttccgacgtctcagagcttgataccgtaccgccgcaatcacaaactctgacagaacagcggctgaaatattggttccgactggccgacccgcagacacgccatcattttctgcaatgggcggaaaaacagccgccctcttga

SEQ ID NO: 371471 - DNA, 459 bp, Salmonella enterica
atggaactgacgactcgcaccttgccgacgcgcaaacatatcgcgttggttgctcacgaccactgcaaacagatgttaatgaactgggtggaacgccatcagccgttgctggaaaaacacgttctttatgcaaccggcaccacggggaatctgatccagcgcgcaaccggtatggacgttaatgcgatgctgagcggcccgatgggcggcgaccagcaggttggcgcactcatttcagaagggaaaatcgacgtgttgattttcttctgggacccgcttaacgcggtaccgcacgaccccgatgtcaaagcgctactgcgtctggccaccgtatggaatatccctgtcgccactaacgtctcaacggcggactttatcatccagtccccgcattttaatgacgctgtagatattcttattccggattatgcgcgttatctggccgagcgcctgaaataa

SEQ ID NO: 371472 - DNA, 2055 bp, Salmonella enterica
atggaactgaaagcaacttctcttggaaaacgtctggcgcaacacccgtatgatcgtgccgagatcctcaacgctggggtgaaagtgtctggcgacaggcatgaatatcttattccattcaatcagttattggcgattcactgtaagcgtgggctggtatggggcgagctggagtttgtcctgccggaggataaagtcgtgcgtttgcacggtaccgagtggtcggaaacccagcaattccatcgctatctggacgcgcactggcgtcgctggagccaggagatgagtgatgtcgccgcgcaggcattacaggagcaatgggcgcgtattagtgagcgaacgggcggaaaccaatggcttacccgtgaacgcgttcgggggctggaacacgaaattcgccagacgtttgccgccttgccgctgccggtctcacgtctggaggagtttgctcactgtcgcgagatatggcgtaagtgtctggcatggttacaggatagcgagggaagtcggcagcagcataatcaggcgtatgctgatgccatgctggaagcgcatgccgacttttttacgcagatagaatcctctccgcttaatccttcccaggccagggcggtggttaacggcgaatcatcgttactggtactggcgggcgcgggaagcggtaagacctcggtgctggtggcgcgcgcgggttggctgttggcgcgcggacaagccgatgcggggcaaattcttttactggcgtttggtcgcaaggcggcagaagagatggatgagcgtatccgcgagcgcttacatacggaagagattactgcccgtacgttccattcgctggcgctgtatattattcagcaaggcagtaaaaaagcgccggttgtcagtaagctggaaagtgacgccaccgcgcggcatcagctatttctgcgcacctggcgtcagcagtgtagcgagaaaaaagcgcaggccaaaggctggcgtcagtggctggaagaggagatgcagtgggtagtgccggaaggtaatttctgggacgatgagacattgcagcggcgtctggcccctcgcctggatcgttgggtcagtttgatgcgtatgcacggcggcgcgcaggcagaaatgatcgctggcgcgccagaggagtgccgcgagctgtttggcaaacgcattaagctgatggcgccgctgctaaaggcctggaaaagcgcgttgaaagcggaaaatgccgttgatttctccgggctgatccatcaggcaatggtgatcctcgaaaaagggcgttttatcagcccgtggaagcatattctggtcgatgaatttcaggatatttccccgcaacgggcggcgctgttagaggcgctgcgcaagcagaatagccagactacgctgtttgccgttggcgatgactggcaggcgatttaccgttttagcggggcgcagctctccttaacgacggcgtttcatcagacgttcggcgagggcgagcattgccacctggacaccacgtaccgctttaacagtcggattggcgatattgccaatcgctttgtacagcagaatccgcaccagcttaaaaaaccgttaaatagtctgaccccaggcgataaaaaagcggtgacgttattggatgaaagccagttggacgcgttactggataaattatccggctatgcgaaggaagatgaacgtatcctggtgctggcgcgctatcaccatctgaaacccgcgagtctacaaaaagcggcgactcgctggccgaagttacagatagacttcatgactatccatgccagcaaaggccaacaggccgattacgtgattcttgtcggattgcaggagggtaacgacggtttccccgccccggcgcgagaatccattatggaaagtgcgcttcttcctcaggttgaggattttccggacgctgaagagcggcgtttgttatatgtggcgttgacgcgcgcgcgtgcgcgggtctggctgctttttaataaagataatccctcgcgctttgtggaggcgcttaaacagctggatgtgccggtggcgaggaagccctaa

SEQ ID NO: 371473 - DNA, 447 bp, Salmonella enterica
atgcgtaccgttctgaatattttaaactttgtactgggcggctttgccactacgctggcctggctgctggcgacgcttgtcagtattgtgcttatttttaccctgccgttgacccgctcctgctgggagataaccaaactgtccctgttcccttacggtaatgaagccattcacgttgacgaacttaatccggcggcgaaaagcgtattaatgaatactggcggtaccttgctgaatattttctggttactttttttcggctggtggctatgcctgatgcacattgcctccggtatcgctcagtgtgtcactatcatcgggatacctgtcggtattgcgaactttaaaattgccgcgattgcgctttggcctgtcggtcgccgcgtcgtctctgtagaaaccgctcgcgccgcgcgagaagctaacgcgcgccgccgttttgaatga

SEQ ID NO: 371474 - DNA, 2154 bp, Salmonella enterica
atgttaagtccgttgattcgccgttatacctggaacagtacctggctgtattacatccgcatttttatcgctctgtgcggcaccaccgccctgccctggtggctgggcgacgtcaaactgaccatcccgctcacgctcggtatggttgccgcggcgctaaccgatctcgacgatcgccttgccggacgcttgcgtaatttaatcattaccttaatttgcttttttatcgcgtcggcttctgtggagctgctctttccctggccgtggctatttgcgttgggcttaacgttatccaccagcgggtttattctgttgggaggactggggcaacgctatgccaccatcgcgttcggcgcgttactcattgccatctatacgatgctgggtacctctttatacgatcactggtatcagcaaccactgctcctgctggcaggcgcagtatggtataacctactgacgctaaccgggcatctgctatttccgatccgtccgttgcaggataatctggcacgcagttacgaacagttagcgcactatctggaactgaaatcacgtctgtttgatcctgatattgaagatgaaagccaggcgccgctctatgatttagcgttagcgaacgggcagttaatggcgacgctgaaccaaacgaaagtgtcgttattgagtcgcctgcgcggcgatcgcggtcaacgcggtacgcgccgcaccctccattactattttgtggcgcaggatattcatgaacgcgccagttcttcgcatattcaataccagacactgcgcgattattttcgccatagcgacgtcatgttccgctttcagcgtctgatgtcgatgcaggcgcaggcctgtacgcagctggcgcgctgtatcttactgcgtacgccgtaccagcatgatccgcgttttgaacgcgtctttacccacattgacgccgcgcttgaacgtatgcgcgccagcggcgcttctttagagctgctgaatacgcttggattcttattaaccaacctacgcgccattgatgcgcaactggcgacgatcgagtcggagcaggcccaggcaatgccgcgcaatgagtcagaaaaccagttggctgatgatagcctgcacgggtttagcgacatctggctgcgtctgagccgtaattttaccccggagtccgctctctttcgccatgcggtacgcatgtcgctggtattgtgcatcggttatgctctcatccaaattaccgggatgcgccacgggtactggatattgctcaccagcctgtttgtttgccagcctaactataacgcgacccgccatcgccttgcgctcaggattatcggcacgttggtaggcgttgctatcggcctgccgattttatggtttgttccttcgcttgaaggacagttagttctgctggtgattaccggcgtgcttttcttcgcattccgtaatgtgcagtatgcccatgcaacgatgttcatcaccctgctggtattactctgctttaacctcctgggcgaaggcttcgaggtagcgttaccgcgcgtcgtcgacacgttaattggctgcgctatcgcctgggctgcggtcagctttatttggccggactggcgctttcgcaaccttccccgggtactccagcgcgccaccgatgctaattgccgctaccttgatgcgatccttgagcaatatcaccagggacgggataaccgcctggcctatcgcattgccagacgcgacgcgcacaaccgcgatgcagaactggcatccgtggtttctaatatgtcgagcgaacccgacgtcacggctgaaacccgggaggcggcgttcaggctgctttgcctcaatcacacttttaccagctatatctccgccctcggcgcgcaccgcgaaaagctcagtaatccggacgtgttggggcttctggatgacgcggtctgctacgttgatgatgcgcttcatcatcaacctgaagacgaacagcgcgtacaccaggcgctggagggtttaaagcagcgagttcagtcactggaaacacgtccggacagcaaagaacctctggttgttcaacaaattggtttgctcattgccttactgcccgagattggacgcttgcaacggcaaatttcaccgccgacttctacattaattacccagccgtaa

SEQ ID NO: 371475 - DNA, 606 bp, Salmonella enterica
atgagagcactctcttatgacaggatctataaatcgcaagaatatttggcctctttggggacgatccagtatcgatctttattcggtagctatagtctgaccgtggaggataccgtctttgcgatggtggctaatggcgagctttatctccgcgcctgtgaagaaagcgtaccctactgtgtgaagcatccccccgcctggctcatgtttatgaaatgtggacgtcccgttatgctcaactattaccgggtggatgaaagcctgtggcgcgatcagcagcagctggtacgtttatcgaagtattctcttgacgcggcaatgaaggaaaaacacagccgtattttacagcacagactcaaagatcttcccaatatgaccttccatctggaaacattgctcaatgagtcagggataaaggacgaaaatatgttacgcatactgggcgcgaaaatgtgctggctaaggttgcgacaaagcaatcccttgctgacggtgaaagttttgtatgccctggaaggcgcaattgtcggcgtacatgaagcggcgctcccggcgagtcgtcgccaggagcttgccgactgggctcattcgcttacggctgggtaa

SEQ ID NO: 371476 - DNA, 510 bp, Salmonella enterica
atgtacacttcaggttatgcaaatcgttcttcgtcatttcctaccactacccacaacgctgcgcgcaccgctacggaaaatgccgcggcaggactggtcagtgaagttgtctaccacgaagaccagcccatgatggcgcaactcctgcttttgcctttactccgtcagttaggccaacaatcacgctggcagctctggctcacgccgcagcaaaagctcagccgtgaatgggtacagtcttcaggtttgccattaacgaaagtgatgcaaattagccagcttgcgcctcgtcatacgctggagtcgatgatccgcgctttgcgtacaggaaattacagcgtggtaattggttggatgactgaagaactgacagaagaagaacatgccagcctggttgaagcagcgaaggtaggtaatgcggtagggtttatcatgcgccctgtacgtgcgcacgctttatccaggagacagcattccgggctaaaaattcactctaatttgtatcattaa

SEQ ID NO: 371477 - DNA, 1053 bp, Salmonella enterica
atgaaaaagacagctatcgcgattgcagtggcactggctggtttcgctaccgtagcgcaggccgctccgaaagataacacctggtacgctggtgctaaactgggctggtctcagtaccatgacaccggcttcattcacaatgatggcccgactcatgaaaaccaactgggcgcaggtgcttttggtggttaccaggttaacccgtatgttggctttgaaatgggctacgactggttaggccgtatgccgtacaaaggcgacaacatcaatggcgcttataaagctcagggcgttcagttgaccgctaaactgggttatccaatcactgacgatctggacgtttatacccgtctgggtggtatggtatggcgtgcagacaccaagtctaacgtccctggcggcccgtctactaaagaccacgacaccggcgtttccccggtattcgcgggcggtatcgagtatgccatcacccctgaaatcgcaacccgtctggaataccagtggactaacaacatcggtgatgccaacaccatcggcacccgtccggacaacggcctgctgagcgtaggtgtttcctaccgtttcggccagcaagaagctgctccggtagtagctccggcaccggctccggctccggaagtacagaccaagcacttcactctgaagtctgacgtactgttcaacttcaacaaatctaccctgaagccggaaggccagcaggctctggatcagctgtacagccagctgagcaacctggatccgaaagacggttccgttgtcgttctgggcttcactgaccgtatcggttctgacgcttacaaccagggtctgtccgagaaacgtgctcagtctgttgttgattacctgatctccaaaggtattccgtctgacaaaatctccgcacgtggtatgggcgaatctaacccggttaccggcaacacctgtgacaacgtgaaacctcgcgctgccctgatcgattgcctggctccggatcgtcgcgtagagatcgaagttaaaggcgttaaagacgtggtaactcagccgcaggcttaa

SEQ ID NO: 371478 - DNA, 453 bp, Salmonella enterica
atgaaatatcaacaacttgaaaatcttgaaagcggttggaaatggaaatatctggtgaaaaagcaccgcgaaggggagttgatcacccgctacgtggaagccagtgctgcccaggaagccgtcaatttgttgttggccctcgaaaatgaaccggtgcgggtaaatgtctggatagacaggcatatgaatcctgccttgcttaatcggatgaaacaaaccattcgggcaagacgcaaacgacacttcaatgcggaacatcagcatacgcgcaaaaaatctatcgatttagagtttatggtctggcagcgtctggcgggccttgcgcagcgacgcggtaaaacattatccgaaacgatagtgcaactgatagaagacgcggagcataaagagaaatatgccacgcaaatgaccacgttaaagcaggatttacaggcgttattaggcaagaagtaa

SEQ ID NO: 371479 - DNA, 1761 bp, Salmonella enterica
ttgaccattacgaaacttgcatggcgtgatctggttccggatagcgaaagctatcaggagatatttgcacagccacacgcgactgacgaaaacgacaccttactcagtgatactcagccacgactgcaatttgcgcttgagcaacttatacagccgtgggcatcatcctcttttatgctgactaaagcgcctgaagagcaagagtatctcactttactttcagatgccgtccgcgctctgcaaaccgatgccggacaattaaccggcggacattatgacgtttccgggcatactgttcattaccgcgccgcgcagaatgcgcaagacaactttgccaccgtcacacaagtcgtcagcgcggactgggtcgaagccgaacagctctttggttgcctgcggcagtataacggcgacattatcctgcagccgggactggttcatcaggcgaacggcggcgtgctgattatttccttacgaacccttctggcgcagccgttactgtggatgcgtctgaaagccatcgttagccgcgagcgttttgactgggtggcctttgacgagtcgcgtccattaccggtctccgtgccatcaatgccgctcaaactgaaggtgattctggttggcgaacgtgaatcactggctgattttcaggagatggaaccggagctcgcggaacaggctatctacagtgaatttgaagacaatttacagatagcggacgcagaagctatgaccctgtggtgtcaatgggtgacgcgtatcgctttacgcgataatttgccccctccggcaccggacgcctggcccgtcctgatacgcgaggctgtgcgctataccggcgaacaggatacgctgcctctttgcccactgtggatagcccgccagtttaaggaggcgtcgcctttatgcgaaggcgatacctgcggcgcagaagcgctcagcctgatgcttgcccgacgcgaatggcgagaaggctttctggcggagcggatgcaggatgagattctgcaagagcagatcctgattgaaaccgaaggcgaacgcgttggacaaatcaatgcgctttccgtcattgagtttcccgggcatccgcgcgcctttggcgaaccgtcgcgaattagctgtgttgtgcatatcggcgatggcgaatttaacgatattgagcgcaaggccgaacttggcgggaatatccacgctaagggaatgatgattatgcaggccttcctgatgtcggagttgcagctggagcaacaaattcccttctctgcctcgttaacctttgagcagtcctacagcgaagtggatggcgatagcgcctcaatggcggaattatgtgcgctcatcagcgcgctggccaatgtgccggtgaatcaaaacattgcgattaccggctcggtcgatcagtttggtcgcgcgcaaccggtgggtgggctaaacgaaaaaattgaaggtttcttcgccatctgcgagcagcgggaattaaacggtaaacagggcgtgattatccctgcagccaatgtccgccatctcagtcttaaatctgaactgctgcaagcggttaaagaagagaagttcactatctgggcggtagacgacgtgaccgacgccttaccgctactgttaaatctggtgtgggatggcgaaggtcaaacgacgttgatgcagactatccaggagcgtatcgcgcaggcgacgcaacaggaaggccgtcatcgtttcccgtggccattacgttggctgaacgcttttattccgaactga

SEQ ID NO: 371480 - DNA, 519 bp, Salmonella enterica
atggtagataaacgcgaatcctatacaaaagaagaccttcttgcctctggtcgtggtgaactgtttggcgctaaagggccgcaactccctgcgccgaacatgctgatgatggaccgcgtcgttaagatgaccgaaacgggcggcaatttcgacaaaggctatgtcgaagccgagctggatatcaatccggatctatggttcttcggatgccactttatcggcgatccggtgatgcccggttgtctgggtctggatgctatgtggcaattggtgggattctacctgggctggctgggcggcgaaggcaaaggccgcgctctgggcgtgggcgaagtgaaatttaccggccaagttctgccgacagccaggaaagtcacctatcgtattcatttcaaacgtatcgtaaaccgtcgcctgatcatgggcctggcggacggtgaggttctggtggatggtcgtctgatctataccgcacacgatttgaaagtcggtttgttccaggatacttccgcgttctaa

SEQ ID NO: 371481 - DNA, 564 bp, Salmonella enterica
atgaaaaaatggctagtcgtgataatggcgttctggctggcgtcatgtagctccggcggagagaataaaagctattatcagctcccgatagcgcaaagcggtgtgcaaagcaccgcaagccagggcaaccgtctcttatgggtagagcaggtttccgtacctgactatctggcaggtaacggcgtggtgtatcaaaccagtgatgttcagtatgtgattgccaataacaatctgtgggccagcccgctggaccagcaattacgtaacacgctggtggcgaatcttagcgcccggcttcctggctgggtcgtcgcttcccagccgttgggaaccacccaggatacgttaaacgttaccgtaaccggattccatggacgctacgatggtaaggttatcgtcagcggggagtggttattaaaccacaatggacagctgattaagcggcctttccatatcgaagccagtcagcagaaagatggctatgatgagatggtcaaagtactggcaagcgcatggagtcaggaagcagccgctatcgcagatgagataaagcgccttccctga

SEQ ID NO: 371482 - DNA, 1641 bp, Salmonella enterica
atggaacctaaaaaaggggaagccaaagtacaaaaggtgaaaaattggtcgcctgtctggatattcccgattgttactgcgcttatcggagcctggattctgttttatcactacagccaccagggaccggaagttaccttaatcaccaccaatgcggaaggcattgaaggcggaaaaacgacgatcaaaagtcgcagcgtggatgttggcgtggttgaaagcgcgacgctgactgacgatctgacccacgtacaaatcaaagcgcggctccattccggtatggaaaagttgctgcataaagactcggtattttgggtggtaaaaccgcaggtggggcgtgaaggcatcagcgggcttgggacgctgctatcaggtgcgtatattgaactacaaccaggaagtaagggcagtcagccggaaagctatcagcttcttgactcaccgccgttggcgccgcccgatgccaaaggtattcgtgtgattctggacagcaaaaaggccggtcagctcagtcctggcgatcccgttctgttccggggctatcgggtagggtccgttgaaaccagctctttcgatccgcaaaaacggacaatgagttatcagttgttcattaaggcgccaaacgatcggttggtcaccagtaatgtccgattctggaaagatagcggtatcgctgtggatctgacatcggcgggaatgcgcgtggaaatgggatcgttgacgacgttgtttggcggcggcgtgagttttgatgtgccggaaggacttgagcaggggcaacccgtcgccgaaaaaacggcgtttaatctctacgacgatcaaaaaagtattcaggattcgctgtataccgatcatatcgattacctgatgttctttaaagattcggtgcgcggattacaacccggcgcgccgctggagttccgcggtattcgtctggggacggtaagcaaagtgcctttctttgcgtctaaaatgcgccaggtatttaacgacgattaccgtattcctgtgctggtgcgcattgaaccggagcgtctgaaagcgcaattgggagaaaatgcggatgttggcgcgcatttgacggaactgcttaagcgcggtttacgcgcttcgcttaaaaccggtaacctggtgaccggggcgctgtatgtcgatctggacttttatcctaaggagccgccgattaccgggctacgcgaatttgatggttatgaaattattcccaccgtcagcagcggcctggcgcaaattcaacagcgactggtggaaacgttggataagatcaacaacctgccgctgaatccgatgattgaacaagcgaccaatacgctgtctgaaagccagcgtactatgcgtcggctgcaaaccacgctggataatatgaacaagattacctccagtcagtcgatgcagcagcttccggcggatatgcaaacgacgttacgcgaacttaaccgcagtatgcagggcttccagcctggatcggcggcgtataacaaaatggtggcggatatgcagcgtctcgatcaggtgcttcgtgagttacaaccggtgttgaaaactctgaacgagaagagcaacgcgctggtatttgaagcgaaggataaaaaagatcctgagcctaagagggcgaaacaatga

SEQ ID NO: 371483 - DNA, 1254 bp, Salmonella enterica
atgtgtgaacatcaccatgctgcgaagcacatattgtgcccgcaatgtgacatgctggtggctttaccccgcctctcgcatgggcaaaaagcagcatgtccacgatgcggcgcaacgttaacgaccgagtgggacgcgccccggcagcgtcctaccgcctgtgcgttagcggcactatttatgttgctgctttctaacctttttcccttcgtgaatatgaatgtcgcgggcgtcaccagcgaagtcacgcttctggaaatccccggcgtcatgttttctgaagattacgccagcctcggcacgttctttttattatttgtccaactggtgccggcattttgcctggtgactattctattacttgtcaaccgcgccagtctgccgttgtcggtaaaaaaaacgctggcaaggatctttttcctcctcaaatcgtggggaatggcggaaatatttctcgccggggtgttggtcagttttgttaagctgatggcctacggcgatatcggcatcggcagcagctttattccctggtgcttattttgtctcgttcaactgcgggcgttccagtgtgtcgatcgccgctggttgtgggatgatatcgccccgcagcctgcactggcgcagccgttaacgccggggattaccggtatccggcagtctttgcgttcttgcgcctgctgtacggcgatcctgcctgcggagagtctcgtctgtccgcgttgccatacgaaaggctatgtccggcgtaaaaacagtttgcagtggacgctggcgttattatttacctcgatcatgctttatctgcccgccaatattttgccgattatgattaccgacttactgggctcgaaaatgccgtcgaccattctggctggcgtgattttgctgtggagcgaggggtcttatccggtggcggcggttatctttctcgccagtattatggtgccgacgctaaaaatgatcgccattgcctggctttgttgggatgcgaaaggccacggtaagcgcgacagtgaacggatgcattttatttatgaagtagtggagtttgtggggcgctggtcaatgattgatgtctttgtcattgccgtactctctgcgctggtgcgtatgggagggttaatgaatatttatcctgcgatgggtgcgttgatgtttgctttagtcgtcataatgacaatgttttctgcgatgacctttgatccgcgtctgtcgtgggatcgtgagtacgaaccaggccatgaggagtcctga

SEQ ID NO: 371484 - DNA, 1908 bp, Salmonella enterica
atgtcattaatcagtatgcatggcgcatggctgtcgttcagcgacgcgccgcttctcgataacgcagagttgcatatcgaagataacgaacgcgtctgtctggtggggcgtaacggcgccgggaaatccaccttgatgaagatcctcaaccgcgaacagggtctggacgatgggcgtattatttatgagcaggatctgatcgtcgcgcgtctgcaacaggacccgccccgtaatattgcgggcagcgtctatgactttgtcgccgaaggtatcgaagaacaagcggaatacctcaagcgctatcatgagatttcccgtctggtgatgaccgatcccagcgagaaaaacctcaatgaaatggcgcgcgtacaggaacagctcgatcatcataatctgtggcagctggaaaaccgtattaatgaagtgctggcgcagcttggactcgatcctaacgccgcgctgtcgtcgctctccggcggctggctgcgtaaagccgcgctgggtcgggcgctggtcagcaatccgcgcgtattgttactggatgaaccgactaaccatctggatatcgaaactatcgactggctggaagggtttctgaaaacctttaacggaacgattatttttatctctcacgatcgttcgtttattcgcaatatggcgacccgcattgtcgatctcgatcgtggcaaactggtcacctatccgggaaattacgatcaatacctgctggagaaagaagaagcgctgcgcgtagaagagttacaaaacgcggaatttgatcgcaaactggcgcaggaagaagtctggattcgccaggggatcaaggcgcgccgcacccgtaatgaagggcgcgtgcgggcgttaaaagcgatgcgtcgtgaacgcagcgagcgccgggaagtgatgggcacggcgaagatgcaggtcgaagaggcgacgcgctccggtaaaatcgtttttgagatggaaaacgtcgattaccaggtagaaggaaaacaactggtaaaagatttctccgctcaggtacagcgcggtgacaagattgcgttaattggcccgaacggctgcggtaaaaccacgctactgaaactgatgctgggacagcttcaggctgacagcgggcgcatccacgtaggaacgaagctggaagtcgcctacttcgatcagcatcgcgccgaactggacccggaaaaaaccgtgatggataacctggcggaaggcaagcaggaggtgatggtaaacggtaagccgcgccatgtactgggctatttgcaggacttcctgtttcaccccaaacgggcgatgacgcccgtccgcgcgctttccggcggcgaacgtaaccgtctgctgctggcgcgactgttcctcaagccgagcaatcttttaattctcgatgaaccaacgaacgatcttgacgtcgaaacgctggaactattagaagaattaattgatggctatcagggcacggtactactggtcagccacgatcggcaatttgtcgataataccgtgacggaatgctggattttcgagggcggcggcaaaatcggacgttatatcggcggctaccatgatgcgcgtgcgcagcaagagcagcatctggcgacgaaacagccgatggcgaaaaaaaatgaggaagttattgcccctaaagcagaaattgtaaaacgtggcagtagcaaactaagctataaactgcagcgcgagctggagcagttacccggtcagcttgaagacctggaagcgaagctggaagcgctacaggcgcaggttgcggatgcggccttttttagccaaccccatgagcaaacgcaaaaagttctggccgatttaagtcaggcggagcaagaacttgagcaagccttcgaacgttgggagtatcttgaaggcctgaaaaacggggcataa

SEQ ID NO: 371485 - DNA, 2109 bp, Salmonella enterica
atgaattctctgtttgccagtacggcccgcgggctggaagagctgttaaaaactgaactggaaaaactgggcgccgtagggtgtcaggttgttcagggtggggtccattttcagggcgacacgcggcttatttaccagagcctgatgtggagccgcctggcctcgcgtattatcctgccgatgggtgagtgcaaggtctacagcgatctcgatctttacctcggcgttcaggcgataaactggacagagatttttaatcctggcgcgacgtttgcggtgcatttcagcggcctgaacgacaccatccgtaatagtcagtatggcgcgatgaaagttaaagacgcgattgtcgatgcgtttacgcggaaaaatcttccgcgtccaaatgtggaccgcgaatcgccggacctccgtattaacgtctggctgaataaagaaactgccagcattgcgctggatctcagtggtgatggcctgcacctgcgcggttatcgcgatcgcaccgggctggcgccaattaaagagacgctggcggcagcgattgttatgcgttccggctggcaaccaggtacgccgctgctcgaccctatgtgtggttcggggacactgttgattgaggccgcgatgtgggcgaccgatcgcgcgccgggactgcaccgtggtcactggggatttagcggctgggcgcagcatgacgaaactatctggcaggaagtgaaagccgaagcgcagacccgggcgcgtaaggggctggcggagtattcctctcatttctacggttccgacagcgatgcgcgcgtcattgagcgggcgcgcagcaacgcccgtcgcgccggtatcggggagcttatcacctttgaagtgaaagatgtggcgcaactgagtaatccattgccgaaaggcccgtatggtacggtgatcagtaacccgccttacggcgaacgtctggacagcgaaccggcgctgattgcgttgcacagtctgctgggccgtaccatgaaaaatcagtttggcggctggaacctgtcgctgttcagcgcttcgcccgatctgctgggcagcctgcaattacgtgccgacaaacagtttaaagccaagaatggcccgctggactgcgtgcagaaaaactatcatattgcggaaaccacggcggacagtaaaccggcgacggtggcggaagattacgctaaccgcctgcgtaaaaatcttaaaaagctggagaaatgggcgcgccaggaagggattgaatgctatcgcttgtatgatgccgacctgccggaatataacgtggcggtagaccgttacggcgactgggcggtgattcaggaatatgcgccgccgaaaacggtggatgcgcaaaaagcgcggcagcgcctgttcgatattattgcggcaaccttgtcagtgctcggtattccgccgaataaactggtgttaaaaacccgtgaacggcaaaaaggaaaaaaccagtatcagaaaatgagcgagaagggcgagttccttgaagtcagcgaatataatgcgcgcttatgggtaaatctgacggattatctcgacaccggtctgttcctcgatcaccgtattgcccgcaggatgctgggagaaatgagcaaaggcaaagatttcctgaatctcttttcttataccggcagcgccagcgtacatgcgggtctgggcggcgcgcgcagcaccacaacggtggatatgtcccgcacctatctggagtgggccgaacgtaatttgcgtctgaacggactgagcggccgcgcgcatcgcctgattcaggccgactgcctgggctggctgcgcgaggcgaatgaacagttcgatttgatctttatcgatccgccgacgttctctaactcaaaacgtatggaagagtcgtttgatgttcagcgcgatcatgtcgcgttaatgaaagatttaaaacgtctgctgcgtaaaggcggcaccatcatgttctcaaataataagcgcggattccgtatggatctggaagggctggctgagctggggcttaccgcacaagaaattacgcaaaaaacgctttccccggattttgcccgtaaccgtcagatccataactgctggctgatccgcgccgcctga

SEQ ID NO: 371486 - DNA, 1110 bp, Salmonella enterica
gtggcgacgttatcacggctctttattcatccggtcaaatccatgcgcggcattggcctgactcatgcgctggcagatatcagcggcctggcttttgatcgcatcttcatggtgaccgagcctgacggcacatttattaccgcccgccagtttccacaaatggtacgttttaccccttctcccttacacgacggcctccatttgaccgcgccagacggcagtagcgcgctggttcgctttacggatttcaccccgcaggatgcgccgaccgaggtctggggaaaccattttaccgctcgcgtcgccccgacggcgattaatcaatggttgagcggctttttctcccgcgatgtccagttgcgctgggttgggccgcagttgacgcgccgggtcaaacgacataacgcggtgccgctgggatttgccgatggctacccgtatttattgaccaacgaagcctcgctgcgcgatctgcaacagcgttgtccggcaggcgtacaaatggaacaatttcgcccaaacttagtggtttccggcgtagcggcctgggaggaagatagctggaaagtgcttcgcattggcgatgtgatttttgacgtcgtgaagccctgtagccgctgtatttttacaaccgtcagccctgaaaaggggcaaaaacatccttccggagaaccgctggcgacactgcaagcttttcgtaccgcccaggacaatggcgatgtggatttcggtcagaatctgattgcccgcaatagcggcgtcgttcgcgtcggcgatgaagtggagattctggcgacagctccggcaaaagcttatggcgccacaacggtcgacgacagcgttacgccagataaacacccggacgcgagtgtaaccatcgactggcaggggcaaaccttctgcgggaataatcaacaggtactactggaacagttggagaatcaggggattcgtattccgtattcttgccgggctggtatctgtggttgctgccggatacgtttgctggaaggcgaagtaagtccgctgaaaaaatcggctatgggtgacgatggtacgattctgagctgtagctgcgtgcctaagaccgcgttacgactggagaattaa

SEQ ID NO: 371487 - DNA, 543 bp, Salmonella enterica
atgcgaattaaacctgacgataactggcgctggtattatgatgaagagcacgatcgtatgatgctcgatctcgccaatggtatactttttcgctcgcgcttctctcgtaaaatgcttacgccggacgcgttttgcccgaccggtttttgtgtggatgatgccgcgctctatttttcctttgaagaaaaatgccgggatttcgaattaaccaaagagcaacgcgcggagctggtgttgaatgcgctggtggcgattcgctatctcaaaccgcagatgccaaaaagctggcattttgtagcgcatggcgaaatgtggaccccaggaacgggcgatgccgcaagcgtctggttaagcgatacggcggaacaggttaatttgctggtcgttgagccgggagaaaatgccgcgttgtgtctgctggcccagccgggcgtggtgatagcaggccgaaccatgcagcttggcgatgcgattaaaattatgaacgacaggctgaaaccgcaggttcactgtcacagtttcagccttgaacaagcggtttaa

SEQ ID NO: 371488 - DNA, 1011 bp, Salmonella enterica
atgtactatcccttcgttcgtaaagcccttttccagctcgatccagagcgcgctcatgaatttacatttcaacaattacgccgcattacaggtacgccgctggaagcgctggtgcgccagaaagtaccgacaaagccggttacctgcatgggacttacctttaaaaatccactggggctggctgccggtctggataaagacggggagtgcatcgacgcgttaggcgcgatggggtttggctccctggaaatcggcaccgtgacgccgcgcccacagccgggtaacgataagccgcgtctttttcgtctggtggatgctgaaggtctgatcaatcggatgggctttaataatctgggcgtcgataacctggtcgagaatgttaaaaaagcccattttgatggtattctgggaattaacatcggtaaaaataaagatacgcctgtcgaaaatggcaaagatgactacctgatttgtatggaaaaagtctatgcttatgcgggttatatcgccattaatatttcttcgccgaatacgccagggctacgtacgctccagtatggcgatgcgctggacgatctgttaactgccattaaaaataagcaaaacgatcttcaggcgatccaccataaatatgtgccggtggcagtaaagatcgcgccggatctttgtgaagaagaattgatccaggttgccgatagcctgcttcgtcataatattgatggggtgattgcgacaaataccaccctcgatcgttctctggtacaaggaatgaaaaattgccagcaaacggggggattaagtggccggccattacaattaaaaagcacagaaattattcgccgtttatcccaggagttaaagggacaattgcctattatcggcgtcggcggcattgactcagttatcgccgcgcgcgagaagatagcggcaggagctacgctggtacaaatttattccggctttatttttaaaggcccgccattgattaaagaaatcgtaacgcacatctaa

SEQ ID NO: 371489 - DNA, 2613 bp, Salmonella enterica
atgacacaacagccacaagccaaataccgccatgactatcgcgcgccggattaccagattactgatattgacttgacctttgacctcgatgccgaaaaaaccgtggtcaccgcaataagccaggctgttcgtcatagcgcgcctgatgcgcctcttcgccttgatggggaagatttaacgctggtatctatccacgtcaacgatgcgccgtggacagcatataaggaagaagagggcgcgcttatcatcagcgacctgccagagcgttttacgttacgcattgtcaacgagataagtccggcggcgaatacggcgctggaaggattgtaccagtccggcgatgcgctctgtacccagtgtgaagcggagggcttccgccatattacctggtatcttgaccgcccggacgtactggcgcgatttaccaccaaaattattgccgataaaagcaaatatccgttcctgctctccaatggcaaccgtgttgcacagggcgagctggagaatggccgtcactgggttcagtggcaagatccgttcccgaaaccgtgttatctgtttgcgctggtggccggtgattttgacgtgctgcgcgatacctttaccacccgctccgggcgtgacgtcgcattagaactgtacgttgaccgtggcaatctggatcgcgcgccgtgggcaatgacctcgctgaaaaattccatgaaatgggatgaagcgcgttttgggctcgaatatgacctcgacatctatatgattgtcgcggtggatttctttaatatgggcgcgatggagaataaaggtctcaatatctttaactccaaatacgtgctggcgcgaaccgataccgcgacggataaagattatctcgatattgagcgcgtgataggccatgagtatttccacaactggaccggcaaccgcgtcacctgccgcgactggttccagttgagccttaaagaggggctaaccgtgttccgcgatcaggagtttagctctgatttggggtcacgcgcggtgaaccgcatcagtaacgtgcgtaccatgcgcggtttacaattcgcggaagacgccagcccgatggcgcatcctatccgcccggataaagtaatcgaaatgaataacttctacaccctcaccgtttatgaaaagggcgcggaagtcattcgcatgatccacacgttgctgggtgaggaaaatttccagaaggggatgcagctttattttgagcgccatgacggcagcgccgcgacgtgtgatgacttcgtacaggcgatggaagatgcttctaatgtcgatttgtcccatttccgccgctggtacagtcagtccggcacgccgattgtaacggtaaaagatgattataatccggaaaccgagcagtacacgttgaccatcagccagcgcactccggcgacggcggatcaggcggagaagcagccgctgcatattccattcgccatcgaactgtacgataacgaaggcaacgtcattccgttgcaaaaaggcggtcacccggtcaacgccgtgctgaacgtcacgcaggcggagcagacatttaccttcgataatgtttacttccagcctgttccggccttgctgtgcgagttttcagcgccggtgaaactggaatataaatggagcgatcagcagttgacgttcctgatgcgccatgcgcgcaatgatttctcccgttgggatgcggcgcaaagcctgctggccacatacattaaactgaatgtggcgcgtcatcagcaggggcaaccgctatcgcttccggtgcatgtcgctgatgcgttccgtgcagtactgttggatgagaaaatcgatccggcgttggccgcagaaattttaacgctgccttcggccaatgaaattgcggagctgtttgaggtcattgacccgatcgccattgcgcaagttcgtgaagcgctaacgcgtacgctggcggcagaactggcggatgagttcctggctatctataacgccaatcatctggatgagtatcgtgttgatcacggcgatatcggtaagcgcacgctgcgcaatgcttgcctgcgcttcctggcgttcggcgagacggagctggctaatacgctggtcagcaaacagtatcgcgacgccaataatatgaccgatgcgctggcggccctgtctgctgcggtggcggcgcagttgccgtgccgcgatacgctgatgcaggagtatgacgataagtggcatcaggacggcctggtgatggataaatggtttatcctgcaatccacaagcccggcggaaaatgtactggaaaccgtacgcggcctgctcaaacaccgttctttcagtatgagcaacccgaaccgcgtccgttcattaattggcgcgtttgctggcagcaacccggcggcgttccatgcgcaagacggtagcggataccagttcctggtcgagatgctgaccgatctgaatagccgtaacccgcaggtagcatctcgcctcattgaaccgctgattcgtctgaaacgttacgatgaaaagcgtcaggagaaaatgcgtgcggcgctggagcagttaaaaggactggagaatctttccggcgatctgtacgagaagataactaaagcgttagcctga

SEQ ID NO: 371490 - DNA, 255 bp, Salmonella enterica
ttgacagacaaaaccgccaaagcaaaaatactgtatatacaaacagttattagcgaaacacgtatgttcgtagaactggtttatgacaagcgtaatgttgaaggactcgaaggggccagcgagatcattctggccgaactgacgaagcaggtgcaccagattttccctgatgccgaagtgagggtgaagccgatgcaggcaaactgcttgaatagtgataccaacaaaagcgatcgcgaaaatttgaacagatag

SEQ ID NO: 371491 - DNA, 687 bp, Salmonella enterica
atgttaagacacattcaaaatagtttaggcagcgtttacagaagtaatacagcaactcctcagggtcagattattcaccatcgtaactttcaaagccagtttgataccacaggcaacaccctctacaataattgctgggtttgctcattaaatgttatcaaatccagagatggcaataattatagtgcattagaggacatcacttctgataatcaagcgtttaataatatattagagggtattgatataatagaatgtgagaatttattaaaagaaatgaatgtgcaaaaaatacctgaatcctctctttttacaaacattaaagaagctttacaggcagaagttttcaatagtactgtagaagatgactttgagagttttatttcttacgaattacaaaaccatggaccactgatgttgatcaggccttcacttggctcggaatgtctacatgcagagtgcattgtaggctatgatagtgaagtgaaaaaagtattaatttatgattcaatgaatacctcacctgaatggcaatcaaatattgatgtctatgacaagcttaccttagcattcaatgataaatataaaaatgaagattgcagtatttgtggtctttactatgacggtgtttatgagccaaaacctttacactcctcctcctggaaagactggtgtaccattttatga

SEQ ID NO: 371492 - DNA, 249 bp, Salmonella enterica
atggggggtcgggggtcggaggttcaaatcctctcgtgccgaccaaaattccccttaaaaaccagcctgtcagggctgttttttttatggctcaatttcctacggggaagctatggggtgaaactggggaataaagccgtcgagattcgacgcaatttgcgattgattcatcagtttgctcactgctcagtttcggaattcatcaatacacaaattttcatttcgaattactgtataaattccctgtaa

SEQ ID NO: 371493 - DNA, 633 bp, Salmonella enterica
atggaagacgaaagtaatccgtggcctagttttgttgatacattctctacggtattgtgtatttttatatttcttatgttggtgtttgcacttaataatatgattattatgtatgacaactcaattaaagtttataaagcaaatatagagaataagactaaatctactgctcaaaatagcggagccaatgacaattcaaatgataatgaaatagttaataaagaagtgaatactcaagatgtgtcggacggaatgactacaatgtcaggtaaggaggttggagtatacgatatcgccgatggtcagaaaattgatataacatctacaaaaaatgagcttgttattacgtatcatggcaggctgagaagcttttctgaagaggatactcataaaatagaggcttggttagaagacaaaatcaatagtaatttattgatagaaatggttattcctcaggcagacatctctttctctgactctttacgactgggatatgaacggggaattattttaatgaaagagattaagaagatatatcctgatgtagttattgacatgagtgttaactccgcagcatcaagtacaacgagtaaagctattatcacgactattaataaaaaggtgtcagagtga

SEQ ID NO: 371494 - DNA, 531 bp, Salmonella enterica
atggccagcagaggcgtaaacaaggtgattctcgttggtaatctgggccaggacccggaagtacgctatatgccgagtggcggcgctgtcgccaacttaacgctggctacttctgaatcctggcgcgataagcagaccggcgaaatgaaagagcagactgaatggcaccgggtggtgatgttcggcaaactggcggaagtggccggcgaatatctgcgtaaaggttctcaggtgtatatcgaaggtcaattgcgtacccgcaagtggaccgatcagagtggccaggaacgctatacgactgaaattaacgttccgcagatcggcggcgtgatgcagatgctgggtggtcgccagggcggcggcgcgccggcaggcggtcagcagcaggggggttggggtcagccacaacaacctcagcagccgcagggcggcaaccagttcagcggcggcgcgcagtcgcgtccacagcaatccgcgccagcgccgtctaacgaaccgccaatggattttgacgacgacattccgttctga

SEQ ID NO: 371495 - DNA, 2826 bp, Salmonella enterica
atggataagatcgaagttcggggcgcccgcacccataatctcaaaaatattaacctcgtcatcccccgcgacaaactgattgtcgtgaccgggctttcgggttcaggcaaatcctcactggctttcgacactctgtatgccgaagggcagcgtcgttacgttgaatcgctctccgcttacgcgcggcagtttttgtcgctcatggaaaaaccggatgtcgaccatattgaggggctatcgcccgcgatctcaattgaacagaaatcgacatcgcacaacccgcgctctacggtgggtactattaccgagatccacgactacctgcgcctgctgtttgcccgcgtgggcgagccgcgttgtccggatcatgacgtgccgctggcggcgcaaaccgttagccagatggtcgataacgtgctgtcacagccggaaggcaaacgtctgatgctgctcgcgccgattattaaagagcgtaaaggcgaacacaccaaaacgctggaaaatctggcaagccagggttacattcgcgcccgtattgacggcgaagtctgcgatctctccgatccgccgaagctggagctacaaaagaaacataccattgaggtggtgatcgatcgcttcaaagttcgcaacgatctttcccaacgcctggcggagtcgttcgaaacggcgctggaattatccggcggcacggcggttgttgccgatatggacgatgagaaagcggaggagcttctgttctccgccaattttgcctgtccgatttgcggctacagtatgcgcgaactggaaccgcgtctgttctcgttcaacaacccggcaggcgcctgcccgacctgtgacgggctcggcgttcagcaatatttcgatccggaccgcgtgatccagaatcccgacctgtcgctggcaggcggcgcgattcgtggttgggatcgtcgcaatttttattactttcaaatgctcaagtcgctggcggaacactataagttcgacgtggatgcgccgtgggcaagcctcagcgccaacgtacataaagtcgtgctgtacggttccggcaaagagaacattgaatttaaatatatgaacgatcgcggcgatacttccgtgcgccgccatccgttcgaaggcgtgctgcataatatggagcgccgttataaagagacggaatccagcgcggtgcgcgaagagctggcgaagttcatcagtaatcgcccctgcgccagctgtgaaggaacgcgactgaatcgcgaagcgcgccatgtatttgtggaaaatacgccgctgcctgctatttccgatatgagcattggccatgcgatggattttttcactaatctcaagctttccgggcaacgagcgaaaatcgccgaaaaagtgctaaaagagatcggcgatcgcctcaagtttctggtgaacgtcggcctgaactatctcacgctctcccgctcggcagagacgctttccggcggcgaagcccagcgtattcgtctggcgagccagataggcgccgggttagtcggcgtgatgtatgtgctggatgagccgtccatcggtctgcaccagcgcgataacgaacggctgctgggtacgctgattcatctgcgcaatcttggcaataccgtgattgtggtggaacatgatgaagacgccattcgcgccgccgaccatgtgatcgatattggccccggcgcgggcgttcacggcggcgaggtggtggcggaaggcccgctggaagccattatggcggtaccggaatcgctgaccggccagtacatgagcggtaaacgcaaaattgaagtgccgaaacaacgcgtgccggcaaatccagaaaaagtgctcaaactcaccggcgcgcgcggcaacaacctgaaagatgtgacccttacgctaccggtagggctgtttacctgtatcaccggcgtctcgggttccggtaaatcgacgctgattaacgacacgctgttccccatcgcccagcgtcagttaaacggggcgactatcgccgaaccggcgccgtatcgggatattcaggggctggaacatttcgataaagtgatcgatatcgaccagagcccaatcgggcgcaccccgcgttccaacccggcgacctatacgggcgtctttaccccggttcgcgagctttttgctggcgtgccggagtctcgctcgcgcggctacacgccagggcgattcagcttcaacgtgcgcggcggtcgctgcgaagcgtgccagggcgatggcgtcattaaagtcgaaatgcactttctgccggatatttacgtgccgtgcgaccagtgcaaaggcaagcgctataaccgggaaacgctggagattaagtacaaaggcaagaccatccacgaagtgctggatatgaccattgaagaagcgcgtgagttctttgatgcggttccggcgctggcgcgtaagctgcagacgctgatggacgtggggctgacctatatccgtcttggtcagtcggcgacgacgctttccggcggcgaggcccagcgcgtgaagctggcgcgcgaactgtcgaagcgcggcaccgggcagacgctgtatattctcgacgagccgaccaccggcctgcactttgccgatattcagcagttgcttgacgttctgcatcagttgcgcgatcagggcaacaccatcgtggtgatcgaacacaacctggacgtcattaaaacggcggactggattgtcgacctcggcccggaaggcggcagcggcggcggcgaaattctcgtctccggtacgccggaaaccgtggcggagtgcgaggcgtcgcataccgcccgcttccttaaacctatgctcaaataa

SEQ ID NO: 371496 - DNA, 444 bp, Salmonella enterica
atgaagttgccctacgcaatcacactactgctgtgcctgtttttagccgcctgtacgctgcctgaccgctttagcgccgtggcttttcaacaactgacgctattacaaacgcgctcaacccgcttcctgcaggacgcggcgcgaataccgtggcaaaaagagacactgctcaaggatgaccgcgatatccgccagacattttttcaggctgagcgggtcgcccgtcaaggtggggataaacaccgactcgataatctggcgctgctgaaaaatcactatttgcgtctttatgcgcgggttatgcaacgtaagcaaccacttactcacatccaggcagagagataccaacagcaaaataatcaggtctggaaattagctatacagggtgagtgtctgcattggggcgcccactgcactcaaggagatgaaaatggcgtctattaa

SEQ ID NO: 371497 - DNA, 339 bp, Salmonella enterica
atggcgtctattaacgaaatacattacctgatgaccaccgcccgggccgaacaccctgtagcgtcctcggcgattgccgagtttatccagacgtataagcaggcaagagaagacagcgacgacgctatccgcgagtccgccgcgtttatcgcccgcgcgcttcaggaacatgctcgcggctggctggacgacgacgatatgattattctgctggaaggacagcgggacctcgccaggctacgcgccaataatgcgcaaatcgccctcggcagccgtatccggtctacggtcatccgcctcattgatatcgccctggcgttgttggtcggcgcgctataa

SEQ ID NO: 371498 - DNA, 357 bp, Salmonella enterica
atgaccatttcggaattactgcaatactgcatggcaaaacctggcgcagagcagagcgtccacagcgactggaaagcgacgcaaattaaagtggaagatgtacttttcgcgatggtaaaagaagttgaaggacgcccggcagcctctctcaaaaccagcccggaactggcagagttgttacgtcagcagcacagcgatgtacgaccgagtcggcaccttaataaagcgcactggagcacggtctatctggacggctcgctgccggattcacaactctattatctggtcgatgcctcttatcaacaggcggtaaatgcgctgtcggaagataaacgcaagcagttgccgcagtcctga

SEQ ID NO: 371499 - DNA, 417 bp, Salmonella enterica
atgtggtatcagcgcaccattacactgagcgagaagccgcgcgggtttcatctgataacagatgaaattatcgataaattgtctggcttaccgcctgtcgaaacgggtttgctgcatctgttgttgctacatacctcggcctcgctgacgctaaacgaaaactgcgatcccaccgtgcgcgctgatatggagcgccatttcctgaaaaccgttcccgataatgcggcgtatgaacatgactacgaaggcgcggatgacatgccttcgcatattaagtcgtcagtattgggcgtctcgttgctgctgcctgtacgccaggggcgtttacagttaggaacatggcaaggtatctggttgggagagcaccgtattcacggcggtccacgtaaaatcatcgcgacactacaaggggaatga

SEQ ID NO: 371500 - DNA, 714 bp, Salmonella enterica
atgaaaaaaataaccctggcgctgagtgccgtctgtttgttgtttacgctaaaccattccgcgaatgcgttagtatcttccccttcgacactcaatccgggcactaatgttgcaaaactcgcggaacaagcgcctgtccattgggtctctgtcgcccagattgaaaacagcctcaccggacgcccgccgatggcggtcggctttgatattgacgacaccgtgttattttccagccccggattctggcgcggaaagaaaacctattccccggacagcgacgattatctgaaaaatccggccttttgggaaaaaatgaacaacggctgggatgagttcagtattccaaaagaagtggcccgacagctcattgatatgcatgttcgccgtggcgacagtatttactttgtcactggtcgtagtcagacgaaaacggaaaccgtgtcgaaaacgctggcggataacttccatattccggcggcgaatatgaatccggtgattttcgccggcgataaaccggaacaaaatacgaaagtacagtggctgcaggagaagaacatgcgtatcttctacggcgattcggataacgatattaccgcggctcgtgattgtggtatccgcggtattcgcatcctgcgcgcggctaactccacctacaaaccgctgccgcaggcaggagcgtttggcgaggaagtcattgtcaactcggagtactaa

SEQ ID NO: 371501 - DNA, 1194 bp, Salmonella enterica
gtgtttcaaaaagttgacgcctatgccggcgatccgattctttcactgatggagcgttttaaagacgactcccgtcacgacaaagtaaatctgagcattggcctgtattacaacgaagacgggattatcccacagctcaaaacggtggccgaagccgaagcccggcttaacgcgcagccgcatggcgcttcgctgtacctgccgatggaaggactcaatacttatcgccatactatcgcgcctttgctctttggcgccgatcacccggttcttcagcaacagcgcgtggccactatccagacattaggcggctccggcgcgctgaaagtaggcgcggatttcctgaagcgttatttccccgacgcaggcgtatgggtgagcgaccccacctgggaaaaccatattgcgatatttgccggggcaggattcgaagtgagtacttacccctggtatgacgacgcgactaacggcatccgttttaacgatctgctggccacgctgaatacgttacctgcgcgcagtatcgtgctgctgcacccctgttgtcacaacccgaccggggcggatttaacgccttcgcaatgggatgcggtgattgaaatagtgaaagcgcgcgatctgattccgttccttgatattgcctatcaggggtttggcgcaggcatggacgaggatgcttacgctattcgcgccattgccagcgccgggttacctgcgttagtcagtaattctttttcgaagattttctcgctgtacggcgagcgcgtcggcggcctgtccgtggtgtgtgaagatgctgaaatcgccgcgcgggttctgggacagctaaaagcgacggtgcgccgaatttactccagtccgccgtgtttcggcgctcaggtggtcgctacggtcctgggcgatgaggcgttaaaagcgggctggctggcggaagtcgacgcgatgcgtaaccgcattatatcgatgcgccagacgctggtgaaggagctgaaggcggagatgcctgaccgcaactttgattacttgttacagcagcgcggtatgttcagctataccgggttaagcgcggagcaggtcgagcggttgcgcgatgagtttggcgtttacctgattgccagtggccgcatgtgtgtcgccgggcttaatgcttcaaatgtacaccgcgtggcgaaggcatttgccgctgtcatgtaa

SEQ ID NO: 371502 - DNA, 1080 bp, Salmonella enterica
atgcaagcggcaacagtcgtcattaaccgccgcgctctgcgacacaacctgcaacgtctgcgtgaactggcgcctgccagtaagctggttgcggtggtgaaagcgaacgcttatggacacggtcttctggagaccgcgcgaacgctccctgatgctgacgcttttggcgtggcgcgtcttgaagaggctctacgtctgcgagcgggcgggatcacgcagcctatcctgctgctggagggttttttcgacgccgccgatctgccgaccatttccgcgcaatgtctgcatactgccgtacataatcaagagcagcttgccgccctggaggcggtggagctggcggagccggtaacggtctggatgaaactggataccggtatgcatcgtctcggcgtgcgtcccgaagaggcggaggcgttctaccagcgtctgacgcactgtaaaaatgtacgccagccggtgaatatcgtcagccattttgcccgtgcggatgagccggaatgcggcgctaccgaacatcagctcgacatttttaatgccttctgtcagggtaaacccggtcagcgctctattgccgcgtctggcggtatcctgctgtggccgcagtctcactttgactgggcgcgtccgggcatcattttgtatggcgtatcgccgctggagcacaaaccctgggggccggattttggttttcagccggtgatgtccttaacctccagtttgatcgcggtgcgtgaccacaaagcgggcgaaccggtgggctacggcgggacatgggtgagtgagcgcgacacgcgcctgggcgtggtggcgatgggttatggcgatggctacccacgagcggcgccttccggtacgccagtactggtcaatggtcgtgaagttccgattgtcgggcgggtggcgatggatatgatttgcgtagatttggggccaaacgcgcaggataacgcgggcgatccggtggtcttatggggtgaaggtctgccggttgaacgtatcgctgaaatgacaaaagtaagtgcttacgaacttatcacgcgcctgacctcaagggtggcgatgaagtatattgattaa

SEQ ID NO: 371503 - DNA, 1416 bp, Salmonella enterica
atggcaggaaataaacccttcaacaaaccacagactgatgcccgcgaccgcgatccgcaggttgccgggataaaagtgccgccgcactcgattgaagcggaacagtcggtgttgggcggtttaatgctggataacgagcgctgggacgatgtggccgagcgcgtggtggcggaagatttctatacccgtccgcatcgccatatctttacggagatggggcgcttgcaggaaagcggcagtcctatcgacctgatcacgctcgcggaatcgctggagcggcagggccaactggacagcgtcggcggtttcgcctatctggcggaactgtctaaaaacacgccaagcgcggcgaacatcagtgcttatgcggacattgtgcgcgaacgcgccgtggtccgcgatatgatcgcggtggcgcatgaaattgcggacgccggttacgatccacaggggcgcaatagcgacgaactgctggatctggcggagtcgcgcgtcttccagatcgcggaaaaccgggccaacaaagacgaaggtccgaaaagcatcgaccagatcctcgacgctaccgtggcgcgtattgagcagttgttccagcaaccgcacgatggcgttacaggcgtggataccggctatcaggatctcaataaaaagacggcagggttacagcgttcggatttgattatcgtcgcggcgcgtccctccatgggtaaaaccacttttgcgatgaacctctgcgaaaatgcggcgatgttgcaggataaaccggtactgatcttcagcctggagatgcccggcgaacagatcatgatgcgtatgctggcctcgctgtcccgcgtcgatcagacacgtattcgtaccggtcaactcgatgatgaagactgggcgcgaatctccggcacgatgggcattctgctggagaaacgcaatatgtatattgacgactcctcaggtcttacgccgacagaagtccgttcgcgcgcgcggcgtattttccgcgaacatggcgggttaagtctgattatgatcgactacctgcaattgatgcgtgtgccgtcgctttctgataaccgtactctggaaatcgccgaaatttctcgctcgttgaaagcgctggcgaaggaactccaggtgccggtcgtggcgctatcgcagcttaaccgctccctggaacaacgcgcggataaacgtccggtgaactccgacctgcgtgaatccggctctattgaacaggatgccgacttaattatgtttatctaccgtgatgaggtttatcacgagaacagcgacttaaaaggcattgctgaaattattattggtaagcagcgtaacggtcctatcggtacggttcgtctgacgttcaatggtcagtggtcgcgcttcgataactatgcgggaccgcaatacgatgatgagtaa

SEQ ID NO: 371504 - DNA, 984 bp, Salmonella enterica
atggcaacgcgtattgaatttcacaagcatggtggtccggaagtgcttcagaccgtggagtttacgccaacggaaccggcggaacacgaaatccaggttgagaacaaagccattggtatcaacttcatcgacacctatatccgtagcggactctatccgcccccgtcgttgcctgcgggcctgggaaccgaagctgcgggtgtggtcagtaaagtcggcaacggcgtggagcacattcgcgtcggcgatcgcgtcgtctacgcgcagtcaacgctcggcgcttacagttccgtccataacgtcaccgcagataaagccgcgattttgcctgacgccatttctttcgaacaggcggcagcctcttttctcaagggattgaccgttttttacctgttgcgcaaaacctatgaagtgaaacccgacgaacccttcctgtttcatgccgctgcgggcggcgtcggtctgatcgcctgccaatgggcgaaagcgctgggcgcgaagcttatcggtaccgtcggtagcgcgcaaaaagcgcagcgggcgctggacgccggcgcctggcaggtgattaattaccgtgaggagagcattgtcgaacgggtaaaagagatcaccggcggcaaaaaagtccgcgtggtctatgactccgtggggaaagatacctgggaagcctcactggactgcctgcaacgtcggggactgatggtcagtttcggcaatgcgtccggccccgtcactggcgtgaatttaggtattctgaatcagaaaggttccctgtatgccacgcgaccttcactacaggggtatattacgacgcgtgaagaactgaccgaagccagcaatgaattgttctcattgatcgccagcggcgtgattaaagttgatgtggctgaaaatcaacgctatgcgttaaaagatgcccgtcgcgcgcatgaagtgctggaaagccgggccacacagggctcaagcctgctgattccgtaa

SEQ ID NO: 371505 - DNA, 243 bp, Salmonella enterica
atgctggaactactttttgtgcttggcttttttctgatgttaatggtgacgggcgtctccttgctgggcattctggccgcgctggttgtagcgactgccgtcatgttcctgggtggaatgttcgccctgatgatcaagctgttaccgtggctactgctggcggtggctgtggtgtgggtgatcaaagcagtaaaaacgccaaaaatcccacagtatcagcgcaataaccgtcggttttactaa

SEQ ID NO: 371506 - DNA, 999 bp, Salmonella enterica
atgcagcctgaaacccagtcctccgctttccctgcttatcgcttctccatcgcgcctatgctcgactggacggacagacattgccgctatttcctgcgtttgctgtctcgccagacgctgctctacaccgaaatggtgaccacgggcgcgattattcacggtaagggtgactatctggcttatagcgaagaagagcatccggtcgctctacagcttggtggaagcgatccggctcagcttgcgcattgtgcaaagctggcggaagcgcgtggctacgatgaaattaacctcaacgtggggtgcccctccgatcgtgtgcaaaatggtatgtttggcgcctgtttgatgggcaatgcgcaactggtcgccgattgtgttaaagccatgcgtgatgtcgtctcgattccggtaacggtaaaaacccgcattggtattgacgatcaggacagttatgcgtttctgtgtgatttcatcgatacggtttccggtcggggcgaatgcgagatgtttattatccatgcgcgcaaagcctggctttctggcttaagcccgaaagaaaatcgtgagatcccgccgctggattacccgcgcgtataccagctaaagcgggattttccgcacctgaccatgtccattaacggcggcatcaaatcgctggaagaggcgaaggagcacctgcgccatatggatggcgtcatggttggccgcgaagcttatcagaatccgggtatactggccgcggtggatcgggagatttttggcgccgataccaccgatgccgacccggttgcggtggttcgcgcgatgtatccctatattgagcgtgaattgagccagggagcgtatctggggcatatcactcgccatatgctggggttgttccagggcattcccggcgcgcgacagtggcgtcgctatctgagcgaaaacgcccataaagctggcgcggatgttgctgtactggagcaggcgctaaaactggtagcagacaagcgttaa

SEQ ID NO: 371507 - DNA, 1311 bp, Salmonella enterica
gtgaacaaaaacgtcaaactttcactgattgctatcgcggtctcgctttttatggcaaagcaggcgagcgccgccaatacctggacggaagcgcgtaatgacgcaatgggcgggacgggcgttgcgtccgcgaattatggcagcggagtactattaaatccggcgttactggcaaaagccaaaccggaagacaatatcactgttgtccttcctgcggtcggcgtccagattacggataaagacaatctccaggatgaaattgacgatatcagcgataaagtggattactacgatgaggtcgtcgataaccttacgctggggcaaattctgctcaatccgcgaggcgtgctgaatcaatttcagggcgccgcgcgcgacctggccgatgagctggaatatctcaacggaaaaaccgcccgcgccaatgccggcgccgggttggcggtaagtattccagggcaaacgctttccgtggcgtttatcgccaaaggttatgcgcatgggcgcgtgagttcgtccattgatcagaacgatattcagtatctgcgcgatatccagcatgatgaacgtgtcgcgcttcgtgaagcaggacgcgctgctttgctggggtctgacgaaattacaaagcatttaaactctaccgcgtcggggcgggtagcgattgtgtctgactacggtattgcactggcgaagcagtttgtggtgggcgaggtgcctgtttccattggcgttacgccaaaactgcaaaaaacctggctctataactacaccacctcaatttataactacgacagtagcgactggaatagcagccgttatcgcaatgacgatacgggttttaacattgatgcggggcttgctgccgatatcggtgaaaactggacgttggggctgagcgggcaaaatctggtatctcgcgatatcgatacgaaagatatttacatcactaatggtatgacgggagaaaccaccaactacaaagatacataccaaatccgccccctggttaccgcgggcgtcgcatggcataacgatttgctgaccgtaagcgccgatggcgatctgacggaaacgaaaggctttaagagcgaagacaattcacagtacgttggcgtcggcgctgaagttcgaccgttatcatggctggcggtgcgcgcagggtatcgtgcggatgtgaaaaataacgatagcaatgtggttaccggcggtcttggctttgcgccctttaaccgtgtgcatctcgatttaatgggactgtacggcgaagatgaaacctggggggcaggcgcgcagcttacgatgacattctga

SEQ ID NO: 371508 - DNA, 516 bp, Salmonella enterica
atggaaaagaccacaacgcaagagttactggcgcaagctgaaaaactctgcgcgcagcgcaacgtgcgcctgacgcctcagcgcctcgaagtgctgcgcctgatgagtctgcaacagggtgccatcagcgcatacgatttgctcgatttgctgcgcgaaacggaaccacaggccaaaccgcccaccatttaccgcgcgctggattttttgctcgaacagggttttgtccataaagtggaatccaccaatagttatgtggtttgccacctgttcgaccagccgacgcacagctcggccatgtttatctgcgatcgttgcggcgtggtgaaggaagagtgtgccgagggcgtggaagacatcatgcatacgctggcggctaaaatgggatttgcgctacgacataacgttattgaggcgcacggtctgtgccctgcgtgcgtagaagtggaagcgtgtcgccatccgggcgactgtggtcacgatcactcggtgctggtgaagaaaaaaccgcgttag

SEQ ID NO: 371509 - DNA, 213 bp, Salmonella enterica
atgatgaataaagacgaagccggcggtaactggaaacagtttaaaggtaaaatgaaagaacaatggggcaaactgaccgatgacgatatgaccgttatcgaaggtaaacgcgaccaactggtaggtaaaatccaggagcgttacggttaccagaaagatcaggcggaaaaagaggttgttgactgggaaacccgtaacaactatcgctggtaa

SEQ ID NO: 371510 - DNA, 129 bp, Salmonella enterica
atggtttgccagatcgtgacggttaaaaattctgaatataaaaccgaaggccgaattcctgcctacaattattatcacgtccagcagaaattgcagtgcatttgggcgaataacacctgctattcctaa

SEQ ID NO: 371511 - DNA, 1326 bp, Salmonella enterica
atgccgctttttacctcctctgataaagctctctggcatctcgcgctgccgatgattttttctaacatcaccgtccccttgctggggctggtcgatacggcggtgattggtcatctggacagcccggttttcctgggcggcgtggcggtgggcgcgactgccaccagctttcttttcatgctgctgctatttctacgtatgagcaccaccggcctaacggcgcaggcatttggcgccaaaaatccgcaggcgttagcccgggcgctcattcaaccgttattactggcgctgggcgctggcgtgatgattgtgctatttcgcacgccgcttatcgagctggctttatatattgtcggcgggaacgacgctgtcctggtgcaagcgagacgcttccttgaaattcgttggctaagcgctcccgcgtcactggcgaatctggtgctgctcggttggctgttaggcgttcagtatgcgcgggcgccggttatcttgttggtcgtgggcaatatcctcaatatcgcgctcgacctgtggctggtgatggggcttcatatgaacgtgcagggtgctgccctggcgacggtcatcgcagaatatgtcacgttactgatcggcctcatgatggtacgtaaagttctccatctccgcggtgtgtcgctggatatgctaaaacaggcctggcgcggcaacgtgcgccgccttttggcgctcaatcgcgatatcatgctgcgctcattgctccttcagctttgttttggcgcaatcacggtgtcaggcgcgcggctgggcagcgatattatcgcggtaaatgcagtcctgatgaccttactcacctttacggcctatgcgctggacggttttgcttatgcggtggaggcgcactccggtcaggcttacggcgcgcgtgacggtagcaagctactggacgtctggcgagcggcgtgtcgtcagtcaggaattgtggccttgttgttttccacagtctatgccctggcaggcgaacatattgtcgcgttactgacctcattgccgcaaatacagctactggcggatcggtatcttatctggcaggtggtattaccgctggtgggcgtatggtgctatctgctcgacggtatgtttattggcgcgacgcgcgctgccgaaatgcgcaatagcatggctgtcgccgcgggaggattcgcgctgacgctcttcgccctgccggtattaggaaatcatggtttatggctggcattaaccgtgttcctggcgcttcgcggtctgtcgttgagccttatctggcgtcgtcactggcgcgagggtacatggtttgccagatcgtga

SEQ ID NO: 371512 - DNA, 609 bp, Salmonella enterica
atgaaagcgttaacggccaggcaacaagaggtgtttgatctcatccgggatcacatcagccagacaggtatgccaccgacgcgtgcggaaatcgcgcagcgtttggggttccgttccccaaacgctgcggaagaacaccttaaagcgctggcgcgcaaaggggtgcttgaaatcgtttccggcgcatcgcgaggtatccgtctgttacaggaagaagaggacggattaccgcttgtcgggcgtgtcgcggcgggtgaaccgcttctggcgcagcagcatattgaaggccattaccaggtcgatccttcgctgttcaaacccagcgccgatttcctgctgcgcgtgagcggtatgtcgatgaaagacatcggtattatggatggggatttgctggcggtacataaaacgcaggacgtccgtaatggccaggtggttgtcgctcgcattgacgatgaagtgacagtaaaacgcctgaaaaagcagggcaataaagtggagctgctgccggaaaacagcgagtttacaccgatagtggtggatctgcgcgaacaaagctttacgattgaagggctggcggtaggcgtcattcgcaacggggaatggttgtaa

SEQ ID NO: 371513 - DNA, 369 bp, Salmonella enterica
atggccaataataccactggattcaccagaattatcaaagcggcaggatattcctggaaaggatttcgcgccgcatggactcacgaagcggcgtttcgccaggaaagtatcgcggtattgctgggcgtcatcatcgcctgctggctggatgtggatgcgattacccgtgtgttattgataggttccgttttacttatcatgattgttgaaatcctcaacagcgctattgaagcggtcgttgaccgcatcggttctgaataccatgagctttccggccgtgcgaaagatatgggatcggctgcggtgctactgtctattttcgttgccctgatgacctggggcatcctgttatggtcacattttcgataa

SEQ ID NO: 371514 - DNA, 2421 bp, Salmonella enterica
atgtccggctggccacgaatttactacaaattactgaatttaccattaagcatactggtaaaaagcaagtctattccggcggaacccgcccaggaattggggctcgatacttctcgccccattatgtatgtcttgccatacaactcaaaagcggacttactgacgctgcgggcgcaatgtctggcgcacgatctcccggatccgctggagccgctggagatcgacggcgcgctgttgccacgctatgtatttattcacggcggaccgcgtgtctttacctattacacgccaaaagaagagtcggtgaaactttttcacgattatctcgatctgcatcggagtaatccggctttggacgtgcagatggtgcccgtttccgtgatgtttggccgcgcgccgggtcgtgaaaagggagaagataacccgcctttacgtatgctgaacggcgtacagaaattctttgccatctcctggctgggtcgcgatagctttgtccgattctcgccgtccgtctcattgcgtcgcatggctgatgaacacggcaccgataaaatcatcgcgcagaagctggctcgcgtggcgcgtatgcactttgctcgccagcgcctggcggcggttggcccacgcctgcccgcccgtcaggatctgtttaacaaactgctggcctcgaaagcgatcgcccgcgcggtagaagacgaagcgcgcagtaagaaaatctctcatgaaaaagcgcagcaaaacgccattgcgctgatggaagagatcgcggcgaacttctcttacgagatgattcgtttgaccgacaggattttggggtttacctggaaccgactgtaccaggggattaacgtgcataacgccgagcgcgtacgccaactggcgcacgacgggcatgaaatcgtctatgtgccctgtcaccgcagccatatggactatttgctcctttcttatgtgctgtaccatcagggactggttccgccgcacattgccgcaggcattaaccttaatttctggcccgctggcccgattttccgtcgtctgggcgcgttctttattcgtcgcacctttaaggggaataaactctattccaccgtctttcgcgaatacctgggcgagctgttcagccgcggttactcggttgagtattttgtcgaaggaggacgttcgcgtaccggacgtttgttagacccgaaaaccggcaccctgtcgatgactatccaggcgatgctgcgcggcggtacccgtccaattacgttagtgcctatttacatcggctatgagcacgtcatggaagtgggcacctatgcgaaagaactgcgcggcgcgacaaaagagaaagagagcctgccgcagatgctgaaaggcttgagcaagctgcgcaatctgggtcagggctacgttaactttggcgaaccgatgccgctcatgacgtacctgaaccagcatgtgccggagtggcgcgaatctatcgaccctatagaggccatacgcccagcctggctgacgccgacggtaaatagtatcgccgccgatctgatggtgcgtattaacaacgctggcgcggcaaacgcgatgaacctgtgttgtaccgcgctgttagcgtcgcgtcagcgctcgctcacccgcgagcagctcaccgagcagcttgattgctatctcgatctgatgcgcaatgtcccttattccacagactcaaccgttcctgccgccagcgctggcgagctcatcgctcacgcgctgcagatgaataagtttgaggtcgagaaagacaccattggcgatatcatcattctgccgcgcgagcaggcggtgttgatgacctactatcgtaacaatatcgcgcatatgttgattatgccttcgctgatggcggcgattatcacccagcatcgtcgcatttcgcgtgatgcgttgcagcagcatgttgaagcgctctatccgatgttaaaagcggagctgttcctgcgctgggagcgcgaggagttagcctcggtcattgacgcgctggccagtgaaatgcagcgtcaggggctaattaccctgcaggatgatgaactgcatatcaacccgacgcattcccgtacgctgcaactgctggcggcaggcgcgcgcgaaacgctacagcgttatgccattacgttctggctgttgagcgccaatccgtccatcaaccgcagtacgctggagaaagaaagccgtaccgtggcgcaacgtctgtctgtcctgcacggtattaacgcgccggagtttttcgacaaagcggtgttcagttcactcgtgttgacgctacgggatgagggttatatcagtgatacgggcgatgccgaaccggcagaaacgatgaagatatatcagatgcttgccgatctgattacctctgatgtccgtctgacgattgaaagcgcgacgcagggcgagtaa

SEQ ID NO: 371515 - DNA, 873 bp, Salmonella enterica
atggagtggagtctgacgcagagtaagctgctggcgtttcaccgtttgatgcgtacagataagcctattggcgcgttgctgctgctctggccgacgctttgggcgctatgggtggcgacgccgggtatgcctcagctgtggattttggcagtttttgtcgctggcgtgtggttaatgcgcgcggcgggctgcgtggtaaatgattatgccgatcgtaaatttgacggacatgtaaaacgtacggtcaaccggcctttacccagcggcgccgtgacagagaaagaagcgcgcaacctgtttgtggtgctggtgctgctggcgtttctgttggtgctgacgctgaacgccatgacgattctgctttccgtggcggcgctggcgttggcctgggtttatccctttatgaaacgctacacccacctgccgcaggtcgtgctgggggccgctttcggctggtcaatccccatggcgttcgccgcggtgagcgaatccctgccgttgagctgctggctaatgttcctcgccaatattctctgggcagtggcttacgatacgcaatatgcgatggtcgacagagatgatgatatcaagataggcattaaatcgacggcgatcttgtttggtcgttatgacacattgattatcgggattctgcagcttggcgtcatggcgttaatggcgctgatcggctggttgaatggtctgggatggggatattactgggctgtgctggtggcgggcgcgctgtttgtctaccagcaaaaactgattgcgaaccgtgagcgtgaagcctgctttaaagcctttatgaacaataactacgttggcctggtgctatttttagggctggcgatgagttactggcacttctga

SEQ ID NO: 371516 - DNA, 498 bp, Salmonella enterica
atgtcacaccctgcgttaacgcaactgcgtgcgctgcgctattttgatgcgattcctgcgcttgaaccccatttgctggactggctgttgctggaagattctatgactaaacgttttgagcagcagggaaagcgggtaagcgtgacgctgattcgggaagcgtttgtcggccaaagtgaggtcgaggaagcatcaggtttactgccatccgagtcccgctactggttacgtgagatactgctttgcgctgacggcgagccctggcttgccggacgtaccgtggtaccggaatccacgctgtgcggacctgaacaggtcttacaacatctgggtaaaaccccgcttggacgttatctatttacatcatcgacactgacccgcgattttattgaaattggacgcgatgcaacgctgtgggggcgccgctctcgactgcggttgagcggaaaaccgctgttgcttaccgagctttttttacctgcatcgccgctgtactga

SEQ ID NO: 371517 - DNA, 918 bp, Salmonella enterica
atgaaaatgaagaaaagtctcgtcgccctctgtttaaccgcagggctgttcgccagcgtgccgggtatcagcctggcggaagtgaactatgtaccgcaaaataccagcgccgcgcccgctattcctgctgctgcgctacagcaattaacctggacgcctgtagatcagtcaaaaacgcagtctacccaactggcgactggcggccagcgccttgacgtcgccggcattaccggcccggtcgccgcttatagcgttccggcgaatatcggcgagctgacattaactctgaccagcgaggtcaataagcaagccagcgtttttgcgccaaacgtgttgattcttgaccaaaatatgacgccttcggcgttcttccccagcagttactttacttatcagcagccgggcgtcatgagcgcagaccggctggaaggcgtgatgcgcctgacgcctgcgttggggcagcagaaactctatgttctggtgtttacgaccgaaaaagatcttcagcaaaccactacgctgctcgatccggcaaaagcctatgccaaaggcgtcggcaactctatcccggatattcccgatccagttgctcgccataccactgacggcgtggtgaaactgaaggtgaaaaccaacagtagctccagcgtattggtcgggccgttgtttggctcgtccggtaccgggccggtaacggtaggcaataccgccgcgccggtcgctgcgccagcgccagtcgcgccgaagaaaagcgagccgatgttgaacgatacggaaagctactttaataaagcgattaaggatgccgtagcgaaaggcgacgtcgataaagcgctgaaactgcttgatgaggccgaacgtctgggatcgacatctgcccgttccacctttatcagcagtgtaaaaggcaaggggtaa

SEQ ID NO: 371518 - DNA, 1359 bp, Salmonella enterica
atgatgattactctgcgcaaactcccactggcggttgctgtcgcagcgggcgtaatgtccgctcaggcaatggctgtcgatttccacggttacgcccgttccggtattggctggacgggaagcggcggcgaacaacagtgtttccaggcaacgggtgcccaaagtaaataccgtcttggtaacgaatgtgaaacctatgcggaactgaaactgggccaggaagtgtggaaagagggcgataagagcttctatttcgacaccaacgtcgcctattcggttaaccagcagaacgactgggaatcgaccgatcccgccttccgcgaagcgaacgtgcagggtaaaaacctgattgaatggctgccgggctctaccatctgggccggtaagcgcttctatcagcgtcatgacgtacacatgatcgacttctactactgggatatttcaggtcctggcgcaggtatcgaaaatatcgatctgggcttcggtaagctttcactggcggcgacccggtctactgaagcgggcggctcttacaccttcagcagccagaatatttatgatgaagtaaaagataccgctaacgacgtctttgacgtacgtctggctggtctgcaaacgaacccggacggcgtactggagctaggcgttgattacggtcgcgccaatacgaccgatggttataagctggctgatggggcatcgaaagacggctggatgttcaccgccgaacacacgcaaagcatgttgaaaggctataacaagtttgtcgtgcaatatgccaccgatgccatgaccacgcagggtaaaggccaggcgcgcggttccgacggttcttcatctttcactgaagaattgtctgatggaaccaaaattaattacgccaataaggtcatcaataataatggcaatatgtggcgtattttggatcatggcgccatctcgcttggtgataaatgggatttgatgtacgtcggtatgtaccagaatatcgattgggataataacctgggtactgagtggtggaccgtgggtgtacgtccaatgtacaagtggacgccaatcatgagcaccctgctggaagtcggctacgacaacgtgaaatctcagcagaccggcgatcgtaacaatcaatataaaatcaccctggcgcaacagtggcaggcgggcgacagcatctggtcgcgtccggctatccgtattttcgccacctacgcgaaatgggatgagaaatggggctatatcaaagacggcgataacatttcccgttatgccgcagcgactaactccggcatttccaccaacagccgtggcgatagcgatgagtggaccttcggcgcccagatggaaatctggtggtaa

SEQ ID NO: 371519 - DNA, 1110 bp, Salmonella enterica
atggcgagcgtacagctacgaaatgtaacgaaagcctggggtgacgtggtggtatcgaaagatattaacctcgatatccatgacggggagttcgtggtgtttgtgggaccgtcaggctgtggtaaatcgaccttgctgcgtatgatcgccgggcttgaaaccatcaccagtggcgacctgtttatcggggaaacccgtatgaatgatattccgcctgccgagcgcggcgtgggcatggtattccagtcttatgcgctctatccccatctctccgttgcagaaaacatgtctttcggcctcaagctggcgggcgccaaaaaagaggtaatgaatcaacgcgtcaatcaggtggcggaagtactgcaactggcgcatctgctggaacgtaagccaaaagcgctttccggcggtcagcgtcagcgcgtagcgattggccgcacgctggtggcggagccgcgtgtgtttttgctggatgaaccgctctctaacctggatgccgcgctacgcgtgcagatgcgcattgaaatttctcgcctgcataaacgtctgggccgcacgatgatttacgtcacccacgatcaggtcgaggcgatgacgctggccgacaaaatcgtggtgctggacgccggtcgcgtcgcgcaggtcggtaagccgctggagctgtaccactatccggcggaccgttttgtcgcgggcttcatcggctcgccgaagatgaacttcctgccggtgaaagtgaccgccaccgcgattgaacaagtccaggtcgaactgccgaatcgccagcaaatctggctgccggtcgaaagtcgcggcgtgcaggtcggcgccaatatgtctttaggtattcggccggaacacctgctgccgagcgatatcgccgatgtcaccctggaaggcgaagtccaggtggtcgagcagttagggcacgaaacacaaattcatatccagatccccgccatccgtcaaaacctggtttatcgccagaatgacgtggtgttggtagaagagggcgccacattcgctatcggcctgccgccagagcgctgtcatctgttccgcgaggatggcagcgcatgtcgtcgtctgcatcaagagccgggtgtttaa

SEQ ID NO: 371520 - DNA, 1191 bp, Salmonella enterica
atgaagattaaaactggcgtaggcatcctcgcattatccgcacttacgacgatgatgatttccgccccggctctcgccaaaattgaagaaggtaaactggttatctggatcaacggcgacaagggttataacggtctggccgaggtcggtaaaaaatttgagcaagacaccggcattaaagtggccgttgagcacccggataagctggaagagaaattcccgcaggtggcagccaccggcgacggtcctgacattatcttctgggcgcacgaccgttttggcggctacgcgcagtctggtctgctggcggaggtcactccggataaagcgtttcaggacaaactctatccgttcacctgggatgcggtacgttataacggcaagctgatcgcctaccccatcgccgttgaagccctctccctgatttataacaaagacctcgtcccgaacccgccgaaaacctgggaagagatcccggcgctggataaagagctaaaagcgaaagggaagtcggcgataatgttcaacctgcaagagccgtatttcacctggcctttgatcgccgctgacggcggttacgcgttcaaatttgaaaacggcaagtatgacgtgaaagacgttggtgtcgacaacgccggcgcgaaagcgggcctgactttcctgatcgatatgatcaagaacaaaaatatgagcgccgataccgattactccatcgccgaagcggccttcaataaaggcgaaacggcaatgaccatcaacggtccgtgggcatggtcgaacatcgacaagagcaaagtcaactacggtgtcaccctgctgccgaccttcaaaggtaaaccctcgaaaccgttcgtcggcgtgctgagcgcggggattaacgctgccagcccgaataaagagctggcgaaagagttcctcgaaaactacctgctgaccgatcagggtctggaagcggtgaacaaagataaaccgctgggcgccgtggcgctgaaatctttccaggagcagttagcgaaagacccccgtatcgccgccaccatggataacgcccagaaaggcgagatcatgccgaatattccgcaaatgtccgccttctggtatgcggtacgtacggctgtgatcaacgccgccagcggccgtcaaaccgtggatgccgcgctgaaagatgcacaaagccgtatcactaagtaa

SEQ ID NO: 371521 - DNA, 1545 bp, Salmonella enterica
atggatgtcattaaaaagaaacactggtggcaaagcgaccagcttaaatggtcagtaattggtctgctgggcctgctggtgggttaccttgtagttttaatgtacgtacaaggggagtatctgttcgccatcatgacgctgattttaagctctgctggcctgtatattttcgcaaatcgtaaaacctatgcctggcgctacgtttaccctggcctcgccggcatggggctgtttgtgctattcccgctggtgtgcaccatcgctatcgcctttactaactacagcagcaccaaccagctcacctttgaacgcgcccaacaagtgctgatggaccgttcttatcaggcaggaaaaacctataacttcggtctttacccgagcggcgacgagtggcaactggccctcaccgacggagaaacgggcaaacattacctgtctgacgcattttccttcggcggcgaacaaaaattacagctgaaagagaccgatgccctgccgggcggcgaacgcgccaatctgcggataatcacccagaaccgtctggcgttgaaccagataaccgccgtcctgccggatgaaagtaaagtgattatgagctcgctgcgtcagttttccggtacccgtccgctgtacacactggctgatgacggcctgcttaccaataaccagagcggcgtaaaataccggccaaataacgatagcggttattatcagtcgatcaacgccgacggaagctggggtgatgaaaaactcagtcctggttataccgttactatcggcgcgaaaaactttacgcgcgtctttaccgacgaagggatccagaagccttttttcgctatcttcgtctggaccgtggtcttttcggtcctcactgtggtgttaactgtggcggttgggatggtattggcctgcctcgtacagtgggaagcgctgaaaggtaaagctatctaccgcgtcctgctgattctgccctacgccgtaccgtcgtttatttcaattttgattttcaaagggttattcaaccaaagctttggcgaaatcaatatgatgctgagcgcgctgtttggcattaaacctgcctggttcagcgaccccaacaccgcgcgggcaatggtgattatcgtgaatacctggctgggctatccctacatgatgatcctgtgcatgggactgctgaaagcgattccggatgacctgtacgaagcctccgcaatggacggcgccggtccatttcagaatttctttaagatcaccttaccgctgctgattaagccgctaacgccgctgatgatcgccagcttcgcctttaactttaataactttgtcctgattcagttattgaccaacggcgggccagaccgtctcggcaccaccacgcctgccggttataccgatttgctcgtcagctacacctaccgtatcgcctttgaaggcggcggcggtcaggacttcggtctggcggcggccattgccacgctgatcttcctgctggtaggcgcgctggcaatagtgaacctgaaagccacgcgtatgaagtttgattaa

SEQ ID NO: 371522 - DNA, 891 bp, Salmonella enterica
atggctatggtccaacccaaatctcagaaactgcgtctcctcatcacgcacctggggctgctgattttcatcgcagcgattatgttcccgctgctgatggtcatcgctatctcgctacgtgaagggaacttcgccaccggaagcctgatcccggataaaatctcctgggaacactggcggctggcgctgggtttcagcgtggaacatgcggatggtcgggtaacgccgcctcccttcccggtcctgctgtggctgtggaactcggtgaaaatcgccggtattaccgccatcggcatcgtggcgctctccaccacctgcgcctacgctttcgcacgaatgcgttttccaggtaaagcaacactgctcaaagggatgctgattttccagatgtttccggcggttttgtctctggtagcgctgtatgcgttatttgatcgcctgggacaatacattccatttatcggtctgaatacgcatggcggcgtgatcttcgcctatcttggcggcatcgcgctgcatgtctggacgattaaaggctacttcgaaactatcgacagttcgctggaagaggccgccgcgctggatggcgcaaccccgtggcaggcgtttcgcctggtgctgctgccgctttccgtaccgattctggcggtggtgtttattctgtcgttcatcgcagcgattaccgaagttccggtcgcctcgttgttactgcgcgatgtggacagctatacgctggccgtgggtatgcagcaatatctcaacccgcaaaactatttgtggggcgactttgccgccgccgccgtcctttcagctattcctatcaccctggtgttcctgttggcgcaacgttggctggtcaacggcctgacggctgggggtgtgaaaggttaa

SEQ ID NO: 371523 - DNA, 411 bp, Salmonella enterica
atgatgccattatcgcgctcacgtcttgagtttatcgccacgattttacaaaacgtactaaatttggggctgcttaccctcggtctgatcctggtcgtttttctcggtaaagagacggttcatctggcggatgcattattcgtgcctgagcaagccagcaaatatgaactggtggaagggctggtgatctactttctttatttcgaatttattgcgctgattgtgaagtactttaagtctggccttcactttccgctgcgctatttcgtgtacattgggatcacggcgattgtgcgcctgatcattgtcgatcataaaacgccaatggatgtattactctattcggcggcgatcctcctgttggttatcacgttgtggttatgtaattcgaaccgactacggcgagaatag

SEQ ID NO: 371524 - DNA, 2097 bp, Salmonella enterica
atgaaaaaaacacatctgctcagcgtgctggcgctgggtattagcgcggcctgccatgccgaaacatatccagcccctgttgggccttcacaatctgactttggcggcgtgggcctgctgcaaacgccgacagcgcgtatggcgcgtgaaggggagatgagcctgaactatcgtgataacgatcagtaccgctactactcggcttcggttcagcttttcccgtggctggaaaccacgttgcgctataccgatgtccgtacgaaaaagtacagcagcgtggaatcattctccggcgaccagacttacaaagataaagcgtttgatgtgaaactgcggttgtgggaagagagttactggatgccgcaggtggcggttggcgcgcgcgatatcggcgggacggggctgtttgatgcggaatatattgtagcgagtaaggcctgggggccgtttgatttttcattaggtctcggctggggctatcttggcaccagcggcaatgtgtctaatcctttctgttcgtatagtgataaattctgttcgcgtgataacagttataaagaggccggttccgtcgacggtagcgatatgtttcacggcccggcctcgctgtttggcggcgtggaataccagaccccgtggcaaccgctacgcctgaagctggagtatgaaggcaataactatcagcaggattttgcgggtaaactggagcagaagagcaagtttaacgtcggcgccatttaccgcgtcaccgattgggccgacgttaacctcagctacgagcgcggcaacacctttatgtttggcgttacgctgcgcaccaatttcaacgatttacgtcccgcgtatcatgacaattcacgcccgcaataccgaccacagccgcaggatgccatcctgcaacattcggtagtggctaatcaattaacgttattgaaatataatgccggtctggcggacccgaaaatccaggtcaaaggcgatacgctatacgttaccggtgaacaggtgaagtaccgcgactcccgtgaagggatcgtgcgcgctaaccggatcgtcatgaacgatctgccggaggggatccgcacgatccgcgtgacggaaaaccgccttaatctgccgcaggtcaccactgaaaccgatgtcgccagcctgaaacgccatctggaaggcgaaccgctgggacatgaaactccgctggcgcaaaaacgcgtggagccgatcgtgccagagagtactgaacagggttggtatatcgacaagtcgcgcgttgattttcatcttgatcccgtgctgaatcagtcggtaggcggcccggaaaacttctatatgtatcagttgggcgtaatgggaaccgcggatctgtgggtcacagatcatctgctcaccacgggcagcgtgtttgccaatatcgccaacaactacgacaaatttaactacaccaatccgccgaaggactcgcatctgccgcgggtgcgtacgcatgtccgtgagtatgtgcagaacgatgtttatgtgaataacctacaggccaactacttccagtattttggcaatggtttctatgggcaggtctacggcggttatctggagaccatgtttggcggtgccggggcggaagtcctgtatcgcccggtagacagcaattgggcgtttggtctggatgccaactacgtgaaacagcgtgactggcgtagcgcgcaggatatgatgaagtttaccgattacagcgtgaagaccggacatttgaccgcatactggacgccgtcgttcgcccaggatgtgctggtgaaagccagcgttggtcagtatctggcgggcgataaaggcggtacgctggagatcgccaaacgcttcgatagcggcgtcgttgtcggcggttacgcgacgattaccgatgcgtcgccggatgaatatggggaaggggattttaccaaaggcgtatatgtttccgtaccgctggatctcttctcgtccggcccaacccgaagtcgtgcggcaattggctggacgccgctgacgcgtgacggtggtcaacagcttggccgtaagtttggcctgtatgatatgaccagtgacaggagcgtaaatttccgttaa

SEQ ID NO: 371525 - DNA, 738 bp, Salmonella enterica
atgatgaaaaggatgataagcgcgctggcactggcctttatcgcgtcatccgtctttgccagcggcactgttaccgtttttacccaaggtaatagcgagcctaaaacgctgacagacgctgaacgtctgctcgatttagtcggacagccgcgcctggcaacgagctggtggcctgcggcggtgataggcgaagaacaggcgaccgtgacggcgcgtcagcagcagcaggaacttctcgggcgactggcggcgctcggcgctgaggaagatggcgatgcggcggcggcgataaacacactacgccgacagattcaggcggtgaaggtgacgggcagacaattagtgaaccttgatcctgacgtggttcgggtgagcgaacgaggtaacccgccgctgcaaggtcactacacgctctgggtcgggccgcaacccacgcaggtgacgctctttggcttgattagccagccgggcagccagccgttcgtccctgggcgggacgtcgccagttatcttgagggtcagcgcttactcagcggcgcggatcgtagctatgcctgggtggtttaccctgatggacgcagccaaaaagcgccggtggcttactggaataaacgtcatatcgagccaatgcccggcagcattatttttgtcggttttgccgattccctttggcgcggcacgccgaaggcgataaatgccgacattcttcataccctgacgcagcggataccggaataa

SEQ ID NO: 371526 - DNA, 639 bp, Salmonella enterica
gtgaagcgactcgcacttatcctgatttgcctgctattacaggcgtgttcggccaccactaaaggcctgggcgattcactgtgggacagtttgttcggtacgccaggcgtacagctaacggatgacgatattcaaaacatgccgtatgccagccagtacatgcagcttaacggcggccctcaactgtttgtggtgctcgctttctcggaaaacgggcagcagaaatgggtgacgcaggatggcgcgacgatcgtgacgcagcatggccgtctggtcaaaactctgctcagcggtgacaacctgatcgatgtgaataatctggcggccgacccgctggcgaaaccaggacagattatcgatggcgcgacctggactcgcaccctgggctggaccgaacatcgccaggtgcgttacgccaccgcccgctccgtttttacatggcgagggaccgatagcgtgaacgtcggcagtgaagagaccgccgtgcgggtgttagatgaagaagtgacgaccgatcaaacgcgctggcgtaatcgctactgggttgatagtgaaggccaaattcgccagacggaacagtatctgggcgcgaattactttccggtgaaaaccacgctgattaaggcggcaaaatcatga

SEQ ID NO: 371527 - DNA, 246 bp, Salmonella enterica
atgatgaaaaaagtactgtatggcatttttgccataaccgcgcttgcggcgacatctgtctcggcagcccccgttcaggtgggtgaagcggcagggtcggcagcgacgtcggtatcggcgggaagctcctccgctaccagcgttagcaccgtaagttcggcggtgggcgtcgcgttagcggcaaccggcggcggcgatggttccaataccgggaccacgaccaccacgaccaccagtacccagtag

SEQ ID NO: 371528 - DNA, 1650 bp, Salmonella enterica
atgaaaaacatcaatccaacgcagacttctgcctggcaggcgctccagaaacactacgatgaaatgaaagacgttacgatcgctgagcttttcgcgaacgatagcgaccgtttcgctaaattttccgcgacgtttgacgatctgatgctggtggatttctccaaaaaccgcatcaccgaagagacgctggcaaaattacaggatctggcgaaagagaccgatctggccggcgcgattaaatccatgttctccggcgagaagatcaaccgcaccgaagaccgcgccgtgctgcacgtggcgctgcgtaaccgtagcaatacgccgatcattgtggacggcaaagatgtgatgccggaagtgaacgccgtgcttgagaaaatgaaaactttctcgcaagcgattatctccggtcagtggaaaggctacaccggtaaggccatcaccgacgtggtgaacatcggtatcggcggttccgacctcggcccgttcatggtgaccgaagcgctgcgtccgtataaaaatcatctgactatgcacttcgtctctaacgttgatggcacccacatcgctgaagtgctgaaaaaagtgaacccggaaaccacgctgttcctggtcgcttctaaaactttcaccacccaggaaaccatgaccaacgcccacagcgcgcgcgactggttcctgaaaactgcaggcgatgaaaaacacgtggcgaaacactttgctgcgctctccaccaacgccaaagcggtcggcgaatttggtatcgacacggccaatatgttcgagttctgggactgggtcggcggtcgttactcgctgtggtctgccatcgggctgtccattattctgtccgtcggtttcgacaactttgtcgagctgctttccggcgcgcacgcgatggacaagcatttctccaccactccggcggagaaaaacctacccattctgctggcgttgattggcatctggtacaacaatttcttcggcgcggaaaccgaagccattctgccgtacgaccagtatatgcaccgtttcgccgcctacttccagcagggtaacatggaatccaacggtaaatacgttgaccgtaacggcaacgccgtggattaccagacaggcccaattatctggggcgaaccaggcaccaacggtcagcacgcgttttatcaattgattcaccagggtactaaaatggtgccgtgtgactttatcgccccggctatcacccataacccgctatccgatcatcatcagaagctgctgtctaacttcttcgcgcagaccgaagcgctggcgtttggtaaatcccgcgaggtggttgagcaggaatatcgcgatcagggtaaagatccggcgcagctcgaacacgttgtgccattcaaagtgtttgaaggcaaccgcccgaccaactctatcctgctgcgtgaaattacaccgttcagcctgggcgcgctgattgcgctgtatgagcataaaatctttacgcagggcgccatcctgaacatctttactttcgaccagtggggcgttgagttgggtaaacagttggctaaccgtattctgccggagctgggcgatgataaagctatttcgtcccatgatagctctaccaacggtctgattaaccgttataaagcctggcgcgcctga

SEQ ID NO: 371529 - DNA, 1350 bp, Salmonella enterica
atgacagagatcgttgtttccaaatttggcggtaccagcgtcgctgattttgacgccatgaaccgtagcgcggatatcgtactttccgacgccaatgttcgtttagtcgtgctttccgcgtctgccggcatcactaatctgctggtggcgctggccgaagggatggagcccggcgaacgtttcgctacgctcgacgccatccgtaaaatccagttcgatatccttgatcgtctgcgtcatccgaatgtcattcgcgaagagattgaacgcctgctggaaaacatcactattctggcggaggcggcatcgctggcgacatcggcagccctgaccgatgaactggtcagccacggcgagctgatgtctaccctgctatttgttgagatcctgcgtgaacgcgacgtacaggcccactggttcgacgtgcgcaaagtgatgcgtaccagcgatcgctttggtcgtgcggaaccggacgtcgcagcgcttgcggaactggccgcgcagcagttgctcccgcgcctgagcgaaacgttggtcattactcagggctttatcggcagtgaaagcaaaggccgcaccacgacattaggccgcggcggcagcgactatacggcagcgttgctggctgaagcgctccatgccgcgcgagttgatatctggacagatgtgcccggtatttacaccaccgacccgcgcgtagtgcccgtcgcgcagcgaattgatgaaatcgactttgaagaagcggcggagatggcaaccttcggcgcaaaagtactgcatccagccaccttactcccggccgtgcgcagcgatatcccggtcttcgttggctccagtaaagatccgcaagcgggcggtacgctggtgtgcaataaaacccaaaacccgccgctgttccgcgcgctggcgctgcgccgcaatcaaacgctattgacgctgcacagcctgaatatgctgcactcacgaggtttcctggcagaggtgttcggcattctggcgcggcataatatttcggtagatctgattaccacttcggaggtgagcgttgcgctgacgctggatactaccggctccacctccacgggcgatacgttactgacccaatccttattgatggagctttccgcgctgtgtcgggtcgaagtcgaagaaggactggcgctggtcgcgctgattggcaacaacctgtcaaaagcctgcggtgttggtaaagaagtgtttggcgtcctggaaccgttcaacattcgcatgatttgttacggcgcctccagccacaatctgtgcttcctcgtgccgggagacgatgccgagaaagtggtgcaaaagctacatcagaacttatttgaataa

SEQ ID NO: 371530 - DNA, 348 bp, Salmonella enterica
atgattcagaaatcaaaagaaatggttcggcttccggagattattaacgatctggcgtttcatgcgtcgcaggtacttattgaaagcatgaatattgatagcgcgtcagccgaaaatgccggtcaggcaattgctgacagaatgatgcgcaactggggcgggcaaagcatttatttccccaaaggtatctctggtcgagcctcggagcgggattatcagatttacagcgagtgcgatgggcgtaattatgcggagctggccaaaaagtacaatttgacactgcagtggatctataaaatcgttaagcgggtccacacggaaaaacagcaccagcggcgtatgctgtaa

SEQ ID NO: 371531 - DNA, 417 bp, Salmonella enterica
atgtatatctatagttcaaaaaaacagaaaaaaactggattatggattaatcgcaaactaaattccaaatttggaattgatatagagctgggagcagtaatcggctatggtttggatattccgcatcacatggggatcgtcatcacgaaaaaggctcgtatcggttgtaatttatcgcttaagcaaaatacaacagtagggaacaagcaaggtttaaaagaagatgatttcattattattggcaataatgtagatataggagccaacacctgcattataggctctattactatcggtgataatgttactattggagcaatgtcatttgtaaataagagcattccagcaaatagcatatatattacaaaaaaaacatcagaagtaatcccagtaataaatcacaaaaaatgggattaa

SEQ ID NO: 371532 - DNA, 729 bp, Salmonella enterica
atgattattgtttctgtgctcagacaaagcaaagacttcaccacaaaacatgctcaatggttacataagcagctcaaaggttatgattctgtttgtttaacagatgcgctaaagataaaaggggtaaatacagcgcctcttttgtatgattggccaggatggtgggcaaaactagaacttttcaatccactgcatcctgttcttggtaatgaggatattctctatattgatatagatagcgttgttgtgggagatattactcctctgacaactatgaaaaaaataacattacttaatgacttttctcagcatggtgcttcagttgcgccagcaacaggtattatgtttattcctgcacccgcaaaaaaaaatgtgtgggatgaatttatgaaaaatcctgaaaaggaaatcaatgccataagaaccccgccctatcatggcgatcaaggatttatcggcagaatatgtcaagatgctgaaagatggcaaaacatcttacccggaagaattattagttacaaagctaatatagcaacaccaaaaatgattggttttaaccctgaactatacgatgggacaggtaatggaaaattacctgacggagtaagcatagtctgttttcatggttcccctcgcccctggaacacagcattgccttgggtgccttattttagtttaaaaaacacaatccaaagcaaagtgaaacaatataagttatcactgcgttaa

SEQ ID NO: 371533 - DNA, 1590 bp, Salmonella enterica
atgaaaaaaattgcgattattggaagcagtggaggcaacctctacaacctgggtggcgccgagccagagaagttactccaggaaatttatcagcagtgtgaggctgcgggcgtgaatgtggccgccgtacagtttatcgcggcagaagcctcgatggacgtcgccaaaccggataccccggcatcggtttatgcattaaccacagaaaaccaacaaaaaccacagcgcatatttcagggcaaactttcggaggtaaacacctcggtagtagaaagcgatcgccaaatcgctgagatgatccgccgcggtgagatcgatgggatcgtggtaatgagcgctgatccggtaaaggcgaaccaggccgtttttgccgccgccgttgagatgaaaacaccgattgtcggcaccgggggaacctccatggcgctggtggcggcaaagggggcgaatgtggtcgcgacctccggaacaactggcaccaccagccgtacccgcgccgtctccttcgtggcgtcgctgtgtaaacattggggtatcaagtacaaaccacagttgggtagcgcttcgccctcgcagagcggttccggaaaaagcctgctcaaacgttttaacattcgtagcatcatgatccctgctctaccaggctttatcgccatggcgattgtactcgccctgagccacataccaggactggaaaaacttaacgatatctttgaaatcttattaaaaggtctgccagtgttagtcgcggtactggcggcaaaacagatttccgaactggatgaagtttcaattgtggccggggtcgtcgctggcgtgctttccgtagagggcggactgatcggcggcattatcggcggtgtaatggcggggattttcgtccgttggctgttcgagctgtgcctgaactggcgcttcccaatgactaccgtcaacatcgtcgccggtgggatatcgggccttgccgctgggttagtcatgcactatctgctgagtccgctggcgctatctgcgggtaattacatcaaactggctatcgaaagcacgctggcattcagcccaattcttgccgggctgctggctggtctggttatctggcctgccattctcggcggcgtctatcacgcggtgatcctgccgttggtgctgctggagatggaaaaatccggcgtcagcttcctcggcgcggtcgatatggtcggtctggtgatggtggccgcaggtattaaccttgccaatgtgatcgccccgcgtgaaaaaagcgaagctgccgttgctacgccgggcctgctcattaacctgggttttggcacctttgttgaatccgcctatcccttcatgttcgccaacaaaattgtttttggctccgccattttttgggccggaatgggcggcatgatgctgggcttttttaacgtcaaaggcgtggcctatgttccggctttcgcctcaccgttcttatccagcaatgcgctccagatggccatcgtaatgattgccacaatggctatgacctgccttaccaccattattgctaaccgtttcaaacctgtcgtacagagcgaatcaacaacgacagccgttaattaa

SEQ ID NO: 371534 - DNA, 840 bp, Salmonella enterica
atgtttaaaggcgatatgaataaaaaacgcgccaaagcgttacagaaagtgaaagaagccatcacgcttcacggtgggcaaactatcctcagcacaggaataactggcgacgatgcgcgcctggcgaaagccgtgtgtgaggctggcgttaagcttctggagccgaaccaccctgcgttggcgctggcgcgtggacacaaaggcgtgagcaacatgcacgcggcggagcagattcgtcacgaaatcaccaacagccagatggctgaggccgtacacggtgtgcgtaatgtggtcccggacgatatttttatcaccgttggtatcgccggcggttttaccgaaaccttaccggtgccgctcagcgaaacggaaattctggagattgcccgcgctggagccgacggtttacatacgcataaatccgactgggacgatctgcaggacatcgttaatctcgcccatcaatatggtctgaccgtcgatgcctatattggccatcctgacgatctgcatactttcggtattcctgcacgcacgccggaagaggtcgccagcgtggcgaagcggatgcaggatatcggcgtggatatgattggtctgatgaccggcatgagctatgaaggcgtagcggcaggcgatatcccgcagatgattaaagatcgcctgcgggcgttggtcggcgcggtggatgttccgacgctggcggaaggcgggattaacctcgccaacgcgaaagcgtttaaagataccggagtcaatattctggtggtcggtacggctatcgacaacatggtgtgcaacgccgccaaagaagccgttacgccgtttattgttcattga

SEQ ID NO: 371535 - DNA, 864 bp, Salmonella enterica
atgttgttaatcaccgatctggatggaacattactcacctcgcagaaaacaatcagcccgcgcacgcgtcaggcgctgattgcgttccgccaggacggtggtctactggcggcatgttccgccagaccggtctcctcaatggtacgcctgctacgccaacaacaggttgataggttgtttagctggtgcgccggttttaactgcggacaccttctggagatggcgggacagcgcattattcatgctgcccctctgaccgccacagacctgtggaatattgaccagcatatttctctttcccgctatcaccaccatttttttagtgccgaagcaattcaccatcgtgacgatagactgattgcgcactggacaacatatgaggctcgcttatttggattaccgcttataactgaaactgcagaaaatatctttaatcgtcgcaacatatataaaattacacttgttgccgcatctccggagatagataatctgtgtacagaagtgaataatcacctgccttgtggatattatgcggttgtcacgggagagaattatattgatattcaaagatccgatataaataaagggtgcataatagaacaattaattcattatttaaatatatcttctgacaaggtggtcgcgattggcgatcagcagaatgatgtcagcatgtttgccgccgccggaatcagcatcgcaatgggcaacgcgccggatgcagtaaagcggcaggccggctatgtgactgccacgaatgatgaggagggtatcgtccatgcgttggagtggttgcgttgccttacgcatccagttaccatgcgccaaaggttgacggcggcgaaagataatgaatccaattaa

SEQ ID NO: 371536 - DNA, 759 bp, Salmonella enterica
atgaatccaattaaaagacgaaaacatattcttgatgaattaaacaaattcggtgaagtcaccgttattaaattatcggaaatgctcaacgtcacctcggaaaccattcgtcgcgatctctccttactggaatcagaaggcaaaatcactaagattcatgggggcgcagtcaaaaagcaagttgtccaggaggatgcgtttagcgcaagaatagaggcgcatcgcgaagagaaaatagcgattggcaaacttgccgccgaaatggtcagtgaacgggatacattgtttattgactcctgtacaactaaccttattctggccgagcaattaccgcctctcgctttttccgtgattaccaattcagccctgattgccgataaaattaaagagcataacctgcaggcccgcgtgtatgtattaggcggcgaatatgattaccattttcgcgccaacctcggcgtctcggtgtgtcagcagattaacgcaattcacgcggatatctgttttattggcgctggcggcatttctccccagcatggcgtgttggtgaagagctttgaagaagcctacgttgccaaagccatgattgcgatgagcaaaaaatcagtgattctcgccgaccataccaaatttggtcaggacggtgtgatgtgcatcgcaagcgtaaaagaaatcgataacatcatcacggataaaggatttacgtcaacgggttatacgccacaggatttcgccggaaagctgcggattgctgactga

SEQ ID NO: 371537 - DNA, 273 bp, Salmonella enterica
atggcactcccccgcattacccaaaaagagatgaccgagcgcgaacagcgcgaactgaaaacgttgctggaccgcgcccgtattgcgcacggtcgtccgctgaccaattctgagaccaacagcgtaaaaaaggagtacatcgataagctgatggcgctgcgtgaggctgaagcgaaaaaagcccgccagttgaagaaaaagcaggcgtataaacccgatacggaagcgtcattctcctggtcggcgaatacgccgacgcgcggcagacgttaa

SEQ ID NO: 371538 - DNA, 870 bp, Salmonella enterica
atgctgaccgacacatctatccggcttaataaatatatcagtgaaagcggcatctgttcgcgtcgcgaggcggaccgttttatcgaacagggcaatgtctttatcaacggcaaacgcgccgccattggcgatcaggtagtcgccggggatgttgttaaagtaaatggtcggttgattgagccgcgagaagcggatgatttagtgctgattgcgctgaataaaccggttggcattgtcagtaccactgaagacggcgaacgcgacaatattgtcgattttgtgaaccacagcaaacgtatcttcccgattggtcgtctggataaagactcgcaggggctgatatttctgactaaccacggcgatctggtcaataagattctgcgtgccggtaacgatcacgaaaaagagtatctggtgacggtggataaaccgattaccgacgagtttattcgtggtatgggcgctggcgtgccgattctgggtactgtcaccaaaaaatgtaaggtgaaaaaagaggcgccgtttgtctttcgcattaccctggtgcagggattaaaccgtcagatccgtcgtatgtgtgaatactttggttatgaagtgacgaaactggagcgtacgcgcattatgaacgtcagcctgagcgggattccgctgggcgagtggcgcgatctgacggacgatgagctgatcgatctgtttaaattgattgagcgttcctcttccgaagccaaaccaaaggccaaagcgaagccgaagaccacgggtattaagcgaccggttattgcgatcgaaaaaagcaatgagaaagcgcgcccggcatcaagcggtaagcgctttacctcgccgggacgaaagaagaaaggacgttaa

SEQ ID NO: 371539 - DNA, 540 bp, Salmonella enterica
atggcaaaactgaccttacaagagcaactgctacaagcgggattagtgaccagcaaaaaaatggccaaagtccagcgcacggctaaaaaatcacgcgttcaggctcgtgaggccagagaggcggtggaaaaaaataaaaaggcgcaacttgagcgtgataaacaactcagtgaacagcaaaaacaagcggttttagcgaaagagtttaaagctcaggttaagcaacttattgaaatgaatagaatcaatgtatctaaaggcgatattggttttaacttcaccgataataacgtcatcaaaaaaatagacgtggataagctcactcagacgcaactgattaatgggcgtctcgcgattgcgcgtctggttatcaataacagcggtgaatgtgaatatgcgattattcccgcgagcgtcgccgataaaatcgcacaacgagatgcggacagtattgtcgtaaacagtgcgctgagtcaggaagagcaggacgaagatgatccgtatgccgattttaaagttcccgacgatttgatgtggtaa

SEQ ID NO: 371540 - DNA, 603 bp, Salmonella enterica
gtgtttattccgtttgccggcgtcacgcaaacatgggacgagtacacggataaaaccgcagaggtacttgcgccattagggataaacgtcacagggattcatcgtgtcgccgatccgcttgcagcgattgagaaagcggaaatcattattgtcggcggcggaaatacctttcagctactgaaagaatcgcgtgaacgcgggctgctggcgccgatggcggacagggtaaaacgcggcgcgctgtatatcggctggagcgcgggcgccaaccttgcctgcccgactatccgcacgaccaacgatatgccgatcgtcgatccaaacggtttcgacgcgctggatctgttcccgctgcaaattaatcctcacttcactaacgccttgccggaaggtcataagggcgagacccgcgagcagcgtattcgcgaactgctggtggtcgcgccggaactgacagtgattggtttgccggaaggtaactggattcaggtgagcaacggccaggcggttctcggcggcccgaataccacctgggtgtttaaagcgggcgaagaggccgtggcgctggaagcggtcatcgcttttaatccctggccacattga

SEQ ID NO: 371541 - DNA, 1632 bp, Salmonella enterica
gtgttaactttgctccatctactttctgccgttgcgctgttggtatggggaacacatatcgttcgtactggcgtaatgcgcgtgtttggcgcgcgtctacgcactgtcctcagccgcagcgtggaaaagaaaccgctcgccttttgtgcgggtatcggtgttaccgcgctggtacaaagcagtaacgccaccactttattggtaacgtcgtttgtcgcccaggatcttgtcgccctgacgccagctctggtgattgtgctgggcgctgatgtgggtactgcgctaatggcgcgtattctcacctttgacttgtcgtggctatcgccgctgctgatttttattggcgtgattttctttttgggacgtaagcagtcccgcgccgggcagctgggtcgcgtcggtatcgggcttggcctgattctactggcgctggagctgattgtgcaggcagtgacgccgatcactcaggctaatggcgtgcaggtcattttcgcgtcgctgacgggcgacattatgctggatgcgctgattggcgcgatgttcgctattatcagttattccagcctggcggcggtgttgctgacggcgaccctgacggcggcggggattatatcgttcccggtggcgttgtgcctggtcatcggcgccaatctgggatcgggcttgttggcgatgctcaacaacagcgccgccaatgctgccgcgcgtcgcgtagcgctcggcagcctattgttcaaattgatcggcagcctggtcatcctgccgtttgtccatccgctggcgaatctgatggatgagctatcgctaccgaagtcagagctggtgatctatttccacgttttctataacctggtgcgctgcctggcgatggtgccatttgccgagctgatggcgcgtttttgtaaacgaattattcgtgatgagcctgaactggatacccatctgaagccgaaacatctggatgtcagcgcgctggatacgccaacgctggcgctggctaatgctgcccgtgaggtgttgcgcattggcgatgcgatggaacagatgatggaagggctaaaaaaggtcatgcacggcgagccgcgtgaagagaaagcgctgcgcaagctggcggatgacgttaacgtgctctacaccgcgattaagctttatctggcgcgaatgccgaaagacgagctggcggcggaggagtcccgtcggtgggcggagattattgagatggccctgaacctcgaacaggcgtcggatattatcgagcgaatgggcagcgagattgccgacaagtcgctggcggcgcgtcgggcattttcagaagaaggattgaaagagctggatgcgctttacgatcaactgctcagtaatctgcaactggcgatgtcggtctttttctccggcgatgtcaccagcgcccgtcggttgcgccgcagtaaacatcgcttccgtatacttaatcgccgatactcacatgcgcatgtcgaccgcctgcaccagcagaacgtgcaaagcattgaaaccagctcgctccatttagggctgctgggcgatatgaagcgtcttaactcactgttctgttcggtcgcctatagcgtactggaacagccggatcaggacgaggaacggggcgagtattaa

SEQ ID NO: 371542 - DNA, 3684 bp, Salmonella enterica
gtgagcagcaaagttgaacaactgcgtgcgcagttaaatgaacgtattctggtgctggacggcggtatgggcaccatgatccagagctatcgtctacatgaagaagatttccgcggggagcgctttgccgactggccctgcgacctgaaaggcaacaatgacctgctggtactcagcaagccggaggtgatcgccgctatccacaacgcctactttgaggctggcgcggatatcatcgaaaccaacacctttaactcgacaaccattgcgatggcggattaccggatggaatccctgtcggcggaaatcaactatgcggcggccaaactggcgcgcgcctgcgccgatgaatggacggcgcgaacaccagaaaaaccacgttttgttgcgggcgtgcttggtccaactaaccgcacggcctccatttcgccggacgtcaacgacccggcgtttcgtaatatcaccttcgatcagctggtggcggcctaccgtgaatccaccaaagcgctggtggaaggcggggcggacctgatcctgattgaaaccgtctttgacaccctgaatgcgaaagcggcggtgtttgcggtgaaagaagagtttgaagcgctgggcgttgatctgccgatcatgatttccggcaccatcaccgacgcctctggtcgtaccctctccggccagacgaccgaagccttttataactcgctgcgccacgccgaggcgctcacttttggccttaactgcgcgctggggcctgatgagctgcgccagtacgtccaggaactgtcgcggattgccgaatgctacgtcaccgcgcacccgaacgccggcctgccgaacgctttcggcgagtacgacctcgacgccgacaccatggcgaaacagattcgcgaatgggcggaagcgggcttcctgaatatcgttggcggctgctgtggcactacgccggagcatatcgccgccatgagccgcgccgttgccggtttgctgccgcgccagctgccggatatcccggtcgcctgccgcctttccggcctggagccgctgaacattggtgacgatagcctgtttgtgaacgtcggcgaacgtactaacgtcaccggctcggccaaatttaaacggctgatcaaagaagagaaatacagcgaagcgctggatgtcgcccgtcagcaggtagaaagcggcgcgcagattattgatatcaatatggatgaggggatgctcgacgccgaagcggcgatggtgcgtttcctcagcctgattgccggtgagccggacattgcccgtgtaccaatcatgatcgactcctccaaatgggaggttatcgaaaaagggctgaagtgcattcagggtaaaggcatcgtcaactctatttcgatgaaagagggcgtggaagcctttattcatcatgcgaagttgctacgtcgctatggcgccgcagtggtggtgatggcctttgatgagcaggggcaggccgatacccgcgcgcgtaaaatcgaaatttgccgccgagcctacaaaattctcaccgaagaggtgggtttcccgccggaagacatcatcttcgacccgaatatcttcgccgtggcgaccggtattgaagagcacaacaactacgcgcaggactttatcggcgcttgcgaagacatcaaacgcgagctgccgcacgcgctgatctccggcggcgtgtctaacgtgtccttctcgttccgcggcaacgacccggtacgtgaggctatccacgcggtattcctctactacgccatccgcaatggcatggacatgggcatcgtcaacgccgggcaactggcgatttatgacgacctgcctgccgaactgcgcgatgcagttgaagatgtcattcttaaccgtcgcgatgacggcaccgagcgtttgctggatttggcggagaaataccgcggcagcaaaaccgacgaagctgccaacgcccagcaggcggaatggcgtagctgggacgtgaaaaagcgtctcgaatactcgctggtgaaaggcatcaccgaatttatcgaacaggataccgaagaagcccgtcagcaggccgcccgcccgattgaggtgattgaagggccgttgatggacggcatgaacgtggtcggcgacctgttcggcgaagggaaaatgttcctgccgcaggtggtgaaatccgctcgcgtgatgaaacaagcggtggcctacctggagccgtttattgaagccagcaaagaaaaaggctccagcaacggcaagatggtgatcgccaccgtgaagggcgatgtgcacgatattggtaaaaatatcgttggcgtggtgctgcaatgtaacaactacgaaatcgtcgatcttggcgtgatggtgccagcggagaaaatcctcagaacggcgcgtgaagtgaatgccgatctgatcggtctttccgggcttatcaccccgtcgctggacgaaatggtcaacgtggcgaaagagatggagcgtcagggctttactatcccgctactgatcggcggcgcaaccacttcgaaagcgcatacggcggtgaaaatcgagcagaactacagcggtccgacggtctacgtgcagaatgcttcgcgtaccgtgggcgtggtggcggcgctactctccgacaaccagcgcgatgactttgtcgcccgtacccgcaaagagtacgaaaccgtgcgtattcagcacgcccgcaaaaaaccgcgtacgccgccggtcacgctggaagcggcgcgcgataatgatctggcattcgattgggaacgctacaccccgccggtagcccaccgtctgggcgtgcagggggtggaagccagcatcgaaactctgcgcaactacatcgactggacgccgttctttatgacctggtcgctggccggcaaatacccgcgcattctggaagatgaggtggtgggcgttgaggcgcagcgtctgtttaaagacgccaatgatatgctggataaactcagcgccgagaagctgttgaatccgcgtggcgtggtgggcctgttcccggctaaccgtgtgggtgacgacatcgaaatctatcgcgacgcaacccgtactcatgttctgacggtcagccaccacctgcgccagcagaccgagaaagtcggttttgccaactactgtctggcggattttgtcgcgccgaaactgagcggcaaagcggattacatcggtgctttcgcggtgaccggcggtctggaggaggatgcgctggcggacgccttcgaagcgcaacacgacgactataacaagatcatggtgaaagcgattgccgaccgtctggcggaagcgtttgccgagtatctgcatgagcgtgtacgtaaggtttactggggatatgcgccgaacgagagcctgagtaacgacgaattaatccgcgaaaactaccaggggattcgcccggcgccgggttatcctgcctgcccggaacataccgaaaaaggcactatctggcagctactggatgtcgaaaaacacaccgggatgaagctcaccgaatctttcgccatgtggcctggcgcgtcggtctccggctggtacttcagccatcctgagagcaaatacttcgcggtagcgcagatccaacgcgatcaggtgacagattatgctttccgtaaaggaatgagcgttgaggacgttgagcggtggctggcgccgaacctggggtacgatgcggactga

SEQ ID NO: 371543 - DNA, 825 bp, Salmonella enterica
atggttgcccctgttcccgcgaaacgcgggagaaaacctgccgctaccactgcacccgtaaccgggcaggttcagtcattaactcgcggtctgaagctgctggagtggattgccgagtccaacggcagcgtcgcgctgaccgaactggcgcaacaggcgggtttgcctaattccacgactcaccgtctactcaccaccatgcagcagcagggttttgtccgccaggttggtgagctgggccactgggccgtaggcgcacacgcgtttatcgtcggcagcagcttcttacagagccgtaatctgctggcgattgtccatccgattttgcgcaagctgatggaggactccggcgaaacggtaaaccttgccgtactcgaccagagcgaccatcaggccattattatcgatcaggtgcagtgtacgcagctgatgcgtatgtccgcgccgatcggcggcaagctgcccatgcacgcctctggcgcgggcaaggcgtttttatcacagctcagtgaggaacaggttaccagtctgctgcaccgcaaggggttgcacgcttatacccatgcgacgctggtgtcgccgctgcatctgaaagatgacctcgcccaaacacgcaagcgcggctattcctttgacgacgaagaacatgcgctcggtctgcgctgcgtggcctcgtgtatttatgacgaacaccgcgaaccgtttgcggccctctctatttccggcccctgctcacgcattaccgacgatcgcgtcaccgaacttggcgccatggtgattaaagcggcgaaagaggtgacgctggcctatggtggaactcgctga

SEQ ID NO: 371544 - DNA, 435 bp, Salmonella enterica
atggtggaactcgctgaaatgagcagcctgaaattatactggcaggagaagtacccacaggccttctgttggtctttcggtgattcgccggcgctggccgacgagctggcggcgctagtggtcgccggtaaaaagcgtggcacctgtagctcgctggttagctatcagaaagagcagccccctgtcacgcccgggtcatatcacattgtgctcaacggcacaggcgacgccgtgtgcgtcatacgcacgctggcgctcaggctgatccgttttaacgagatgagcgccgatctcgccgcactggaaggcgaaggcgatcttagcctggcgtactggcaagcggcacaccgggccttttttgagcgcgagggtaattggtcgccggagatggaactggtttacgaagagttcgccgtactcgagatcgcgccgtaa

SEQ ID NO: 371545 - DNA, 1752 bp, Salmonella enterica
atgccgcgtggcctggaattactgattgctcaaaccatcctgcaaggctttgacgcgcagtatggtcgatttctggaagtgacttccggcgcgcagcagcgttttgaacaggccgactggcacgccgtccaacaggcgatgaaaagccgtatccacctctatgatcatcatgtgggtctggtggtggagcaactgcgctgtattaccgatggcaaaagtaccgacgcggatttccttttacgcgttaaagagcattacacccggctgttgccggattacccgcgcttcgagattgcggagagctttttcaactccgtttattgccggttatttgaccaccgctcgttaacacccgagcggttgtttattttcagttcgcaaccggagcgccgctttcgtactatcccgcgcccgctggccaaagacttctttcccgatcacggttgggagccgctgttgatgcgcatactcagtgacttaccgctgcgtctgccctggcagaataaaagccgggatatccgctatattatcgcgcacctgactgaaacactgggcgaggacgcgctacctcgctgccatgtccaggtggcgaatgagttgttttaccgtaataaagcggcctggctggtaggtaaattaaccacacctgacggtacgctgccgtttttactgccgattcatcgcactgatgagggtgaactgtttgtcgatacctgcctgaccaccacggcagaagcgagcattgtgtttggttttgcccgctcttattttatggtgtatgcgccgctgcctgccgcgctggttgagtggttgcgtgaaatcctgccgggtaaaaccactgccgaactgtatatggcgattggctgccagaaacatgcgaaaaccgaaagctaccgcgaatatttatgttatctggctgaaagtgatgagaaattcattgaggcgcctggtatccgcggcatggtgatgctggtgtttaccctgccaggtttcgaccgggtatttaaaatcattaaagacaaattcgccccgcagaaagagatgtctgccgctcatgtgcgtgcctgttatcaactggtaaaagagcatgatcgcgtcggtcgtatggcggatacccaggagtttgagaatttcgtactggataaacggcaaattgatccggcgctgatggcgcttttacggcaagaagtgccagagaagattaccgatcttggggaacatatcgtcattcgccatctctatattgaacggcgcatggtgccgctcaatatctggctggaacaggtagaaggccagcagttgcgtgatgcgatagaagaatatggtaatgcgattcgccagcttgccgccgctaatattttccccggcgatatgttgtttaaaaactttggcgttacccgtcatggtcgcgtggtgttctacgactacgatgaaatttgctacatgacggaagtgaatttccgcgatattccgccagcgcgttatccggaagacgaactggccagcgaaccctggtatagcgtctcgccgggtgatgttttcccggaggagtttcgccactggctgtgtgccgatccgcgtatcgggccattgtttgaagagatgcatgccgacctgtttcgcgccgattactggcgcgcgctacagacgcgtattaaagaagggcatgtagaagatgtgtatgcctatcgacgtagacagcgctttagcgtgcgttacggcgcgatctcgagtacggcgaactcttcgtaa

SEQ ID NO: 371546 - DNA, 1305 bp, Salmonella enterica
atgaaaacccgtactcaacaaatcgaagaattacagaaagagtggacacaaccgcgctgggaaggcatcacccgcccgtacagcgcggaggaggtggtgaaattacgcggctcggttaacccggaatgcacgctggcgcagctcggcgcagcgaaaatttggcggctgttgcacggtgaagcgaaaaaaggctatatcaacagccttggcgcgctgactggcggtcaggcgttgcagcaggcgaaagccggtattgaggcgatttatctttcaggctggcaggtagcggcagatgccaacctggcatccagcatgtatccggatcaatcgttgtacccggcaaactctgttccggcggtagtggatcggatcaacaacacttttcgtcgtgcagatcagatccagtgggcatccggtattgaacccaatgatccgcgctatgtggattacttcctgccgatcgttgctgatgcggaagccggttttggcggcgttctgaatgccttcgaactgatgaaatcgatgattgaagccggtgcagcggccgttcacttcgaagatcagctggcgtcggtgaagaaatgcggccatatgggcggcaaggtgctggtccccacgcaggaagcgattcagaaactggttgctgcgcgtctggccgctgatgtgatgggtgtcccgacgctggtgattgcgcgtaccgatgcggatgcggcagatctgattacttccgactgcgatccctatgacagcggttttattaccggcgaacgcaccagcgaaggtttctaccgcacccatgcgggcattgagcaggcgatcagccgcggtctggcgtatgccccgtatgccgatctggtatggtgcgaaacttctacgccggatctcgaattggcgcgtcgttttgccgatgctatccacgcgaagtatccgggcaaactgctggcctataactgttcgccatccttcaactggcagaagaatctggacgacaagaccattgccagcttccagcagcagttgtcggacatgggttacaaataccagtttattaccctggcgggcatccacagcatgtggttcaacatgttcgacctggcgcatgcatacgcgcagggcgagggcatgaagcactatgttgagaaggttcaacaacccgagttcgccgcggcgaaagacggctacacctttgtttcccaccagcaggaagtgggtacaggttacttcgacaaagtcaccaccattattcagggcggcgcgtcatccgttaccgcgttaacaggatcgacggaagaatcgcagttttga

SEQ ID NO: 371547 - DNA, 1602 bp, Salmonella enterica
atgaatccacaggcaaccacaactgatgaattaacctttaccaggccgcaaggcgagctggaaaagcaagtcctgaccgctgaagcagtcgagtttttgacggagttagtcacccgttttacgccaaaacgcaataaactcctggctgcacgtatccagcaacagcaggatattgataacggtaagttgcctgattttatttcggaaaccacttccattagagaaagtaattggcagattcgtggtattccggcggatttacaggatcgccgagtagaaattaccgggccggttgaacgtaaaatggtgattaatgccctgaacgcaaatgtgaaagtgtttatggcggattttgaagactcgctggcgccggactggaataaagttattgatggtcaaatcaacctgcgtgatgcggtgaacggcaccattagctataccaacgaagccggaaaaatctatcagctcaagcccgatccggccgtattgatttgtcgtgtacgtggtctacatctgccagaaaaacatgttacctggcggggggaagccattcccggcagcctgtttgattttgctctgtactttttccacaactataaagcgctgctcgctaaaggtagcggcccgtatttttacctgccgaaaacgcaagcctggcaggaggcagcctggtggagcgaagtcttcagctacgccgaagaccgctttaacctgccgcgcggtacgatcaaagcgaccctgttgattgaaacgcttcctgctgttttccagatggatgagattcttcatgcgttgcgtgatcatattgtcggtctcaactgtggtcgctgggattatattttcagctatatcaaaacgttgaaaaatcacccggatcgcgtcctgccggacaggcaggtggtaacgatggacaaaccgtttctgagcgcctactcgcgcctgctgatcaaaacctgtcacaagcgcggcgcgttcgcgatgggcggtatggcggcgtttatcccgagcaaagacgttgaacgcaacaatcaggtccttgccaaagtgaaagcggataaagcgctggaagcgaacaacggccacgacggcacgtggattgcgcatcctgggttggcggataccgcaatggccgtctttaacgaggtactgggcgagcacaaaaatcagctgttcattacccgtgatgaagatgcgccgattaccgctgaacagttactggagccatgtgaaggcgaacgcacagaagcgggaatgcgcgccaatattcgcgtggcagtgcagtacattgaagcgtggatctccggcaatggctgtgtaccgatttacggtctgatggaggatgccgcgacggcggaaatctcacgaacctctatctggcagtggattcaccatgagaaaacactgagcaatggaaaacccgtaacgaaagcgcttttccgcgaaatgttggcggaagagatgcgggtaatccaggacgaactgggcgagcaccgctacagcagcgggcgcttcgacgatgccgcacgtctgatggagcaaatcaccacctcagatgacttaatcgacttcctcaccctgccgggctatcgcttactggcttaa

SEQ ID NO: 371548 - DNA, 930 bp, Salmonella enterica
atgccgattcgcgtgctggacgagctacccgccgtcaattttttacgtgaggagaatgtcttcgtcatgacgacttctcgcgcatcaggtcaggaaattcgcccgctaaaggtacttatccttaacctgatgccgaagaagattgaaacggaaaatcagtttctgcgcttgctatcgaactcgccattgcaggtcgatattcaactgctgcggatagatgcccgcgagtcgaggaacacgccagccgagcacctgaacaacttttactgtaacttcgacgatatctgcgatcagaactttgatgggcttatcgtgaccggagcgccgctgggtctggtggaatttaatgacgtggcttactggccgcagattaggcaggtgcttgaatgggcgaaagatcacgttacttcgacgctatttgtctgttgggccgttcaggccgcactcaatattctgtatggtatccctaagcagacccgtacagataaactttccggcgtctatgaacatcacatccttcatccacatgctctgttaacgcgtggttttgatgattcgtttcttgcgccacactcacgctatgccgatttcccggcggcgctgatacgggattatacggatcttgaaattctggccgaaacagaagaaggggatgcgtacctgtttgccagcaaagataaacgtattgcgtttgtcaccggtcatcctgaatatgacgctcatacgttagcgggtgaatattttcgtgacgttgaggccgggttaaatccggaggttccgtacaactatttcccaaaaaacgatccgcaaaacataccgcgcgcaacctggcgcagccacggtaatttactgtttactaactggctcaactattatgtctaccagattacgccatatgatctgcgtcacatgaatccaaccctggattaa

SEQ ID NO: 371549 - DNA, 438 bp, Salmonella enterica
atgatgattaacattcgtcgttcaaggcatgaggaaggggaaaaactgattgcgatctggcgtcgctcagtcgataccacgcacgattttctgtcaaacgcttatcgggccgaactggaagaactggtgagcgattttctgccagaagcgccactatgggttgccgtgaccgatcaggatgagccggtaggatttatgctgcttaccggcgaacatatggatgcgctgtttgtcgatccggacgtgcgtggtcagggtatcggtaagagattagttgaacatgcgttaacactggcgccggggttgacaaccaatgttaacgagcaaaatacacaagctgttggattttataagaaaatgggatttaaggtgacgggacgttcggaggtcgacgatcttgggaaaccgtatccattgttgaatttaatttatccgtga

SEQ ID NO: 371550 - DNA, 279 bp, Salmonella enterica
atgcgtaaagcccgttttactgagcatcagatcattgccgtaattaaatcggttgaagccggacgaaccgttaaagatgtctgccgggaggccggtatatctgaagccacctggtacaactggaagtccagatacggcggcatggaggcttctgatattaaaaagatcaaggatcttgaggacgagaatcggcgtctcaaacagatgtttgccgacctgagccttgagaaccgggcgctgaaagacgttatcgaaaaaagctttaaaaccagcctttaa

SEQ ID NO: 371551 - DNA, 249 bp, Salmonella enterica
atggatccttttgtgattccacgggtatccctgccgccgcagaacctggaaaagttttggaaaaccgtaccgtgggtatcgctctgccactgcctgcaacgcgacaataacgggttcgtcacgcgtgttatccggacggtaatggtaaaccgttctgctcaggttcagactccggcaggcctgacggatactgagtccaaatgtcgttatcagatgagtgaccagctcacgcttaaaggctggttttaa

SEQ ID NO: 371552 - DNA, 336 bp, Salmonella enterica
ttgccggtgcgtaatccctcgccactggccacaccggaagcgcttaaccagagctggtctgtcgattttatgcatgatgatctggtctgtggccgtcgttttcgcacgttcaatgtcgttgatgactttaaccgtgaggcattgtcgattgaaatcgatctgaatctgccagctttgcgcgtggtccgtgtactcgacaggaccgcggcaaatcgcggctatccggttatgctacgcatggataatggtccggaatttatctcacttgcactggctgaatgggcagagcaacatgcagtaaaactggaatttattcagccgggtaagccgacgtag

SEQ ID NO: 371553 - DNA, 165 bp, Salmonella enterica
atgacctctgacaaaaccctaaagcaagcgatatcaaatattactatctggcgcaaaggcgaacagcgagcgccgcataagccgttattgctgttatatgtcctctcgcactatcggcagggccacgatcgtctatttgattatggttctgaaattcatgagtaa

SEQ ID NO: 371554 - DNA, 717 bp, Salmonella enterica
gtgggacgtaaatgggcaaatattgttgctaaaaaaacggctaaagacggtgcaacgtctaaagtatatgcaaaatttggtgtagaaatctatgctgcggctaaacaaggtgaaccagacccggaatcaaactcagctttaaaattcgttattgaacgtgcgaaacaagcacaggttccaaaacatgttattgataaagctattgataaagccaaaggtggcggagatgaaacgttcgtgcaagggcgttatgaaggctttggacccaatggttcaatggttatcgctgaaacgttgacgtctaatgttaaccgtacgattgctaatatccgcacaattttcaataaaaaaggcgggaatatcggagcggcaggtgctgtcagctatatgtttgacaatactggagtgattgtatttaaaggaacagaccctgaccatattttcgaaattttgcttgatgctgaagttgatgttcgtgatgtaaccgaagaagaaggaaacatcgttatttatactgaagctacagacctgcacaaaggaattgcagcgctaaaagcagctggaattactgaattttcaacaacagaattagaaatgattgctcaatcagaagttgaactttcaccagaagatttagaaatctttgaaggacttgttgatgcccttgaagatgatgatgatgtgcaaaaagtatatcataacgttgcaaacctctaa

SEQ ID NO: 371555 - DNA, 1626 bp, Salmonella enterica
atggatatcagcgccgttatttttgcaacgcatcgcattcggctattacccgatgaaggcaaaatcccctgggacgagccagccttcagccaacgcatgctggaaaatcatctgtcacaggaccacgactgggccagccgccggctaaccgtgattgagcaacaggtaacatggattacccgtcagttacccgctggcgcccgcattctggatctcggctgtggacccggtttttatacccgcctgttagcggagcgtgggtttcactgcacaggcgtagatttctctccggcatccatcacatgggctcgccagcaggcgcaagccgcaaacctgaatattgactacattcagcaagatattcgtacataccaccccacggaacctttcgatttcattatgatgacgtttggggaactgaatgtctttagcgctgcggatgcgcaaagcctcatcagtcattgcgcgcagtggttgaaaccggacggcaaactgcttgttgaagtgcataccttcgatgaagttaaacgccagggcatggcgcagccatgctggcagcgttgtccgcacggcctgtttcttgccgagcctcatctgctgttaacggaaaatgcctgggatgaagaggcccaaaccagctcaacgcagttctgggcgatagcggaaaacggctgtaccacccgtttcggcagtcaaatgaaggcctggcgcgatgatgaatatatcagcctgcttggtgatgctggcttcactgtgttgcagcgcccggacagtcacacctggccggtcggcgagacttttgcaggcaagctgtttgcgctactggctgaaaaagcccctcccgctgagggaatcaccctcagtaaaaggaataacccaatggatatcccacgtatttttaccattagcgaaagcgaacaccgtatccataatccgtttacagcggaaaagtacgccacactgggccatgcgttacgcatgaagccaggcacgcggattctcgatctcggtagcggttcgggtgagatgctctgcacctgggctcgcgattacggtgttacaggtactggcattgacataagcccgctcttcaccacacaggcaaaacaacgtgcagaagagctcggcgtcagtgaatacgtacattttattcataacgacgcggccggttatatcgacgaggaaaaatatgacgtggcggcctgcgtaggcgcgacctggattgcgggcggtgtcgcggggacaatagatctgctggccaaaagcctcaaacctggcgggatcattctcatcggtgaaccgtactggcgtcagatccccgcaacggaagagatcgcccacgcctgtggcgtctcatccgtcgccgattttcgccccttgcccgagctggtcgcctttttcgaccaactcggctatgacgtagtggaaatggtgctggcggacccgcaaggctgggacagatatgaagccgcgaagtggatgaccatgcgtcgctggctggaggaaaaccctgacgatgagtttgcgcaggaggttcgaacagaactgacggtagcccccaaacgtcacgtcacctggacgcgagaatactttggctggggcgtatttgcgttaatcgcgcgataa

SEQ ID NO: 371556 - DNA, 258 bp, Salmonella enterica
atgaatttatcccgtcaggaacaacgtaccttacacgttctcgccaaaggcggacgcattacgcacatccgcgatgcgtcaggccgcgtcaccgccgttgagtgctatagccgcgaagggctgttgctcgccgattgcacgctcgctgtattcaaaaaactcaaaaccaaaaagctgatcaaatccgttaacggtcagccctaccgcattaatacaaccgggctgaacaacgttcgcgcccagcctgataatcgctaa

SEQ ID NO: 371557 - DNA, 192 bp, Salmonella enterica
atgtttatgtatgaaaaatatttaagtgatatttttcagtgggttaaaaaaagatttccaacgcaacaaccctgtcaatggctaaaaagatacgccgagattatcaaagcggccattatcgggtatatgaatttaatcaatattcattatggtagcggcgggatctattcaactgacttactaaacgcatga

SEQ ID NO: 371558 - DNA, 609 bp, Salmonella enterica
atgaaagtcatatggactgtcactcctgtggggtatcagcgcatagcgaaacgttgcccttcatgcagcgtaaaacgggacttcacgccttctggggcatttcgggttaattcgcaaaagaaggtactcgatgtctggagtatctataaatgcacacactgcgattacacctggaatatctccctgttctcgcgcctgccagtcagcaaaattaaccgcgatctttatggccgactgatggcgaatgatgccgccacggtgcaatattttgcttatgacaacgcgatcctgaagcgaaacaatgctgaattatcggggcagcctgattttcacattcaggaacggtggctggtcagtatcgcctcccacaagcaggtcagtgttagcgtcaggatttcccgttcttttcaggtcagcctgctgtcgattttgaagaagcaactcctgttaagcgcagccgaaatcaagagacggattgaaacagggcaaataagtggcgtcacgatgaaaatgcttaaatcgcgaaaactgaagaatgcgaaatatgatttgcagctctcagttgaaacactgtatgaccggcgaaggattgttctgacccgtcgataa

SEQ ID NO: 371559 - DNA, 912 bp, Salmonella enterica
atgcacacctttagaccatactcactaaggcatagcgatctgttatatgaagatattccgttagaaatacgcgagcaaataatcttattgattatcaatacgctaggaaactgctcctctttttatgatatgacattatactgctatcataatagtcattctgacgaagtttatcgaagaatatgtaaaacgttgcgcaaagagtatggcttattcaccttatatgcgcattcaacgtcatatctggatgaaatgagtaatctgttattaaaaacagatgataaaagaaagcatattgataccattgagcttgcttttaactatatagatacttaccttcggacctatgaagttacgcttgggttagaaccggataaggcgattagtgaattaaacaatatatttcatgagcatagtttaaaatatcgctatgaaaatggtagaattgtaaggctgcgcagaataaaacggcttaaaaacatatgttattatttgtactctcctggagagtatggctttgtcgaatatgatcttatggaagcgtataatcgcctgatacttaatgattttgcctgtgtcgtaagggaatgtcatgcagccttcagaagcgttcttctcagaattcatgagagaaaaggtatcgtatatcatgaacaagatagtttaaatacactaatggctaatctgatggcgagaggcgttatatctgctgaatatgtacataaatttcattttttaagtgacgtgctggagtcagaaatatttctgccgatggcgccagaaaagtcgcatcatcactacgcaatgatgctccgtatctctgaagagttggcctgtagtatctattatcttactgagcggagtatattttttcttacccagcgggctgaagaagacagtgtcgcgccataa

SEQ ID NO: 371560 - DNA, 462 bp, Salmonella enterica
atgagcactattttaaagccttttttattggcggtaaccctgatgttaatcttaataaggcttggctttgcaacggaggatggagcgataaccatggttaaaacctacagcgcttatgactatttgcagacccgagcgcggttgatgcacgctgtcgccgatcacggtctggtgttatttggggaatttgatcatgccagagcggcacagaatgttaacctgaaaatgccgccgacaacggttctggtctttggcaatcctaaaggcggaacgcctctcatgctggcgcatcccgaactggcactggatttaccgtttcgggtgctcattagccagcaagccgatgggcgaacgttagtcagttatcatcccgctgaaacgctgcaacgttatggtcttgatgccgcagccatacaggctttgaaaaaactggaacagctcgttgaaaaaagtctccactaa

SEQ ID NO: 371561 - DNA, 519 bp, Salmonella enterica
atgacgcgtggattcgacatctatattcccgcgctgtttcctcaccataccccctttcgctatgaacagcaggaggaggcttaccgtcacttttcagcaaatgtcggctttgatcccgccgtcgttaccacattactccacgatctcagaacgcagtacgagacgctaatcgtcgtagggtatagcgtcggcgcaacgctcgcatggctaagtgcagccagtgggttatgcgatggcgtcatttgctattacggttcccgtatacgccagtaccttcatcttgcgcctctctgtccgacactggttattatcgcgcgttatgagccggcgtttgatcccctcgccatgcgacagacgctggaaaagcgaccctgggtgcggtgtaaaatgtacgatgcgcggcacgggttctgtgatgctgatagcgccaccttcgatgccgccttatcgcatcaggtaatggacgatgtgagcgcatttattcgcgacatcactcgtgcaaacacatcgcccgattga

SEQ ID NO: 371562 - DNA, 726 bp, Salmonella enterica
atgatacgggatctgattgttcagacgccgtaccgccccggggagcgcttgccgccggaaagagagatcgctgagaggctcaatgtgacgcgtaccgtcgtgcgtgaagcgctgatcatgctggaaattaaaggtctggttgaagtccgccgcggcgccgggatctacgtgctcgacagcgcggataataacgagatggaaggcgctgacgtcaatcactgtaatgacgccgggccgtttgaactgttacaggcgcgtcagttgctggaaagcaatatcgctgaatttgccgctctgcaggccacccgcgaggacatcattaaaatgcgccaggcgttacaactggaagagcgagagctcgcctccagcgcgccgggcggctcagaaagcggcgatatgcagtttcatctggccattgccgaagcgacccataacagtatgttggtagagctcttccgtcagtcctggcaatggcgtgaaaataatccgatgtggctccagcttcatagccatctgggcgatacgctttaccgtaaggagtggctggtcgatcataagcagatcctcgcggcgttaattaagaaagacgcccgcgcagcgaagctggcgatgtggcagcacctggaaaacgtgaagcagcgtctgctggagttttccaatgttgatgacatctactttgatggctatctgtttgagtcatggccgctggacaacgttgatgcctga

SEQ ID NO: 371563 - DNA, 1014 bp, Salmonella enterica
atgaacacccttcctatcattctgactggcgatcgccccaccggctcgctgcacctcggccattatgtcggttcactgcgccagcgcgtcgcgctacagcaggatcaccaacagtatgtcctgattgccgacctgcagggactcaccgataacggcagtaatccgcaaaaaatccgcgataatattccgcaagtgttagctgactatctggccgtcggcatcgatcccacgctgacgacgatctgcctgcaatccgcgttacccgccctcgccgaattaacggtgctgtatatgaatattgttaccgtcgcccgagtggagcgtaatcctacggtaaaaaatgagattgcccaaaaaggctttacccgttccctgccggtcgggttcatggcgtatcccattagccaggcggcagatatcaccgcctttaaggccgaaatggtaccggttggcgacgaccaattgcccatgattgagcaaacgaatgagatcgttcataagatgaatagtcttttctcctcgccggtattgcgaccctgtcaggcgctcctgagcgatatgggccgtctgccaggcattgacggcagcgccaagatgtcgaaatcgctcggcaataccctgcttctttccgccagcgaagagaccatccaccgtgcggtcagcgcgatgtacaccgatcccaaccatttaaaaattagcgatccgggaaaaatagaaggtaacgtcgtctttacgtggctggatgcgttccatccggataaagccaaagtcgcggcgatgaaagcacattatcaacaaggcggattaggcgaccgtgtctgtaaaaatgagctggagacctgcctgcaagaactgatcgcgcccatacgcgaacgacgggcaacctttattgcagataagggaatgctaatggaattactgaaaaaaggtagcgagcgggcgcatgaggtcactcaaaagacgctacaggaagtaaaacgtggactgggcctgcccacgctattccaggtataa

SEQ ID NO: 371564 - DNA, 447 bp, Salmonella enterica
atggacgccatctatttaaaactggacggtattgaaggcgaaagccggatcaaaggttttgaaaaccaaataaaacttattgcttacaaccacaacccgacaaaacgggagtccggcgaagcgagagggacatatattggagggttgacgctgacaaagccagtcgatcttgctacaccaggcctctatgagcactattgtaacgggaaaacggtgaaagaaggcgtgctgacattatgccgtcgtgataagggcgcaatgctgccatttattatttatacgctcaccaatgtgcgaatttcacgcatgagcaatcatggcgacgccgaaggcagcgccacggagaccgtggatttggtttatagccatattcgctgggatattcccgcattagcgtcgaaaagcaaaacacggcggcctcttcaccgacaggcgctgtggcgatga

SEQ ID NO: 371565 - DNA, 735 bp, Salmonella enterica
atgaaacacaccattgggatactgggggggatgggacctgcggcaacggcggatatgttggaaaaatttgttgaattgcgacatgccagttgtgatcaacaacacatcccgctcattgtcagctctatccctgatattcccgatcgtacagcatgtctgttatccggcgggccttcgccataccgttatctggagcgttatctgcatatgctggaagacgccggggcggagtgtatcgttatcccatgcaacactgcgcattattggtttgatgatttacagaacgtcgcgaaagcgcgaatgatcagcatcctggacgccaccctgggggatattccgccatcggcgcggcacgttggtctgctggcgaccaatgcgacgctggcgaccgggttatatcaaaagaaagctctggcgcgggggctgacgttaattcagccagaagaagcgggacaggcgttggtaatgcaggctatttatacgcttaaacgtggcgataaaactgtggcgcaagcgctgctgctgccgcaaatcgatagccttattgcccgtggcgctcaggcaattattatggggtgtaccgaaattccgcttattgtggccggacatgaacgcgcgatagcgtgcccgatgattgattccacagcgtcgctggtgcgcgcggcgattcgttggtatgagtcctggccagacacccgcgcctctttgaccggggaacaacgccttaccgcctga

SEQ ID NO: 371566 - DNA, 909 bp, Salmonella enterica
atggatgtaactggagcaggtttgcacaatattgagacaaaatggctatatgattttctgacgctggaaaagtgccgcaatttctctcaggccgccattatccgcaacgtatcgcaacccgcttttagccggcggattcgcgccctggaacatgccgtgggcgttgaactgtttaaccgccaggtctcgccgctacagctttccgaacagggtaaaatctttcactctcaggttcgccacctgttacagcagctggaaagcaatctgaccgaactgcgcggcggcagcgattatacgctgcgtaaaatcaagattgccgccgcccactcgctctccctcggcctgttgccgaccatcgttaagcagatgccgacgcagtttacctacgccgttgaggcgatagatgtcgaccaggcggtggatatgttacgtgaggggcaaagcgattttatcttttcctatcacgatgaaaacctgcaacaagcgccgtttgataatatccgcctgtttgagtcgagactgtttccggtttgcgccaacaatggccggggcgagccgcgctatacgcttgagcagccgcactttcccctgcttaattacagtcagaactcctatatgggccggctgataaatcgtactctgactcgccatgctgaactgagtttcagtacatttttcgtctcttcgatgagtgaattgttaaaacaggttgcgatggacggctgcggaatcgcctggttgcccgagtatgctatccgtcaggagattaccgacggacgcctgatagtgcttgatgccgacgaactggttattccgattcaggcttatgcttatcgcatgaatacccgcatgagtcaggtagccgaaacattttggcgcgacctgcgtgggcttcaggccgcgctgtaa

SEQ ID NO: 371567 - DNA, 1173 bp, Salmonella enterica
atgcctgatttatccgccgcggagtttaccttattacagggtgcgcacctgtttgcgccagaagaccggggcatctgcgatgttctactcgcgaatggcaaaattattgccgtcggcgctgacatccccggcgatatcgtaccggactgtgcggtgattaatcttagcggtcgtatgctgtgcccgggctttatcgaccaacacgttcatctgatcggcggcggcggcgaagcggggccgacgacgcggacgccggaagtctccctgagccgcctgacggaagccgggataacaacggtcgtcggcctgcttggcaccgactccgtcagccgtcatcccgcgtcgctgttagccaaaacgcgagcgctaaatgaggaggggatcaccgcctggatgctcacgggcgcttatcacgttccgtcgccgaccattactggctcggtagaaaaagacgtcgcgctgatcgaccgcgtcattggcgtgaaatgcgcagtctccgaccaccgttccgccgcgcccagcgggaatcaactcgccagcatggccgctgaatcacgcgttggcggcctgctgggcggcaaacccggtgtcagcgtttttcatatgggcagcagcaaaaaagggttacagccgctgtatgacatcctggaaaacagcgacgtgccaatcggtaaactgctgcctacccacgtcaaccgtagcgaatcgcttttcgagcaggcgctggcgtttgcgcttaaaggcggcgtaatcgacatgaccaccagtatcccggatcccgtcgcgccggcggagggcattgccagagcggtaaaagccggcgtcccgctttcccgggtgacgctcagttcagacggcaacggcagccagccgctatttgacgctgccggaaatctgacgggcatcggcgtcgcgggcttcgaaagtttgctggagacgttgcagacgctggttaaccactacggattcagcctgaccgatgctctgcgtccgctgacgaccagcgtagccgccttcctcagtctggacggcaaaggcgaaatccgtcccggtaacgatgcggatctgcttgtctttagcgcagatttacgcattgagcaggtgtatgcgcgcggcaaacgcatggtcaatgaggggaaagcctgcgtaaaaggtacctttgaaccggcgtaa

SEQ ID NO: 371568 - DNA, 462 bp, Salmonella enterica
atgacgactcaagtacgtaagaatgtcatggatatgtttatcgatggcgcacgccgcggttttaccatcgccacgaccaacctgttacccaatgtggtcatggcatttgtcattattcaggcgctgaaaattaccggtctgctcgactgggtaggccatatctgccagcccgtgatggcgttgtgggggcttcccggcgaagcggctacggtgcttctggcttcgctgatgagtatgggcggcgccgttggcgtggcggccagtctggctaccgccggcgcgctaagcggccacgatgttaccgtactactgccagccatttacctgatgggaaacccggtacagaatgtcggccgctgtctcggtactgccgaagtcaacgccaaatattacccgcatattatcgcagtctgcgccatcaatgcgctgctgtcgatctgggtcatgcagcttattgtttaa

SEQ ID NO: 371569 - DNA, 672 bp, Salmonella enterica
atggcgcaacaagtggacggggcggccatgccgcttgatacagaaaaggtcgggataaagggatacctggcgttttttctcaccattattttcttttccggcgtattttccggaagcgaaggctggtggcgcgtttttgattttaccgtactcaacgggtcattcggtcatgtgaccggtacgcagacctttcgcggcgcgggcggaacgggcgcgaaagatggcttcctttttgcgctggagctggcgccgtcggttatcctttctctgggtatcatcgcgattacggatgggcttggcggtctgcgggcggcacagcaattgatgacgcccatcctgaaaccattgcttggcattcccggcatttgctcactggcgctgatcgccaacctgcaaaataccgacgccgcggcgggtatgactaaagagctggcgcaggaaggtgaaatcaccgaacgcgataaagtgatttttgccgcctggcagaccagcggcagcgctattatcaccaactatttctcctccggcgttgcggtattcgcctttctggggacgtcagtcatcattccgctggtggtcattctgctattcaaatttatcggcgcaaaccttttgcgcgtctggattaacatcgaagaacgccgtcaccctgcgcaaggagcccaatcatga

SEQ ID NO: 371570 - DNA, 1185 bp, Salmonella enterica
atggttcatgctcagagcgcttcacctcgccatcccatttttacggcgcttttcggtatgatggtattgacgctggggatgggagttggccgctttctgtatacgcccatgctgccggtaatgctggcggaaaagcagctaacgtttaatcagctctcctggattgccagcgccaattatgcagggtacctggcgggaagcttactgttttcctttggcctttttcatctcccctctcgtctacgccccatgctgctggcttcggcggtcgccaccggtattcttattctgtctatggcgatatttactcagcccgcggtcgtcatgttggtgcgcttcctggcaggcgtcgcgagtgcgggaatgatgatttttggatcaatgattgtgttgcatcatacccgccatccgtttgtgatcgccgcgctcttttccggcgtcggggccgggattgcactgggtaacgaatatgtcattggcggtttacattatgcgctttcggcccattcgctatggctgggggccggggcgctcgccggtatattgctattaatcgtggcaatgttgattcccccccgcgctcatgcgctgccgcctgcgcctttagcaagaatcgaaaatcagcctatgccctggtggcaactggcgctgttgtacggtttcgccggattcggctacatcattgtcgctacctatttgccgctgatggcgaaaagcgcgggctctccgctactcacggcgcacctttggtcgttggtcggcctggcgatcattcccggctgcttcggctggctgtgggcggcaaaacattggggtgtcctgccatgcctgaccgcgaacctgttgatccagagcgcctgcgtgctgctgtctctcgccagcgactcgttgttgctgttaatactgagcagtattggttttggcgccacgtttatgggcacaacctcgctggtgatgccgctagcccgacagctcagcgcgccgggcaatattaatttattaggcctggtgacgctaacgtatggtattgggcaaattctcggtccgctcgccgccagtctgtcaggcaatggcgcgtcggcaattatcaacgccacgctttgcggcgccgcggcgctcttttttgccgcgctgatcagcgccgcgcagcagataaaacaaaaacggtttgtgatacgtgaataa

SEQ ID NO: 371571 - DNA, 1272 bp, Salmonella enterica
atgaataaaatcgccgaactcaaacgcgccaaacgcctggcgctctcactgttgctgatagccgccgcgacgtttgtaaccacgcttttcctgccgcccagtttttgggtgctgggcgtaaaagctattgccgaagcggcgatggttggcgcgctggcggactggtttgccgtggtggcgctgtttcgccgcattcccattccgtttatttcacgacatacggcgattattccccgtaacaaagaccgaatcggcgaaaatcttgggcaatttgtacaggagaagttccttgatacgcagtcgctgatcgcgctaatccgccgccatgaacccgcgctgcttatcggaaactggttcagccagccggacaacgccagccgggtcgggcagcatctgctgcaaattatgagcggctttctggaactaaccgatgacgcccgtattcagcggctgctcaagcgagcggtacataaggcgattgataaagtggatctttccggcaccagcgccctgatgctggaaagcatgaccaaaaacgatcgtcaccaggtgttactcgatacgctgatcgcccagcttatcgccctgttacagcgtgacagctcccgaacatttatcgccagacagatcatacgctggctggaaaccgaacatccgttaaaagcgaagattctgccgactgaatggctgggagaacacagcgctgaactggtctccgacgcggtaaattctctgctggatgatatcagtcacgaccgcgcgcatcagattcgtcatgccttcgatcgtgcgacgtataagctgatcgataaacttaaacatgatccggaaatggctgcccgggcagaaaacattaaaagttacctgaaggaagatgaggcgtttaaccgttatctcggcgaaatctgggcggatctacgccagtggttaaaaacagatatcaacgccgaagactcaaaggggaagcagcgcatcgctcatgccggacaatggtttggcgagacgctgatcgccgacgacgcattacgcgcctcgcttaacggtcatctggaacaggccgcgcaccgcgtcgcgccggaattcgccgccttcctgacgcgccacatcagcgataccgtaaaaggctgggatgcgcgcgatatgtcgcagcagattgagcttaatatcggtaaagatttgcagtttatccgcgtgaacggcacgctggtcggcggcgctattggtctggtgttatatttactgtcgcaaataccggcactgctcagtatctaa

SEQ ID NO: 371572 - DNA, 1242 bp, Salmonella enterica
atgcaacggattattcagtttttctcccaacgcgccacaacgttatttttcccgatggcgctgattttgtacgattttgccgcctatctgacgacggatctgattcagcctggcatcattaacgtcgtgcgcgattttaatgctgacgtcagtcttgcgccggcctcggtcagtctctatctggcgggaggaatggcgttgcaatggcttctggggccgctatccgacaggattggccgccggccagtgctgattgcaggcgcattaatttttactctcgcctgcgcggcaacgctgttgacgacctcaatgacgcagtttctggttgcccgttttgtgcagggcaccagcatttgctttatcgcaacggtcggctacgtcacggtacaggaggccttcggtcaaaccaaagccattaagctgatggcgattattacctccattgtgctggtcgctccggttatcggcccgctctccggcgccgcgctgatgcacttcgttcactggaaggtactgttcggtattattgcggtgatgggactgttggcattgtgcggcctgctgctggcgatgccagaaacggtgcaacgcggcgcggtgccgttcagcgcggtgagcgtactgcgcgattttcgtaatgtgtttcgcaacccgatttttctcaccggggcggcgacgctgtcgttgagctacatcccgatgatgagctgggtggcggtgtcgccggtgatcctgatcgatgccggcgggatgagtacttcgcaattcgcctgggcgcaggtgcccgtattcggcgcggtgatcgtggccaatatgatcgttgtgcgcctggtgaaagatccgacccgaccgcgttttatctggcgcgccgtaccaatccagttaagcgggctggcgacattgctcctcggtaatcttcttctgccgcacgtctggctttggtctgtgctgggcaccagcctgtacgcgttcggcattggcatgattttcccgacgctgtttcgcttcacgcttttttccaacaacttgccaaaagggacagtttcagcctcgctgaacatggtgattctgacggtgatggcggtgtcggtcgaagttggccgctggctgtggtttcacggcgggagactgccgtttcacctgctggcagcggtggccggggtgattgtggtcttcactctggcgacactattacagcgcgtgcgccagcatgaggcggcagaactggccgctgagaagtaa

SEQ ID NO: 371573 - DNA, 954 bp, Salmonella enterica
atgaaaaaatcgacgacctcaacaccgcatgatgcggtgtttaaaacctttttgcgccacccggaaaccgcccgcgattttatggagattcatctgccggtgtcgttacgccagctttgcgacctgcggacgctaaagctggagcccggcagttttattgaaaaaaatctgcgagcctattattccgatgtgctttggtcgctgaaaacgcgcgagggcgacggttatatctatgtcgtgattgaacatcagagcacgccggatgcgcatatggcgtttcggctgatgcggtatgcgatggcggcaatgcaacagcatctggatgcggggcataagcatcttccgctggtggtgccgatgctgttttatcacggtgttgatagcccgtatcctttttcgctgtgctggctggatgagtttgcgaacccggaagtggcaagaagactctatgccgctgcctttccgctggtcgatattacggtggtatcggatgatgacattatgcagcaccgccgcattgcgctgctggagctcatccaaaaacatatccgccagcgggacctgctgggactggttgaacggattgcttcgctgttagttactggttgcgctaatgacaggcagcttaaagcgctgtttaattatcttatgattcagcacggacatacgcctcgtttcaccacgtttattcgtgatgtggtagggcatgtcccgcacactaaggagagactgatgacgctgatagagaggatccgcgcagcggatcgcagaaaaggggaacggcaaggaagacaggtcggtctggaggaaggattagaaaaagggctggaaaaaggtcagcatgttgccgcattgcgtatcgccagacagatgctggcggacggacttgaccgcgagactgtccagcggttcaccggccttacggctgaagagcttcaggatgttagtcactaa

SEQ ID NO: 371574 - DNA, 1371 bp, Salmonella enterica
atggcttaccagacagtgaatcctgccaataatcagctcattaaagagtatcccccgcacacgggcgcggatattgaaaccgcgctgcaaaaagctgacgcgctctatcactccgactggtccaagggagagattgaccaacgtctgccggtactgcataagctggctgacttgatcgacagccgtgttgaagaactggcaaaaatcgccagccaggagatgggcaagctcatcgagcagagccgtggcgaagtcaaactgtgtgcgcagatcgctcgctattatgcggataacgcgaagcagtttcttgccccggtgccttataaaaccgagtttggcgacgcgtgggtagaacatcatccgattggcgtcatcatggctgttgagccgtggaacttcccgtactatcagttgatgcgtgtgctggcgccgaacctggccgctggtaacccggtgctggcgaaacatgccagcatcgtaccgcactgcgccgagacatttgcccatctggtgcgtgaagccggcgcgccggaaggcgcatggaccaacctgtttatttcctccgatcaggtggcgaacatcatcgccgacccgcgcgtgcagggcgcggcgctgaccggatctgaaaaagcggggagcgccgtggcggcacaggcggcgaagcacattaaaaaatcgacgctggaactgggcgggaacgatgtgttcgtcgtgctggacgatgccgatcttgagaaagcggtgaaaattggcgtgcaggcacggctcactaatgcggggcaggtatgtacggcggcgaagcgctttatcctgcatgagaaaatcgccgatcaattcctcagccagttcaccgaggcgttcaggaaggtgaaggtgggggatcagatggacgcttctaccgaactggggccgctgtcgtcgaaagatgctctggatacactgaccagacaggtcgaggaagcggtgaaaaatggtgcgacgctgcacgttggcggcacgccgctggaaagcaaaggcaacttctttgagccgaccattctgaccaatattacgcgtgacaacccggcgtactttgaagagttcttcggcccggtggcgcagatgtatgtggtgaaagacgatgatgaggcggtgaaactcgccaacgattcccactacggcctgggcggcgcagtgtttagtcagaatatcgaacgcgctaaacgcatggcctcccggattgaaaccgggatggtttatatcaactggctgaccgacaccgcagcggagctgccgttcggcggcgttaagcgttcgggcttcggacgcgagctatcggatctggggattaaggagtttgtgaaccagaagctggtagtggtgcgccgctaa

SEQ ID NO: 371575 - DNA, 165 bp, Salmonella enterica
atggaattttacgagaaccgccccaggcaaccatttattggctttgtgcagctcagacgggcgctaaaaaggtggtggctgcgtaagcgggcctgtcaggcgctgcgacgaatgagtgatgagcagttaagggatattgggttggaaaagaaggatgtggaataa

SEQ ID NO: 371576 - DNA, 921 bp, Salmonella enterica
atgagcgatatccagcttttccgcctcggtggcgggaaagtacaagaactgccgggcaaagccgcagccattgaaaaagatctgcaaatgctgatcgaatcccatatggaaacgttccttggcgtccgctttctcgagaccgaataccacacgggtaaaacccatcgtgggcgaattgattccctcggcctcgatgaaaataactgcccggtgattattgaatataagcgccacagcaatgaaaacgtcattaaccaggggctgttttatctcgactggctgctcgatcataaagcggaatttcagttgctggtgatggaaaaaataagtaaaaccgcggccaaagccattgactggtccggcacacggttaatctgtattgccgccgattttaataaatacgacgaacatgccgttcagcaaatcaaccgcaatatcaacctgatccgctacaagctttttgccgacgacctgttaatgctggaactggttaacgccgtggtcgaaaatagccctcagtacatcatcgcgaacggttccgtcagcagcggtaaacgccatacccgcacgcagcgcgaacagctctcttcagcctctcccgcgctgctttcattatatgaacagctaaaaagttatgtgctctcactcagtgatgaggttcagtttaaagagcttaagctctatgacgccttccgcctcattcgcaactttctgtgcgtagccgtttatcccgtgaccgacccacacctacgcctgtggctgaaaatcaatccacagcatatccagcttgaagaaggatttagccgggacgtcacaaacattggccactggggaaccggcgacgtcgaattgattgtgcgtaacgaacacgatctggataaagccaaactgctgatcgagaaagcctggcaggaaaattag

SEQ ID NO: 371577 - DNA, 3267 bp, Salmonella enterica
atgcatctctcattcagtgaagcgaagttagaacaggcgataattgaactgttacaggatcagggctatcagcacctgatcggcgataatgtgccgcgttccagcctcgatcaggtgattatcgaagacgatcttcgtcactacctcgccgcacgctatcaggccgacggcatcaccgaagaggagatccagcggctgatcaaacagttcaccaccctgcccgcctccgatctctatgaaagcaacaaaaccttctgcgcctggctggccaacggtttcctgtttaaacgcgacgatcgccagcagaaagatctctatatcgaactgctcgacacccggcatctgcccgccgcgctgcgtgaactgttcgataccgaagatgtgccgctgcaacaggccgcagaaacgccggcaagttatcatcttatccagccgctgaaccgggtaaaaatcgtcaatcagctgaccatcaccggcaaagaaaaccagccgcgtatcccggatgccattctgtatatcaacggcctgccgttagtagtgtttgaatttaaaagtgcggtgcgcgagcaggaagccaatattggcgatgcctggaaacagctctgcacccgctatcgccgcgatattccgcagctgtttgtctataacgcgctgtgcattatcagcgacggcgtcaataaccgcatgggcaacctgtttgcgccgtacgagtatttctattcctggcgcaaagtcaccggcaatgaaaaccgcgagcagaacggcatcccttccctgcactcgatgattcaggggctgtttcacccggtccgcctgctggacgtgatcaaaaactttatctgcttcccggataaagccaaacacgaagtgaaaatctgctgccgctacccgcagtactatgcggcacgcaagctgtattacagcatcgaacgggcgcgtaaacctttcggcgacggcaagggcggcacctactttggcgcaaccggctgcggcaagagctacaccatgcagttcttaacccgcctgctgatgaaaagcgtcgaattcgccagcccaacgatcgtgctgatcaccgaccgcaccgatctggacgatcagctctcagcgcagatgtgcaatgccaaaaactatatcggcgacgacaccgtggtgcccgtcaccagccgcgacgatctgcgggagaagctggccggtcgcaacagcggcggcgtcttcctgaccaccatccataaatttaccgaagataccgaactgctctccgagcgcagcaatatcatctgtatttccgatgaagcgcaccgcagccaggtcaacctcgatcagaaagtgatcgtcgataaagagagcggcagggtgcgtaaaacctacggtttcgccaaatatctgcacgactcgctgccgcgggccacctacgttggttttaccggcacccctatcgacgccacgatggacgtctttggcgttatcgtggacagctacaccatgactgaatccgtgcaggatgagatcaccgtgcgcatcgtctacgaaggccgcgccgcgaaggtcatcctcgatgccggtaagctggaagaggtggaaaagtattacgaagagtgcgccaatgcgggcaccaacgagtggcaaatcgacgagagcaaaaaagccagcgccaccatgaacgccattcttggcgatgaagaccgcctgaaagcgctggcggaagactttgcgaaacactatgaaaaacgtgtcgccgaaggctcaacggtgaaaggcaaagcgatgtttgtctgcgccagccgcgagattgcctgggatttctatcgtcagttgaaagactttcgtcccgcgtggtttgaagttaagcaggccccggagggggttgagctgaccgggcaggaggagaaagagctgccgccgtccgaaatggtcaagatggtgatgacacgcggtaaagacgatgacgcgaaactgtacgatttgctgggcagtaaagagtaccgcaaagagctggataaacagttcaaaaacgcgaagtcgaatttcaaaatcgccatcgtggtggacatgtggctgaccggttttgacgtgccggagctggacaccatttatatcgataagccgctgcaaaagcataacctgatccagaccatctcccgcgttaaccgcaagatggaaggcaaaagcaaagggctggtcgtcgactatatcggcattaagcgccagatgaaccaggcgctggcgatgtattcgcgcattgacgccaccaactttgaagatattcagcagtcagtcattgaggtgaaaaatcatctcgatctgctggcgcaggtgttccatgaattcgacagccgcccttatttcagcggcgagccgcaggcgcagcttgcctgcctgaacttcgcggcagaatttgtcatgcgcacccagaagctggaacgccgctttatggggctggtgaagcggctgaaagcggcctatgacgtctgctgcggcagcgaggcgctgtcgcaggccgagcgcgaccatatccatttttacattgccgtgcgctctatcgtcttcaagctgaccaaaggcgacgcgccggacctcacacagatgaacgctcgcgtgcgcgagatgatcgccgaagcgctgaaagccgacggcgtggaagagctatttttcctcggtgacaagaaagcggagtcgatcgatattttcgacgatgattatctggcgcgcattaataagatcaaactgccggccaccaaaattcagctgctgcaaaagctgctggaaaaagccatcagcgactttaaacagatcaaccagcttcaggggatcaatttcacccgtcgtttccagtccattatggataaatataacgagcgccgggaagatgacgtcctcaacggtgaagagtttgataacttcagccaggagatgaccgatattatctacgatattaaaaccgagatgggcacctatgccgagatgggtattgatatcgaagagaaagccttttacgacattctggcgcatatgcgtgataagtatcagtttacctatgaggacgacaagatgctggcgctggcaaaagagatgaaggcggtggtcgataacacctcgaagtatccggactggagcaagcgtgatgatattaaggcgaagctgaaggtggagctaatcctgctgctgcacaagcacaagttcccgccggtggcgaatgatgatgtgtatatgggcgtgctgtcgcaggcggagaattttaagcagcaccatagtcatacgctgcattaa

SEQ ID NO: 371578 - DNA, 1305 bp, Salmonella enterica
atggcatttgaaaagacaatcccactcaatgaatttatcactcttcaaagaggtttcgatttacctcaagataaaagagttatgggcgatattccagtcgtagcttcaacgggagttgttggttaccacaatgaagagaaagttctagctccaggtgttgttatcgggcgaagtggtagcattggtggtggtcagtatataacaactaatttttggcctttaaacacaacattgtgggttaaggattttaaggggcaccaccctagatttgtttattatttacttagaagtattgattttagccaatttaatgttggctcaggtgtgcccacattaaatagaaatcaccttagtggaatactcgtagcggataccagctatagttatgaaaaagaagcttctgatattattggcattttagatgataaaataaaattaaataaagagctcaaccataccctggaacaaatatcccaaaccctgttcaaatcctggtttgtggatttcgacccggtgattgacaacgcgctggatgcgggaaacccaatcccggaagcgctgcaatctcgcgctgaactgcgtcaaaaaattcgcaatagtgcagatttcaaaccacttccggcggatattcgtgcactgttcccggctgaatttgaagaaacagagttaggttggatgccgaaaggttggataacaacatctttcaacgatttgatagaactaattggtggtggcacacctaaaacctctgtagaagagttctggaatggagatattccatggttctctgtcgtcgatgcacctagtgaatccgacgtatacgtattaactacagagaaaaaaattaccattgaaggactcaacaattcctccgcaaagttattaagaaaaggaacaacaataatcagcgccagaggaactgtagggaaatgcgctatggttgctgtaccgatggcaatgaatcagtcatgctatggtgttatcggtaaaaataatatttctgatgaatatatttacttccaattaaaaaatgcagtccaaacccttcaacaaatgggacacggctcagttttcaacacaataacaagagatacattcaaaaatattaaagttcctttttgcaatgaagaattaacaaatagctattctttgcttgttaaaaattatttttcaaaaatactgaataataattatcaaaatattgctttaacaaacctccgcgacaccctgctccccaaactcatctccggcgagctgtccctggaggatctaccaaacttagccaaacaaaccgaacccgcataa

SEQ ID NO: 371579 - DNA, 1620 bp, Salmonella enterica
atggccaaagcaccaacgaaaaaagccaaagcaaagaaaggttttgaagacacattatgggataccgcgaaccagcttcgcggcagcgttgaatcctccgagtacaagcacgtggtgctgagcctcgtgttcctcaaatttattagcgataagtttgaagcccgtcgcaaacagatggaagacgaaggccagggcgatttcctcgaaatggaagtcttctatcagcaggacaacatcttctacctgccggaagaagcgcgctggtcgttcatcaagcaaaacgctaagcaggacgatatcgccgtacgcattgataccgccctctccaccattgagaagcgcaacccgtcgctgaaaggcgcgctgccggacaactacttcagccgtcagaatctggaaaccaagaagctggcgtcgcttatcgacaccatcgataacatcgaaacgctggcccacgaaaccgacgtggaagcgctgtcgaaagaagaccttgtcggtcgcgtgtacgaatacttcctcggcaagtttgccgcaaccgaaggcaaaggcgggggcgagttctatacgccgaaatgcgtggtgacgctgctgaccgaaatgctcgaaccgttccagggcaaaatttatgacccctgctgcggctcggcggggatgtttgtccagtcggtgaagtttgttgaaagccatcaggggaaaagccgcgatatcgccctgtacggccaggagctgacggccaccacctacaagctggcgaagatgaaccttgcgattcgcggactttccgccaaccttggtgagcgcccggcggacaccttcttcagcgaccagcacccggacctgaaagccgactatattctggccaacccgccgtttaacctgaaagactggcgtaacgacgccgagctgaccaaagacccgcgctttgctggctaccgcacgccgccgaccggtaacgccaactacggctggattttgcatatgctttccaagttgtcggccaacggcaccgccggttttgtgctggcgaacggctcgatgagctccaacaccagcggcgaagccgagatccgcgcgcagatgatcgaaaacgatctgatcgactgcatgatcgccctgcccggacagctgttcttcaccacccaaatcccggtgtgcctgtggtttatgaccaaatcgaaggcagccgatccggccaaaggctatcgtaaccgtcagggtgagacgctgtttattgatgcgcgtaaccttggtaccatgatcaaccgcaccaccaaagagctgacggcagacgatattgccaccatcgccgatacctaccatgcctggcgcagcacgccggaagagctggtcgagcgcgttaagcgcggcgacagccagttggcgcaatatgaagaccaggccggattctgcaaggttgcgaccattgcagagatcaaggcgaacgactctgtgctgacgccgggccgttatgtcggtgccgccgagcaggaagacgacggcgtagcgtttgaaaccaaaatgcgcgagttgtcgcagacgttgtttgcacagatgaagcaggcggaagaactggataacgcgattcgtcagaatctggaggtgctgggttatggcatttga

SEQ ID NO: 371580 - DNA, 339 bp, Salmonella enterica
gtgtatgtcatcggtaaagtgcaggtcagcatcaccaccattaccgaagtagtgcaggtgaagcggatgcaaaacaccattacccacctctatattgaccagctacgcggtgcactaccctaccacaaagccattcgcggtacgctaatcactaccgacaagtttgccgccaaatgcgcagaggccgcactgtttccaggggccgcgcccattacattgatcgacggcgatcgcctgttggagttgttaatcgaaaataacgtcgggatcaggcgcagcaatgcggtggaactgctggatgtggatttacagctgtttgatgagctggaaatcgactaa

SEQ ID NO: 371581 - DNA, 468 bp, Salmonella enterica
atgctactggcgttactggctggccgtaaacaggccagacgtgcagatctgttgccgaaatggcagacttccttgcaccagcactctaaattcgcctcccctagctcggttaaaactacgctctatgcccggctttataatctggtcgaacgaagactggttgcccgtaaaggaatgagctacaaaattaccgatgcagtccgaaaatggctcaacaaagcgctacctgaacgtcgtaccgatccgcgcaaagagctgcttgacgccgtaaaacgctataacgagcagccaaaagaggtgttgcgcgaacagctctctaccatgaacccgtacaaatttgaacatctggtgggccagttgctggaagcgatgggttatgaacaggtggaagtcacaaagcctctggtgacaaaggcgtgtatgtcatcggtaaagtgcaggtcagcatcaccaccattaccgaagtag

SEQ ID NO: 371582 - DNA, 441 bp, Salmonella enterica
gtgaagaattataaagtgattaccccgcttttccaacatacgaacatgaccctggccatgatgaaagccgtcgcaagatgctcagttaaagcggttcgaaatatgatcaccgccattcaggagcagaccggccccccgcagaacccggttgactggtccgagccggataaatggattaaagaacggctcagcggtgaagatgccagcatagcctggcaaatctggaatatggataactatatcctgaacccacgccacagctatggttgctacatgtttatcaataaccctctgttcgatctgatgcaaactgccgaggacggcggctggtaccccagcgaacaggggcgactacttatggatcacgatgaggccacgctacacaaacttggtgatatcgaaggcatgttacatgctactggcgttactggctggccgtaa

SEQ ID NO: 371583 - DNA, 135 bp, Salmonella enterica
atgaatatggagaatatccttggcaaaccatctgtctcattcctggcaatcctgattgagccaggtattggtcttgcctgtaaaacgatgttcatcttcttcctgattcagtaccgtcagtgggctattgattaa

SEQ ID NO: 371584 - DNA, 1089 bp, Salmonella enterica
atgaaaaaaaaaataataaacgataatagttatattaagttaaatcaaaaggagtttaaactaatattctctaacattaccctctatgatttttcacaaagccgtgatatcaaaaattatatttcaaggattacagaaatttgtaatgaatacattaatactttatctatccatagtattctagacttattcacatctctcattgaagagaaccgccccccgacacagaaacattacactccacacgaaattgtcacgttcatgggtaacataattcaggcacaaaaaggcgagtctttttttgatcctgcttgtggctctggtgagtttatctcagaaatcattaaaaaccaagttgctatatcaggttcagaatatgacgtagacagattgaaaatttcaaaaatgaagatgctggtaaatgatctatctccatcaaatatcagcccatcttactttactgaggggcataatcttaaaaaaatttttgacattattctttcaaacccaccattttctttaaaaattccatttgatatggaaatgcacttttgtatgtatggtaagccaccaacatcaaatgctgattttgcttttttacagtattgcatttttatgttaaaagataatggccgggcagcgattatcctacctgatggcattcttttccgagaaggcaaggaatacgaaatcagaaaaaaaataattaaaaataaccatatttccgcaattatctacctaccaaaaggtatgttcaaaactactgcaatcgcaacaaatattatagtttttaagaaaaagcaaaaaactaatgatatcttaatgataaatgtgaggaaaaaaaacaacctgaatgtaaatttattattagagttaattaccaaacgcagcactactgaaatatccagactcacttccctaaacgaaatatctgctcatgattacaatctgtcagcctcgttatacttcaggccacaagtaaaaaaaactgatctgaagcaattaataatgaaacaaaaggagcttgaagagaagttacattcattacaatatgctttccagcacaaactcacctcgttgaatttataa

SEQ ID NO: 371585 - DNA, 576 bp, Salmonella enterica
atgattaaattgctttctgaggtcgcagaggttactggcgggcacacattccgaaccaaagctgaggctgcatcaggtcatgtaagactcctgcagattaaggacatacaagaaggtattctgactgatttttcagcgcttccttttgcggatattcagccagagaaactgaaaataaatcttcaaactaacgatattcttttaccactcagaggggaaaggataccggctatgatgattgttaaccaacagagtacacttgtaacaacgacaaaccaaattgctgtaataagagttaacagccttttaattaatcctgaatatctgtattatttttttaattctccagaaggagatgagaaaatttctgctctacaaggtggaggattagtcgtgaatcttagtttaaaaaaactattaacacttgaaatacccataccattgcggcctgtacaggatgaggttatcggccttcgtaaaatatggagtgaacaaaaaaaaacgcttgaggatttaatagaaaatggaacgactctatgccatactgcaattaatagattaatctaccgtggctaa

SEQ ID NO: 371586 - DNA, 1842 bp, Salmonella enterica
atggcaatcattattcccaccgtaagtagctgtagcgagaaaattacagcaggcgaaaaaaggctggcaaggctactggagagagggttaagcgatagctgtacctgctggtacgacacgccgatgggcaaacaacatagtcatcctgactttgttattctgacccccgacaaaggtatattattcattgaagttaaggactggtttattacaaaaatcaaaggtgctaataaaacatatgtccagtatgaaactaaaaatggtatagaaagtttaaaaaatcctattgagcaagttcgtcagtatgctttccagaccattaatagcctcaaaacagatccacaacttcgccagcaagaaggccaatatcagggcagttttgttatgccgtatggatacggcgtgtatctgtccaatatttctcgctctcagcttgagaaagccttttcacctaccgaacttgcagacatactccctaccgataaggtgatatgtaaggatgaactcaatgaatttatgtctcaggaaaaagtagctgccaggctcgcattacttgccaaatacaactttgctcaccagactacacctcagcagctggatcgtataagatggcatctttatcctgatattcgaatccataaacccattaagcaagctgatgtaaagaatttcacactccacacaccaagtattatatccattatggaccggcaacaggaacaacttgcaagaagcatggggtccggacatcgggtgattcatggcgttgcaggatctggtaaaacactgatattacttcaccgttgcctcgaacttgcaaataatattgaaaacgaaaaacctgttttggtcatttgctacaacattacgctcgccagaaaactcaaagcccttattgagaaacatacgctcaggcttcctgttgaggtcacacattttcatttatggtgtcatcaacaattacagtcttatggacggctaccgccaaaaagcaaaaactttgttgagctaatggaaaatgccctttctatcgcctttgaggatggaatcatccagccagagcagtacagcgccgtgctgatcgacgaaggccacgattttaatcctgagtggctaagaattcttacccgaatggcagacaccaaaaataacacactgcttttcctttatgatgatgcacaatcaatttatcagaaaaagaaagcgctcgacttcaccttatccagcgtcggcattaaagctcaggggcgaacgacaatcctgaatattaattaccgtaatactcagcaaatattacatttcgctagtagcattgcatttaactatctcaataatcacattgaggatgctcttaaatatcagcagcccgactcaggcggaattgcgggttcttatcctgagttgacctgttttgataaccaggatgaggaaataacgcatatccttaactgggttatcgaacagcaccagcggggcattccgtggtttgatattgccatattgtgcccatcaacctatagcattaaagacgtgctgggaccacaactgacggctcgcaatatcccttatcaaatgattattacctctgccgataaaaaaaactggtcgccacagcaagaacggctgtgtgttatgcctctgccgagcagtaaaggactcgaatttcagtcagtcgctgtcatggacgcagccagatccaaaaatgaagaagacttgagcaatgatatcaaaaggctttacgttggcttcacacgggctcgctataatctgctgataactatgaatggagaaaatgcactcagcgagcatcttctcactacctataagcagataacacgatag

SEQ ID NO: 371587 - DNA, 213 bp, Salmonella enterica
atggacggaggcgatagacgcctaatgccattctgcacgaagcgatgctgcgagagcaaaataagaaatagccagaagatgccggatgccggatgccggatgccggatgccggctgcgccttctgcggcctactcttctggtcaattttcttttatctcgaatacgcaaattgtgaagctatttccaacaatccaggtataatcgtaagataa

SEQ ID NO: 371588 - DNA, 288 bp, Salmonella enterica
atgccgatggagtttgaatgggatgcgaacaaggctaaaagcaacctgaggaagcacggtgtccgctttgaggatgcggtactggtgtttgacgatccccgacacctgtcacgtcaggagcgttatgagaatggagaatatcgttggcagaccctcggccttgttcatggcattgtggtcattctggttgctcatagcgttcggttcgaaagtggttttgaagttatccgtatcatcagcgctcgcaaggcagacagaaaagagaggaatcgttatgagcatggttaa

SEQ ID NO: 371589 - DNA, 303 bp, Salmonella enterica
atgagcatggttaaacataaacgcggcaatgcatccgcgctgagtgctcagcatgaggctgaactgaaggcgctggcgaaaaaatcagatgatgagattgattacagcgacattcccgcttcggaggatgggcagtggtctgaagcagtgcgtggtaagttttttcgcccgttaaaaactcaggcctcggtgcgtattgacgccgatgtgatggagtggctgaaacggccaggaaaaggctaccagacgcggctcaatgccattctgcgcgaggcgatgctgcgcgagcaaaataagaaatag

SEQ ID NO: 371590 - DNA, 957 bp, Salmonella enterica
atgaccccgattgcagttaccctacttaccggttttcttggtgccggcaaaaccaccctactacgccatatcctcaacgaacaacatggttttaaaatcgccgttatcgaaaacgaatttggcgaagtctccgttgacgatcaactgattggcgatcgcgccacacagatcaaaaccctgactaacggctgcatctgttgtacccgctccaacgagctggaagatgcgctattagacctgctcgacagccgcgaccgcggcgatattgctttcgaccgcctggtgattgaatgcaccggcatggctgaccccggcccgataattcagacctttttctcccatgacgtattatgcgaacgctacctgttagacggcgtgattgcgctggtcgacgcggtgcacgctaacgagcagatgaaccagttcaccatcgcccagtcgcagataggctacgccgaccgtatcctgctgaccaaaaccgacgtggcaggcgacagcgagaaactgcgcgagcggctggcgcgtatcaacgcccgcgccccggtttacaccgtggtacacggcgatattgacctgagtcagttgtttaataccagcggctttatgctggaagagagcgtgctggcaagccaaccgcgtttccactttattgccgataaacagaacgatgtgtcgtcaattgtggtggaactggattacccggtggatatcagcgaggtttcgcgggtgatggaaaacctgctgctggaatcagcggataaactgctgcgttacaaagggatgctgtggatcgacggcgaacccaaccgcctgctgttccagggcgtgcagcgcctctacagcgccgactgggacagaccgtggggcgacgaaacgccgcacagcacgctggtatttatcgggatccagttgccggaagacgagatcagagcggcgtttgcggggttaaggaagtaa

SEQ ID NO: 371591 - DNA, 204 bp, Salmonella enterica
atgtttgatactttaggtcaggcaaaaaaatatctcggccaggcggcaaaaatgttgattggtattccggactacgacaactatgtcgagcacatgaaaaccaaccatcccgacaagccgtacatgacctatgaagagttcttccgcgaacgtcagcaagcacgttacggcggcgatggcaaaggcggtatgcgctgttgttaa

SEQ ID NO: 371592 - DNA, 2151 bp, Salmonella enterica
atggatacgaaaaagatattcaagcacataccctgggtgattctcggaatcatcggtgctttctgcctctcggtcgttgccctacgtcggggtgaacacgtgagcgccctgtggatcgtggtcgcttccgtttccgtctatctggtggcttaccgctactacagcctgtacatcgcccagaaggtcatgaaactcgacccgacgcgcgcgacgccggcggttatcaataacgacggcctgaactacgtgccgactaaccgctacgtgctgtttggtcaccacttcgccgccatcgctggcgcaggtccgctggtcgggccggtattggccgcgcagatgggctatctgccggggacactgtggttactggcgggcgtggtgctcgcgggcgcagtgcaggactttatggtgctgttcatctcttcccgccgtaacggcgcctctcttggcgagatgatcaaagaagagatgggtaccgttccaggcaccatcgcgctgttcggctgcttcttaatcatgatcatcatcctcgcggtgctggcattaatcgtggttaaagcgctggccgaaagcccgtggggcgtcttcaccgtctgctccacggtgccgattgcgctgtttatgggcatctacatgcgcttcctgcgtccgggacgcgtaggcgaagtctccgttattggtatcgtgctgctggtggcgtctatttacttcggcggcgtgattgcccacgacccttactggggcccggcgctgacctttaaagacaccaccattaccttcgcgctgatcggctacgcctttgtttccgcgctgctgccggtatggctgatcctcgccccgcgcgactatctcgctaccttcctgaaaatcggcgtgatcgtcggtctggcgctggggattgtgatcctcaacccagaactgaaaatgccggcgttgacgcagtatgtcgacggtaccggcccgctgtggaaaggcgctctgttcccgttcctgttcatcaccatcgcctgtggcgccgtctctggcttccacgcgctcatctcttccggcaccacaccgaaactgctggcctgtgagaccgatgcgcgttttatcggctacggcgcgatgctgatggagtcctttgttgcagtgatggcgctggtggcggcctcgatcattgaaccgggtctctacttcgcgatgaacaccccgccggcaggtctgggcattaccatgccaaacctgcacgagatgggcggcgagaacgcgccgctgattatggcgcagttgaaagacgttaccgcacatgcagcggcgaccgtcagctcctggggctttgtgatttccccggaacaaatcctgcaaactgcgaaagatatcggtgaaccgtcagtattgaaccgcgcaggcggcgcgccaacgctggcagtaggtatcgcgcatgtgttccacaaagtcctgccgatggcggatatgggcttctggtatcacttcggtattctgttcgaagcgctgtttatcctgaccgcactggatgcgggtacccgttccggccgctttatgttgcaagatttactgggtaacttcgtcccgttcctgaaaaaaaccgattctctggtcgcgggtatcatcggtaccgcaggctgcgtcggtttgtggggctatctgctgtatcagggcgtggtcgacccgctgggcggcgtgaagagcctgtggccgctgttcggtatctctaaccagatgctggccgccgtggcgctggtgttgagcaccgtggtactgatcaaaatgcagcgcaccaagtacatctgggtgacggtaatcccggcggtatggctgctgatctgcaccacctgggcactgggcctgaaactgttcagcgccaacccacagatggaaggtttcttctacatggcaaacctgtataaagagaagattgccaacggcaccaacctgaccgcgcagcagattgccaatatgaaccatatcgtggtgaacaactacactaacgctggtttgagtattctgttcctggtggtggtgtacagtattatcttctacggtttcaccacctggatgaaggtacgcaacagcgataaacgtaccgacaaagaaaccccgtatgtgcccgtgccggagggcggcgtgaagatctcttcacaccactaa

SEQ ID NO: 371593 - DNA, 1662 bp, Salmonella enterica
atgttaaagcgaattaaaattgttaccagcttactgctggtattggcgctatttggccttttacaactgacatccggcgggctgttcttcaactcgctgaagaatgacaaagaaaacttcaccgtattgcaaaccattcgtcagcagcagtctgccctgaatgcaacctgggtggagctgttgcaaacgcgtaataccctgaatcgcgcgggtatccgctggatgatggaccagagcaatattggcagcggcgcaactgtcgctgaactgatgcagggggcgaccaatacgctgaagctgaccgaaaaaaactgggcgcagtatgaggcgttaccgcgcgatccacgtcagagtgaagcgtctttccttgagatcaaacgaacctatgatatctaccacggcgcgttggcggagcttattcagcttcttggcgcgggtaagattaacgagttttttgatcaaccgactcaaagctatcaggacgcttttgagaagcagtacatggcctatatgcagcaaaacgatcgtctgtacgatattgctgttgaggataacaacagttcctacaaccaggcgatgtgggtactggtcagtgtgctgattgccgttctggtggtcattatcgccgtctggttcggcatcaaactgtcgcttatcgccccgatgaatcgtctgattgaaagcattcgtcatatcgccagcggcgatctggtgaagcgtatcgacgtggaaggctccaacgaaatggggcagttggctgaaaacctgcgtcatatgcaaagtgaactgatgcgtaccgttggcgatgtacgtaacggcgcgaatgcgatctatagcggcgccagcgagattgcgatgggcaacaacgatctctcttcccgtactgagcagcaggcagcgtctctggaagagaccgccgccagtatggaacaactgaccgccaccgtgaaacagaacgccgaaaacgcccgtcaggccagtcacctggcattgagcgcctctgaaacagcgcaaaaaggcggcaaagtggtggataacgtcgtacaaacaatgcgcgatatcgcctccagttcgcagaaaatcgccgatattatcagcgtaatcgacggtattgctttccagaccaatatcctggcgctgaatgcggcggtagaagcggcgcgcgcaggcgagcagggacgcgggttcgcggtggtggccggtgaagtccgtaatctggcccagcggagcgcgcaggcagcgcgggagatcaagagtctgattgaggattccgtgagccgtgttgatgtaggttcgacgctggtcgaaagcgccggtgaaaccatggatgagatcgtcaatgcagtgacccgcgtgaccgatatcatgggcgagattgcctcggcgtctgacgagcaaagccgtggtatcgaccaggtgggcctggcggtagcggagatggatcgcgtaacgcagcagaacgcctcgctggtggaagagtccgccgccgcggctgcggcgctggaagagcaagccagccgtctgacccaggccgtcgcggtgttccgtattcaacagcaacagcagcgtgcgcgtgatgtggctgcggtaaaaaccccggcagccgtgtcgtcaccaaaggccgctgtggccgacggcagcgataattgggaaacgttttaa

SEQ ID NO: 371594 - DNA, 2766 bp, Salmonella enterica
atgcgcaaagatgccctgcttgctttcctgatgaaccaaacggatttttttgatccggaaaatgtcagtgaggtgtttaccgcgcgctatctggcgcagcgttttaatatgcagcgtaataccgccagccattatctgaaccaactggtggcgcagggcgtgctctgcaaaatcaatacccgtcccgtctatttcctgcataagcaggcatttagccaacagttttttaccctttcgcgtaatgaatacgccagcgtcgcggagctgttagcgcacggggaacaggagtgcgcgccggacgatcacttttctctgttgattggtcataacgaaagcctgaagcggccgattgagcaactgaaaaccgcgctgttttatcccgacggcggactgccgctactgatgaccggcgaaagcggcaccgggaaaagttatctggcgcagctcatgcacgaatatgccatcgcccaggcgcttctgtcgccggatgcgccatttatcagttttaattgcgcccagtatgcgagcaatcccgaactgctggctgcgaatctttttggctatgtgaagggcgcgtttaccggcgcgcagagcgacagaccgggcgcgttcgaggcggctgacggcggcatgttatttctggatgaagtccaccggctgagcgccgaagggcaggagaagctctttacctggctcgatcgtggtgaaatttatcgggtaggcgacaccgcgcaggggcatccggtttcggtacgtctggtatttgcgacgaccgaagagatacacagtacctttctgacgacatttttgcgacgcatcccgattcaggtcaacctgccggatctccagcaccgtagccgccaggaaaaagaggcgctgatcttactgtttttctggacggaggcgaaaaaactttcggccacgcttatcctcaaaccgcgtttgttgcagatcctcaatcaatatgtttatcgcggcaacgtcggcgagctgaaaaatgtggtgaagtatgcggtggcgacggcatgggcgaaaaagcctgggcaggaaaccgttaccgtgtcgctgcacgatctgccggatgccatgctgtcggcattgccgtcactgaatgaaccgctggcggacgacacgccggtgagcatctcgcccgacacgaaccttacctggctgctgcgcgcccgcgacgagatgcagggcatgatccatgatacgcagtgtcatgtgctggcgctgtacgagctggtacgtagcgggaaagaggggtgggagacggtacaaaaaagaatgggcgatgaaattgagaccctcttcgatcgcctgatttttaccggcgacgataatgtgcactcacagcggttgctgttaattacaagccaggtgcgggaagagttttatcgtctggagaagcgcttcaatatgcagcttaacggcaactgtatttacgcgcttagccactatttaatccatcgtaccgcactggcgccttctcgtctcaacagcgagcagatccgccaactggacgccttcctcgcccagaaatatccgctactgtacagcttctgtttacaaattctggagacgctgggccagaagctggatctggagccgagacgcattgatatgctgctgctggcgctttggctgcataaacagggggctaacaaccaaaaacaggtgacgcatgcggtgattctggcgcacggctatgccaccgccagcagtatcgccaacgtcgccaaccggctactgaaaaatacgatttttgaatcgttcgatatgccgctggacgtcacgccggaggcgatagcgcagcaggtgatgcgctatctggaagagcatccgctcgcctccggcctgatgattctggtggatatgggatcgctcaaggccattcatcgccattttgatcgcgcgctttccacgccggtgacgattatcaacaacgtctcgaccagcatggccctgtatgtaggggagcgtattttacaggggcattttattgaagagatcgcccgcgatatcgcccgggatgtgccggtcgagtatcagctctactggccgaaaagcaacaaaccgcgcgccatactgaccacctgcgcgaccggtatcggtgtggcgacgaatctttgcgcattgctgagcgccagtattccacaggcgctggagattgacgtcgtcgcctgcgattatgcgatgctggcgaacaataaaacccaggagccggtatttatgcgctacgacgtactggcgatagttggcacgctggacccgcacatcgccagcgtgccgtggatttcgctcgactcgctgatctccggcgaggggaaccactacctgatgcggctgtttggttcgctaaccactccggagcaggtggcggagatcaacaacctgctgctgaaaaatttctcgctccgacgagtgatcgaatccgtcaccatcctcgacaccagcaaagtcatcaaccacgttgagcagtttctgctgcgctatgagcatctggcgggcgttaccgtctcgaatgaaagaaaggtggcgctctatgtgcatattagttgcctgattgagcgtctgatccgccatgcgggcattactgcctggagtgggcaacagtgtccggaacaggaactgaatcggctacgggaagcgtttagtgtcattgagagtaactacagtgtcaaaatccccaccgccgagcttggctatattcataatatcctgaccttcgaaacagaacttatcgagcaagatcaacagttttaa

SEQ ID NO: 371595 - DNA, 423 bp, Salmonella enterica
atgaagagacattatattttcgccagccacggcacgctggccagcggagttttaaactccgtggagctgattttaggcaaacggtcaaatgtctggacgctgtgcgcttacgttgaagagagcgtggatttaagccagcaggtagatacgctaattgcccggatcccgccggaagatgaaattattgcgctgaccgatatttttgccggcagcgtgaataacgaatttgtccgttatttatcacgggaaaattttcatctgctggcagggattaacctgccgctggttatcgatctctttatgtcggaaaacgatggcaataccacgcataccataatgacggcgttagcggattcaaaagaaaatattcagtactgcaatcaaactatcaccagcgccatgcaaagcgataaagatttttaa

SEQ ID NO: 371596 - DNA, 462 bp, Salmonella enterica
atgattgtttttttacgggtggatcatcgtttattacatggacaggtcgccttttcctggacgcagtacgttggcgcagactgtattttaattgccaacgacagcgtacctaatgatgacctgcgtaaaaccaccattaagatggcgaagccgcccgcggtgaagctggttattaaaaatattgccgattcaattgaagcgataaaaagcggcgttaccgataaatataaactttttattgttgttgaatccgtggcggatgcgtaccggctggcgcgcgaattacccgacattaaaagtattaatttaggcggcacgaaggtacgtgaagggagccagaatattgctaaagccatcaatctgttagcggatgaaatgactcaacttcgggagctggcggctggcggagtagagatagaaattcggctggtgcctaacgatcgtaaacaactttttgcctga

SEQ ID NO: 371597 - DNA, 780 bp, Salmonella enterica
atggtagaggcgcttttacttggactggtggcgtttatcgcccagtctgaatatgcattagggacgtcgctgatttccagacctatcgtgaccggacttttaaccggactggtgctgggcgacatggaaaccggaattgtgatgggcgcgacgctggagttggcgtttatcggttccttttcggtgggcgcgtcgctgcccccggatgtggtcactggcggtattttaggtgtggcctttgcgattaattccggcgctggggcggaaaccgcgctgttattaggtttgcctatcgcgacactggcgttaattgtgaaaaatatctataacggaatgtttattccgttgctctgtcataaagccgatgcttacgctgaggtgggggatacccggggcattgagcgtatgcatttaatctccggcattgggctgtcgctgatgctggggattatcgtcacggtctcttatttagcgggcgtgaatatggttaaaggttttctggatgccattccagaatttattaaacatggattaagcgttgccaccggtattattcccgcgctgggttttgccatgctggcgcgcttattaattaataaaaaggtcgccccctattttttcctcggttttgttttaatggcgtatttaaaaattccggtgacgggtattgcgattctcggcgcgatcgtcgccgtcgtgatggtcaatataccgaaatttgcggcctcgcaaccggcacctgcgcaaggagcgtctcatgacgatgaagatgatttctga

SEQ ID NO: 371598 - DNA, 849 bp, Salmonella enterica
atgacgatgaagatgatttctgataaagaccgccagcaggcggaaaccactggtctggtcaccgcgcgtgatttacgccgcgtcttctggcggtcattccagatggagttttcctggaactatgaacgacaaatgaacctggcgttcgtctatacgctcattccggtattaaagaaactgtatagccgaaaagaagatcttgccgaagcgctaaaacgccatctggctttctttaataccactccgcacattgtgacgttgatcctcggtattaccgtggcgatggaggagaaaaatagccagcagaaagagatggacgccagttctatcgataacgtcaaagcgtcgttaatggggccgctggcgggtattggcgactcttttttctggggaacattgcgtcttatcgccactggcatcggtaccagtctggcgctgaaaggcaatattctggggccgattttatttctgctggtgtttaacgtaccgcatattctggcccgctggttctttacccgctggggctatgtgctgggaaccggcgtactgcaacgcattcagcaaagcggaatgatggaaagcctaacctatggcgcctcgattatcggtctgatggtggttggcgcgatgacagcctccatgattgatatcaccattcccattacgtttggtacgggagaggcgaaaacccatgttcaggacattattaacgacatcatgccttgtctgctgccgttaattagcttcgccattgtgtactggcttttagggaaaaaagtgaaaccgttaaccatcattggcggtattgcgctggtgggaattttcggttcctggatagggttattttaa

SEQ ID NO: 371599 - DNA, 1059 bp, Salmonella enterica
atgtcaccaaccatgctgacctatattaacgaagagtctgacgtcctggcgaatattattcgctgccatcgccagtcgctggaagaagtatcgcggttcgccagccaaaaaacgttacgacgaatactgatattagccaccggatcgtcattgaatgccgccttttgcgcccgttatttctttgagcgctgcggtatctctatcgatattaaagagccgtacacctttagccagtatgagaatagcgatccgcaagccgatatggttattgctatttcccagagcgggaaaagcgcttctaccctggaggcgatgcgtaaagttcaggcgcagggacgtccggtattcgctctgaccgccgatccgcaaagccctcttggcaaggccagtgattatccactggatattctgaccgggattgagtccgtcggctttgttacccgtggatttagcgcgacggtactgaatctgttgcttatcgcgttgttagttgcccgtcagcagcagctgacggaatcgcaggtcgaggagtatgtggcgcagcttcaacgcatcgcggcaaccctgccgttggttatcgtgcgtacggaagcgtttattcaccagcaccaggccgttttacgaaacgggacgcgttttgtggcgacaggctacggcgcgctggttggggtggcaaaagagttggaaactaaatttaccgagacggtgcgtgttccctcaagcgggtttgagctggaagcctatatgcacggcccgtatctggaagccaatgcggaacacgtgatgttcttctttgaggaccggcccgacgcgcgctccagggcgctacgggagtatatgacgcctgcggtcgccaaaacctttactctcacgctggcgaaggcggcgcaggatgaccagacgcttgcgctggatgtagcggttgatcaccatttctcgccattactgttgattgtgccggtacaactcatggcgtttcatatcgcctcactgaaaggcatcgacctttcggtacgcatttttgacgatttcgatcgcgttttaaaaagtaaaatctga

SEQ ID NO: 371600 - DNA, 1011 bp, Salmonella enterica
atgttgggttttaatcaggacgagtacctgacgagtgctcgtgagatcatcgctgcgcgccagaaggcagaacaggttgctgacgagatttatcaggccgggttcagttctttatttttcgcctctgttggcggttcactggcgccaatgatggcaattaatgaatttgccaaagaattaacaacgttgccggtttatgttgagcaggcggcagaattaattcataaaggaaataagcggctgaataaagactctgtggttattacgctgtctaaatccggcgataccaaagaatcggtggcgatcgccgagtggtgtaaagcacagggaatacgcgtagtcgctattaccaaaaatgcggactctccgctggcgcaggcggcgacatggcatattccgatgcgtcacaaaaatggcgtggaatatgaatatatgttgctgtactggctgtttttccgcgtgctgtcgcgcaataacgaattcgccagttacgatcgcttcgccagccaactggaaattctgccggcgaatctgctgaaagcgaaacaaaaatttgatccgcaggcggacgctatcgccagccgttatcataacagcgattatatgatgtgggtcggcggcgcggagatgtggggcgaggtctatctgttctccatgtgtatcttggaagagatgcagtggaagcgcacgcgccccgtcagctctgcggaatttttccacggcgctctggagctgctggaaaaagacgttccgctcattctggtgaaaggggaagggaaatgccgcgcgctggatgaacgcgttgagcgttttgccagtaaaattaccgataacctggtggtgattgatccgaaagcgtatgcgctggacggcattgatgatgagttccgctggatcatggcgccctgcgtcgtctcgacactgctggttgatcggctggcggcgcacttcgagaaatataccggccacagtctggatattcgtcgctactaccgtcagttcgattattaa

SEQ ID NO: 371601 - DNA, 2292 bp, Salmonella enterica
ttgtccgagttgctctctgtcgctctgtttctcgcctctgtgctgatatatgcctggaaggcgggccgtaacacctggtggtttgccgccactctcacggtgctgggactttttgtcattctgaatattaccctgtatgccagcgactattttaccggcgacgggatcaacgacgcagtgctttatacgctcacgaatagtctgacgggagcgggagtcggcaaatatattctgccgggaatcggcattgccctggcgttagtggcggtattcggcgcgctgggatgggtactacgccgccgccgtcaccatcctcatcatgtcggttacagcctgctggcgttactgctggcgttgggttcggtcgacgccagcccggcgtttcgccagattaccgaactggtaaaatcacaaatgcgcgatggcgatccggattttgccgtttattataaagaaccagcaaaaaccattcctaatccgaagctcaatctggtctatatctacggcgagagcctggaacggacctattttgataatgacgcgttccccaatctcacgccagagttgggcgcgctgaaaaatgaggggctggatttcagccataccatgcaactgccgggaacggattacaccatcgccgggatggtggcttcccagtgtggtattccgctgtttgcgccgtttgagggcaatgcgtccgcgtcggtttccagcttcttcccgcagaatatctgcctcggcgatattctgaaaaactccggctaccagaactatttcgtgcagggcgctaacctgcgttttgccgggaaagacgtgttcctgaaatcacacggatttgatcatctgtacggcgctgaagagctaaaaacggtggtggcggacccgtcttatcgtaacgactggggcttctacgacgatacggtgcttgatgaggcatggaagaaatttgaagcgctttcccgctcaggccagcgcttttcgctgtttactctgaccgtagatacccatcacccggacggttttatctcgcggacctgcaaccgcaaacgctacgattacgacggtaagcccaaccagtcctttagcgccgtaagttgcagccaggaaaacatcgccgagtttatcaacaaaatcaaagcgtcaccgtggtttaaagataccgttatcgtcgtctcttccgaccatctggcgatgaataatacggcctggaaatacctgaataagcaagatcgcaacaatctgtttttcattctgcgcggcgataaaccacagcaggagacgctggcggtcaaacgcaacacgatggacaacggcgcaacggtgctggatattctcggcggcgataattttatcggtctgggacgtagcagcctttccgggcagtcgctgtcggaagtgttcctgaatgtaaaagagaaagtgctggcgatgaagccggatatcattcgcctgtggaatttcccgaaagagataaaagattttaccgtcgatcgggacaaaaacatgatcgcgttttccgggagccacttccgcctgccgttactactgcgcgtatcggataagcgcgtcgagccgttaccggaaagtgaatactccgctccgctacggttccagttggccgacttcgccccgcgcgataatttcgtttggatcgatcgctgctacaaaatggcgcagctatgggcgccggcgctggcgctctctaccgactggtgcgtctcgcaggggcagcttggcgggcagcaaaccgtacagcatgtcgataaagcgcagtggaaaggcaagacggcgtttaaagagacggtcatcgacgtgacgcgttaccagggcaatgtcgatacactgaagattgttgataacgacattcgctacaaagccgacagttttatctttaacgtcgcgggcgcgccggaagaggtgaaacagtttagcggcatttcccggccggagtcctgggggcgctggtcaaatgcgcagttgggcgatgaggttaaaatcgaatataaagcgccgctgccgaaaaagtttgatctggtgatcaccgccaaagccttcggcgacaacgcgaatcggccgattccggtacgcgtaggcaacgaagaacagacgctggtgctgggtcacgatgtgtccactatcacgctgcatttcaacaacccgacggacgcgaataccttagtcattgcgccgcccgctcccgtctccaccaacgaaggtaatattttgggccattcgccgcgcaaattggggattggcatggtggagatcaaagtggtgaatgttgaaagttaa

SEQ ID NO: 371602 - DNA, 462 bp, Salmonella enterica
atgaatacagcgaaacatgttctgtgctgcgcggcgatcgccagcgtactgatttccaccagcggtattgccgccagtcagctaagcgctcagggcgcgaacgcacagcagggcgggatgtcgctttctgcgctaaccggtctgctcagcagaggtgcccagtcgctcagcgccgataatatgaataatgccgccggtattttgcagtactgcgccaaacagaaactggcgtccgctaccaacgtggaaaacgttaaaaatcagattctgaacaagttggggttggataccacacagcaggagcaggacactaactacctgaacggcctgcaagggttgctcaagacgaaggacggccagcagttgaacctcaataatatcggcagtacgccgctggcggaaaaggtgaaaaccaaagcttgcgatctggtattgcagcaagggctgaatttcctctcctga

SEQ ID NO: 371603 - DNA, 738 bp, Salmonella enterica
atgaaaaatgttggcgacctgatgcagcgtctacaaaaaatgatgcctgcgcatattacaccggcgtttaaaacgggcgaagaactgctggcgtggcagaaagagcaaggcgagatcggggcggcggcgctggcgcgggaaaatcgggcgatgaaaatgcagcgcacctttaaccgttccggcattcgaccgctgcatcagaactgctcgtttgataactatcgggttgagtgcgacggacaaatgaacgcgttaagcaaagcccgacagtacgttgatgagtttgacggcaatatcgccagctttgtcttttccggcaagcctggaaccggtaaaaaccatctcgccgcggctatttgtaacgagctgctgctgcgcggaaagtcggtactgattatcaccgtagcggatattatgtcagcgatgaaagacacgttcagcaatcgggaaaccagcgaagagcagttgcttaacgatctgagtaacgttgatctgctggtgatcgacgagatcggcgtgcagaccgaatcccgctatgaaaaagtgatcatcaatcaaattgtcgatcgtcgttcctcgtcaaaacgtcccaccggcatgttgacgaacagcaatatggaagagatgacgaaaatgcttggcgaacgcgtcatggaccgtatgcgtctcggcaacagtttatgggttaattttacctgggacagttaccgcagccgggtgacgggtaaagagtattaa

SEQ ID NO: 371604 - DNA, 540 bp, Salmonella enterica
atgtcttccagaattttaacgtcggacgtcatcggtattgacgcccttttacacgatcatcatgctgtgctggcgaagtcaacgggcggcgcagtggcggtattcgctaataatgcgcctgccttttatgccgtgacgcctgcacgcatggctgaactgctggcgcttgaagaaaagttatcacgtccgggaagcgatgtggcgttagacgcacaattttacgaagaacccgaagccgcccccgttgcgattccctgcggaaaattcgccatgtatcccgcctggcaaccggatgcggattttcagcgtcaggctgccctttggggcgtggcgcttcgggagccggtcaccgcagaagagctggcggcgtttatcgcctactggcaggcggaaggtaaggtttttcaccatatccagtggcagcaaaagctggcgcgcagcgtgcaaatcagccgttccagcaatggcggaatgccgcagcgcgacatcaatagcgtcagcgaacctgacaatcatattccaccaggttttagggggtaa

SEQ ID NO: 371605 - DNA, 474 bp, Salmonella enterica
atgggtataatcgactttttactggcgctaatgcaggacatgatcttgtctgcgatccccgccgtcgggtttgcgatggtctttaatgttccccaccgggcgcttccgtggtgcgcgctactgggggcgctgggtcatggctcgcgtatgctaatgatgagcgctggctttaatatcgaatggtcgacgtttatggcttcgctgctggtcggcagtattggtattcagtggtcacgctggtatctcgctcaccctaaagtgtttaccgtcgcggccgtgatcccgatgtttccggggatttccgcctataccgcgatgatttccgcagtaaaaattagccatctgggctatagcgaaccgatgatgattacgctgctgaccaattttctgaaagcctcttccattgttggcgcgctctcaattggcctctctgtaccgggattatggctgtaccgcaaacgcccccgcgtgtga

SEQ ID NO: 371606 - DNA, 945 bp, Salmonella enterica
gtgacgaagcgcacgtctcaagaagcttatgcgttgcgtctggcggctgacgtttttatcaacaagaaattgatcttaaccaacgccatcatgcctgcgcttcgtgttaaaaaggaagcctctgtcatagtggcggcgcatagaatgtctttttggacaggacgagtcatgcaagaagagcaatcaattcaacgagcagtaacacggttatgtattcaatgcgggctgtttttattgcagcacggggcggaaagcgcactggttgatgagctttccacccgcctcggtttggcgctcggtatggatagcgtcgaaagcgcgatctcctctaacgccattgtcctgacgaccattaaagacggacaatgtctgacatcgacacgtaaaaaccaggatcgcggcattaatatgcacgtcgtcacggaggttcagcatatcgttatcctcgcggaacatcgtctgctggattacaaaggcgtggaaaaacgctttagccagctccgcccgctgcgttatccgcgctggctggtggcgtttatggtcggtctttcctgctcctgcttttgtaagctgaataatggcggctgggatggcgcggttatcacctttttcgccagtatgatagccatgtatatccgtcagatgctggcgcagcggcatttacatccgcagatcaatttttgcattaccgcctttgtcgctaccacgatttccgggctgatgctcactcttcccgcctttagccagacgcccactatcgccatggcggcaagcgtactgctactggtgccgggctttccgctgattaattccgtcgcagatatgtttaaaggacatattaataccgggctggcgcgctgggctatcgccagcctgttgacactagccacctgtgtgggcgtagtgatgtcaatgacagtatgggggctacgaggatgggtataa

SEQ ID NO: 371607 - DNA, 726 bp, Salmonella enterica
atgctgccaggatgctgcaaaaatggacttattatcagtaaaacccctcttatacaggaaggccttaaaggggttataacaggtaatttccccgattataaactggcgtattgccgtacgatagaagagctaacgctgctacagctacgccgaagtaatttagttattgctgatttagcagttaacaatgcctctccccgcgctatctgcgaatatttttatagcttactctcgcaatatcgcgacatacattgggtatttctggttcctaaatcctgctatccacatgcagttgatctcctgatgggccccgtcagcaccttgctttcagacgaagagccaatcgagaatcttattagcgttatccatgcgggaaacgctcgctcagaaagaataagcaaaacattattatcgcctcaggtaccgtctgaaattcagcagtcccacgacaggccgattgtccttacgctgtctgaacgaaaagtattacgccttttaggaaaagggtggggcattaaccaaattgcggcgttacttaaaaaaagtaataaaacaattagcgcccaaaaaaatagcgccatgcgacgcttatcaatacacagtaatgcagagatgtatgcatggataaacagttctcagggagccagagaattgaacctaccttcggtatatggagaaaccatggaatggaaaacagaatcagcaagagaaatgttgcgctcgtag

SEQ ID NO: 371608 - DNA, 675 bp, Salmonella enterica
atggaaaacagaatcagcaagagaaatgttgcgctcgtagaaaaatgcgtgatgagcaccattggtattaaagggctatttgatgcaatgccggattgccgacatacgcttcatattttttcaaaaccatccacgttttataaggctgcgctaaagacgccgttttctgccgttattttttctctttctgcgttaagaactgaacgccggacaggattatccagtctgacggaactggcgataaattatccccatatgcggcgtctggtgattgccgatgatgatgctgaagcccgcttaatcagcgcgctatccccgctgccgctggatggggtcatcagcaaagcgtcgccgttggatgttttacaggatgccttatttacatcgcttaatagcgcccggcggacaacggagcgtacagacaatctttgggaacttcaccagaattgtatgcttagtccaaccgagcgggagattctgcgtttcatgtcgaacggctactcaatgccgcaaattgccgtccagttagaacgtaacattaagactatccgggcgcataagtttaatgtgatgtccaagctgggcgtgagttctgatgccgggttactcgatgcggcggatattctgttatatctgcgcgccggagatgctaccgcgctccagcatcgggtatag

SEQ ID NO: 371609 - DNA, 459 bp, Salmonella enterica
atgagtctgcaatctgtacggcaatttctggccgatcatgctcccgatattgaaattatcgaattaaatcaaagtacagcgactgtcgagctggcagccaaagcgcacaacgtagagccagggcagatagctaaaacgctctcgcttaaagtaaaagacaccattatcctggtggtcgcgaaaggcgatgcccgcctggataataagaagcttaaaaccactttcggcgcaaaagcccgtatgttgagcagcgatgaagtggtcaatgcaaccggacatcctgtcggcggcgtatgtcctttcgggctggagcacccgctgcccgtttattgcgacatctctctgaaggggtataacgaagtattgcctgccgcaggcgccacgcacagcgcggtacgcatcacgccggaaagaatggctgaactgacatcggcgacctgggtagacgtgtgccaataa

SEQ ID NO: 371610 - DNA, 789 bp, Salmonella enterica
atggcctaccgttccgcaccgattgctgacgatattatctggcgagctgctccccagccggaagacgcctcgctggcggacgcagtacgcgagacgatcgcctctacccgtaagcacctgttggacttcatccggctggatgaaacgccgccgccaacggcgatgactcttgcccagtggacgcgccccgcgacgtttcgttcattgctggccgcctattccgatcacatctatcgacacacgccaggcctgccacgtgaaaataagccgttactctccctgtgggcgcaatggtatatcgggctgatggcgccgccgctgatgctggcattactgacgcaagcgcgcgctatcaatgtctcggcagaacatattcacgttgaatttcatgaaaccgggcgcgccgcgtgtttctggcttgatgtgcatcaggataacctggcaacggagcgttccccggaagaacgaatggaaacgctaatagtctccgcactacagccggtcattcaggcgctggaggcgactggctacatcaacgcgaaacttatctggagcaataccggttatttaatcaactggtatctgactgagatgaaaccgctgcttggcgaagccctgctggcaacgctacgccagcgctgtttttttgaaaagcagctatccgacggtcaggataacccgctgtggcggaccgtcgtaatgcgcgacggtcttctggtacgcagaacctgctgccaacgttaccgcttacctgacgtacaacagtgcggcgactgcacgctaaagtaa

SEQ ID NO: 371611 - DNA, 1065 bp, Salmonella enterica
atgacaacaccatcctggcggtcgcttcgtattaagaagtatcagttttctttacgtcttttcttgtttctcaacgccgtgtcggcgctatttactctcgttttccccctttatcagatcaatgtattttgcacgccaatgatcgggatagtggtcctgagcgtattactgttgatatggcatgggaaatatggacaaaaaagaattaatctcccctttatctccctactctttgggggaatatgggcggcgcatattgcgctaaagtatccggcgttaggccattatgatttctcttttttactgatttccctgcttagcgttctgtttatcggctcgatagcctttgccgcgaatatcgtcgcgtttacgctctattcgctaccgccagtcgcggtctgcctgtggctgaacgataatgaacaaggtttgcgaattctctatttgctggccctgccaatggtgggaatcgctattcaacatgttatccagaaacgctacgataactttgcccaacagctcatgtttaagctgctggccgagcgggaaaccctcaatggcctgagcatgcttgatccattaaccggcttatataaccgccgtggcctgcaaaatcggctggatacgttacaggcgccgggcagccatgaacactacgtcctgctattggatatcgatcatttcaaagcgtataacgatcactacggtcatatgatgggcgatcaggcgttaatccgcgtctcagcggcaattcgggacgccgtgcgatcgcgcgatgtcgtctgccgttttggcggggaagaatttctggtgttgctgaccaccgccgaaccacagcaagcccgcgctaccgcagaacgtatccgacaggaagtatacgatcttaaaatcccgcatatgtttaacgaaagcgtcgccaccaatgtcactgtcagtatcggcattgcgcccctgacggatcgcaatatcggagacgctatcgaaaaagcggataaagcgctctacgaagccaagcatcttggacgtaaccacattctggtcagcgacgacatgcgcgccctatga

SEQ ID NO: 371612 - DNA, 237 bp, Salmonella enterica
atgttgcagcggacgttaggcagcggatggggcgtattattgcctggagtgattatcgttggactggcgtttatcggcctgtcagctgatgcgctgaagctgttgattgtatcaggattgctactgtctgcgctgatgttgtatcacaaacaattacggcattttgtactgctgccatcgtgtatagcgcttattggcggcatgatgttggcaatgacgaactggaatcagggatga

SEQ ID NO: 371613 - DNA, 567 bp, Salmonella enterica
gtggcaaagtttgtacccgcaatttttctcgaccgtgacggcaccattaatatggatcacggctacgtacatgaaatcgatgcatttgagtttatagacggcgttattgacgcgatgcgcgagctaaaaaaaatgggctatgcgttggtggtggtgacgaaccagtccggaatcgcgcgcggcaaattcactgaggcgcagtttgaaacgttaaccgaatggatggactggtcgttggcggatcgcgatgttgatttggacggcatctattattgtcctcaccatccgcagggcagcatagaagagttccgtcaggtatgtgattgccgcaagccgcatccaggaatgcttatctcggcgcgtgattttctgcatatcgatatggcggcttcttatatggtgggagacaagctggaagatatgcaggcggcagcggcggcaaatgtcgggacaaaagtgctggtgcgtacgggcaaaccggtcacggcagaagcagaaaacgcggcggactgggtgttaaacagccttgctgacctgccatcagcgataaaaaagcagcaaaaataa

SEQ ID NO: 371614 - DNA, 1032 bp, Salmonella enterica
atgattaaactttcgaatattaccaaagtgttccagcaggggacgcgcaccattcaggcgctaaataatgtcagcctgcacgttcctgccgggcagatttatggcgtcattggcgcctccggcgccggtaaaagtacgcttatccgctgcgttaacttacttgaacgtccaaccgaaggtagcgttcaggtcggcggtcaggagctgacaacgctttcagagtctgagttgaccaaagctcgccgtcaaatcggcatgattttccaacattttaacctgctctcttcccgtaccgtgtttggcaacgtcgcgttgccgctggaactggataacacaccaaaggaagagatcaaacgccgtgtcacagagctgctggatttagtcggtcttggcgacaagcacgacagctatccggcaaatctttccggcggtcagaaacagcgtgtcgcgattgcccgcgcgttagccagtaatccaaaagtgttgctgtgcgatgaagccaccagcgcgcttgatcccgcgacgacccgttcgattctggaattgctgaaagatatcaaccgtcgtctggggttgacgattctgcttatcactcatgaaatggatgtcgtaaaacgtatctgcgactgcgttgccgttatcagtaatggcgagcttattgagcaagatacggtcagcgaagtcttctcgcaccctaaaacgccgctggcgcagaagtttattcagtccactctgcacctggacattccggaagattaccaggcgcgtttgaaagcgtcgccggaaactgacagcgtgccgatgctgcgcatggagttcaccgggcagtctgtggatgccccgctgctttctgaaaccgcgcgtcgtttcaatgtgaacaataatattatcagcgcgcagatggattacgcgggcggtgtgaagttcggcattatgctaacggaaatgcacggcacacaagaagagacgcaagccgcaattgcctggctgcaggatcaccatgtgaaagtagaggtactgggttatgtctga

SEQ ID NO: 371615 - DNA, 654 bp, Salmonella enterica
atgtctgaggcaatgatgtggttactggttcgtggcgtctgggaaacgctggcgatgacctttgtctccggtttcttcggtttcgtgattggcctgccggttggcgtattgctgtatgttacgcgcccggggcagattatggagaacgccagactgtatcgctccctctccgcggtggtcaatattttccgctcgattccctttatcatcctgctggtgtggatgattccttttacccgaataattgtcggcacctccattggtttgcaggctgcaattgtaccgctgaccgtcggcgccgcgccttttatcgcccgtatggtggaaaatgcgttgttagagatccctgccgggctgattgaagcctcgcgagcgatgggcgccacgccgctgcaaattgtacgtaaaatccttttaccggaagcgctgcctggtctggtgaatgcggcaaccattacactgatcaccctggtcggttactccgcaatgggcggtgccgtcggcgctggcggcctcggtcaaatcggctatcagtacggttatattggatacaatgctaccgtgatgaatacggtgctggtattacttgtcgttctggtttatttaattcagttatccggcgatcgcatcgtcagggctgtcacgcataagtaa

SEQ ID NO: 371616 - DNA, 816 bp, Salmonella enterica
atggcgttcaaattcaaaacctttgcggcagtgggtgctctgattggttctctggcacttgcgggttgcggtcaggatgaaaaagatccaaatcatattaaagtcggcgtaatcgttggcgcagagcagcaagttgccgaagtcgcgcagaaagtcgcgaaagaaaaatacggcctggacgtggaattggtgacctttaatgattatgttctgcctaatgaagcgctgagcaaaggcgacatcgatgccaatgccttccagcacaaaccgtatctggatcagcaaatcaaagatcgaggctacaaactggtttccgttggtaagacttttgtctatcccattgcaggatattccaaaaaaatcaaatctctggatgagctcaaggacggttcccaggtcgctgtgcctaacgacccgaccaaccttggtcgttccctgttgctgctgcaaaaagtagggctgattaaactgaaagacggcgtcggtctgcttcctacctcgctggatatcgtcgaaaacccgaaaaatctgaaaattgttgagctggaagcgccgcagttgccgcgttcgctggatgacgcgcagatcgcgttagcagtcatcaatacgacatacgccagccagattggcctgacgccagcgaaagacggtatcttcgttgaagataaagattctccgtacgttaaccttatcgtgacgcgtgaagataacaaagacgccgagaatgtgaaaaaattcgttcaggcttatcagtctgatgaagtgtacgaagccgcaaataaagtttttaatggcggtgcggtgaaaggctggtaa

SEQ ID NO: 371617 - DNA, 405 bp, Salmonella enterica
atgcgtgctttaccgatctgtttattggcactcatgctgggcggttgttccatgctaagcagatcccctgttgaacccgttcaaagcaccgcaaccccgccaaaagcggagccggagaaacctaaagcgccgcgtgccgctcccgtcaggatttacaccaatgctgaagacttagtcggtaaacctttccgcgatcttggcgaggttagcggcgaatcctgccaggcgacaaatcaagactctccgcctaacattccaactgcgcgcaagcgtatgcagattaatgcatctaaaatgaaagccaacgccgtcctgctgcacagctgtgaaattaccagcggcacgccaggctgctatcgtcaggcggtttgtatcgggtccgccctgaatatttcggcgaaatga

SEQ ID NO: 371618 - DNA, 708 bp, Salmonella enterica
atgagcagctttcagtttgaacaaatcggcgttattcgctccccctataaagaaaaattcgccgttccgcgccagcctggtctggtcaaaagcgcctgcggcgaactgcatctgatagcgccttacaaccaggccgatgccgttcgcggcctggaagctttcagccatttgtgggtgcttttcgtttttcatcagacgatggacggcggctggcggccgacagttcgtccgccccgtcttggcggtaacgccagaatgggcgtttttgccacgcgctccacgttccgccccaatccgattggcatgtcgctcgttgcgctaaaaggtatcgagtgccggaaagagagcgtaattctgaaattaggcagtctggatctggtggatggcacgccggtggtggatattaaaccgtatttaccgtttgccgaggccttaccggacgccgccgccagctatgcgcaacaggcgccgatagctgaaatgcccgtgagttttaccgctgaggtggctcaacagcttacgacgctggaaaggcgttatccgcagctacggacatttatttgcgatgtgctggcgcaagatcctcgcccggcttatcgtaagggtgaagagacgggcaaaacctatgccgtctggctgcatgattttaacgtgcgctggcgtgtggttaacaccggatttgaagtgtttgcgctggaaccacggtaa

SEQ ID NO: 371619 - DNA, 1719 bp, Salmonella enterica
atgcgtactagccaatacctgctctccactctgaaggagacacctgccgacgccgaggttatcagccaccagctgatgctgcgcgccgggatgatccgcaagctcgcctccgggttatatacctggctgccgaccggcctgcgcgtcctgaaaaaagtcgaaaacatcgtgcgtgaagagatgaacaacgccggtgctatcgaggtgtcgatgccagtcgttcagccagccgacctgtggcaagagagtggtcgttgggaacagtacggtccggaactgctgcgttttgtcgaccgtggcgagcgtccgttcgtactcggcccgacccacgaagaagttatcaccgatctggtgcgtaatgaactcagctcttataagcagttgccgctgaacttcttccaaatccagaccaaattccgtgatgaagtgcgtccgcgctttggcgtgatgcgttcgcgcgaattcctgatgaaagatgcttactctttccacacctctcaggagtcgttgcaggaaacctatgacgccatgtacgccgcgtatagccgtatcttcagccgtatggggctggatttccgcgcggtacaggccgataccggttctatcggcggcaacgcctcgcatgaattccaggtgctggcgcaaagcggcgaagacgatatcgttttctctgatgtttctgattacgcggctaacattgaactggcagaagctatcgcgccgcaaacgccgcgcgcagcggcgacgcaggaaatgactctggtcgatacaccaaatgccaaaaccatcgcggagctggtggaacaattcaacctgccaattgaaaaaacggtaaaaacgctgctggtgaaagcggtgaaagacagcaagtctccgctggtggctctgctggttcgcggcgatcatgaactgaatgaagttaaagcggaaaaactgccgcacgttgccagcccgctgaccttcgctaccgaagaagagattcgcgccgtaattaatgccggccctggctccctcggcccggtcaatatgccgattccggtcatcatcgatcgtaccgttgccgccatgagcgattttgccgctggcgccaacatcgacggtaaacactactttggtattaactgggatcgcgatgtggcgacgcctgttgttgccgacatccgtaacgtagtcgccggcgatccgagtccggatggtcagggaacgttgcttatcaaacgcggtatcgaagtgggtcacatcttccagttaggtaccaagtactcagaagcgctgaaagcctccgttcagggtgaagatggccgtaaccagatcctgacaatgggctgctacggtatcggcgtaacacgtgtcgttgccgcggctatcgagcagaactttgacgagcgcggcattgtatggcctgacgccattgcgcctttccaggtcgctattctgccgatgaatatgcacaaatccttccgtgtgcaggagctggcggaaaagctgtacagcgaattgcgcgcgcagggcattgaagtgctgatggacgaccgtaaagagcgcccgggcgtgatgtttgccgatatggagctgattggtattccacatactatcgtgattggcgatcgcaacctggataacgacgatattgagtataaataccgtcgtagcggtgaaaaatcgctgattaaaaccggcgatatcgttgattatctggtcaaggcgattaaaggctaa

SEQ ID NO: 371620 - DNA, 702 bp, Salmonella enterica
atggtgagaacagcaatattgtcagtagcggcagcctgtacgctatttgcattgatagggtgtaataaccgtgcggaagttgacgccctgcaacctgcgcaggcggcggaattaaaacccatgcagcaaagctggcgcggcgtgctgccctgtgcggattgtgaaggtattgaaacgtcactgtttctggaaaaagacggcacatgggtgatgaacgagcgctatcagggcgtgcgcgaagaaccttcctcttttgcgtcatacggtacctgggcgcggacggcggataaactggtgttaaccgacagcaatggcgagaaatcgtattatcgcgcgaaaggcaatgagctggagatgctcgacagagaaggcaatccggtggcttcgcagcttaattatacgcttgtgcctgttaccgccagcctgccggtaacgccaatgccgctgcgtggtatgtatgtatacagggccgatgcggcgacctttaccgattgcgcgaccggaaaacggctgccggtcgccagtaacgcccagcttgagcgcggctatctggcggcgaaaggtgaagcggaaaaaccggtgctgctgacggtagaagggcattttgtgttagccgcgaatccggacacgggcgagccggtaaaaacgctaatagctgataaaaatgtgaagtttgcgccgggtaaagattgcactcactaa

SEQ ID NO: 371621 - DNA, 423 bp, Salmonella enterica
atgattgccatctcccggacggtctccatagccgataatgagctggaaattacggccattcgcgcgcagggcgcgggtggtcagcacgtaaataagacctctagcgcgattcatttgcgctttgacattcgggcctctggcctgccagagtattataaacagcgtttgctgacggccagccaccatctgataagcgatgatggcgtcattatcattaaggcgcaggagttccggagccaggagctcaaccgggaagcggctatcgccaggctggttgccgtcataaaagaattaaccgcggagcagaaaagccgtcgcgcaacccgtccgacgcgtgcctcgaaagagcgccgcttatcctcaaaggcgcaaaaatcttctgtaaaggcgcttcgcggcaaagttcgtcgtccactggattga

SEQ ID NO: 371622 - DNA, 546 bp, Salmonella enterica
atggcgcttaaagcgacaatttataaagccgtcgtcaatgtggctgaccttgatcgcaaccggtttctggatgcggcattgacgctggcgcgtcacccttctgaaacgcaggagcgcatgatgctgcgcctgttggcatggataaaatatgctgatgaacggttgcagtttacacgcgggctcagcgcggaagatgagccggaggcctggctgcgcaacgatcatctgggcatcgatctttggatagagctggggctgccggatgagcgccgtattaagaaagcctgtactcaggcgagcgacgtcgcgctctttgcttataactcccgggcggcgcaaatctggtggcagcagcatcaaagcaagtgtgcgcagttcgctaacctgtccgtctggtatctggatgacgggcagctggcgcagctcagtgaatttgccgatcgtaccatgacgctacaggcgacgattcaggacggcgcaatctggctttctgatgctcggaataatctggaaatacagctaaccgcctggcaacagccctcatga

SEQ ID NO: 371623 - DNA, 201 bp, Salmonella enterica
gtggaaaaatattgtgagttagtacgcaagcggtatgcggaaatcgccagcggagacttagggtatgtcccggatgcgctgggttgtgtattgaaagtgcttaatgaagtggcggcagatagcgccctttcagagtcggtcagggaaaaggcagcttatgctgccgcgaacttactggtgagcgattatgtcaatgaatga

SEQ ID NO: 371624 - DNA, 261 bp, Salmonella enterica
atgtcaatgaatgaaacgtatcaacccattaattgcgatgactacgatagtcttgagcttgcctgcatgcatcatttaatactgacgctaacgttaaaagatggcgaggttttgcaggcaaaagcgaacgatttgatcttacgtaaaaatgtagaatatctgcttgccgaggtttccggcgagtcttgtgagcttcgtctcgataaaatcgccagtttcagccacccggaaattggtaccgtggtagttagcgaatcctga

SEQ ID NO: 371625 - DNA, 1293 bp, Salmonella enterica
atgaccactctcacgttgaatacctcgttactctcttctcgccgtattctggctgcctttagcggtggcctggattctacggtgcttctgcatcaactggtgttgtggctagaacgccaccctgacgttacgctgcgtgctatccatattcatcacggtttaagccctcatgctgaaagctgggtgcggcattgcgaaaccgtatgcgcacgctggcaggttccgctggtagtggagcgggtgacgctggcggataatggcctgggtatcgaggcccatgcgcgtgaagcgcgctaccgggcgttcgcacagacgctattgcctggcgaagtgctggcaaccgcgcagcaccttgacgatcagtgtgaaacattcctgctggcgttaaagcgcggcagcggtccggccggactttccgcgatgggagaacgctcgccttttgccggaactctgcttcttcgcccgctgttgagagaaacgcggaagacgctggaacagtgggctgtgcgtcatggcttatgctggattgaagatgaaagcaatcaggatgacgcctacgatcgcaattttttacgcctgcgcgcgcttccgctcttacagcagcgctggccgcattttcctgcggcggtagcccgtagtgcgacgctctgcgccgagcaagaaaggctgctggacgagcttctggccagcgatcttacggactgtatcacgacggagggaacattgcggctctctccattaatgtcgatgagcgatgtgcggcgggcggcgattttgcgtcgctggctggcgatgcgtaatgcgccgatgccctctcgcgacgcgctggaacgtatctggcaggaggtggcgctggcgcgcgacgatgcctctccctgtttacgctttggcgatcacgagattcgccgttatcagtcgcaactgtggtggattaaatccgtggccggacaacacgaaacgacggtcgcctggcccgtctggcaaacaccgctggcgctgcctgccggcttagggacggtacagctcgttcctggcggcgaactgcgccgaccgcgagaggaagaatccgtcagcattcggtttaaagcgccagggttgctacacattgtgggacgtcacggcggacgtaaattaaagaaaatctggcaggagcaggggatcccgccctggcgacgagacaccacgccgctgttgttttacggcgaaacgctgattgcggctgcgggtgtttttgtgacgcgtgagggagcagcagaagataaagaaggggtgagtctggtttggcatgcctga

SEQ ID NO: 371626 - DNA, 390 bp, Salmonella enterica
atgctgggattaaaacaggttcatcacatcgcgatcattgcgacagactatgcggtgagcaaggcgttttactgcgatattctggggttcgatctgttaagcgaagtttggcgggaagagcgtgactcgtggaagggcgatttggcgctaaacgggcagtatgtgattgagcttttctcttttcccttccctccggcgcgtccaagccgacctgaagcctgcggcctgcgccatctggctttcagcgtggaaaatgtggaaaacgccgttgcgcatctggaaaagcatcaggttaagtgcgaaccgatacgcatcgatccgtataccgggaagcgctttacttttttcaacgatccggacggtttaccgcttgagctgtatgagcagtaa

SEQ ID NO: 371627 - DNA, 2142 bp, Salmonella enterica
atgaacatcatcgccattatggggccgcacggggtttactataaagatgaacccatcaaggagcttgagcgtgcattacaatccctgggatttcaaattatctggccgcaaaatagcgttgacttgttgaagtttattgaacataacccgcgcatctgcggcgttatttttgactgggatgaatacagtctcgacctttgtagcgaaatcaaccagctaaatgaataccttcctctctacgcctttatcaataccaactccacgctggacgttagcgttcacgatatgcgcatggcgctgtggttttttgagtatgcattggggctggctgaagatatcgcgacgcgcattcatcaatatacaaacgaatatctcgataatattacgccgccgtttaccaaagcgctttttacctacgccaaagaaggaaaatataccttttgtacgccgggtcatatggcgggaacggcgtatcagaaaagcccgccaggctgcctgttttatgacttttttggcggcaataccttaaaagctgatgtgtcgatttcggtgactgaactgggatcgctgctggatcacaccgggccgcatctggaagcggaagagtatatcgcccgtacttttggcgccgagcagagctatatggtgacgaacggtacgtcgacctcgaataaaattgtcggtatgtatgccgcgcctgcgggaagtacgctactcattgatcgtaattgtcataaatcgctggcgcatttgctgatgatgagcgatgtggtgcctctctggttgaagccgacgcgcaatgcgctcggtattctcggcggtattcctaagcgtgaatttacccgcgacagcattacgcgtaaggtggcggaaaccgcgcaggcgcaatggccggttcatgcggttatcaccaattctacttacgatggtctgttgtataacactaactggatcaagcagatgctggacgttccctcgatccattttgattccgcctgggtaccctatacccatttccatccgatctaccaggggaaaagcgggatgagcggcgatcgggtgcccggaaaagtgattttcgaaacgcaatccacccataaaatgctggcggctttttcgcaggcgtcgcttattcatatcaaaggggaatatgacgaagagacgtttaacgaagcgtttatgatgcacacttccacatcgccgagctatcccattgtcgcctctatcgagaccgcggcggcgatgctgcgcggcaatccagggaaaagattgattaatcgttcggtggaacgggcgctccattttcgtaaagaagtacagcggttacgtgaagagtccgatagctggttctttgatatctggcagccggaagaggttgatgaggccgaatgctggccggtcacgccgggagaaacctggcatggcttcgccgatgctgatgacgatcatatgtttctcgatccggttaaggtgacaatcctgacgccggggatggatgagcagggcaacatgagcgaagaggggatacccgccgcgctggtggcgaagttcctcgatgagcgaggcgtggtggtggaaaaaaccgggccgtataatctgctgtttttgttcagcatagggattgataagacccgtgcgatggggctgctgcgcggactgacagaatttaaacgcgcctacgatcttaacctgcgcgtcaaaaatatgttgccggatctgtatgcggaagatccggatttttatcgcaatatgcgcattcaggatctggcgcaggggatccataaactgatccgccagcacgatcttccggggctgatgctgcgggcgttcgaggttttaccggagatgatcatgaccccgcaccaggcctggcagcgtcagatcaaaggcgaggtggaaaccgtggcgctcgatcaactgccagggcgcgtttccgcgaatatgatcctgccttatccgccaggcgttccgctgttgatgcccggcgagaggattacgcaacagagtcgggccgtgctcgattttctgctgatgctctgctcgattggccagcattatcccggttttgaaacggatattcacggcgcgaaacggaatgaagacggggtgtaccaggtacgagtcttaaaacacgcctgttag

SEQ ID NO: 371628 - DNA, 1764 bp, Salmonella enterica
atgggattgcaaaaaacactggcgctcagcgccgtggcggcaggaatcatgttgagcttatccggtgcgcaggccgcgccgctgcttagcagtagtgagccaatgaccatcaacgccagcgatctggcggcgaaagagaaagcgctgacggattttccgttaatggaggcagtgaaatcctctatccagacgttggataacagcgcggtcgaacaaatcgaaccggggcgcgccgctaacccggcaaacgtaaaacgcgttgaaagtattctgaaagaggccgactgggattatctgttcccgatgcgcgcgccggaatacacttattctaacttcctgaaagcgataggtaaattcccggcggtttgtggtacctacaccgatggacgcgatagcgacgctatctgccgtaaaaccctggctactatgtttgcgcattttgcccaggagacgggcggtcacgaaagctggcgtgacattccggaatggcgccaggcgctggtctatctgcgcgaagtcggctggacagaagggcagaaaggcggctacaacggcgaatgtaacccggatgtatggcagggccagacctggccgtgcggtaaagataaggacggcgatttcctcagctattttggtcgcggggcaaaacagctttcttataactacaactatgggcctttctctgacgcgatgtatggcgacgttcgccctctgctggataaacccgagctggtggcggatacctggatgaacctggcgagcgccgtcttcttctttgtgtatccgcagccgccgaagccgtctatgctacatgtgattgacggtacctggcagccaaacgatcgcgataaagcaaacggcctggtatcaggtttcggcgtcactattcagatcatcaatggcggcgtggagtgcggcggcgcagatgagaatgcgcagtcgcttaaccgcatcgcctactacaaagagtttgccaactacctgaaagtgccggtgccggcggacgaagtgttgggctgtaaaaagatgaagcagttcgatgaaggcggcgctggcgcgttaccgatctattgggaacaagactggggctggagcgccgatactgcggacggtaaaacctattcctgccagttagtgggatatcagacgccgtataccgcctttaaagagggcgactacacgaaatgtgtacagcattatttcaacgttaatgtcgtcgatgataacggaaccactgaaccggatgtcacgccaactccggcgccagtgacggatgaaaacgtggcgccagtcgcgcgcattgccgggccggtcggggcggtggaagctggtagcccggtttcactcagcgcggaaggatcgaccgacgcgaatggcgacaagctcacctatacctggatgtcgcaggatggcaaaacgctgagcggccaggataaagccgttgtgattttcaacgcgccggatgtcactcagaacacccagtatgtggtgaatctgaccgttagcgacggtacgctctccagtacagcggtttatacgctgaatgtgaaagcgaaggccgccgctgcggatgacgaagataagaccaccagctatcctgcctggagcagcagccagaaatggaatccgggcgacatcgttaacagtaatggcgcattgtaccagtgcaaaccgttcccggaaggctcatggtgtaatgttgcgcctgcctactatgagcccggtgtagggattgcctgggccgatgcatggaacgcattgtaa

SEQ ID NO: 371629 - DNA, 960 bp, Salmonella enterica
atgagtctgaatttccttgattttgaacagccgatagcagagctggaagcgaaaatcgattctctgactgcggtaagccgccaggatgagaaactggatattaatatcgatgaagaagtccatcgcctgcgcgaaaaaagcgtagaactgacgcgcaaaatcttcgccgatctcggcgcatggcaggtagcccaactggcgcgccatccgcagcgtccgtacaccctggattatgtccgtctggcgtttgatgagtttgatgagctggcgggcgatcgcgcctatgctgatgacaaagccatcgtcggcggtatcgcgcgtctggaagggcgaccggtgatgatcattggtcatcagaaaggtcgtgaaaccaaagaaaaaattcgtcgtaactttggcatgccagcgccggaaggctaccgcaaagcgctgcgcctgatggaaatggctgaacgcttcaacatgccgattatcaccttcatcgacaccccgggcgcttaccctggcgtgggcgcggaagagcgtggtcagtctgaagctatcgcccgcaacctgcgtgagatgtctcgtctgaacgtaccggtcatctgcaccgtgattggcgaaggcggctccggcggcgcattggcgattggcgtgggtgataaagtgaatatgctgcaatacagcacctattccgttatctccccggaaggttgcgcctctattttgtggaagagcgccgacaaagcgccattggctgctgaagcgatgggcatcatcgcgccgcgtctgaaagagctgaagctcatcgattccatcattccggagccgctgggcggcgcgcaccgtaatccggaagcgatggcggcgtcgctaaaagcgcagctgctggaagatttagccgatctcgatgtgttaagcaccgatgatttaaaaaaccgtcgttaccagcgtttgatgagctacggttacgcctaa

SEQ ID NO: 371630 - DNA, 3483 bp, Salmonella enterica
atgtctgaaccacgtttcgttcacctgcgggtgcacagcgactactctatgatcgatgggctggcgaagaccgggccgctggtgaaaaaggcggcctcattaggtatgcctgcgctggcgatcaccgattttaccaacctctgcggtctggtgaagttctacggagcgggtcatggcgcgggcattaaacccatcgtcggggcggactttaacgttcacaacgaactgctgggagatgagctgactcatctgacggtactggcggcgaataatacgggataccagaacctgacgttgctgatctcgaaagcgtatcagcgcggctacggcgcggcaggcccgattatcgagcgcgactggctggtagagcttaaagaaggtttgatcctgctttccggcgggcgcatgggcgacgtaggccgctgtctgctacgcggcaaccaggcgctggtggaggagtgcgttgctttctatgaagcgcattttcccgatcgctactttctggaactgatccgcaccggcagacaggatgaagagacttatctccatgctgcggttgaactggctgaggcacgtggtttgccggttgtcgcgacaaacgatgtccgtttccttgaaagcgatgattttgacgcccatgagattcgtgtcgcgatccacgacggtttcacgctcgacgatcctaaacgtccacgcaattattcaccgcagcagtatatgcgcagtgaagaagaaatgtgcgagctgttctccgatattccggagtcgctggaaaatacggtggagattgccaaacgctgcaacgtaacggtgcgtctgggtgaatatttcctgccgcagttcccgaccggcgatatgaccaccgaagattatctggtcaaaaaagcgaaagaggggctggaagagcgtctggctttcctgtttccggacgaagaagagcgcaaaaagcgtcgcccggaatatgacgagcgtctggatattgaactacaggttatcaaccagatggggttccctggctacttcctcatcgtgatggagtttatccagtggtcaaaagataacggcgtgccggtagggccgggacgtggttccggggctggttcgctggtggcctacgcgctgaaaattaccgaccttgatccgctggaatttgacctgctgttcgaacgtttcctgaacccggaacgtgtctcgatgcctgacttcgacgttgacttctgtatggagaaacgcgaccaggtgattgagcacgtcgcagacatgtacgggcgtgatgcggtatcgcagattatcaccttcggtacgatggcggcgaaagccgttatccgcgatgtgggccgcgtgctggggcatccgtacggttttgtcgatcgtatctcgaagctggtgccgcccgatccgggcatgacgctggcaaaagcctttgaagcggaaccgcaactgccggaaatttacgaggcggatgaagaggtcagagcgctgatcgatatggcgcgtaagctcgaaggcgtcacgcgtaacgccggtaagcacgctggcggcgtggtcatcgcgccgaccaaaattaccgactttgcgccgctgtactgcgatgaagagggcaagcatccggttacccagtttgataaaagtgacgtggaatatgccgggctggtgaagttcgacttcctcggtttgcgtacgctgaccatcatcaactgggcgctggagatgatcaacaagcggcgcgagaaaaacggcgagccgccgctggatatcgccgccattccgctggatgacaagaaaagcttcgacatgctgcagcgctcggaaaccacggcggtcttccagcttgaatcgcgcggcatgaaagatctgatcaaacgtctgcagccggactgctttgaagatatgatcgcactggtggccctgttccgtcccggcccgttgcagtcagggatggtagataacttcatcgaccgtaagcacggtcgtgaagaactctcttacccggacgttcagtggcagcatgaaagcctgaagccggtactggagccgacctacggcatcattctgtatcaggaacaggtgatgcagattgcccaggtactttccgggtatactctcggcggcgcggatatgctgcgtcgtgcgatgggtaagaaaaagccggaggagatggccaaacagcgttccgtttttgaagagggcgcgaaaaagaacggtatcgacggcgaactggcgatgaaaatctttgacctggtggagaaattcgccggttacgggtttaacaaatcgcactccgccgcttatgcgctggtttcttaccagacgctatggctaaaggcgcactatccggctgaatttatggcggcggtaatgaccgccgatatggataacaccgagaaggtcgtcggcctggtggacgagtgctggcggatgggactgaaaattctgccgccggatattaactccggattgtaccatttccacgttaacgatgagggcgagatcgtctacggcatcggcgcgatcaaaggcgtcggcgaagggccgatcgaagcgatcatcgacgcgcgtaatcagggcggctatttccgcgagctgtttgatctgtgcgcgcggaccgacaccaaaaagctcaaccgccgggtgctggaaaagctgatcatgtccggggcgttcgaccgcctggggccgcaccgcgccgcgctgatgaactcattgggcgatgcgctgaaagccgccgaccagcacgccaaagcggaagctatcggtcaggcggatatgttcggcgtactggcggaagagccggagcaaatcgaacaatcctatgccagctgccagccgtggccggagcaggtggtgttagatggggaacgtgaaacgttggggctgtacctgacgggccaccctatcaatcagtatttaaaagaaattgagcgctatgtcggcggggtaaggctcaaagacatgcatccgacagaacgtggtaaagtcaccacggctgcggggctcgtgattgccgcaagggttatggtcaccaagcgcggcaatcgtatcggcatctgtacgctggatgaccgttccgggcgtctggaagtgatgttatttaccgacgcgctggataaataccagcagttgctggaaaaagaccgcatacttatcgtcagcggacaggtcagctttgatgacttcagcggggggcttaaaatgaccgcccgcgaagtgatggatattgacgaaactcgcgaaaaatacgctcgcgggcttgctatctcgctgacggacaggcaaattgatgaccagcttttaaaccgactccgtcagtctctggaaccccaccgctcggggaccattccagtacatctctactatcagagggcggatgcgcgagcgcggctgcgttttggcgcaacgtggcgtgtctctccgagcgatcgtttacttaacgatctgcgtggcctcattggttcggagcaggtggaactggagtttgactaa

SEQ ID NO: 371631 - DNA, 597 bp, Salmonella enterica
atgatcgaatttgtttatccacacacccatttagtggcgggtgtggatgaagtgggccgtggcccgctggtgggcgccgtagtgaccgccgccgtgatcctcgatccggctcgtccgatcgtcggtctgaatgattccaaaaaattgtctgaaaagcgtcgtctgtcattgtatgacgagattaaagaaaaggcgttaagctggagtctgggacgcgcggaagcgcatgaaattgatgagctgaatattttgcacgccaccatgctcgccatgcagcgcgctgtcgctggtctgcatattgcgccagaatatgtgctgatcgacggcaatcgctgtccggaactgcctgtgccgtcaatggccgtggtgaaaggcgacagccgcgtggcggagattagcgcggcgtctattctggcgaaagtcacccgcgacgcagaaatggcggcgctggatatcgtttttcctcagtatggctttgcgcagcacaaaggctatccaaccgcttttcatctggaaaagttggcccagtatggcgcgacggcgcaccaccgacgcagttttgcgcctgttaaacgcgctctgggacttgtgtcctga

SEQ ID NO: 371632 - DNA, 1149 bp, Salmonella enterica
atggcggcacagcgtcctttaacgattgccctggtcgccggtgaaacgtccggcgatattcttggcgcaggcttaattcgtgcgctgaaagcgcgcgtacccaacgcccgctttgtgggcgttgcggggccgcgtatgcaggccgaagggtgtgaagcctggtacgaaatggaagagctggcggtcatgggcattgttgaagtgctcggacgtttacgccgtttgttgcatatccgcgccgatctgacccgccgttttaccgagctcaagcccgatgtctttgtcgggattgatgcccctgatttcaacattaccctcgaaggtaatctgaaaaagcaagggattaagaccattcattatgtcagcccgtccgtttgggcctggcgacagaaacgcgttttcaaaataggcagatccacccatatggtgctggcttttctgcctttcgaaaaagcgttttacgataaatttaacgtcccgtgccgctttatcggtcacaccatggcggatgccatgccgctggacccggataaaaatgcggcgcgcgacgtgctgggtatcccgcatgacgcccattgtctggcgctactgccaggtagccgtggcgcggaagtggaaatgctcagcgccgacttcctgaaaaccgcacaattgctgcgacagcgctatcccgatctggaagtggtagtgccgctggtaaacgcgaaacgccgcgagcagtttgaaaaaattaaagcggaggttgcgccggatctcgccgttcatttgctggacggtatggcgcgcgaggcgatgatcgccagcgacgcggcgttgctggcctcaggcacggcggcactggagtgtatgctggcaaaatgcccgatggtcgtggggtatcgtatgaagcccttcactttctggctggcgaaacgtctggtgaaaacggagtatgtgtctttgcctaacctgctggcgggaagagaattagtcaaagagctgttgcaggaagagtgcgaaccgcaaaaactcgccgaagcgctgttgccgctactggcgaacggtaaaaccagccatgcgatgcacgacaccttccgtgagctgcatcagcagatccgctgtaatgccgatgagcaggcggcagatgccgtcctggagttagcacaatga

SEQ ID NO: 371633 - DNA, 789 bp, Salmonella enterica
gtgattgataaatccgcctttattcatcctaccgccattgtggaagacggcgctgtaattggcgctaatgcccacattggtcccttttgtattgttgggccgcaggtcgaaattggtgagggaaccgtactgaagtctcatgtggtcgtgaatggtcaaaccaaaatcggccgcgacaacgagatttatcagtttgcctccatcggtgaagtgaaccaggatctgaaatatgcgggtgagccgacccgtgtggaaattggcgatcgtaaccgcatccgcgaaagcgtcaccattcatcgtggtacagtgcagggcggtgggttgacgaaggtgggtagcgataacctgctgatgatcaatgcgcatgtcgcacatgattgtacggtagggaatcgctgtatcctcgccaacaacgccacgctggcggggcacgtatcagtcgatgattttgcgattatcggcggtatgacggcagttcatcaattctgcattatcggtgcgcatgtgatggtcggcggctgctccggcgtggcgcaggatgtccctccgtatgtgattgcgcagggtaaccatgcgacgccgttcggggtaaatatcgaagggctgaagcgtcgcggctttagccgtgaagggctggtggcgattcgtaatgcctacaaactgttgtaccgcagtggtaaaacgctcgacgaagcgaagctggaaatcgctgaacttgctgaaaagcatccggaagtgaaggcgtttaccgagttctttgagcgttcaacgcgcggtccgattcgttaa

SEQ ID NO: 371634 - DNA, 456 bp, Salmonella enterica
ttgactactaacactcatactctgcagattgaagagattttagagcttctgccgcaccgttttccgtttttactggtcgatcgcgtgctggactttgaagaaggtcgttttctgcgtgcggtgaaaaatgtctccgtcaacgagccgtttttccaggggcactttccgggcaaaccgattttgccaggcgtgctgattctggaagcgatggcgcaggcaaccggtattctggcgtttaaaagcgttggtaaactggaacctggcgaactgtattatttcgcgggtattgatgaagcgcgctttaagcgtccggtggtgccaggcgatcagatgatcatggaagtcactttcgagaaaacgcgccgtggcctgacccgctttaaaggggttgcgctggtcgacggtaaagtcgtgtgcgaagcaaccatgatgtgtgctcgtagccgggaggcctga

SEQ ID NO: 371635 - DNA, 1026 bp, Salmonella enterica
atgccttcaattcgactggctgacttagcagaacagttggatgcagaattacacggtgatggcgatatcgtcatcaccggcgttgcgtccatgcaatctgcaacaacaggccacattacgtttatggtaaatcctaagtaccgtgaacacttaggtttatgccaggcttctgcggttgtcatgacgcaggacgatcttccttttgctaagagcgcggcgctggtagttaaaaatccctacctgacctacgcgcgcatggcgcaaattttagatactacgccgcagcccgcgcagaatatcgcgccaagcgccgtgattgatgcgacggcaacgctgggtagcaatgtttcagtcggcgcgaatgcggtgattgaatctggcgtacaactgggcgataacgtggttatcggcgcaggctgtttcgtcggaaaaaatagcaaaatcggggcgggttcacgcttgtgggcgaacgtaacgatttaccacgacattcagatcggtgagaattgcctgatccagtccagtacggtgatcggcgcggacggttttggctacgctaacgatcgtggcaactgggtgaagatcccacaactgggccgggtcattattggcgatcgtgtcgagatcggcgcttgtaccaccattgaccgtggcgcgttggatgatactgttattggcaatggcgtgattattgataatcagtgccagattgcacataacgtcgtgattggcgacaatacggcagttgccggtggcgtcattatggcgggtagcctgaagattggccgttactgcatgattggcggcgccagcgtgatcaatgggcatatggaaatatgcgacaaagtcacggtaactggcatgggtatggtgatgcgtcccatcacggaaccgggcgtctactcctcaggcattccgctgcaacccaacaaagtatggcgtaaaactgctgcactggtgatgaacattgatgatatgagcaagcgtctcaaagcgattgagcgcaaggttaatcaacaagactaa

SEQ ID NO: 371636 - DNA, 486 bp, Salmonella enterica
gtgaaaaagtggttattagctgcaggtcttggtttggcgatggtaacgtccgcacaggctgctgacaaaattgcaatcgtcaacatgggtaatctgttccaacaggttgcgcagaagacgggtgtatccaatacactggaaaacgaatttaaaggccgtgcggctgaactgcaaaaaatggaaaccgatctgcaatctaaaatgcagcgtctgcaatccatgaaagcaggtagcgatcgtactaagctggaaaaagacgtgatgtctcagcgccagactttcgcgcaaaaagcgcaggcttttgagaaagatcgcgctcgtcgttccaacgaagaacgcaacaaactggtgactcgtatccagactgcggtgaaaaaagtggctaacgaccagagtatcgatctggtggtagacgcaaacaccgttgcttacaacagcagcgatgtgaaagacatcaccgctgacgtactgaaacaggttaaataa

SEQ ID NO: 371637 - DNA, 2415 bp, Salmonella enterica
atggcgatgaaaaagttgctcatagcgtcgctgctgttcagcagcgccaccgtatacggtgctgaagggttcgtagtgaaggacattcatttcgaaggcctgcagcgagtcgccgttggtgcggctctcctcagtatgccggtgcgcacaggcgacacggttaatgatgaagatatcagtaacaccattcgcgctctgttcgccaccggcaactttgaggacgtccgcgtcctgcgcgatggtaatacccttctggttcaggtaaaagaacgtccgaccattgccagcatcactttctccgggaacaagtcggtgaaagatgacatgctcaagcaaaacctcgaagcgtctggcgtacgtgttggcgagtctctggatcgcaccacgttgtctgatatcgaaaaaggtctggaagacttttactatagcgtaggtaaatacagcgccagcgttaaggcggtcgtcacgccgctaccgcgcaaccgtgttgatcttaaactggtgttccaggagggcgtatcggcgaagatccaacagatcaacatcgtcggtaaccatgcctttagcaccgaagaactcatttctcatttccagttgcgtgacgaagtgccgtggtggaacgtcgtcggcgatcgtaaataccagaaacagaagctggcgggcgaccttgaaaccttgcgcagctactatctggatcgcggctacgcgcgtttcaatattgactccacgcaagtgagtctgacgccggataagaaagggatctacatcaccgtcaatatcaccgaaggcgatcagtacaagctttccggggttcaggtgagcggtaacctggccggacattccgctgaaattgagaaactgacgaaaattgaaccgggcgagctctataacggcaccaaagtgaccaaaatggaagatgacatcaaaaagcttctgggtcgctatggttacgcctatccgcgcgtgcagtcacagcctgaaattaacgatgctgacaaaaccgtaaaactgcgcgtgaacgtcgatgcgggcaaccgtttctacgtgcgtaagatccgctttgaaggcaacgacacctcaaaagattccgttctgcgccgtgaaatgcgccagatggaaggggcgtggctgggcagcgacctggttgaccaggggaaagagcgtctgaaccgtctcggcttctttgaaaccgtcgacaccgacacgcagcgcgttccgggtagcccggatcaggttgatgtggtgtacaaggtgaaagagcgcaacaccggtagctttaacttcggtatcggttacggtacagaaagcggcgtgagcttccaggccggcgttcagcaggacaactggttaggtaccggttattccgtggggattaacggcaccaaaaacgactaccagacctacagcgaactgtccgttactaacccatactttaccgttgacggcgtgagcctcggtggtcgtatcttctataacgacttccaggcggacgacgcggatctatccgactataccaacaagagttacggtacggatgtgacgcttggcttccccatcaacgagtacaacacgttgcgtgctggtctgggttatgtccataacaaactgtccaacatgcagccgcagatcgcgatggatcgttatcttgagtcgatgggacaatctgctgataccagcagttttgccgctgatgacttcacctttaactacggctggacctataacaagcttgaccgtggttatttcccgacggacggctcgcgagtcaacctgacgggtaaggtgacgatcccaggttccgacaacgaatactacaaagtgtcgctggataccgcgacctatgtgcctatcgataacgatcacaagtgggtggttctggggcgtactcgttggggttatggcgatggtttaggcggcaaggaaatgccgttctatgagaacttctatgccggtggttccagtaccgtgcgtggtttccagtcgaatactatcggcccgaaagcggtctataaaaatggcgcccacactagttgggacgataatgatgattacgaagactgtactcaggaatcaggctgtaaatcagatgatgcggtaggtggtaatgccatggctgtcgccagcctggaatttattaccccgacgccgttcatcagcgaaaagtatgccaactcggttcgtacctccttcttctgggatatgggtaccgtttgggatacgaactgggatccgtcatctgcgccgtcagatgtaccggattacagcgatccaggcaacatccgtatgtccgcgggtatcgcattacaatggatgtccccattggggccgttggtcttctcctacgcccagccgtttaaaaagtacgatggagacaaagccgagcagttccagtttaacattggtaaaacctggtaa

SEQ ID NO: 371638 - DNA, 1353 bp, Salmonella enterica
atgctgagtattctctggaatctggctgcattcatcatcgcactgggcgtgctgatcactgtgcatgaatttggtcatttctgggttgcccggcgctgcggtgtgcgagttgagcgcttttccatcggttttggcaaagcgctctggcgtcgtaccgatcggtacggcaccgagtatgtcatcgccctgatcccgctgggcggctacgtcaaaatgctggatgagcgcgccgaactggtagcgccggaattgcgtcgtcacgccttcaataacaaaacggtgggccagcgcgccgcaattattgccgcaggtccggttgcgaacttcatttttgctatctttgcttactggctggtctttatcatcggcgtccctggcgttcgtccggtcattggcgaaataacgcccaactcgattgctgcgcaggcgcaaattgcgcctggtacggaacttaaagccgttgatggtatcgaaacccctgattgggatgccgtgcgtttacaactggtgtccaaaattggcgatcagcagacgacggtgagcgtcgcgccgtttggtagcgaccagcggcaggataaaacgcttgatttacgtcactgggcatttgagcctgataagcaagatcctgtatcttctttagggattcggccccgcgggccacagattgaaccggtactgtcagaagtgcaggcgaattccgcagccagtaaagcgggtttgcaagcaggcgacaggatcgttaaagtcgatggtcagccgttaacgcagtggatgaaattcgtgacgtttgtacgcgataatcccggtaagccgttagcgttagagattgaaaggcaggggagcgccttgtcgttgacgttaacgccggatacgaaatcggttaacggaaaggcggaagggtttgcaggcgtggtgcctaaaattattcctctgccggaagagtacaagactatacgccagtatgggccttttagcgccatcctcgaagccacggataagacgtggcagttgatgaagctgacggtcagtatgctgggtaaattgataaccggtgatgtgaaactgaacaacctcagtgggccgatttctatcgctcagggggctgggatgtcagcggagttcggggtgatttattacctgatgttccttgcgctaatcagcgtgaacttagggataattaacctgtttccgctgcccgttcttgacgggggtcatctgctgttcctggcgattgaaaagcttaagggcgggccggtatccgagcgggttcaagactttagttatcgcattggctcgattttgctggtgttgttaatggggcttgcacttttcaatgatttctctcggttgtaa

SEQ ID NO: 371639 - DNA, 858 bp, Salmonella enterica
ttgctgaagtatcgcctgatttctgcttttgtgttaatacccgcggtcatcgctgcgctttttttattgccgccggtggggttcgccattattacgctggttgtctgtatgctggccgcgtgggaatggggacagttaagcggtttcgccgcgcgttcacagcgggtttggctggcggtgctgtgtggtctgttattggcgctgatgctatttttgttgcctgagtatcatcacaacattcgtcaaccgctggttgagatgtcgctttgggcatcgttaggatggtgggttgtcgcgctactgctggtgctattttatcccggttcggcggcaatctggcgcaactcaaaaacattgcgtctcattttcggtttgttaactattgtgccatttttctggggcatgctggcgctgcgcgcctggcactatgacgagaatcattacagtggcgcaatatggttactctatgtcatgatcctggtctggggagcggactctggcgcgtatatgtttggtaaattgtttggcaaacataagctggcgccgaaggtttccccgggtaaaacctggcaagggtttatcggcgggcttgctacggctgccgtgatctcatggggctacggtatgtgggcgaatctgaatgttgcgcctgttatcttgctgatttgctctgtggtggcggctctggcttctgtactgggcgacctcaccgagagtatgtttaagcgcgaagcaggaattaaggatagcggccacttgattccaggccatggcggcattctggaccgaattgacagcctgacggctgccgtaccggtctttgcttgcctgttgttactggtgttcaggacgctctaa

SEQ ID NO: 371640 - DNA, 759 bp, Salmonella enterica
atgttgtctgcaactcaaccagtaagcgaaaatttgccagcgcatggctgccgtcatgttgcaataattatggatggcaatggtcgctgggcgaaaaagcaagggaagatccgggcctttgggcataaagccggggcgaagtccgtccggcgagcggtctcttttgctgccaataacggtattgatgcgttaacgctgtatgcctttagtagtgaaaactggaaccgaccggcgcaggaagtgagcgcgttaatggagctgtttgtgtgggcgctggatagcgaagtcaaaagcctgcaccgccataacgttcgcctgcgtattatcggcgatatcagccgattcaactcacgtttacaagaacgtattcgcaaatcagaagcgcttaccgcccataatacgggtctaacgctgaatatcgctgcgaattacggcggacgttgggatattgtccagggagtccgacaactggcggaacaggtgcaggctggagtgctgcgccccgatcagattgatgaagagagactaggccagcaaatctgtatgcatgagctggcgcctgtggatttagtaattaggactgggggagagcatcgcattagtaactttttgctttggcaaattgcctatgccgaactttactttacggatgttctttggcccgatttcgatgaacaagactttgaaggtgcgctgcatgcctttgctaatcgagagcgtcgtttcggcggtaccgagcctggtgatgacaaagcctga

SEQ ID NO: 371641 - DNA, 1197 bp, Salmonella enterica
atgaagcaattaaccattctgggctcgaccggctctattggttgcagcacactggacgtggtgcgccataatcctgatagcttccgcgttatcgcgctggtggcgggtaaaaatgtcgcccgcatggcggagcagtgcctggagttctcgccgcgttatgccgtgatggacgatacgtcgagcgcagaacagctcaaaataatgcttcagcagcatggcagccgcaccgaggttctgagcggtcagcaggctgcctgtgagatggcggcgcttgatgaggtcgggcatgtgatggcggccattgtgggcgcggctggtttactgccgaccctggcggcgattcgcgcagggaagacgattctgctggcgaataaagaatcgctggtgacctgcgggcggctgtttatggacgaagtaaaacgcagcaacgcccggcttttacccgtcgatagcgaacataacgcgatttttcagagtttgccgcaatctattcagcataatctgggatacgctgaccttgagcaaaatggcgtaacgtcgattttgcttaccgggtctggtggcccgtttcgtgaaacgcccatgtgcgatctggcagcgatgacgccggatcaggcatgtcgtcatccgaactggtcgatggggcgaaaaatctccgtcgactccgccaccatgatgaataaaggtctggaatacattgaagcgcgttggttatttaatgccagcgcacgtcagatggaagtgttgatccatccgcaatcggtcattcattcgatggtgcgttatcaggacggcagcgtcctggcgcagcttggagaacctgacatgcgtacgcctattgcgcatacgatggcatggccgaatcgcgtcacgtccggcgcgcagccgctcgatttttgcaaactcagcgcgctgacgtttagcgcgccagattatcagcgttatccttgcctgaagctggcgatggaggcgtttgagcaaggtcaggcggcaacgacggcgctcaatgcggcaaacgaaatcaccgttgccgcgtttctggcgcaacagattcgttttaccgatatcgccgggctcaatttagcggtgctggagaggatggatttacacgaaccggcaagcgttgaggacgtattgcaggttgacgccatcgcgcgtgaagtagccagaaaacaagtgatacggctctcacgctga

SEQ ID NO: 371642 - DNA, 558 bp, Salmonella enterica
gtgattagcgatatcagaaaagatgctgaagtacgcatggaaaaatgcgttgaagcgttcaaaacccaaatcagcaaagtgcgcacgggtcgtgcttctcccagcctgctggatggtattgtcgtagaatactatggcactccgaccccgctgcgccagttggcaagcgtaacggtagaagactcccgtaccttaaaaattaacgtgtttgaccgttctatggggccagccgttgaaaaagcgatcatggcgtcagacctcggtttgaatccaagctctgcgggcaccgacattcgcgttccgctgccgccgctgaccgaagaacgtcgtaaagatctgacgaaaattgtccgtggcgaagcggagcaggcgcgtgtcgccgttcgtaacgtccgtcgtgatgcgaacgataaagtaaaagctctactgaaagataaagcgatcagtgaagatgacgatcgtcgctctcaggaagaagtacagaaaatgaccgacgcggcaattaagaaagttgatgcggcgttggcagataaagaagcagaactgatgcagttctga

SEQ ID NO: 371643 - DNA, 726 bp, Salmonella enterica
atggctaccaatgcaaaacccgtctataaacgcattctgcttaaattaagcggcgaagctctgcagggtacggaaggcttcggtattgatgcaagcatactggatcgtatggctcaggagatcaaagaactggttgaactgggtattcaggttggtgtggtgattggcggtggtaacctgttccgtggcgcgggtctggcaaaagcggggatgaaccgcgttgtgggcgaccacatgggcatgttggccaccgtcatgaacggcctggcaatgcgtgatgcgcttcaccgcgcctatgtgaacgcccgcctgatgtcggcaattcctttaaacggcgtgtgcgacaactacagttgggccgaggcgattagcctgctgcgtaataaccgtgttgtgattctgtctgcaggtacgggtaacccgttcttcactaccgactctgcggcctgtctgcgcgggatcgaaattgaagcggatgtcgtactgaaagcgaccaaagtggatggtgtattcactgccgatccggcaaaagatccttccgcgaccatgtacgatcagctgacctacagcgaagtgctggataaagagctgaaagtgatggatctggcggcgttcacgctggctcgtgaccacaaactgccgattcgtgttttcaacatgaacaaaccgggcgcgctgcgtcgtgtggtgatgggcgaaaaagaagggacgttaatcacggaataa

SEQ ID NO: 371644 - DNA, 924 bp, Salmonella enterica
atggccccctttttcacttttatatctgtgcggtttgatgccgggcagatcaaatctttcgaggattttagaatggctgaaattaccgcatccctggtaaaagagctgcgtgagcgtaccggcgcaggcatgatggattgcaaaaaagcgctgactgaagcgaatggcgacattgagctggcaatcgaaaacatgcgtaagtctggcgctatcaaagcggcgaaaaaagcaggcaacgtggctgctgacggcgtaatcaaaaccaaaatcgacggcaacgtcgctttcattctggaagttaactgccagactgacttcgtggctaaagatgctggcttccaggcatttgctgacaaagtgctggacgccgctgttgctggcaaaatcactgacgtagaagtcctgaaagcgcagttcgaagaagagcgcgttgctctggtagcgaaaatcggcgagaacatcaacattcgtcgcgtcgcttccctggaaggcgacgttctgggttcttaccagcacggtgcgcgcatcggcgttctggttgccgctaaaggcgctgacgaagagctggttaagcagctggcgatgcacgttgcggcaagcaagccggaattcgttaagccggaagatgtgtctgctgacgtggtagagaaagagtaccaggtacagctggacatcgcgatgcagtccggtaagccgaaagaaatcgcagagaaaatggttgaaggccgcatgaagaaattcaccggcgaagtttctctgactggtcagcctttcgtcatggaaccgagcaaatctgttggccaactgctgaaagagcacaacgctgacgtgactggcttcatccgctttgaagtgggcgaaggcattgagaaagtcgagactgactttgcagcagaagttgctgcgatgtctaagcagtcctga

SEQ ID NO: 371645 - DNA, 726 bp, Salmonella enterica
atggcaactgtttccatgcgcgacatgctcaaggctggtgttcacttcggtcaccagacccgttactggaacccgaaaatgaagccgttcatcttcggcgcgcgtaacaaagttcacatcatcaaccttgagaaaactgtaccgatgttcaacgaagctctggctgaactgaacaagatctctgctcgtaaaggtaaaatccttttcgttggtactaaacgcgctgcaagcgaagcggtgaaagaagctgctaacagctgcgaccagttcttcgtgaaccatcgctggctgggcggtatgctgactaactggaaaacagttcgtcagtccatcaaacgtctgaaagacctggaaactcagtctcaggacggtactttcgaaaagctgaccaagaaagaagcgctgatgcgtactcgtgagcttgagaaactggaaaacagcctgggcggtatcaaagacatgggcggtctgccggacgctctgttcgttatcgatgctgaccacgagcacattgctatcaaagaagcgaacaacctgggtatcccggtatttgctatcgttgataccaactctgatccggacggcgttgacttcgttatcccgggtaacgatgacgcaatccgtgctgttagcctgtacctgggcgctgtcgctgcaaccgttcgtgaaggccgttctcaggatctggcttcccaggcggaagaaagcttcgtagaagccgagtaa

SEQ ID NO: 371646 - DNA, 795 bp, Salmonella enterica
atggctatctctatcaagacatctgaagacatcgaaaaaatgcgcgtcgcgggccgtctggcagccgaagtgctggaaatgatcgaaccgtatatcaaaccgggcgtcaccaccggcgaactggaccgtatctgtaacgattacatcgttaacgaacaacacgcgatctccgcctgcctcggctaccacggctatccgaaatccgtctgtatctctattaatgaagtggtgtgccacggcattccggatgacgctaaacatctgaaagatggtgatatcgtcaacatcgacgtgaccgtgattaaagatgaattccacggcgatacctcgaagatgtttatcgtcggcaaaccgaccattctgggcgagcgtctgtgccgcgtcacgcaagagagcctgtatctgggcatcaaaatggtgaaaccgggcatccgcctgcgcaccattggcgccgccatccagaaatatgccgaaggcgaaggtttctccgtggtacgtgaatactgcggacacggtattggtcgcggcttccatgaagaaccgcaggtgctgcattatgatgcagacgatggcggcgtcgtgttgcagcctggcatgacctttaccattgaaccgatgctgaacgccggggattaccgtatccgcaccatgaaagacggctggacggtaaaaaccaaagaccgcagcttgtctgctcagtacgagcatactattgtggtaacggaaaacggctgtgaaattctgacgctgcgtaaagatgacaccatcccggcgatcatcacacacgacgaataa

SEQ ID NO: 371647 - DNA, 2673 bp, Salmonella enterica
atgaatactcttcctgaacagcacgcgaataccgcactccccaccctccctgaccagccgcaaaaccctggcgtctggccgcgcgctgaactgaccgtcgccggtatcaaagcccgcatcgacatctttcaacactggctgggagaggcatttgacagcggcatttgtgctgaacagcttattgaagcccgaaccgaatttatcgaccagttattgcaacgcctgtggattgaggccggtttcggtcagattgccgatctggcgctggtcgccgtcggcggctatggacgcggtgaactgcatccgctttccgatattgatctgctcattttaagccgcaaaaagctgcctgatgaacaggcgcaaaaggtcggcgagctgctgactttattatgggacgtcaagctggatgtcgggcatagcgtacgtacgctggaagagtgtctgctggaaggtctgtctgatttaaccgttgcaacaaacctcatcgaaacgcgcctgctgatcggtgatgtcgctctgtttctggcactacaaaaacatattttcagcgaaggtttttggccgtccgacaaattttacgccgccaaagtagaagagcagaaccagcgccaccagcgctatcacggtaccagctataatctggagccggatattaaaagcagccccggcggcctgcgcgatatccatacgttacagtgggtcgcccgacgtcacttcggcgctacctcgctcgatgagatggtgggattcggctttttaacccccgctgagcgcgcggagctcaacgagtgcctgcatatcctgtggcgcattcgctttgcgctacatctggtggtcagccgctacgataaccgcctgctgttcgaccgccagttaagcgtcgctcaacgccttaactacagcggcgagggcaatgatccggttgagcggatgatgaaagactacttccgggttacgcgccgggtgagcgaacttaatcagatgctgcttcagctatttgacgaggcgattctggcgctacctgcggatgaaaaaccacgtcctgttgacgatgagtttcaactgcgcggcacgcttattgatctgcgtgacgacacgctgtttatccgcgaaccgcaagcgatcctgcggatgttttatatgatggtgcgcaatagcgcgatcaccggcatctactctacgacgttacgccatttgcgccacgcccgccgccacctgagccaaccgctgtgttacatcccggaggcgcgcactctgtttcttagtatgctgcgccatcccggcgcggtcagccgcggcctgctgcccatgcatcgccacagcgtactgtgggcttatatgccgcagtggtcacacatcgtcggacaaatgcagtttgacctgttccacgcatacacggtggatgaacacaccatccgcgtaatgctcaaactggagagctttgcgaaagaagagacgcgccagcgccatccgctatgcgtcgatctctggccgcggcttccccatccggaactgatcctgatcgccgcgctgttccacgatattgcgaaaggacgcggcggcgaccattcggtactgggcgcgcaggatgtactcaccttcgccgaactgcacggtttgaactcacgcgaaacgcaactggtcgcctggctggtgcgccaacacctgctaatgtcagtcaccgcccagcgccgcgacatccaggatccggaagtcatcaagcagtttgccgaagaggtgcaaaccgaaacacggctgcgttttctggtctgcctgaccgtcgcggacatctgcgcgaccaacgaaaccttgtggaatagctggaaacagagcctgctgcgcgagctgtacttcgccactgaaaaacagctcaggcgtggaatgcaaaatacgccggatatgcgtgagcgcgtgcgtcaccatcagcttcaggcgctggcgctgctgcgaatggacaatattgatgaagccgcgctgcacaaaatctggacccgctgtcgcgctaactattttgttcgtcatagtccaaatcagctcgcctggcacgcacgccatttattgcagcacgatctgcgccaaccgttagtgttgctcagtccgcaggccacgcgcggtggaaccgaaatttttatctggagtccggacagaccctatctgtttgccgccgtctgcgccgagctggacaggcgtaatttaagcgtccatgacgcgcagatctttaccactcgcgacggcatggcaatggatacgtttattgttctggaaccagacggcagcccgctggcggcggatcgccatgacgttattcgcaccggtcttgaacaaaccattacgcagcgtagctggcagccgccgcagccgcgtcggcaaccggcaaagttacggcactttacggtcgaaacggaagtcaattttttgcccacccataccgacagaaaatcattcatggaattgatcgcgctcgatcagcctggtctgctggccagggtcggacaaatttttgccgatctgggaatttcgcttcatggcgcccgaattacaaccattggtgaacgagtagaagatttattcataatcgccacagcggatcggcgcgcacttaataatgtgctgcaacttgaggtgcaacaacggttgacagcggccctcaatccaaacgataaagggtag

SEQ ID NO: 371648 - DNA, 825 bp, Salmonella enterica
atgcagcagttacagaacgttattgagaccgcttttgagcgccgcgccgatattacgccggctaatgtagataccgtgacccgagaggcggtaaaacaggtcatttctctacttgattccggcgcgctgcgtgtcgcagaaaaaatcgacggtcagtgggtcactcaccagtggttgaagaaagcggttctgctctctttccgtattaacgataaccaggttatcgacggtgcggaaagccgctacttcgataaagtcccgatgaaattcgctgattacgacgaagcgcgttttcagaaagaaggcttccgcgtcgttccgcctgcggccgttcgtcagggcgcatttatcgcccgcaacaccgtgctgatgccgtcttacgttaacatcggcgcctacgttgacgaaggcaccatggttgacacctgggcgacggtgggttcctgcgcgcagattggtaaaaatgttcacctttccggcggcgtgggtatcggcggcgtactggagccgctgcaggctaacccaaccatcattgaagacaactgctttattggcgcgcgttctgaggtcgtggaaggcgtcattgtcgaagaaggttccgtcatttccatgggggtatacctcggccagagcaccaaaatctacgatcgcgaaaccggtgaagttcactatggccgcgtaccggcgggctccgtggtcgtttccggcaacctgccgtcaaaagacggtaagtacagtttgtactgcgcggtgatcgtgaaaaaagtcgacgccaaaacgcgtggtaaagtgggcattaacgaattattgcgcactattgattaa

SEQ ID NO: 371649 - DNA, 1302 bp, Salmonella enterica
atgtccggaacgtataatgccactattcgccgggtggtgatttccgcctggataggaaactccattgaatattatgattttctattatatggcctggcaagcgcgctggtatttggcccgctttttttccctggcgccagcccattgactgcaacgttatcttcttttgccagtttcggcgtgggatttatttcccgaccgctgggcgcgctattttttggcaacaggggggatacgcttgggcgtaaaaacacgttattaatcacgttaggcgggatgggcgcggtcacgtttctcatcggttgcctgccttcttacgccagtatcggcgcgctggcgcctgctttactggttattctgcgttttctacagggatttatggttggaggcgaatggggaggcgccatgttgatggtcgtggaatatgctgctggaaagcaccgggggcggttaagcgcgctatcgcaaacaggaggactcacgggacaattattggcgacaggcgtatttatagtcgtgacccaattaccgaaggaggcgttgttatcgtggggatggcgtattccttttctgctcagtgcgcttttggtgttgcctggattatatatgcgtcatcgtctggatgagacgcctgtcttccgtgcgtttaaaaagcagcaggccattaatcataggcagcaaagagaagaaaggccggtggtcaaagtagtacgagaacaatggcgcagcattttgctgattataattctgcgttttgcggaaagcgttcccttttttcttgccaccgtcttcgcggtttcctgggcgacgacgcagcttgggattgccagcctgactattctgtacattgtaatgttcacctgtctgctggcgtatcccatgcacgtgctatttggcatcatgtcggatcggcgtggctgccgtcaggtgtatattttcggcgcgctttttgtcgcggcaatggcttttccctttttctggctgctggaaagccgttcgctcatactgatgacaatgggctacgttctgcttattaacattggtcataattcactgaatgccgtgcaaccttcttttttcgccggactgtttcatccgcctgtacgctacagcggttcatcaattggcgctcagttgggggcggttgtggcagggggattcacgccgtttatcgctaaagcgttaagcgcagtctatgataacagttggactttggttgccggttatgtcgttttgactgcgctggcttcggcgtttgcggcaaagattgcgccggaaaccgtgttaccgcattcgccgtaa

SEQ ID NO: 371650 - DNA, 387 bp, Salmonella enterica
atgtatgacaatctaaaaagtctgggcattaccaatcctgaggaaatcgatcgttacagcctgcggcaagaagccaataacgatatcctgaaaatctattttcaaaaggatagaggtgaattctttgctaaaagcgtgaagtttaagtatccacgccagcgtaaaacggtggtggccgatggcatcggtcagggttataaagaagtacaggagattagccctaacctacgctatgtgattgacgagctggaccaaatctgccagcgcgaccgctcagaactcgatctcaaacgtaagatccttgacgacttgcgccacctggaaagcgtcgtcgcgaataagatcagtgaaatcgaagccgatctggacaagcttacccgcaaataa

SEQ ID NO: 371651 - DNA, 3033 bp, Salmonella enterica
atgactcaggaaatcacgctaacatgttattcgctgcctgcggcccccggactggataacatcaaatttgaaaaggggcgcgagcacgaccgccaggcgctgggatttattctgccagcgaatacgcagctgcaaatccgccagccaaataacaacgccggtaacgccagactccgtctgctgtgcaatgactcagcgtgtgagaaatcgcttacgctgaacggcaactggcaaacgatcagcacaacggtcgattccgttccctttattgataccctcttttttgcgcagggcggcgagttttcggtgatctaccgacagccaaccagcaataaaaatttgccacactggcgtaaggggcaatccgaagacgcttttttccagacctgggaagaacaggcgtcgccttttgccctactggaactggaccgcgtgcgttttctgctgccctgggcggatcgcgctaatgtcatcaacgccggtatcaccgcgctggatgcgtactacacgcgagtgatcgacgcctataatggctggactggtctcagcgatagccctgcttcgccgcttaatcaaaatgtcgctaaccgctattttattaaagcggataaacacggcgtcggcgcggcttattatctcccctggtggtgcgcgcaaacggctgcaacattaagccaggggtggatcgataatgtcgccacgcagtggacgattctgcatgaaatcggtcacggctatcagggcgtctttatgaatgacgtcgacctgccagtcggtgaggtgtggaacaacatttacgccgcgtttttccagcagcttaacctgaaccaggggaaccatctttataccgacggctggctctacaattacggacggcagtctgagcaggaattgcaattcattacctatctgcggaatcgcacgccggttaacgcctggggcgtccgcccccgcctgcaatttctgatgctgatgttatttaaaggcggaacagaagcctttcgagtgtttaaccagaactaccgcgagctgggtgctgacgaaaactttttgccctgcgagcatcgcctgaccgatctgctggcggacgccatcgccacagcctcaggttatgacgtcgcgccgtttattcagctgtgcggcttaccggtcgatgcgttcacccgcgagcagatcgccgcacaggcggtaaaacccgtctggccgctttacgatctgttgccggagcgcgaatgggaaagcgcgcgccaacagttagggctggactcttttgtctggctggttgaaaacgccgaactggcggagctgaacaaaacgggaacgctcacgctaacgctgaatatcgatcagccggagcaactttatggacgcgccttaacgctacacgacaacgccggcagcacgtatacattgcccgtcaacgacagtacgctcacgttaactcccctgcccattggcatttaccatctcaccctgcccaaagggcgatcgcagaaataccgcccggacacggactatgtggttatccgcgaaggggaaaacgcacttaccgttaatttcaccgccttgcaggacagcgccgcgtataacgagcagttgattttcctcggctacggtgacatgcccttcgcccgtttagccgtggatcatgaggccagacaattagttctggatatcacgaacgccacgcagcacagctacttcgcgaatacgttatacgccagcataacggtgttaaccgccagcggcgaaaaggtttttgaacgtaagatgaacggaataaactgcgccaccggaaaaattgtggtgccgtttagcgaccactaccacctttatctttatcatgccgagcctggccgcctgaaagcctcgccgggctatctgacattggtctcgtcgacgaaatatcagttactgcgtcttgatagcgaagggctttatcatttttcgctcaacaacgatcctgccgcagatctccaggctatgtttacccatcgcgcagatgctatccgcgcctgccctttattaatggcgcaaccttatgccgcttgcaaaaacgatctctggctgatgctctcccatattgaagagccgacccgtagcgcgttaatgcgcgacagcgttgatgtgctgccggcggataacagcgagccgggcgaaggcatcggtaaaggcgtgacgttgcagttacgcggacaaggcgacagaacgttttgccagcttgcttacgataatcggcaacagcgcatgacaatagaaacactggccgggcagcctcatccctactataccgcgacatacagcacgctcacgataaaggaggagtccggcgaggttatctatagccgtcattatgatggcatcacccactattcagccgatagcgatacggttgttttgcaagcgggaatgtacattgagctcttccatgacgaaccttaccgttgcagcgccatcaatgaaacgaccgggcaaaacgtcaggctgaaaaaacacaaccgctggcgcgtggtgagcgatgggctggaggtcgactcaccggaacaaacggaagagaaaaatacctccgatgctgccgcattatatggcgataaattcagctggcagcttattggcaaggaagaaaatggttttgccagtatggaaatagacatccgtgcgcaacaatttatctttaccgcatacccaattgcgccgcatagcgacttcgcaacggaatatgcggcagtgacgatttataatacgcgcggtacggtggtttaccgtcagtcgataaaaggttcggtgcagcttggcggctatactgacgtctgcgggctggatgaggattatacgattgaggtctttcatgccgagggcgcagaccagtcggttatccgcaacccgctcaatggcgaaagctggccgcagccgcaacacgtgatctggcaggtcacggcgcggggattacagcgcctgaccacgaattaccccccccatcacagcgtcttcgggcgctgtgagattacgttgtcggatggcggctttgcctaa

SEQ ID NO: 371652 - DNA, 1158 bp, Salmonella enterica
atggctggctggcatcttgataccaaaatggcgcaggatatcgtggcgcgcactatgcgcatcatcgataccaatatcaacgtaatggatgcccgcgggcgtattatcggcagcggcgatcgggaacgtattggtgaattgcacgaaggcgcgctgttagtgctgtcgcagggccgggttgtggatattgacaacgccgtggcgcgacacctgcacggggtgcgtcaggggattaatcttcccttacgtcttgagggcgaaattgtcggcgtgatcggcctcaccggcgaaccagagcatctgcgtaaatatggcgaactggtgtgtatgactgccgaaatgatgctggagcagtcgcggttaatgcaccttttggcgcaggatagccgtttgcgcgaagagctggtgatgaacctgattcaggccgaagaaaatacgccggcgctggtggaatgggcgcagcgtttggggatcgatttgaaccagccgcgtgtggcggcggtggtggaagtcgacagcggccagcttggcgtcgatagcgcaatggcggaacttcagcagttgcagaatgcgcttaccacgccggagcgtaacaacctgatagccattgtttctctcaccgagatggtggtgctcaaacccgccttaaactcgtttggtcgctgggatgctgaagatcatcgtaagcgcgtagagcagcttatctcgcgaatgaaagagaatggtcagctacgttttcgcgtggcgctgggcaattactttaccgggccgggcagtattgcacgttcataccgcacggcgcgcactacgatgatggtcggcaaacagcggatgccagaaagccgcagctatttttatcaggatttgatgctgccggttctgttagatagcctgcgtggcggctggcaggccaatgagctggcgcgcccgctggtaaaactcaaagcgatggataacaacgggttattacgtcggacgctgacggcgtggtttcgccataatgtccagccgctggcgacctctaaggcgctgtttattcatcgtaacacgctggaatatcggctaaatcgtatttcggaactgaccgggctggatttgggaaattttgacgatcggctgttgctgtatgtggagctacaattggatgaacagcgttaa

SEQ ID NO: 371653 - DNA, 1428 bp, Salmonella enterica
atgaaaaaaaccacattagcaatgagtgcactggctctgagtttaggtttggcattgtcgcctctgtctgccacggcggctgaaacgtcctcttcagcaatgactgcccagcagatgccaagcctggcaccgatgctcgaaaaagtgatgccatcggtggtcagtattaatgttgaaggtagcaccacggtgaatacgccgcgtatgccgcgtaatttccagcagttctttggcgatgactccccgttctgccaggacggttctccgttccagaattctccgttctgccagggcggcggtaacggcggcaacggcggtcagcaacagaaattcatggcgctgggctccggcgtaattattgacgccgcgaagggctacgtcgtcaccaacaaccacgtggttgataacgccagcgtgattaaagtacagcttagcgatggacgtaaattcgatgctaaagtggtaggcaaagatccgcgttctgatatcgcgctgattcaaattcagaatccgaagaacctgacggcgattaagctggcggactccgacgcgctgcgcgtgggggattataccgtcgctattggtaacccgtttggtctgggcgaaacggtgacgtcaggtatcgtttcggcgctggggcgtagcggcctgaacgtagaaaattacgagaattttattcagaccgacgccgcgattaaccgcggtaactccggcggcgcgctggtgaacctgaacggtgagctgatcggtattaacaccgcgattctggcgccggacggcggcaacatcggtatcggcttcgctatccccagtaacatggtgaaaaacctgacgtcgcagatggtggaatacggccaggtgaaacgcggcgaactggggatcatggggactgagctgaattccgaattggcgaaagcgatgaaagtcgacgcccagcgtggcgcgttcgtcagccaggtgatgccgaattcgtccgcggcgaaagcgggtatcaaagccggggatgtcattacctcgctgaacggtaaaccgatcagcagctttgcggcgctgcgcgctcaggtcggcactatgccggtcggcagcaaaatcagcctcggtctgctgcgtgaaggtaaagcgattacggttaatctggaactgcagcagagcagccagagtcaggttgattccagcaccatcttcagcgggattgaaggcgctgaaatgagcaataaaggccaggataaaggcgttgtggtgagcagcgtgaaagcgaactcacccgccgcgcaaattggcctcaaaaaaggcgatgtgattatcggcgctaaccagcagccggtgaaaaatatcgccgagctgcgtaagattctcgacagcaagccgtcggtactggcgctgaatattcagcgtggtgatagttctatttatttgctgatgcagtaa

SEQ ID NO: 371654 - DNA, 1518 bp, Salmonella enterica
atggcatcgatcgatttccgaaataaaattaactggcatcgtcgttatcgttcaccgcagggcgtaaagacggaacatgagatcctgcggatttttgaaagcgatcgcgggcggattatcaactctccggctatacgccgtttgcagcaaaaaacgcaggttttcccgctggagcgcaatgccgcggtgcgtactcgtctgacgcattcgatggaggtgcagcaggtggggcgttatatcgcgaaagagattttaagccgcctgaaagagcaaaaccgactggaggagtacggtctggatgcgctgaccggtccctttgaaagtattgtggaaatggcctgcctgatgcacgacatcggtaatccgccgttcggtcattttggcgaggcggcgatcaatgactggtttcgtcagcggctgcatccggaagatgcggaaagtcagccgctcacgcatgatcgctgtgtggtttcctcgctacggctacaggaaggcgaagaaaatctgaacgatattcgccgcaaggtacgtcaggatatctgccattttgaaggcaatgcacagggaattcgtctggtacatacgctcatgcggatgaatcttacctgggcgcaggttggcggaattttaaaatatacccgtccggcatggtggcgagggccggtgccggattcccatcgctatttaatgaagaaaccgggctattatctttctgaagagaagtatattgcgaggttacgtaaagaactgcagttagcgccttacagtcgctttccattaacgtggattatggaagccgcagatgatatttcttattgtgtcgccgatcttgaagacgcggtagagaaaagaatctttagcgttgagcagctttatcaccatttatatcacgcgtggggccaccatgagaaggattcgctgtttgagctggtggtaggaaatgcgtgggaaaaatcacgcgccaatacattaagccgcagtaccgaagatcagttttttatgtatttacgggtaaatacattaaataaactggtgccctatgccgctcagcgttttattgataatttgccgcagatttttgccggtaccttcaatcaggcgctgctggaagatgccagcggttttagccgcctgcttggactctataagaatgtggcggttgaacatgtgtttagccatccggatgtagaacagcttgaactacagggataccgggtgatcagcgggttattagatatctatcagccgctattaagcttgtcgcttaacgactttcgcgagctggtggaaaaagaacggttgaaacgcttccctatagaatcgcgcttatttcagaaactttctacgcgccatcgtttggcctacgtggaagtcgtcagtaaattacccacggattcggcggagtacccggtactggaatattattatcgctgtcggttgattcaggattatatcagcgggatgactgacctttacgcatgggatgaatatcggcgtttgatggcggtcgaacagtaa

SEQ ID NO: 371655 - DNA, 699 bp, Salmonella enterica
atgaaaatcggcatcattggcgcaatggaagaagaagttacgctgctgcgtgacaaaattgacaaccgtcagacgattacgctgggcggctgcgaaatttacactggccagttgaacggcaccgaagtggcgttgctgaaatccggtatcggtaaagtcgcggcggcgctgggcgcaacgttgcttctggagcactgcaagccggacgtgatcatcaataccggttccgcaggcggtctggcgtccacgctgaaggtcggcgatatcgtcgtctctgacgaagcgcgttaccacgacgctgatgtgaccgctttcggctatgaatacgggcaattaccgggctgtccggccggatttaaggccgatgacaaactgattgccgccgcggaatcctgcatcagggagttgaatctgaacgcggtacgcggccttattgttagcggcgacgcgtttattaacggctccgtcgggctggcgaaaattcggcataacttccccgacgcggtcgccgtagagatggaagccaccgctatcgcccacgtctgctataacttcagcgtgccgttcgtggtggtacgcgctatttctgacgtggccgatcagcaatcgcacctcagctttgacgaattcctcgcggtggcggcgaaacagtcgactctgatggtcgaaacgctggtacagaaactggcgcatggctaa

SEQ ID NO: 371656 - DNA, 801 bp, Salmonella enterica
atggctaagcaaatgttcagggcgctggtcgccctgctgcttacgctcccggtgtggctttacgctgcgccgcgcgtaattaccctctctcccgccaatacggagcttgcttttgccgccgggattacgcccgttggcgtcagcagctattccgactacccgcccgaagcgcaaaaaatagaacaggtctctacctggcagggaatgaatctggaacgcattgtggcgctgaagccggatctggtcgtcgcctggcgcggcggtaatgcggaacgccaggtaaaccaactgacgtcattaggtattaaggtcatgtgggtggacgcggtaagcatcgaacagatcgccgacacgctccgccaactggccgcctggagcccgcagccggaaaaggctcagcaggcagcgcagacattgctaaacgagtacgccgcgctcaacgccgagtatgccggtaaagctaaaaagcgcgtctttcttcagtttggcatgaatcctctgtttaccagtggtaaagggtctattcaacatcaggttttgacgacctgcggcggagaaaacgtctttgctgacagccgcgtgccgtggccgcaagtcagccgtgaacaggtgctggcaaggcatccccaggccattatcgtggccggaaaagcgggcgaaattctcaaaattgaacaatactggggaaacctgttaaaaattccggttattccgcttaacagcgactggtttgaacgcgcaagcccgcgtattatcctcgccgcaaaacaactctgtaatgcgctttcacaggtgaattag

SEQ ID NO: 371657 - DNA, 624 bp, Salmonella enterica
atgctcgtctattggctggatattgtaggcacggctgtatttgctatctctggcgtgttgctggccgggaaattacgtatggatccgttcggcgtcctggtgctcggcgtcgttactgccgtcggcggcgggacaatccgcgatatggcgctggataacggcccggtattctgggttaaagatcctaccgacctggtcgtcgccatggtcaccagtatgctgaccatcctgctggttcgccagccaagacgtctgccgaaatggatgttgccggtgctggatgcggtcgggctggcggtgtttgtcggcattggggtgaataaagccttcctcgctgaaacggggccattagtggccgtctgtatgggcgtgattaccggcgtcggcggcgggattattcgcgatgttctggcacgtgagatccccatgatcctacgcaccgaaatctatgccacggcctgtattatcggcgggattgttcacgccaccgcgttttatacgttttcagtaccgctggaaagcgccagcatgatgggtatggtcgtcacgctgttcattcgcctggcggccattcgctggcatttgaaattgccgacgtttgccctggatgaaaacggacgttga

SEQ ID NO: 371658 - DNA, 345 bp, Salmonella enterica
atgagtgatgacgtagcgctgccgctgcagtttaccgacgcagcagcgaataaagtaaaaagtcttatcgctgacgaagataacccgaatctgaaactacgcgtgtatatcaccggcggtggttgcagcggcttccagtatggttttacctttgacgatcaggttaacgaaggggatatgaccatcgaaaaacagggcgttggcctggtggttgacccgatgagtttgcagtatctggtgggtggttcggtcgattataccgaaggcctggaaggttcccgcttcattgtaaccaacccgaatgcgaaaagtacctgcgggtgtggctcttccttcagtatttga

SEQ ID NO: 371659 - DNA, 1422 bp, Salmonella enterica
atgaaaacagacacttccacctttttagctcagcaaattgtgcgtttacggcgcagagatcagattcgccggttaatgcagcgggataaaacgccgctggccatcctgttaatggcggccgttgtcggcacgcttaccggactggttggcgtcgcctttgaaaaggcggtttcctgggtacaaaacatgcgcattggcgcgctggttcaggtcgcggaccatgcgtttttgctttggccgctggcctttatcctttcggcgttactggcgatggtcggctactttttggtgcgaaaatttgcgccggaagccggcggctcgggtatcccggaaattgaaggcgcgctggaggagttacgtccggtgcgctggtggcgcgtgttgccggtgaagtttatcggcgggatgggaacgttgggcgcaggaatggtattagggcgcgaagggccaacggtgcaaatcgggggcaacctggggcgcatggtgctggatgtttttcgtatgcgcagcgccgaagcgcggcatacgttgctggcgaccggcgcggcggcggggctctctgcggcgtttaacgcgccgctggcgggtatcctgtttattattgaagagatgcgcccgcagtttcgctacaacctgatttcgattaaagcggtgtttaccggcgtcatcatgtcgagcattgtgttccgcatatttaacggcgaagcgccgattattgaagtcggcaaactgtctgatgcgccggttaacacgctgtggttataccttatcctcggcattatttttggctgcgtcgggccagtatttaattcgttggtgctgcgtacccaggatatgtttcagcgctttcatggcggcgaaattaaaaaatgggtgcttatgggcggcgcgatcggcggcctgtgcggtattctggggttgattgagccggaagcggcaggcggcggatttaaccttattcctatcgccgcggcaggtaattttagcgtcgggctactgctgttcatctttattacccgggtggtcacaacgctgctttgcttttcttccggcgcgccggggggcattttcgccccgatgctggcgctgggaacgctgcttggtacggccttcggtatggcggcggcagtgcttttcccgcagtatcacctggaggccggtacctttgcgattgccgggatgggggcgctgatggcggcgtcggtgcgcgccccgctgacggggattgtgctggtgctggagatgaccgataactaccagctcattttgccaatgattatcacctgtcttggcgcgacactattagcccagtttttgggcgggaaaccgttatactcaaccatcctggcgcgcactctggcgaagcaggatgcggaacaggcggcgaaaaaccagaatgcgcctgcgggcgagaatacttga

SEQ ID NO: 371660 - DNA, 1281 bp, Salmonella enterica
atgagtaagtctgaaaatctctatagcgcggcccgcgagctgatccccggcggcgtgaactcccctgttcgcgccttcactggcgtgggcggcaccccgctgtttatcgaaaaagcggacggcgcgtatctgtacgatgtcgatggcaaagcgtatatcgactatgtcggttcctggggaccaatggtactggggcataaccatccggctatccgcaatgcggtgatcgaagctgcggagcgcggtttaagcttcggcgcgccaaccgaaatggaagtaaaaatggcggaactggtgaccaacctggtgccgaccatggacatggtgcgcatggtgaactccggcaccgaagcgacgatgagcgctattcgcctggcgcgtggttttactggccgcgataagattatcaaattcgaaggctgctaccacggccacgcagactgtctgctggtcaaagccggttctggcgcgctgacgctcggtcagccgaactcgccgggcgtgccggcagatttcgcgaaacatacgctgacctgcacttataacgatctgacgtcagtgcgcgcggcgtttgaacaatatccgcaggaaatcgcctgtatcatcgtcgaacccgtagcgggcaatatgaactgcatcccgccgctgccggaatttctgccaggcctgcgcgccttgtgcgatgagttcggcgcgctgctgattatcgacgaagtgatgaccggttttcgcgtagcgctggccggagcccaggattactacggcgtcgtgcctgacctgacctgtctgggtaaaatcatcggcggcgggatgccggtaggcgcgtttggcggtcgtcgcgatgtaatggatgcgctggcgccgacgggcccggtttaccaggcgggcaccctttccggcaacccgattgcgatggcggccggtttcgcctgcctgaatgaagtcgcccagcccggcattcatgaaacgctggatgagctcaccacccgtctggcggaaggtttgctggaagctgccgaagaagcgaatattccgctggtggttaaccatgtcggcggcatgttcgggattttcttcaccgacgctgagagcgtaacctgctatcaggacgtgatggcgtgcgacgtggaacgctttaagcgtttcttccacctgatgctggaggaaggcgtatatctggcgccgtccgcgttcgaagcaggctttatgtccgtggcgcacagtgaagaagatatcaataacaccatcgacgccgcgcgtcgggtgtttgcgaaactgtaa

SEQ ID NO: 371661 - DNA, 843 bp, Salmonella enterica
atgatgagaagcatacagattttatttttactgttggcggtcgtttgttgccgttcaatagcggcgggacccatgctgaaagcgacgttttcaagcaccacgatgtattatggtattggccctaatagcgacaaatctattgtggcggaggtgacgatagcgactccggagggggtgtactatggctcctggaacctttcgggacatcgtaaaggagaaacgctaaccgcagactcctggtctgggccagaacctgcgccgaaggttgtattgaaggattttgataacactgtttcgcgatctgcgtgcaagaatcttccctcgaactggagggggtgtggttcttttaccctggagattacggtacaaagcgatgattatggttgcccctggctggcgtcgagccatatcgttgctaccgcttttatcactaacgaaacgtattccccgccggatacgcgcagctcagtttgcccgaaagttcccgttgatacttttgatatctcctgggatgcgaacgtttcgaaacagaaaacaaccctcatgcttgatgccactggtggcacggtgaatcgcacgttacatacctatttgatggagggggggaaactgtgcgatggcagcaaatttgacaaccgtggcgcttattgccgttttgtctcatcgggtattacgctcaatgtgctgggctgcgaccagtcgagcgtcacgaccagcgccgttgatcatccgataaccgatgttgagcttcatgacattaatgtagcggtgaacacccgcaacattggctccgggcagttcacgtcgacctgtagcttccagtatattattgatgagctttag

SEQ ID NO: 371662 - DNA, 531 bp, Salmonella enterica
atggctaaaagacaggcgttattacacggcgcggcctgcatcctctgtggggcgctgatattgccggtctcagcggcagataacctgcatttttccggtagcctggtggccagtccttgcacgctcacgatgcaggggacggggattgccgaagtcgatttttcgtcgcttgacagttctgatttcactcccgacggccagtctgctcgtaagcctttggtgtttgaactcacggattgcgattcggcgctgagtaacggggtgcaggtgactttcactggaaccgaagcgaccggaatgcgcggtatcctggccatcgatagccattcaggtgcttttgggatcgggattggtattgaaacgctatccggcgttcccgtgggcatgaacgataaagagggtgcgatattcacgctggtgacggggaataacgcgctaaacctgaatgcctgggtacaacgccttcctggcgaggacctggttccgggaacgttcttcgcaagcgcactagttacctttgagtatttatga

SEQ ID NO: 371663 - DNA, 477 bp, Salmonella enterica
atgaaaaaaatggctttgacgatgttaatggggggcagccttgccgcacaggcagccgataatcttaagtttcacggcacattaatttcaccgccgaattgtacgattaacaatgatcagacgatcgacgttaagttcggtaacctgctgattaataaaatagatggtacgcgttatgcgcagaatgttccgtatgagatcacctgtgattcaacggtgcgcgatgagacgatggcgatgaccctgacgctaagcggttccgtgagtgattttaatccggcggcggtaaacaccagcgtggcggggctggggattgaactcaggcagaacgaccaaccctttacgttggggtccaccattacggtgaatgaacaatcgatacctgttctgaaagccataccggttaaaaagagcggtgcttcgctgaaagaaggcggcttcgatgcgacggcaacattacaggtggattatcagtaa

SEQ ID NO: 371664 - DNA, 513 bp, Salmonella enterica
atgaggcaatggcggttacggctgggcacggtaacgtgtgcggccatgctgagtgcggtcagtatgccgctggcagcgggaagtaagacggtcaacatgacgctgacgatagtcgttaatgccgcgccgccctgtactgtgaccggcggtgaggtggaatttggcaatgtgttgacgacgaaagtggatggggtgaattaccggcaggcggtgggctatcgcctgagctgtaacggcagagtgagcgattacctgaagttacagattcaggggaatgcggtgactatcaatggcgagtcggtattgcaaaccgatgtcgatggattggggatccgtctgcaaaccgccacggatggcgagctgatttcacccggcaatacgcaatggttgtcatttcaatacagcggtggcagcggtccggccattgaggcaattcccgtcaaaaataatggcgtaacgttaacaggcggcgcgtttaacgcaggcgccacgctggtggtggattaccaatga

SEQ ID NO: 371665 - DNA, 753 bp, Salmonella enterica
atgatgtcattaaaacgttataacctggccgctgttttgctgcttttgctgggcggctacggtagcgcccaagccgccatcgcgcccgatcgcacccgcctggtgtttcgcggcgaagataaatcgataagcgtcgatctgaaaaacgccaacagcaaactgccctatctggcgcagtcctgggtggaagatgagaagggcgtcaaaatcacctcgcctttaatcgtcgtcccaccggtccagcgcattgagccgtcggcaatcggacaggtcaaaattcaggggatgccggcgctggcgtcgctcccccaggatcgggaaacccttttttattacaacgtgcgcgaaattccgccgcaaagcgacaagcccaatacgctgcaaatcgccctgcaaacgcgcatcaaagttttttaccgcccgcaggcgctatcgaaaatcgatatgcagcatccctggcaatacaagatcacccttcagcgtcagggcaatggctatcaggtgagcaatccgaccggttactacgtggtgttaagcaacgccagcaaccgcatggacggcacaccagccagaggctttagccctttagtgattgcaccaaaaagcaacgtgacgctgggaggggacgccagtgaattaggtcactcgcctgtgctgacttacgtcaacgattatggcgcgcggttaccgctgatttttaactgtactgacaacagttgtgcggtagatgaagcaaaaagcagaaagtcgtaa

SEQ ID NO: 371666 - DNA, 2658 bp, Salmonella enterica
atggctcactataaaaaatttcgtctgagcacgcttgcggccgtggtgggtattgttctggctgtcggtccggaaaatagctatgcggaagcgcccattcaatttaatacccgatttcttgatgttaaagatgatgccagcctggatctctcccgcttttcccgtaaaggctacattatgccggggagctatcatctccaggtgctggtcaatcagagtcaaattgcccaggataatgttattacgtattccgttgataataacgatcctgataacacctatccctgtttatcgcctgaactggtatcgctgctggggttaaaacctgaaatagcagataaaatgatctggataaatgccggtcagtgtctgcaaccagatcaactggaggggatggaaacccaaacggatttaagccagtcaacgctgacggtgattattcctcaggcctatctggaatacagcgatgaagagtgggatccaccttcccgctgggatgaagggattcccggcgtgttatttgactacaacgttaacagccagtggcgacatgctgaacatgatgacggcgatgaatatgacatcagcggcaacggcacggtgggtgccaacctcggcgcgtggcgtttgcgcgcggactggcaggctaactatcgtcacgaaaatgacagcgaagataaagacaactttggctccagttccgaacagaactgggactggaaccgctattacgcctggcgggcgatcccgcagctccgggcgcagctaacgctgggcgaaggatcgctggaatccgatattttcgatggctttaactatgttggcggcagccttatcaccgacgatcagatgttaccgcctaatctgcgcggctacgccccggatatatcaggcgtggcgcgcaccaacgccaaagtcaccgtgacccagcgcgggcgggtgatttatgagtcgcaggtcccggctggaccgtttcgcattcaggatattaatgaaacggtatccggcgatctacacgtcaaaattgaagaacaaagcggtcaggtgcaggaatatgacgtcagcaccgcctccattccgtttctgacccgtcccggccaggtgcgctacaagttggcagccgggcgaccgcaggactgggatcacaatatggaaggcggctttttcacctcagccgaagcctcctgggggatcgctaacggctggtcgctgtacggcggtgccatcggtgagcaggattatcaggcgctggcgttaggactggggcgcgatctggcgctgctgggcgcgttttccgtcgatgtcacccattcccgtgcgacgctgccagagggtagcgcctacggcgacggcaccattcagggtaactcgttccgtgccagctacgctaaagattttgatgatatagacagccgtctgacgtttgctggttatcgcttttccgaagaaaactacatgacgatggacgagtttatcgatacgcataatgacgataacgatcgtcagcgcaccggccacgataaagagatgtataccctgacgtacagccagaacttttcggcaataaacgtcaacgcctatatcaactacacccatcgcacctactggaatcaacctaaccaggacagctataacctgacgctgtcgcactatttcgatgtcggtgaggtgcgcgggatcagtctgtcggtgaacggttttcgcaacgaatatgacaatgagcgtgatgacggcgtgtacgtctcgctcagtattccgtggggcaacaaccgcacgctgagctacaacggctcctttagcgatgacaacaacagcaatcaggtcggctattacgagcgcattgacgatcgcaataactaccagatcaacgctggtcgcgcggataacggtgcgactctcgacggctactaccgttatcaagcgagctatgccgacattgacgtcagtgcgaactatcaggaaggcgactatacctccggcggactgaacatccagggcggcgcgacgctgactgctaaaggcggggcgttgcaccgcaccagcgtcaacggcggctcgcggctgctggtggatgtcggcgatgaagcgaacgtacccatctccggctacagcacgccggtatataccaacgcgtttggtaaagccgtcattgtcgacgtcaacgactactaccgcaaccaggtgaaaatcgacattacccagttgccggaagacgcggaagcaatcctctccatcgctcaggcgaccctgacggaaggggcgatcggttatcgccgcatggaggtgctcagcggtaaaaaagccatgggcagtatccgcctgcgcgatggcggcacgccgcccttcggcgcagaggtttacaacagtcgccagcaacagttagggatcgtaggtgaagacggcagcgtttatctgatcggcattaaccccggcgagcggttgcaggtgacatgggaaggtaaaacgcagtgtgaagcggcgttgcccgatccgctgccgggcgatctgtttagcggcctgttgctgccgtgcatcggcgatgcttcatcacctgaggcaacgcagcccgaagagaaaccattactccagcttcatacgcagcggcggacgtcttcgacgcaacccgaagcgctctcttctcgttatccaacacattga

SEQ ID NO: 371667 - DNA, 561 bp, Salmonella enterica
atgaatacagcagtaaaagctgcggttgctgccgcactggttatgggtgtttccagctttgccaatgctgcaggcagtaatactggtacggttacttttaccggtactattgaagattcaccgtgttcaatcgtggttggcgacgaacaccagaccgttaacctgggccatatcggtactggttctctgatgggcggtaaagaatcttcaaaagtcgatttccatatcggtctggaaaactgcgcattcaccactgagaaagaagtgtctaccgttttctctgccatcggtaacgaatccagcgctaatccgggcagcgttgcgctgatgcgtatcggcggcggcgaaatggcgggttccagcattgtcatcggcaaccacctgggttccgcgatcaaattgggcgacgcttacagcgaaaatctgacgatgaacggcagcgttgcggcggcgaaacagactcttaacttcaaagcctgggtgaaaggcgattccgctgccagcactatcgataccggcgaattcagcagcaccgtaaacttcacgatcagctatctgtaa

SEQ ID NO: 371668 - DNA, 789 bp, Salmonella enterica
atgagcagtaacttcagacatcacctgttgagtctgtcgttactggttggcatagcggccccctgggccgcttttgctcaggcgccaatcagtagtgtcggctcaggctcggtcgaagaccgcgtcactcaacttgagcgtatctctaacgctcacagccagcttttaacccaacttcagcagcagctctccgataatcagtccgatatcgattctttgcgcggccaaatccaggaaaatcagtatcaactgaatcaggtgatggagcgccagaagcaaattatgctgcagctggggagcttgaataatggcggcgcagcgcagccagcagctggtgaccagagcgggacggcaaccactgcgacccccgccccggatgccggtacggcaacctcaggggcgccggtacaaagtggcgatgcgaataccgattacaatgcggcaattgcgctggtgcaggataagtctcgccaggatgatgcgattgtggcgtttcagaacttcatcaagaaataccctgattctacttatcagccgaacgccaattattggctgggccagttgaattacaacaagggtaaaaaagatgacgccgcctattatttcgcctcggtagtaaaaaactatcctaagtcgccgaaggctgcggacgcgatgtacaaagttggcgttatcatgcaggacaaaggtgatacggcaaaagcgaaagcggtttatcagcaggtgattaacaaatatcctggcactgatggcgcgaaacaggcgcagaagcgtcttaacgcgatgtaa

SEQ ID NO: 371669 - DNA, 525 bp, Salmonella enterica
atgcaactgaacaaagtgctgaagggcctgatgattgccctgcctgttatggcaatcgcggcatgttcttccaacaagaacgccagcaatgacggtagcgaaggcggcatgctgaacggcgccggcactggtatggacgctaacggcaacggcaacatgtcatctgaagagcaagcgcgtctgcagatgcagcagctgcagcagaacaacatcgtttacttcgatctcgacaagtacgatatccgttctgacttcgcggcaatgctggatgcgcacgctaacttcctgcgtagcaacccgtcttacaaagtcaccgtagaaggtcacgcggacgaacgcggtactccggagtacaacatctccctgggcgaacgtcgtgctaacgccgttaaaatgtacctgcagggtaaaggcgtttccgctgaccagatctccatcgtttcttacggtaaagaaaaacctgccgtactgggccacgacgaagcggcttacgctaagaaccgtcgcgctgtactggtttactaa

SEQ ID NO: 371670 - DNA, 1293 bp, Salmonella enterica
atgaagcaggcattacgagtagcatttggttttctgatgctgtgggcggcggtgctgcacgcagaagtccgtatcgagatcacccagggggtggactcggcgcgaccgattggcgttgtgccttttaaatgggccgggccgggcgctgcgcctgaagatatcggcggcatcgtggcggcagatttacgtaatagcggtaaatttaatccgttagaccggtcccgactgccgcagcagccagccaccgctcaggaagttcagcctaccgcatggtctgcgctgggtattgatgccgtcgtcgttgggcaggtaacgccgaatccggacggttcctacaatgttgcttatcagctggttgacactggcggcgcgccggggactgtactggcgcaaaattcttataaagtgaacaagcagtggctgcgttatgcaggtcataccgccagtgacgaagtctttgaaaaactgacgggcattaagggcgcgttccgtactcgtatcgcctatgtggtacagactaatggcggtcagttcccgtatgaactgcgtgtgtcggattacgatggttacaatcagtttgtggtgcaccgttctccgcagccgttgatgtctccggcgtggtctccggacggctcaaaactggcttacgtgacatttgaaagcggtcgctccgcgctggttatccagacgctggcaaacggcgcagtgcgtcaggttgcgtccttcccgcgtcacaacggcgcgccggccttctcgccggatgggacgaaactggcgttcgcgttatcgaaaaccggaagtctgaacctgtacgttatggatcttgcttccggccagattcgtcagataacggacgggcgtagcaacaatacggagccgacctggttcccggacagccagactctggcctttacctctgaccaggctggacgtccgcaagtgtataaaatgaacattaacggcggtgcggcgcagcgtattacctgggaaggttcgcaaaaccaggatgcggatgtcagcagcgacggtaaatttatggtaatggtaagctcaaataacgggcagcagcacattgccaaacaagatctggtgacgggtggcgtacaggttctgtcgtcaacgttcctggatgaaacgccaagtctggcacctaacggcacgatggtaatctacagctcttctcaggggatgggatctgtgctgaatttggtttctacagatgggcgtttcaaagcgcgtcttccggcaactgatggtcaggtgaaatcgcctgcctggtcgccgtatctgtga

SEQ ID NO: 371671 - DNA, 1134 bp, Salmonella enterica
gtgtcaaaggcaaccgaacaaaacgacaagctcaaacgggcgataattatttcagccgtgctgcatatcatcttatttgcagtgctgatctggagttcgtttgatgagcatatagaggcttctgccggcggcggcggtggttccgctatcgacgcggtgatggtcgatcctggcgccgttgtgcagcagtacaaccgtcagcaggatcaacaggccagcgccagacgcgcggaagaagagcgtaaaaagctgcaacagcagcaagcagaggagctgcagcagaagcaggctgccgaacaggagcggttgaaacaacttgagaaagaacgtttagcggctcaggagcagcaaaagcaggctgaagaagcggcaaaactggcgcaacagcagcagcaacaggccgaagaagcggcgaaagcggcggcggacgcgaagaaaaaagcggaggccgaagcggcgaaagcggcggcggacgcgaagaagaaagcggaggccgaggcggcgaaagcggcggcggacgcgaagaagaaagcggaagccgaggcggtaaaagcggcagcggacgcgaagaagaaagcggaagccgaagcggcgaaagcggcggcggaggcgaagaagaaagcggatgccgaggcggcgaaagcggcggcggaggcgaagaagaaagcggatgccgcggcggcgaaagcagcggcggacgctaagaagaaagcggctgccgaaaaagcggccgccgcagaaggcgtcgacgatctgcttggcgatctcagctcgggtaagaatgcgccgaaaaccggcggcggcgcgaaagggaatggtcagccatcgaaagatagcggtacatcgggcgctaacggtggggcgacaggcgctgatatcagcgcctacgcgaaacagattcaggtcgccattcagagccgtctgtatgatgcgagcctgtatcagggcaaacaatgtgtcttgcatattagcctggcgccggatggctcattaaaaagcattacgtctgagggcggcgatccggcgctttgtcaggcggcgttaatggcggcaaaaaccgcgaaaattcctaaaccgccaagccaggctgtttatgagaaaataaaggatgccaaactagactttaaactgtag

SEQ ID NO: 371672 - DNA, 429 bp, Salmonella enterica
atggccagaacgcgtggacgaggtcgtcgcgaacttaagtccgaaatcaatattgtaccgctactcgacgtactgttggtgttgctgctgatctttatggcaaccgcgccgatcattacccagagcgtggaggtcgacttgccggaggcgaatcagtcgcaggcggtcagtagtaacgacgatccaccggtcattattgaggtttccggagtagggcaatacagcgtagtggttgataaagatcgaatggatcaactgccgtctgaacaggtgatcgcagaagtaaagcgtcatctgcaggctaatccgaaaacagtctttttaatcggcggcgcgaaagaggtgccgtacgatgaaataattaaagcgctgaacttgttacacagcgcgggcgtaaaatcggttggcttaatgacgcagccaatctga

SEQ ID NO: 371673 - DNA, 693 bp, Salmonella enterica
gtgactgacatgaatatccttgatttgttcctgaaggcaagccttctggttaaacttatcatgttgattttgattggtttttcaatagcatcctgggccatcattatccagcgaacgcgtattctgaacgccgctgcgcgtgaggcggaagcgtttgaagataaattctggtccggaatcgaactatcgcgtctgtaccaggaaagccaggggaggcgcgatagtctgtcgggctcggaacaaatcttttatagcgggttcaaagagtttgtccggctccatcgcgccaacagccatgcgccggaggcagtggtagagggggcgtcgcgtgcgatgcgcatctccatgaaccgagagctggaaacgctggaaacgcatatcccgtttcttggcacggtaggctcaatcagtccttatatcggtctgtttggcaccgtatgggggattatgcatgcgtttatcgccctgggcgcggtgaaacaggcgactctgcaaatggttgcgccgggtattgccgaagcattgattgccacggcgattggtctgtttgccgccatccctgcggttatggcttacaaccgactgaatcagcgcgtgaacaagctggaactgaattacgacaactttatggaagagttcaccgcgattctgcaccgccaggcgtttaccgtaagcgaaagcaacaaggggtaa

SEQ ID NO: 371674 - DNA, 405 bp, Salmonella enterica
atgaataagtatatgtttcgatggccaattcgagtttattacgaagacacggacgccggcggtgtggtttatcacgccagctatgtcgctttttatgaaagagcgcgcacggagatgctgcgtcaccatcacttcagccaacaggtgctgctggcggagcgggtcgcctttgtggtgcgcaagatgacgctggaatactatgcgcctgcgcggctcgacgatatgcttgaagttcaaacagaaattacgtcaatgcgtggcaccgctttggttttcacgcaacgcattgtcaacgcagagaacacgctgctaaatgaagcagaggttctgattgtttgcgttgatccactcaaaatgaagcctcgtgcgcttcctaagtctattgtcgcggagtttaagcagtga

SEQ ID NO: 371675 - DNA, 294 bp, Salmonella enterica
atgacccatattatcgcaaaactgtatgcggtaatggacaagcgcccgttaagggcgctttccttcgtgatggcgatagtgctggcaggatgtatgttctgggacccgtcacggtttgccgccaggaccagcacgcttgaaatctggcacggattattgctgatgtgggcggtttgcgcaggcataatccacggcgtgggttttcgccctgaatccgtacactggcaagggattttttgtccgctccttgcggatatcgtccttatcgtcggcctgattttcttcttcttgtga

SEQ ID NO: 371676 - DNA, 1140 bp, Salmonella enterica
atgatcgattatgaagtactacgttttatctggtggctgctggttggcattttgctaattggtttcgctgtcaccgatgggttcgacatgggggtggggatgctcacccgtttcctcggtcgtaacgacaccgaacgtcgaattatgattaactctatcgccccgcactgggacggtaaccaggtgtggttgatcaccgcgggcggtgcgttgtttgctgcctggccgatggtttacgccgcggcgttctccggtttctatgtagcgatgatcctggtgctggcgtctttgttcttccgtccggtcggttttgattaccgttccaagattgaagacccgcgctggcgcaacatgtgggactggggcgtgttcatcggtagctttgtgccgccgctggtgattggcgtggcctttggcaacctgttgcagggcgtaccgttccacgtggatgagtatctgcgtctgtactacaccggtaacttcttccagttgctgaacccgtttggtctgctggcgggtatcgtaagcgtagggatgatcatcacgcagggggcgacttacctgcaaatgcgcaccgttggcgaactgcacctgcgcgcgcgcgccacctcgcagattgcggcgctggtgacattagtgtgctttgcgctggcgggcgtttgggtaatgtatggtattgatggttatgtcgtgacatccgcgattgaccatcatgccgcctctaacccgctgactaaagaagtggcgcgtgaagctggcgcctggctggtgaactttaataatgctccgatcctgtggttggttccggctctgggcgtggttctgccgctgctgactatcctgacttcccgtatggagaaaggcgcgtgggcattcctgttctcttcgctgaccctggcctgcattattctgacggcgggtatcgctatgttcccatttgtgatgccgtccagcacgatgatgaatgccagcctgaccatgtgggatgcgacatccagccagatgacgctgaacctgatgacctgggttgcggcggtgttcgtaccgatcattctgatctacaccagctggtgttactggaaaatgttcggtcgtatcactaaagaacatattgaaagcaacacccactctctgtactaa

SEQ ID NO: 371677 - DNA, 1569 bp, Salmonella enterica
atgttagatatagtcgaactgtcgcgcttacagtttgccttgaccgcgatgtaccacttcctgtttgtgccgctaacgctcggtatggcgttcctgctggccattatggaaacggtatacgtcctttccggcaaacagatttataaagatatgaccaagttctggggcaagttgtttggtatcaactttgctctgggtgtggctaccggtttgaccatggagttccagttcgggacaaactggtcgtactactcccactatgttggggacatcttcggtgcgccgctggccatcgaaggtttgatggccttcttcctcgaatccacctttgtaggtctgttcttcttcggctgggatcgtctgagtaaagttcagcatatgtgcgtcacctggctggtggctctggggtccaacctctccgcgttgtggattctggtagcgaacggctggatgcaaaacccaatcgctgcggatttcaatttcgaaaccatgcgtatggaaatggtgagcttctctgaactggtgctgaacccggtagcacaggtgaaatttgttcatactgtggcgtccggctatgtcaccggcgcgatgttcatcctcggtatcagcgcttactacatgctgaaaggtcgtgacttcgcctttgctaaacgctcctttgctattgccgccagcttcggtatggctgccgtactgtccgttatcgtactcggcgacgaatccggttacgaaatgggcgacgtgcagaaaaccaagctcgctgcgattgaagctgaatgggaaacgcaacctgctccggcctcctttaccttgttcggtattcctgaccaggacaaacaggaaaaccatctggcgattcagatcccttatgcgctcggtattatcgctacgcgttccgtggacacgccggttattggcctgaaagatctcatggttcagcatgaagagcgtatccgtaacgggatgaaagcctatgaactgctggagcagctgcgcgccggttctaccgaccaggccgttcgcgaccagttcaacagcatgaagaaagatctcggttacggcctgctgctgaaacgctatacgcctaatgtgactgacgcgaccgaagcgcagatccagcaagcgacgaaagattccattcctcgcgttgcgccgctgtacttcgctttccgtatcatggtggcgtgcggcttcctgctgctggcgatcatcgcactttccttctggagcgtgattcgtaaccgcatcggtgagaaaaaatggctgttgcgcgcggcgctatacggtattccactgccgtggattgcggttgaagcaggttggttcgtcgccgagtatggtcgtcagccgtgggcgatcggcgaagtgttgccgacagccgtggcgaactcatcgctgaccgtaggcgatctgctgttctccatgctcctgatttgcggcctgtataccctgttcctggtggcagaattgttcctgatgttcaaatttgcacgccttggcccaagcagcctgaaaaccggtcgctatcactttgagcagtccaccgtgacttctcagccggcacgctaa

SEQ ID NO: 371678 - DNA, 126 bp, Salmonella enterica
atgtccgttttcgacatggttggccacctttacggtggccttttttatggctttattgtttgtggcaaagtacgggtgaagcatccgggatataaaattattggctttgtaaatattgagctatag

SEQ ID NO: 371679 - DNA, 870 bp, Salmonella enterica
atgtccgttttaattaataaagataccaaggttatctgccagggcttcaccggtagccaggggactttccactccgaacaggcgattgcttacggtacgcaaatggtcggcggcgtaacgccgggcaaaggcggcaccacgcatctgggtctgccggtgttcaacaccgtgcgcgaagcggtagaagccaccggtgcgaccgcatccgttatctacgtgccggcgccgttctgcaaagactccattctggaagcgatcgacgcaggcatcaaactgattatcaccatcaccgaaggtattccgacgctggatatgctgaccgtgaaagtgaagctggacgaagcgggcgtacgcatgatcggcccgaactgcccaggtgtgatcaccccgggcgaatgcaaaatcggcatcatgccgggtcacattcataagccgggtaaagtgggtatcgtttcccgttccggcacgctgacctatgaagcggttaagcagaccaccgactacggtttcggccagtccacctgcgtgggtatcggcggcgacccgattccgggctctaacttcatcgacatcctgaaactgttccaggaagatccgcagactgaagcgatcgtgatgatcggcgagatcggcggtagcgcagaagaagaagcggctgcttatattaaagaacacgtgaccaagccggttgttggctatatcgcgggtgttaccgcgccgaaaggcaaacgtatgggccacgctggcgccatcattgccggtggtaaaggcactgcggatgaaaaattcgccgcgctggaagccgcaggcgtgaaaaccgttcgcagcctggccgatatcggcgaagcgctgaaagcaattataaaataa

SEQ ID NO: 371680 - DNA, 1167 bp, Salmonella enterica
atgaacttacatgaatatcaggcaaaacaactttttgcccgctatggcttaccggcgccggtgggttatgcctgtactactccgcgtgaagccgaagaagccgcgtctaaaatcggtgccggcccgtgggtagtgaaatgtcaggttcacgctggcggccgcggcaaagcgggcggtgtgaaggtagtaaaaagcaaagaagagattcgcgcctttgcggaaaactggctgggcaaacgtctggtgacctatcaaacagacgctaatggccaaccggtaaaccagattctggttgaagcggcgaccgacatcggcaaagaactgtacctcggcgcggtggttgaccgtagttctcgtcgcgtggtctttatggcatctaccgaaggcggcgtagagatcgaaaaagtcgcggaggaaaccccgcatctgatccataaagtcgcgctcgatccgctgaccggcccgatgccgtatcagggacgggaactggcgttcaaattgggtctggaaggtaaactggtgcagcagttcaccaaaatctttatgggcctggcaaccattttccttgagcgcgacctggcgctaatcgaaattaatccgctggtgatcactaagcagggcgatctgatttgcctcgacggcaagctgggcgctgacggcaacgcgctgttccgccagccggatctgcgtgaaatgcgtgaccagtctcaggaagacccgcgtgaagcgcaggcggcgcagtgggaactgaactacgtcgcgctggacggcaacatcggttgcatggtgaacggcgcgggcctggcgatgggcaccatggacatcgttaagctgcatggcggcgaaccggctaacttccttgacgtgggcggcggcgcaaccaaagagcgcgtcaccgaagcgtttaaaatcatcctctcggatgacaacgtgaaagcggttctggttaacatcttcggcggtatcgtccgttgtgacctgattgccgacggtatcatcggcgcggtggaagaagtgggcgtgaacgttccggtggtggtgcgtctggaaggcaacaacgccgaactcggcgcgaagaaactggctgacagtggcctgaatattattgcagcgaaaagtctgacggatgcagctcagcaggttgttgccgcagtggaggggaaataa

SEQ ID NO: 371681 - DNA, 1209 bp, Salmonella enterica
atgagtagcgtagatattcttgttcccgacctgcctgagtccgtagcggacgcgaccgtcgccacctggcataaaaaaccgggtgatgcggttgttcgtgacgaagtgctggtagaaatcgaaactgacaaagtggtactggaagtaccggcatcagcggacggcattctggatgcggttctggaagaggaggggacgactgtcacctctcgccagatcctgggtcgcctgcgtgaaggcaacagcgcgggtaaagagaccagcgccaaatctgaagagaaagcgtctacgccggcacagcgccagcaggcgtcgctggaagaacaaaacaacgatgcgctcagcccggcgatccgtcgcctgctggctgaacacaatctggaagccagcgccattaaaggcactggtgtgggtgggcgtctgacccgtgaagatgtggaaaaacatctggcgaaaggcgagtctaaagcacccgctgttgaacctgcagcacaacccgctctgggcgcgcgcggcgaaaaacgcgtgccaatgacccgcctgcgcaagcgcgtggccgagcgtctgctggatgcgaaaaattctaccgccatgctgacgaccttcaatgaagtcaacatgaagccgattatggatttgcgtaagcagtatggcgaagtgtttgaaaaacgtcatggtatccgcctgggctttatgtccttctacgtgaaagcggtagtggaagcgctgaagcgttatccggaagtgaacgcctctatcgacggcgatgacgtggtgtaccacaactactttgatgtgagcatggcggtgtctacgccgcgcggcctggtcacgccggtcctgcgtgacgtggatacgctgggcatggctgacattgagaaaaaaattaaagaactggctgtcaaaggccgcgacggcaagctgaccgtagaagacctgaccggcggtaactttaccattaccaacggcggcgtattcggttcgctgatgtctaccccgatcatcaacccgccgcagagcgcgattctgggaatgcatgctattaaagacaggccgatggcggtggatggcaaggtggaaatcctgccgatgatgtacctggcgctctcttacgatcatcgcctgatcgatggtcgcgaatccgtgggcttcctggtcaccatcaaagagttgctggaagatccgacccgtctgctgttggacgtgtag

SEQ ID NO: 371682 - DNA, 2802 bp, Salmonella enterica
atgcagaacagcgctttgaaagcctggttggactcttcttacctctctggttcgaatcagagctggatagaacagctctatgaagacttcttaaccgatcctgactcggtagacgctaactggcgtttgacgttccagcagttacctggtaccggagtcaaaccggatcaactccattcaaaaacacgtgaatatttccggcggcaggcgttggctggctcacgtcactcttctacgatttccgaccctgacaccaatgtgaagcaggttaaagtcctgcagcttattaacgcttatcgtttccgtggccatcagcatgcaaacctcgatccgctgggtctgtggaaacaagaacgcgtggcggatctggacccttctttccatgatttgaccgaggccgatttccaggaaaccttcaatgtcggctcctttgccagcggcaaagagacgatgaagctgggcgagctgctcgacgcgctcaaacagacctactgcggcccgattggcgctgagtatatgcacatcaccagcaccgaagagaaacgctggatccaacagcgcatcgaatccggtcgtgcggcctttagcgctgacgagaaaaaacgcttcctgaacgaactgaccgccgctgaagggctggaacgttatctgggtgccaaattcccgggtgcgaaacgtttctcgctcgaggggggagatgcgctgatacccatgctgaaagagatggttcgccatgcgggtaacagcggcactcgcgaagtggtgctggggatggcgcaccgcggtcgcctgaacgtgctgatcaacgtactgggtaaaaaaccgcaggatctgttcgacgaatttgccggtaagcataaagaacatctgggtaccggcgacgtgaagtatcacatgggcttctcgtcagatatcgaaaccgaaggcggtctggttcacctggcgctggcgtttaacccatcgcatctggaaattgtgagcccggtggtgatgggctccgtgcgcgcccgtctggacagactggacgaaccgagcagcaacaaagtgttgccgatcactattcacggcgacgccgcggtgaccggccagggcgtggttcaggaaaccctgaacatgtcgaaagcgcgcggttacgaagtgggcggtacggtacgtatcgttatcaacaaccaggtgggcttcaccacctctaacccactggatgcgcgttcaacgccttactgcaccgatatcggtaaaatggtccaggcgccgattttccacgtcaatgcggacgatccggaagccgtcgcttttgtgacccgtctggcgctggacttccgtaacacctttaaacgcgatgtgttcatcgatctggtgtgctaccgccgtcacggccacaacgaagccgacgagccaagcgcaacccagccgctgatgtaccagaaaatcaaaaagcatccgacgccgcgtaaaatctacgccgacaagctggaagcggacaaagtcgcgacgctggaagatgccaccgaaatggttaacctctatcgcgatgcgctggatgcaggcgaatgcgtggtgaaagagtggcgtccgatgaatatgcactcgttcacctggtcgccgtatctaaaccacgaatgggatgaagcatacccgaacaaggtagaaatgaagcgtctgcaggagctggcaaaacgtatcagcaccgtgccggaagccattgaaatgcagtctcgcgtggcgaaaatttatggcgaccgtcaggcaatggcggcaggcgagaaattgtttgactggggcggtgcggaaaatctggcttacgccacgctggtcgatgaaggcattccggtgcgcctgtccggggaagactccggtcgcggcaccttcttccatcgtcatgcggtgatccacaaccagacgaacggctcaacgtatacgccgttgcagcatattcacagcggtcagggacagtttaaagtctgggactccgtgctgtctgaagaagcggtactggcttttgaatacggttatgccacggcggaaccacgtaccctgactatctgggaagcgcagtttggcgattttgccaacggcgcgcaggtagtgattgaccagttcatctcctccggcgagcagaaatggggccggatgtgcggtctggtgatgctgttgccgcatggctatgaagggcagggcccggagcactcttccgcgcgtctggaacgttatctgcaactttgcgccgagcagaatatgcaggtttgcgtgccgtccaccccggcgcaggtctaccatatgctgcgccgtcaggcgctgcgcgggatgcgtcgtccgctggtggtgatgtcgccgaaatcgctgctgcgtcacccgctggcggtttccacgcttgatgaactggcgaacggttccttccagccggccattggcgaaattgacgagctggaccctaaagccgtaaaacgcgtggtaatgtgttctggtaaggtttattacgacctgctggaacaacgtcgcaaaaacgaccagaaagatgtcgctatcgtgcgcatcgaacagctctatccgttcccgcataaagcggtgcaggaagcgctgcaaccatacgctcacgtccatgattttgtctggtgccaggaagagccgctcaaccagggcgcatggtactgcagtcagcatcatttccgtgaagtgattccgtttggggccgctctgcgttatgcaggtcgcccggcctccgcctctccggcggtagggtatatgtccgttcaccagaaacagcaacaagatctggttaatgacgcgctgaacgtcgattaa

SEQ ID NO: 371683 - DNA, 717 bp, Salmonella enterica
atgaaactcgaattttcgatttatcgttataacccggatgtcgataacgctccgcgtatgcaggattacaccctggaaggcgaagaagggcgcgacatgatgctgctggatgcgttaatccagcttaaagaaaaagatcccagcctttctttccgtcgttcctgccgcgaaggtgtgtgcggttctgatggtttgaatatgaacggtaagaatggtctggcctgtattacccctatttcggcgctgactcagccgggtaagaagattgtgattcgcccgctgcccggtttgccggtgatccgcgatttggtggtagacatggggcaattctacgcacaatatgagaagattaagccttacttattgaataatgggcaaaatccaccggctcgtgagcatctgcagatgccggagcagcgtgaaaaactcgatgggctgtatgaatgtattctttgcgcctgttgctcaacatcctgcccgtcattctggtggaacccggataagtttatcggtccggcggggctgctcgcggcgtatcgattcctgatcgatagtcgtgataccgagaccgacagtcgtctggaagggatgagcgatgcattcagcgtattccgctgtcacagcattatgaactgcgtcagtgtatgtcctaagggactaaacccgacgcgcgctatcggccatattaagtcgatgctgttgcagcgtagcgcataa

SEQ ID NO: 371684 - DNA, 1767 bp, Salmonella enterica
atgaaactgccagtcagagaatttgatgctgttgtgattggtgccggtggcgcaggtatgcgcgcggcgctgcaaatttcccagagcggccaaacctgtgcgctgctctcgaaagtcttcccgacccgttcccataccgtttccgcgcagggcggtatcaccgtggcgctcggcaatacccatgaagataactgggaatggcacatgtacgataccgtaaaagggtcggactacattggtgaccaggatgctatcgaatatatgtgtaagaccggaccggaagcgattctggaactggagcacatggggctaccgttctcccgtcttgatgatggacgtatctatcagcgcccgttcggcggccagtcgaaaaactttggcggcgagcaggcggcacgtaccgcggcggcggctgaccgtaccggtcacgccttgctgcacacgttgtatcaacagaatttgaaaaaccacaccacgattttctccgaatggtatgcgctggatctggtgaaaaaccaggatggcgcggtggtggggtgtaccgcactgtgcatcgaaaccggtgaagtggtgtacttcaaagcccgcgcgacggtgctggcgaccggcggcgcaggccgtatctaccagtccaccaccaacgctcacatcaacaccggtgacggtgtcggtatggcgctgcgtgccggtgtcccggtgcaggacatggaaatgtggcagttccacccgaccggcatcgccggggcgggcgtgctggtgacagaaggctgccgcggcgaaggcggttacctgctgaacaaacacggcgagcgctttatggagcgttatgcgccgaatgccaaagacctggcgggtcgtgacgtggtggcgcgttccatcatgatcgaaatccgtgaaggccgcggctgtgatggtccgtgggggccgcacgctaaactgaaactggatcacctgggtaaagaggtgctggaatctcgcctgccgggtatcctggagctgtcccgtactttcgcccacgttgacccggtgaaagagccgattccggttatcccgacctgccactacatgatgggcggtattccgactaaagtgaccggtcaggcgctgaccgtgaacgagcagggcgaagacgtggtcattccggggctgtttgcggtaggcgaaatcgcctgtgtatcggttcacggcgccaaccgtctgggcggtaactcactgctggatctggtggtctttggccgcgcggcggggctgcatttacaggaatccatcgccgagcagggcgtgctgcgcgacgccagcgagtctgacgttgaaggttctctggagcgcctgaatcgctggaacaataaccgcaatggcgaagatccggtggctatccgcaaagcgttgcaggagtgtatgcagcataacttctccgtattccgtgaaggcgacgcgatggcgaaagggcttgagcagttgaaagtgatccgcgagcgtctgaaaaacgcccgtctggatgacacgtccagcgagtttaatacccagcgtgttgagtgtctggagctggataacctgatggaaaccgcctacgccactgccgtatcagccaacttccgaacggaaagccgcggcgcgcatagccgcttcgatttcccggagcgtgatgatgccaactggttgtgtcataccctgtatcagccgcaaacggaatccatgacgcgccgaagcgtcaatatggagccgaaactgcgtccggcgttcccgccgaagattcgtacttattaa

SEQ ID NO: 371685 - DNA, 348 bp, Salmonella enterica
atggtaagcaacgcctccgcattaggacgcaatggcgtacatgacttcatcctggtccgtgctaccgctatcgttctgacgttatacatcatctacatggtgggttttttcgccacgagcggcgaactgacctttgaagcctggaccggtttcttctcatcggccttcaccaaagtcttcaccctgctggcgcttttttccatcttgattcatgcctggatcggcatgtggcaggtgttaaccgactacgttaaaccactggcagtgcgtctgatactgcaactcgttattgttgttgcgctggtggtttacgtcatctatggatttgttgtggtgtggggtgtgtaa

SEQ ID NO: 371686 - DNA, 405 bp, Salmonella enterica
atgtgggcgttattcatgataagaaatgtgaaaaaacaaagacctgtcaatctggatctacaaacgattcggttccccatcacagcgatagcgtccattctccatcgcgtatccggtgtgattactttcatcgccgtcggcatactactgtggctactgggcaccagcctctcttctccggaaggattccagcaggccgccgatatcatggacggcttcatcgttaaatttatcatgtggggcatccttaccgcgctggcgtatcacgtcatcgtgggaattcgtcacatgttaatggattttggctatctggaagaaacattcgaagcgggtcaacgctctgccaaaatctcttttgttatcactgtcgtgctttcacttctcgcaggagtcctcgtatggtaa

SEQ ID NO: 371687 - DNA, 1284 bp, Salmonella enterica
atggctgatacaaaggcaaaaatcacccttactggtgacactgctattgaactggatgtgctaaaaggtacactcggtcaagatgttattgatattcgtagtctcggttcaaaaggagtttttacttttgaccctggtttcacctctaccgcatcctgcgaatctaaaatcaccttcatcgacggcgacgaaggcattttgttgcatcgcggtttcccgattgaccagcttgctaccgattccaactatctggaagtctgttacatcctgctgtacggcgaaaaaccgacgcaggaagagtatgacgagttcagaacgacagtcacccgccatacgatgatccatgagcaaatcactcgcctgttccatgctttccgtcgcgactcacatccgatggcggtaatgtgcgggatcactggcgcgctggcggcgttctaccacgactcgctggatgtgaacaatccgcgccaccgtgaaatcgcggcgttccgcctgctgtccaaaatgccgaccatggcggcgatgtgttacaaatattccatcggtcagccgtttgtttatccgcgcaacgacctttcctacgccggtaacttcctgaacatgatgttctccacgccgtgtgaaacctatgaagtgaatccggtactggagcgcgcgatggaccgtattctgatcctgcacgctgaccatgagcagaacgcctcaacgtcaacggtacgtaccgcaggttcaagcggcgccaacccattcgcctgcattgccgccgggatcgcctccctgtggggacccgcgcacggcggcgccaacgaagccgcgctgaaaatgctggaagaaatcagctctgttaaacacattccggaatttgttcgccgtgcgaaagacaagaatgattctttccgcctgatgggcttcggtcaccgtgtttacaaaaactacgatccgcgcgccaccgtgatgcgtgaaacctgccatgaagtgctgaaagagctgggcaccaaagatgatctgctggaagtggcgatggagcttgagcacattgcgctcaacgacccgtacttcatcgagaagaaactgtacccgaacgtagacttctactccggcatcattctgaaagcgatgggcattccgtcctccatgttcaccgtgatcttcgccatggcgcgtaccgttggctggattgcacactggaatgaaatgcacactgacggcatgaaaatcgcccgtcctcgtcagctgtataccggctacgataaacgcgattttaaatcggcgctgaagcgttaa

SEQ ID NO: 371688 - DNA, 1047 bp, Salmonella enterica
atgccgattctgcagtggtttttgttgttcctgttatcgctgctcatttcccttatttttctctggctgcaccttccggcggcgatgctgctcggtccaatgattgcgggtatcgtgttgagtttgcgaggtagtacgctacaacttccgcgcggtatttttctcgccgcgcaggcgattctcggctgtatgatcgcccaaaatctaaccggttcgatattgaccaccctcgccctctactggccggtcgtgcttttagtgttgctggtgacgctgctttccagcgcgatagtcggctggctgctggtacgctacagctcgctgcccggcaacaccggcgcatgggggtcttcgccgggcggcgcggcggcaatggtagcgatggcgcaagattacggggcggatatccgcctggtggcgtttatgcagtatctacgggtactgtttgtggctggcgcggcggtgctggtgacacgcctgatactcggcgacagcgcggcagcggtcagccaacaggtgatctggtttccaccgcttagcggtaatttattgacgacgctgctattagcgatcgtggcgggcattgccggtcgcctgttgcgtatcccttccggcacgatgctgctccccatgttggcaggcgcgattctccattcgcaaggcatcattgaaattgaattacccgaatggctgctggccgtggcgtatatggcgataggctggcgtattgggctgggttttgacagacaggtgttttttatggcgctgcggccattgccgcaaatcttattgtcaattttcgcgctgatggcgatttgcgccgcgatggcgtggggaatggcttactacatgcagattgattttatgacggcttatctcgccaccagtcccggtggtctggatacggttgccgcgatcgcggcaggaagcagtgccgatatggcgctcatcatggcaatgcaaaccctacggctgttcagcattctgttaactgggccagcagtggcccgttttatatcaacctatgcgcccagacaacctttgtag

SEQ ID NO: 371689 - DNA, 792 bp, Salmonella enterica
atgcctgaaggcccggaaattcgtcgtgcggcggataatctggaggcggcaatcaaaggcaaacccttaaccgatgtctggtttgcctttgcacagttaaaaccgtatgaatcgcagcttaccggtcaacttgttacccggatagagacgcggggaaaagcgttattgacccacttttcaaatggcctgacgctctacagccacaaccaactctatggcgtatggcgggtgatcgatactggtgaaataccgcagaccacgcgtatattgcgcgtcaggctacaaacggcggataaaactattctgctttatagcgcgtctgatatcgaaatgctgacagcagagcagctcacgacgcacccttttttacagcgggtcggtccggatgtgctggacgcgcgtctcactccggaagaggttaaagctcgattgctgtcgccgcgttttcgcaaccgacaattttctgggctgttgctggatcaggcctttctggcgggattggggaattatctgcgcgttgaaatcctctggcaggtagggttaaccggacagcataaagcgaaagatctcaacgaggcgcaactgaatgcgctttctcacgcgctgttggatattccgcgcctgtcctacacgactcgcggtcagtcggatgaaaacaagcatcatggcgcactgtttcgctttaaggttttccatcgtgacggcgaagcgtgcgagcggtgcggcggcattattgaaaagacaacactgtcctcacgcccgttttactggtgcccgcattgccagaaatag

SEQ ID NO: 371690 - DNA, 735 bp, Salmonella enterica
atgaacattgatttaaatgcggatgtgggcgaaggctgcgccagcgacagcgaattattaacgctggtctcctccgccaatatcgcctgtggttttcacgccggtgatgcgcaaaccatgctgaccagcgtgcgcgaggcgctgaaaaacggcgtggcgatcggcgcgcatcccagctttccggatcgggataattttgggcggacggcgatggctttgccgccggaaacggtatacgcccagacgctgtaccaaatcggcgcgctgggggcgattgttcaggcgcaaggcagcgtgatgcgccatgtcaaaccgcacggtatgctctataaccaggcggcgaaagatccccatctggcacaggcgattgcgaaagcggtacacgactatgatccgtcactgatactggttggactggcgggaagtgagctgatccgggccggtgagcgccatcgcctggtgacgcggcaggaggtgtttgccgatcgcggctatcaggccgacggtagcctggtgccgcgcatgcaacctggcgcgctgattcacgacgaagagcaggcgctggcgcaaacgctggatatggtacaagccgggagagtgaaaagcgttactggcgtgtggacgactgtcacggcgcaaacggtgtgcattcatggcgacggcgagtatgcgcttgcattcgctcgcaggttacgcgccgcgttcaatgcgcgtaatatacacgttattgcctga

SEQ ID NO: 371691 - DNA, 933 bp, Salmonella enterica
atgctgaatattattcgcgcggggatttacacctccgtgcaggatagcgggcgtcacggctttcgtcagtcggggctgagtcactgcggtgcgctggataaacccgcctttcagaccgctaatctcctggtcgggaacgatgcgaatgccccggcgctggaaatcactctcggtcaactggttgtcgaatttgaaaatgagacctggttcgctcttaccggcgcaggctgcgaggcgcagttggatgatcaaccggtctggacaggctggcgattgccggtaaaagcgggtcaacgtcttacgctgcatcgaccgcttcacgggatgcgtagctatctggcggtggcgggcggtattgctgtgccggaggtaatgggatcgtgtagtaccgatctgaagtccggtatcggtgggctggaaggacggttgctaaaagatggcgatcggttggcgatgggtaaaccatcgcgacagtttagcgggccgcagggcgtgaagcagttactgtgggggaatcgcatccgtgcgctgccggggccggaataccgtgaattcgatcgcgcctcgcaagaagcgttctggcgttcgccgtggcaactcagtccgcaaagtaatcgcatgggctatcgtttgcagggtcaatcgttaacgcggacaacggatcgcgaactgctgtcgcacggtttgctgcccggtgtcgtgcaggtgccttacaacggccaacctattgtgctaatgaatgatgcccagacaactggcggctatccgcgcattgcctgcatcatcgaggcagatatgtaccatctggcgcagatcccgctagggcaaccgatccattttgtgcaatgttcgctggaagaggcgctcaacgcgcgccgcgagcgtcagcgctatctggaacagcttacctggcggcttcagcatgaacattga

SEQ ID NO: 371692 - DNA, 657 bp, Salmonella enterica
gtgcagcgagcgcgttgttatctgttaggcgaaacggcggtcgttctggaacttgaaccgccgattacgctggcgagccagaaacgcatctggcgtctgacgcagcgtctggtcgatatgccgaacgtggtggaagccattcccgggatgaacaatatcaccgtgatcttgcgggaaccgcaaaccctggcgctggatgcgattgagcgtctgcagcgctggtgggaagagagcgaggcgctggagccggactcgcgttcggttgagatcccggtgatctatggcggcgcaggcgggccggatctggcggcggtggcacggcacagcggtttgagtgaaaagcaggtcgtggagctacatgcctccgttgagtatgtcgtctggtttttaggctttcagcctggctttccctatcttgggaatttaccagaaccgctccatatgcccagacgcgcggagccgcgcctgcaggttccggccggttctgtcggcatcggcggcgcgcagacggggatttatccattatccacgccgggcggctggcagctgatcggcctcacgccgttgaagttattcgatccgatgcgggagcccccggttctgctacgccctggcgatagcgtacgctttgtgccgcaaaaggagggaatatgctga

SEQ ID NO: 371693 - DNA, 744 bp, Salmonella enterica
atgaaaaacaccgagctggaacaactgattaacgacaagctgaacagtgcggcaataagcgattatgcgccgaatggtttacaggtcgaaggaaaagagacggtacagaaaatcgttaccggcgtgaccgcaagtcaggcgctgctcgatgaggcggtgcgtttgcaggccgatgcggtcattgttcatcatggttacttctggaaaggcgagtctccggttattcgcggtatgaaacgccgtcgcttaaaaacgttactggcaaatgatattaacctttacggttggcatctgccgctggatgcgcaccctgagctgggcaacaatgcgcagttggcggcgctattaggcattaccgtgaaaggagaaattgagccgctggtgccgtggggagagctctcaatgccggtgccggggctggaactggcctcatggattgaagcgcgtctggggcgtaaaccgctatggtgcggcgataccgggccagagaatgtgcagcgtgtcgcctggtgtaccggcggcgggcaaagttttattgatagcgccgcccgcttcggcgtggatgcttttattaccggcgaggtgtctgaacagaccattcattccgcgcgcgaacaggggctgcatttttatgccgccgggcaccatgccactgaacgcggcggtattcgcgccctgagcgaatggttgaacgaaaacacggcgttggatgtgacgtttattgatatccctaacccggcataa

SEQ ID NO: 371694 - DNA, 1524 bp, Salmonella enterica
atgcccgctttcttgccgcagcgtctctatcccggaaatacgatgaataaacaagcatctcaaccccgcgctatttactacgttgtcgccctgcaaatttgggagtacttcagcttttatggtatgcgcgccctactgattctttatctcaccaatcagctaaaatacgacgataaccacgcctatgagttattcagcgcttattgttcgctggtctacgtaacgccgattcttggcggctatctggcggataaggtgcttggcaaccgaatggcagtcatgctgggcgcatttttaatggctataggtcatttagtgctgggcgccagtgagatcgcgccgacattcctttatctgtcgctggcgatcattgtctgcggctacggcctgtttaaatcgaatattagctgcctgctgggcgaactgtaccagccggaagatccgcgccgcgacggcgggttctcgctgctttacgcagcgggcaatattggttcgatcgtggcgcctatcgcctgcggctatgtgcaagaggagtacagttgggcgatgggctttgcgctcgccgccattggtatgcttgcggggttagtgatcttcctgtgtggaaatcgtcatttcacccacaccaccggcgtgaataaagccgtgttgtgcgccagaaactacctgctgccgaactggggctggctgttaattttgctggtagcggcgccgttgctgattaccgttctgttctggaaagaatggtctgtctatgccttaatcgtggcgaccgcgatcggcctggtcgtgctggcaaaaatttatcaccaggcgcaaacggccaaacagcgcaaagaactggggctgattgtcaccctgaccctgttcagtatgctgttctgggcgtttgcccagcagggcggcagttctatcagcctgtatatcgaccgctttgtgaaccgcgatattctgggctattccgttcctaccgccatgttccagtcggtgaacgcctttgccgtgatgctgtgtggggtcgtcctggcctggctggttaaagagagcgtaagcggtaatcgcaccgtgcgtatctggggcaaattcgcgctgggtctcggtctgatgagcgccggattctgtattctgaccctgagcgcacgctggtccgccgcttacggacactcttcaatgccgctaatggtgctgggactggcggtgatgggctttgccgagctatttatcgacccggtcgccatgtcgcaaattacgcgcattgatatccccggcgtcaccggcgtattaaccggaatttatatgctgctgtccggcgcgatagctaactatctggcaggcgtcatcgctgaccagacctcgcaaagcgccttcgacgccagcggcgcggttaattacgccatcaacgcctatgtggatgtttttgaacagatcacctggggcgcgttagcctgcgtaggggttgtcctgctgatttggctgtatcagtccttcaaattcaaaagccgcgcgctggccgtcgaatcctga

SEQ ID NO: 371695 - DNA, 1422 bp, Salmonella enterica
atgcccacccatttagtctggttcaggcgcgatctgcgtttacaggataaccttgcgctggccgccgcctgccgcgatgcatccgcgcgggtgctggcgctttatatttccacccccgcgcagtggcaggcccatgatatggcgccgcggcaggcggcattcatcagcgcgcagctcaatgcgctacagacggcccttgcagagaaaggcattccgttgctgtttcatgaagtggcggattttaacgccagtattgaaacggtcaaaaacgtttgccgacagcatgacgtcagccatctgttttataactatcagtatgagtttaacgagcgtcagcgtgatgcggcggtggaaaaaacgctgccctctgtcatctgcgaaggctttgacgatagcgtgattctggcgcccggcgcggtgatgaccggcaatcatgaaatgtataaagtttttacgccgtttaaaaatgcctggttgaaacggctaaaagaagatatcccgccgtgcgttccggccccgaagatccgggtgagcggcgcgctttctacacccttaacgccagtctcgcttaactacccgcaacaggcgtttgacgccgcgcttttcccggtggaagaaaacgcggtcatcgcgcagctacgtcagttttgcgcgcagggcgcagacgagtacgcgttacggcgcgatttccctgcggttgacggcaccagtcggctttccgccagcctggcgacgggcggcctgtcgccgcgacagtgcctgcaccgattactggcggagcagccgcaggcgctggacggcgggccgggaagcgtctggttgaatgagctcatctggcgggaattttaccgtcatttaatgacctggtatccggcattatgcaaacaccagccgtttatccgctggacaaaacgcgtcgcgtggcaggaaaacccgcactattttcaggcatggcagaaaggcgaaaccggttatcccattgtcgatgcggcgatgcgccagcttaacgcgacgggctggatgcataaccgtttacgcatgattaccgccagctttctggtaaaagatctgttgattgactggcggttgggggagcgctatttcatgtcgcagcttattgacggcgatcttgccgccaataatggcggctggcagtgggccgcttcaaccggtaccgatgccgcgccttattttcgtatttttaatcccacgactcagggagagaggttcgatcgcgacggcgaatttatccgccagtggctaccggcattacgcgatatccctggaaaagcgattcacgagccgtggcggtgggcggaaaaagcgggagtcgtgcttgattatcctcggcctattgtggagcacaaacaggcgagaatcgcaacgctttccgcctatgaggcggcgagaaaaggggcgtga

SEQ ID NO: 371696 - DNA, 207 bp, Salmonella enterica
atggaacactataaagactatccagcgcatgtcatttttgcacgtcgtgctttcgcggtgaccgcaggcgtgctggcgttgccggtgatgctcttctggaaagaccgcgcgcgtttttatagttatctgcaccgtgtctggtcgaaaaccagtgataaaccggtatggatggcgcaggctgaaaaagccacctgcgacttttattaa

SEQ ID NO: 371697 - DNA, 1680 bp, Salmonella enterica
atggccgcgcaaggatttttactgatcgccagttttttactgattttattggtactggcgaaaccgttgggttcgggcctggcaaggctcatcgccgccgttccgttgccgggcgtggctggcgttgagcgtatcctctggcggactcttggcattaccgaccacgaaatgaactggcgtcagtatttactggcgctactgacgctcaatctgctgggactgggcatcctgttttgcctgctgttctggcaggagtggctgcccttaaatccgcagcggctaccggggctgtcctgggatctggcgctgaataccgccgtcagctttgtcaccaataccaactggcaagcctacagcggcgaaagcacgctgagctactttagccagatggccgggctgacggtgcaaaatttcctgtcggcggcgaccgggattgcggtggtttttgcgcttatccgcgcctttacgcgccagaatgtgcacacgctgggtaatgcctggcaggatctggtacgcattacgctatggatattatttcctgtcgcgttaattatcgcgctgttttttatccaacaaggcgtaccgcaaaatctgtcggcttatcagcccatcaccacccttgaaggcgctaaacaacttttgccgatgggtccggttgcttcgcaggaggcgatcaaaatgcttggcaccaacggcggcggtttctttaacgccaactcttcgcatccgttcgaaaaccctaccgcgctcactaatctggcgcagatgctggcgatatttttgattccagccgcgctctgtttcgcctttggcgaagcggcgggcgatcgccgtcagggacgcgcgctactgtgggcaatgtcattcatttttgtggtctgcgtagcggtagtgatgtgggcggaagttcagggaaatccacatctgttggcggcgggcgcggacagtagcgtcaacatggagggtaaagaaacgcgctttggcgtgctggccagcagcctgtttgccgtcgtcacgaccgcggcgtcctgcggggcggtaaatgccatgcacgactcgtttaccgctctgggcggtatggtgccgatgtggctgatgcaaattggcgaagtggtctttggcggcgtcggttcaggcctgtatggcatgttgctgtttgtcctgctggcggtgtttatcgcggggctgatgatcggtcgcacgccggaatatctggggaaaaaaatcgacgtgcgcgaaatgaaaatgaccgcgctggcgattctggtcacgccgatgttggtcttgttgggttcggcgctggcgatgatgacggatgccggacgcagcgcaatgctgaaccctggcccgcacggttttagcgaagtgctatatgccgtctcctctgccgccaacaacaacggtagcgcctttgcgggtctgagcgctaactcgcctttctggaactgtttgctggcgttctgcatgttcgtcggccgtttcggcgtgattattcctgtcatggccatcgccggatcgctggtcagtaaaaaagtacagccggccagtcagggaacgctggcgacccacggcgcgctatttattgggctgctcatcggcacggtactgctggtcggcgcgctgacgtttattcctgccctggcgcttggcccggtagcggaacatttctctttaccttga

SEQ ID NO: 371698 - DNA, 2049 bp, Salmonella enterica
atgagtcgcaagcaactggcgctgtttgaacctgttttactcgtacaggcgctaacggatgccgtaaaaaaattaagcccacgcgcccagtggcgtaacccggtgatgtttgtggtctgggccggcagcgtgctaaccactctgttaacgctcgctatggtaacaggacaaatagcgggaagcgccttgtttacagggattatcagcctgtggttatggttcaccgtactgttcgccaattttgccgaagcgctggcggaaggccgcagcaaagcccaggcaaacagtctgaaaggggtgaaaaagaccgcgttcgctcgtcggctgcgcgccccgcgccatgatgcgcaggccgataacgtgcccgccgctgaactgcgaaaaggcgacattgtcctggtcaaagcgggcgatattattccctgcgacggcgaggtcatcgaaggcggcgcgtcggtggatgaaagtgcgattaccggcgaatccgccccggtgatccgcgagtccggcggcgatttcgcctctgtcaccggcggcacgcgaattctttccgactggctggtgattgcctgtagcgtcaatcctggcgaaacctttcttgaccggatgatcgcgatggtggaaggcgcgcagcggcggaaaacgcctaacgagattgccctgacgattttgctcatcgccctgaccattgtctttttactggcgaccgccaccctgtggcccttctccgcctggggcggtaatgcggtcagcgtcaccgtgttggtggcgttgctggtgtgcctgatccccaccaccatcggcgggctactctccgccattggcgtagccggaatgagccgaatgttgggcgcgaacgtcatcgccaccagcggccgcgccgtagaagccgcgggcgatgtcgacgtgctactgctggataaaaccggcactatcacgctcggcaaccgccaggcgtccgattttatacccgcccgaggggtggacgaacgcacgctggctgacgccgcgcagctcgcttcgctggccgacgaaacgccggaaggtcgcagcattgtgatcctcgccaaacagcgctttaacctgcgtgaacgcgatgtgcagtcgcttcatgccacctttgttccgtttaccgcacaaagccgcatgagcgggattaatatcgataaccggatgatccgtaaaggctcggtggacgcgattcggcgtcatgtcgagagcaatggcggccattttcccgccgatgtcgagcaaaacgtcgagaacgtggcgcgcctgggcgcgacgccgctggtggtcgtggagggcgcgcgcgtactgggtgttatcgccctcaaggatatcgttaaaggcggtattaaagaacgtttcgcccagctgcgaaagatgggtattaaaacggtgatgatcactggcgataaccgcctgacggcggcagcgattgccgccgaagccggtgtggacgattttcttgccgaagccacgccggaagccaagctggcgctgatccgtcaatatcaggcggaaggacggctggtcgccatgaccggcgacggcactaacgatgccccggcgctggcgcaggctgacgtcgcggtggcgatgaactccggcacccaggcggcgaaagaagccggtaatatggtggatctggactctaacccaaccaagttgattgaagtggtgcatatcggtaagcagatgctgatgacgcgcggctcgctcaccaccttcagtatcgcgaatgatgtagcgaaatatttcgccattattcccgccgcgtttgccgctacctatccgcagctaaacgcgctcaacgtgatggggctgcattcgccgaactccgccattctgagcgcggtgatctttaacgccctgattattatttttctgatcccgctggcattaaaaggcgtgagttataagccgctttccgcatcggccatgctgcgccgtaatttatggatctatggtctgggtggtctggtggtgccgtttattggtatcaaagtgattgatgtgctgctgaccctgctgggtctggcgtga

SEQ ID NO: 371699 - DNA, 585 bp, Salmonella enterica
atgatcggtttacgtcctgctttttcgacaatgttatttctgctgttattgaccggcggcgtgtatccgcttctgaccacggcgctggggcagtggtggtttccctggcaggctaatggctcgctgattcataaagacaatgtgatacgcggctcagcgcttatcggacaatcgtttaccgccgcgggttattttcatggccggccctccgccaccgccgatacgccttataatccactggcgtcgggcggaagcaacctggccgccagcaatcccgaactggatgcgcaaatacagtcccgcgtcgccgcgctacgcgccgctaacccccaggcgagttccgcggttccggttgagctggcgacggcctcggcaagcgggctggataataatctgacgcccggcgccgcggcatggcaaatcccccgcgtggcggcggctcgccagcttcccgttgaacaggtcgcgcaactggttgcagaatatacgcacaggccgctggcgcgctttcttgggcaaccggtggtgaatattgttgagcttaatctggcgctggatgcgctacagggacacagagcgaaatga

SEQ ID NO: 371700 - DNA, 2685 bp, Salmonella enterica
atgaacgacgaacccttgcgtcctgatccggatcgcttgttggaacaaacgcccccgccccaccgggggaagttgaaaattttcttcggcgcctgcgcaggcgtcggaaaaacctgggcgatgctggcgcaagcgcagcggctgcgagcgcaggggctggatgtggtgatcggcgtggtagagacgcacggccgtgaagagaccgccgcactacttgacgggctgaccattctgccgccaaaacgtcactcgcaccgggggcggcaaattcgcgaatttgacctggatgccgccctcgcccggcgtccggcgctgattttaatggatgagctggcgcacagtaacgcgcctggctcacgccatcctaagcgctggcaggatattgaagagctgctggaagcgggaatcgacgttttcaccaccgtgaacgtacaacatctggaaagtctgaacgatgtggtgagcggcgtcacggggattcaggtgcgcgaaaccgtccccgatcccttttttgatgccgctgatgaagtcgtactggtcgatctgccgcccgacgatctgcgccaacggctcaacgaaggtaaagtgtatatcgccggtcaggcggaacgcgctattgaacattttttccgcaagggcaatctgatcgccctccgcgagctggcgctacgccggacagccgatcgcgtggacgatcagatgcgcgcctggcgcgcgcatccgggcgaagaaaaagtatggcacacccgcgatgcgattttactgtgtatcgggcataacaccggcagcgaaaaactggtgcgtaccgcggcgcgtctggcctcccggctcggcagcgtctggcacgccgtctatgtcgaaacgccaacgttacaccgcttaccggaaaaacaacggcgggctattttaagcgcgctgcgcctggcgcaggagcttggcgcggaaaccgccaccctgtccgatcccgccgaagagaaagcggtcgtgcgctatgcccgcgagcataatctggggaaaatcgtcatgggccgcccggcgtcgcgacgctggtggcgacgtgacgctttcgccgaccgtcttgccaggcgcgcgccggatctcgatcaggtgatcgtcgcgctggaagagccgccagcccgcgcattggcgcaaacgcctgataaccgtccttttaaagagaaatggcgtgggcagattcagggctgtctggtcgccgtggcgctttgcgccatcaccacgcttatcgctatgcagtggcttgtcaccttcgacgccgccaatctggtgatgctctatttgctgggcgtagtggtgattgcgctgctttacgggcgctggccgtcggtggtggcgacggtgattaacgtggcgagtttcgatctcttttttatcgcgccacgcggtacgctcgccgtttcggacgtgcagtatctgctgacttttgccgtgatgctgacggttggtctggtgattggcaatcttactgccggggtgcgctatcaagcgcgcgtcgcccgttatcgggaacagcgtacccgtcatttatatgaaatgtctaaagcgctggccgtcgggcgtagtgaacatgatatcgccgcgaccagcgagcggtttatcgcctcgacgtttcaggcgcgcagccaaattttattacctgatgctaacggtaagttgctgcctctcacccaccagcaaggcatgacgccgtgggacgacgcaattgcgcgctggagttttgataaaggccagcctgccggcgcaggcaccgataccctccctggcgtgccttatcaaatcctgccgctgaaaagcgccgataaaacgtacggtctggctatcgtcgaaccgggtaatttgcgtcagttaatggtgccggagcagcaacgcctgctggaaacatttactctgcttgtcgccaacgcgctggaacgactgacgctgaccgccagcgaagaacaggcgcgtctcgccagcgagcgcgaaagtattcgcaacgctctgctggcggcactgtcgcatgatttacgcacgccgctgacggtattgttcggccaggcggaaattttgacgctggatttagccagcgcaggatcgccccacgcgcgtcaggccagtgaaatccgccagcatattctcaacaccacccggctggtgaataatttgctggatatggcgcgtattcagtccggcgggtttaatcttaaaaaagagtggctgacgctggaagaggtcgtcgggagcgcgttacagatgttagagccgggtttattgcatccgattacattgtcgctgccgcaacagttaacgcttatccatgtcgatggccccttatttgagcgcgtcctgatcaacttgctggaaaacgccgttaagtacgccgggccgcaggccagtatcggcattgatgctgcggttaaggacgatcgtttacaactggatgtctgggataacgggccgggtattcctgcggggcaagaacagaagattttcgataagttcgcccgcggcaacaaagagtccgccgtccccggcgtggggctggggctggcgatttgccatgctatcgtagaggtacacggcggcacgcttaccgcctataatcgaccgcagggcggcgcctgtttccgtgttacgctgccgcaaggaaaaccacctgaacttgacgattttcatgaggatatgtga

SEQ ID NO: 371701 - DNA, 678 bp, Salmonella enterica
gtgacaaacgttctgattgttgaagatgaacaggccatccgccgctttctgcgcgccgcgctggaaggcgacggcctgcgcgtgtatgaagctgaaacattacaacgtggtttactggaagccgccacgcgaaagcccgatctgattattctcgatctcggcctgccggacggcgacggaatcgatttcattcgcgacctgcgtcagtggagcgcaataccggtgattgtcctttccgcccgcagcgaagaaagcgataagattgccgcgcttgacgccggagctgatgattacctgagcaagccattcggcattggcgagttgcaggcgcgtttgcgtgtcgcgctgcgacggcacgccgccagccctagcgccgatccgatcgtccgtttttccggcgtgacggtcgatctcgccgcacggttgatccaccgtggcgacgaagaaatccatctgacgccgattgagttccgcctgctggcggtattactcaataataccggcaaagtattaacccaacggcagttattaaaccaggtctgggggcctaacgccgtggagcatagccactatttgcgcatctatatgggacatttacgccagaaactggaacaagatcccacccgcccacgccattttattaccgaaaccggaattggctatcgctttatgccgtga

SEQ ID NO: 371702 - DNA, 2199 bp, Salmonella enterica
atgtcagaattaaaaattgccgttagccgtcattgcccggattgtttttctacacaccgtaatattgtaaatgttgatgagagtcgtttcatcgacgtggctgccatcgtgttatccatcgacgacattgaacacggaaaactcgatgaaatcgacgcaacgggttacggtattcccgtgtttgttgcgactcatgacgaagggcgcgtaccgcctgagtatttgccgcgtatctctggtgtattcgaatataatgaatcccgtactgccttctatggtcgccagttggaaaccgcagcaagccactacgaaacgcagttacgtccgccgtttttccgcgcgctggtggattatgtcaaccagggcaacagcgcatttgactgcccgggacatcagggcggcgaattcttccgccgtcatcctgccggtaatcagttcgtggaatactttggcgaaacgctcttccgctccgacctatgcaacgcggacgtggcgatgggcgatctgctgattcacgaaggcgcgccttgcattgcgcagcaacatgcggcgaaagtctttaacgccgataagacctactttgtgctgaacgggacctcctcctctaacaaagtcgtactcaacgcgctgttaacgccgggcgatctggtactgtttgaccgtaacaaccacaaatctaaccaccacggcgcattattgcaggcgggcgcaacgccagtttatctggaaaccgcgcgtaacccgtatggttttatcggcgggatcgacgctcactgcttcgaagaagattacctgcgcgagctgattagcgaagtcgcgccgcagcgtgcccgcgaagcacgtccattccgtctggccgtcatccagttaggcacctacgacggtaccatttataacgcccgtcaggtcgtcgataaaattggtcatctgtgcgactacatcctgtttgactccgcctgggtcggctatgaacaatttattccgatgatggccgattgttcgccgctgctgctggaactgaacgaaaacgatccgggtattctggtgacgcagtccgttcacaaacaacaagccggtttctcccagacctcgcagatccataaaaaagatagccatatcaaagggcaatcgcgctacgttccgcataagcgcatgaacaacgcctttatgatgcacgcctccaccagcccgttctatccgctgttcgctgcgctggacgttaacgccaaaatgcacgaaggcgtcagcggtcgcaatatgtggatggattgcgtggttaacggcatcgatgcccgtaaattgatcctcgaaaactgtcatcacatccgtccgttcgtaccggaactgattgatggtaagccgtggcagtcatacccgacgtcagagatcgccagcgatctgcgcttcttccacttcgttccgggagaacactggcatgcgtttgaaggctatgccgaacatcagtactttgtcgacccttgcaaactgctgctcaccacaccgggcattaatgcagcgagcggcgaatatgaagactttggcgttcctgccacgatcctcgccaacttcctgcgcgagaacggcgttgtgccggaaaaatgcgacctcaactccattctgttcctgctgacgccggcagaagacatggcgaagttacaacagcttgtcgccctgctggctcgtttcgaaaaactgctggaagctgatgcgccgttagcggaagtattaccgtccatctacaaacagcatgaagcgcgttatgccggctataccctgcgtcagctttgccaggagatgcacgatctctatgcgcggcacaacgtgaaacagctgcaaaaagagatgttccgtaaatcgcatttcccgaaagtcagtatgaatccgcaagaggccaactatgcctatctgcgcggcgaggtcgaactggttcgcctgccggaagcggaaggtcgtatcgcggctgaaggcgctctgccttacccgccgggagtgctgtgtgtagttccgggtgaaatctggggcggttctgtcctgcgttacttcagcgccctggaagaagggatcaacctgctgccgggctttgcgcctgaactgcagggcgtttatatcgaagaacacgacggccgtaagcaggtctggtgctacgtcattaaacctcgtgacgcgcagcgctccctgctgaaggaggaaaaattatga

SEQ ID NO: 371703 - DNA, 1320 bp, Salmonella enterica
atgagtaaacctaaatccaataaaatgggtgtcgtgcagctcacaattctgactatggtcaacatgatgggctccgggatcatcatgctaccgaccaaactgtctgaagtcggcacgatatccattatctcctggctggtcaccgccgtcggctcgatggcactggcctgggcgtttgcgaaatgcggtatgtttagccgtaaatccggcggcatgggcggttacgccgaatatgccttcggtaaatccggcaactttatggcgaactatacctacggcgtctcgctgctgatcgccaacgtggctatcgccatctccgctgtcggctatggtaccgaactgttcggcgccgcgctgacgccgctccagatcggtctggcgactatcgccgtattgtgggtttgtaccatcgcaaactttggcggcgcgcgtattaccggacagatcagtagcgttaccgtttggggcgtcatcattccggttgtcggcctgtgcatcattggctggttctggtttagccccagcatgtacgtagcgtcatggaacccgcaccatgttccgttctttagcgcggtcggttcttccatcgccatgacgttatgggcatttcttggactggaatccgcctgcgccaacgcagacgtggtcgagaatccggaaaagaacgtccccatcgcggtactgggcggtacgctgggcgcggcggtcatctatatcgtttcgactaacgtgattgccgggattgtgccgaacatggatctggcgaactccacggcgccgtttggtctggcgtttgcacagatgttcacgcctgcggtaggtaaagtgatcatggcgctgatggtaatgtcctgctgcggctcgctgctgggctggcagttcactatcgcccaggtatttaaatcctccgctgacgaaggctatttcccgaaagtcttctctcgtgtaacgaaagtcgacgcgccggtacaggggatgctgattattgtgattattcagactggcctgtcgctgatgaccattagcccgtcgctgaatagtcagtttaacgtcctggttaacctggcggtggtgacgaacattattccgtatattctgtcgatggccgcgctggttatcattcagaaaatggcgaatgtgccgtcatcaaaagcgaaagtcgctaacttcgtggccttcgttggcgccatgtatagcttctacgcgctctattcctccggtgaagaagccatgctgtacggctcaattgtgaccttcctcggctggacgttatacggcctggtctcaccgcgttttgaattgaaaaataaacacggctga

SEQ ID NO: 371704 - DNA, 486 bp, Salmonella enterica
atgagtaatccagaacgggaagtcactgatatagcagaaatactggctattctcagtaaacacgaagtgtgtcggatagggtttaacgacaatctctgtccgtatgttgtccccgtaaattttggctacgagtatcagaacggacgctggatattttattttcacggcgcacgcaccgggaaaaagatgcgtctgttacgtaagaacccggcagtatgcattgaaatggacggcgaccatgcattactacgtgccgatgacccctgtgattatagctacgcctacaccagcgttttcgccaccggactggcatcgatattgcaaacacgcgaggagatgcgctacggcctggacgtcattatgcgtcagaccgatccgggaaaaaccttcagttatcgggaagatatgatgaaagcggtttgcgtggtgcgtattgaatgcgacgccctcacctgccgccgacatctggcgactcagagcgaataa

SEQ ID NO: 371705 - DNA, 1641 bp, Salmonella enterica
atggcaatccacaaccgcgcaggacaacccgcgcaacagagtgatttgattaacgtcgcccaactgacggcgcagtattatgtactgaaaccggaggcagggaatgcagaacatgccgtgaaatttggcacttccggccatcgcggtagcgcaggtcgtcacagtttcaacgaaccgcatattctggcgatcgcccagacgattgctgaagagcgggcgaaaaatggcattaccggcccctgctatgtggggaaagacacccatgcgctctcggaaccggccttcatttccgtgctggaagtgctggcggcaaacggcgtagacgttatcgtgcaggaaaataatggctttacgccaacgcctgccgtgtcaaatgctatcctggtccataacaaaaaaggcggcccgctggctgatggtattgtcattacgccgtcgcacaacccgccggaagatggcggtattaaatataatccgcccaatggcggcccggcggataccaacgtcactaaagtggtagaagatcgtgccaatgcgctgctggcgggcggcctgcaaggcgttaagcgcatctctctggatgcggcaatggcctcgggccacgttaaagcggtagatctggtacagccgtttgtcgaagggctggcggatatcgttgatatagcggcgattcagaaagccggtctgacgctgggtgtcgatccgctgggcggctccggtattgaatactggaaacgtatcgctgagcattacaaacttaacctgacgttagttaacgatcaggttgatcaaaccttccgctttatgcaccttgataaagatggcgcgatccgtatggattgctcctccgaatgtgcgatggcgggtttgctggcgctgcgtgacaagtttgacctggccttcgccaacgacccggactacgaccgtcatggcatcgtgacgcctgcagggctgatgaacccgaaccattatctggcggtcgccattaactatctgttccagcatcgtccgctgtggggcaaagacgtggctgtcggtaaaacgctggtctcttccgcgatgattgaccgcgtggtgaatgatttgggacgcaagctggtagaagtgccggttggcttcaaatggtttgttgacggtttgttcgacggcagctttggtttcggcggggaagagagcgcgggcgcttcgttcctgcgtttcgacggtacgccgtggtctaccgataaagacgggatcatcatgtgcctgctggcggcggaaatcaccgccgttaccgggaaaaacccgcaagagcattacaatgaactggcagcgcgttttggcgcgccgagctataaccgtctgcaggcggcagcgacctcggcccagaaagcggcattgtctaaactgtctccggaaatggtgagcgccagcacgctggcaggcgacccgattaccgcgcgtcttaccgcagcgccgggtaatggcgcatcgattggcggcctgaaggtaatgaccgacaacggctggttcgccgcgcgtccatccggtacggaagacgcttacaagatctattgcgaaagcttcctgggggaagaacatcgcaagcagattgagaaagaagccgttgaaatcgttagcgaagtattgaaaaacgcctga

SEQ ID NO: 371706 - DNA, 543 bp, Salmonella enterica
atgaaaacgattgaagttgatgatgaactctatagctatattgccagccacaccaagcatatcggcgagagcgcatccgacattttacggcgtatgttgaagttttccgccacgacacagccaacggcttcagcggtgaaggggacgcctgcggcgcaacccgttgccgaagcgaaaccggttaacccggtaaaagacaaagttcgcgcgatgcgtgagctgttgttgtctgacgaatatgccgagcagaaaaaagcggtcaaccgctttatgctgattctgactacactctattcactggatcaccacgcgtttgcggaggcgacggagtcgttgcatggccgcacgcgcgtctattttgcggcggatgaacaaacgctgctgaaaaatgggaatcaaactaaacctaagcacgttcccggcacgccgtactgggtgatcaccaacaccaacaccggccgtaaatgcagcatgatcgaacacatcatgcagtcaatgcaattcccggcggaattgattgaaaaggtttgcggaacaatttaa

SEQ ID NO: 371707 - DNA, 771 bp, Salmonella enterica
atgaaattaaacatccgagcgcaatctgcacaaaacctgcacaataattcccccatcgttctcgttcatggtctgtttggcagcctggacaacctcggcgtactggcgcgcgatctggtgaccgatcacgacattattcaggtcgatatgcgcaatcatggtttatcgccgcgcgatccggtcatggattatccggcaatggcccaggatcttctggatacgcttgacgcgcagcagattgaaaaagcgacgtttattggtcattccatgggcggaaaagcggtaatggcgctgacggcgctggcgcccgatcgcatcgatcgtctggtcgcgattgatatcgcccccgtggattatcacgttcgccgccacgatcgcattttcgcggccattaatgccgtcagcgaatccgacgcgacatcccgccaacaggcggcagggattatgcgccaacacctcaacgaagaaggcgtgatccagtttctgttaaaatcctgggctgaaggcgaatggcgttttaatgttccggtattatgggagcagtatccgcatatcgtcggctgggaaaccattccgccctgggaacatccggcgctgtttattccaggcggtaactcgccgtacgtgaccgaagcgtaccgcgacgcgctgctggcgcaattccctttggcgcgcgcgcatgtgatcgccggcgcgggccactgggtacatgccgaaaaaccagaggcggttctgcgcgccatccgccgttatctgcacgataaacgctaa

SEQ ID NO: 371708 - DNA, 294 bp, Salmonella enterica
atggccaaagaacaaacggaccgtacgacattagatctgttcgcgcacgagcgtcgcccgggacgacctaaaacgaatccgctttcgcgcgatgaacagttacgcatcaacaagcgcaaccagttaaaacgcgacaaagttcgtggcctcaagcgtgtcgaattaaaactcaacgcacaagcggttgacgcgctgaatgagctggccgaagcgcgcaacattagccgcagcgagctcattgaagaaatattaatgaagcagcttatggcgctgcgcggccagggtttagtctga

SEQ ID NO: 371709 - DNA, 531 bp, Salmonella enterica
atggcaatcactggcatctttttcggcagcgacaccggtaataccgaaaatatcgcaaaaatgattcaaaaacagcttggtaaagacgttgccgatgtgcatgacattgcaaaaagcagtaaagaagacctggaagggtatgacattctgctgctgggcatcccaacctggtactatggcgaagcgcaatgtgactgggatgacttcttcccgactctcgaagagattgactttaacggtaagctggtggcgctgtttggctgtggcgatcaggaagactacgcggaatacttctgtgatgcgctgggcacgattcgcgacattattgagccgcgcggcgccacgattgtgggtcactggccaactgcaggctatcattttgaagcctctaaaggtctggctgacgacgatcattttgtcggtctggcgattgacgaagaccgtcagcctgaactgaccgccgagcgtgttgaaaaatgggttaagcaagtttcggctgaattgcacctcgacgacatcctcaacgcctaa

SEQ ID NO: 371710 - DNA, 453 bp, Salmonella enterica
atgactgacaacaataccgcattaaagaaggctggcctgaaagtaacgcttcctcgtttaaaaattctggaagttcttcaggaaccagataaccatcacgtcagtgcggaagatttatacaaacgcctgatcgacatgggtgaagaaatcggtctggcaaccgtataccgtgtgctgaaccagtttgacgatgccggtatcgtgacccgccataattttgaaggcggtaaatccgtttttgaactgacgcaacagcatcatcacgaccatcttatctgccttgactgcggaaaagtgattgaatttagtgatgactctattgaagcgcgccagcgtgaaattgcggcgaaacacggtattcgtttaactaatcacagcctctatctttacggccactgcgctgaaggcgactgccgcgaagacgagcacgcgcacgatgacgtgactaaataa

SEQ ID NO: 371711 - DNA, 927 bp, Salmonella enterica
atggagcttcgccagttacgctatttcgtgcgtattattgaaaccggcagtatgggcagcgccgcacaggatcttgatattggcgtttcagcattaagtcaacagatgtcccgtctggaaaacgagcttgccatccgtctgctgcagcgcacttcgcgcggcgtaacgccaaccaacgccgggctggccttttattcgcaggcgcaactcgccctgcgtcatgccgacgacgcaattctcgccgccagagaagcgcgcctttccggtcatgtgagcgtaggaatggcccccagtaccgcctccatactgggtataccgtttatccatgccatgcaggaaaactatgccgatgttcgactgcatgtggtggaaagcttgtccggtaatctggaaagaatgatcaatacccgccagattgatttagccgttgtctttcaaaaagataaaatcctgcgctggagcgccagaccgatccttgaagaacagctttttctgattggctcccatgccctgctggcggcgcttcctgataacccgatcacacctgaacaactggcaggcattccgctcattatgccaagccagggacatgggctgcgcggcaggctggacgctgtctgccaggaacatgcgcttaacgttgagatcgtcgcggaaattgacggtctggcgttgttgatgcgcgccgtgcgcgacggtcttggcgccacgttgcagcccggcgcggcgatttctcatctggataacgacgcgctacgcgtgatcggcgtccataatccggtactcagccgccccaattttttagtcagcctgtcggatgatgaactgacgcccgccggccttgccgccagagtagtccttaccaaagttatgcgtcagttagtcgacgccggtgaatggccaggcgcaaccctttacgcttactaa

SEQ ID NO: 371712 - DNA, 1404 bp, Salmonella enterica
atggttgatgtactggtgataggtggaggcaatgccgcattatgcgccgccctgaccgcacgggaagcgggcgcatcggttctgctgctggaggctgccccgcgggaatggcgcggcggaaattctcagcacacacgaaacctgcgctgtatgcatgatgcgccgcaggatgtgctggtagaaagctatcctgaagaggaattctggcaggatctgtggcgagtcaccgacggcaacaccaacgaggcgctggcgcggctggtcattcgcacctcttcgcaatgccgcgactggatgcgcaaacatggcgttaactttcaaccgccgctatcaggtgcgctccacgttgcgcgcaccaatgcgttttttatgggcggcgggaaagcgctcgtcaatgcctattaccgtagcgccgaacggctgggcgtacaggttcgctataacacgccggttcacgcgcttgaacttcatgacggcgaattcgtggcggcgctggcgggtagcgaacggattaccgccaaagcctgcgtattagcggctggcggtttcgaatcaaaccgtgaatggctgcgggaggcctggggagaaaacgcccgcggcgaatggcccgcggataatttcctgattcgcggcacgcgttttaaccagggcgtattactcaaatttatgatggatgccggcgcggatatcattggcgatccgtcccagtcgcactgcgtagcgattgatgccagggcgccgctgtacgacggcggtatttgtactcgcgtggattgcgtatcgctgggtattgtcgtgaatcgcgacgccgaacgtttttatgatgaaggcgaagatttctggccgaagcgttacgccatttgggggcggctggtggctcaacagccaggacaaattggctattcgattattgacagcaaagccatcggccactttatgccgccggtttttcctggcgcgcaggccaatacgctggctgagctggcctgccagttggggctggacgcggaaaaatttacccataccgtcacgcagtataaccaggcctgccagcccggtcattttgatcataccttgcttgatgactgcgccactaaaaacctgacgccggcgaaaacccactgggcgcgcccgcttgatgcgccgccctactacggttatgcgctgcgacccggcatcacgtttacctacctgggtctgaaagtcaatgaacgtgccgcggtgcattttgccggtcatccaagccgcaacctgtttgttgccggcgagatgatggcaggaaatgtactgggcaaggggtataccgcaggcgtaggcatgtctatcggcacaacctttggccgcattgcgggaatagaagccgcccgcgcggcgcacaaggaggcgcagcatgaaacagcttga

SEQ ID NO: 371713 - DNA, 1140 bp, Salmonella enterica
atgaaacagcttgaaaaattaatcattgaggccaccgtgcttaccgaaccggaagccgaggtcgaacgcgtcatgcaagtgtgtaacgcgtgtcgctactgcgaaggtttttgcgcggtatttccggcgatgacccagcggctcgaattcggtaaagccgatattcattatctggcgaatttatgtcataactgcggcgcctgcctgcacgcatgccagtatgcgccgccccatgaatttgccattaacgtgccgaaagcgatggcgcaagcccgcctggagacgtatcaacagtatgcccagcccgccgcttttggcgcgttataccgccgggcggggatcaccgtcgcgctggcgctgatagtcggtctgacgctctttttattactggcgatggcgctgaaagggtcgctgattcatccgccgctggccggtgacttctatcaaatttttccgcatagcctgctggcatggatgtttggctcagtttttgtgctggcaatcggtttgcttatggcgggcgtaattcgcttctggcgtgagatctcgccgggcgtaccgcgttcggcagagattgcggaagcgtcgcacaatgcgttaacgctgaaatatctcgacggcggtcacggcaaaggctgtaacgaagcggacgatgcgttcacgctgctgcgccgtcgctttcatcactttaccttttacggttttatgctctgttttgccgccacggtcgtggcgacgggctatcactacgtcgccggttgggaagcgccctacccgttttttagcctgccggtcatgctcggcacgctgggcggtatcggtctgcttatcggcccggccgggctactgtggctcaatctgcggcggtcgccgttacatggcgatgcgcgccagaaacccatggatcgcggctttattctgctgctgttcttaaccagtctgaccgggctggcgctgctggcaggcagagacaccagcggaatgggcatactgctggcgctccatttaggcgtggtgatggcgctctttctcacccttccctacggaaaattcgcccacggatttttccgctgcgcggccttactcaaatgggcagttgagaagcgacgcggaaaacatgcgggggatacaggcaactga

SEQ ID NO: 371714 - DNA, 1305 bp, Salmonella enterica
atggcacaacacacacctgcaacatcgcgcgccggcacgttcggcgcaatactgcgcgtgacaagcggcaattttcttgaacagtttgattttttcttgttcggattttacgccacctatatcgccagaacgttttttccggcggaaagcgaatttgcctcattaatgttgacctttgccgtctttggctccggttttttaatgcgccccgtcggcgcgattgtgcttggcgcctatattgacagaatcggacgccgtaaagggctgatggtgacactggcgattatgggctgcggtacgttgctcatcgccctcgtccccggctaccaaacgatcggcctggcagcgcctgcgttggtgctgttgggccggttattacaaggattttctgcgggcgttgagttaggcggcgtctcggtctatctgtccgaaatcgcaacgccaggcaataaagggttttataccagctggcaatccgccagtcagcaggtcgcgatcgttgttgccgcgttgattggttatagcctgaatatcacgctgggacacgacgcgatatcggagtggggctggcgaattccgttctttatcggctgtatgatcattccgctgatttttgttttacgtcgttcattacaagaaacagaggcgtttttacaacgcaagcatcgccccgacaccagggaaatttttgcaactatcgccaaaaactggcgcattattacggccggaacgctgctggtggcgatgaccaccacaacgttttattttatcaccgtttatacgccgacctatggcagaaccgtgcttaatctcagcgcgcgggacagtttgatcgtcaccatgttggtgggggtgtccaattttatctggttacccattggcggcgcgatttccgaccggattggccgtcgcgccgtattaatgggcattacgttgctggcgctgatcaccacctggcccgtcatgcaatggctgaccgccgcgcccgactttacccgcatgacgctggtactgctgtggttctctttcttttttggcatgtataacggcgcaatggtcgcggcgttaaccgaagtgatgccagtctatgtgcgtaccgttggtttctcgctggcctttagcctggcgacggcgatttttggcggcctgacgccggccatctctaccgcgctggtaaagttaaccggcgacaaaagctcgcccggctggtggctgatgtgcgcggcattatgtggacttgccgcgacggcgatgctgtttgtacgtctgagtcgcggctatatcgcggcagaaaataaagcctga

SEQ ID NO: 371715 - DNA, 333 bp, Salmonella enterica
atgaaaaaaattttactcatcgccagcatgaccgccggtttgacggcctgcgcgtcatcacccgcgccggaagaagatagccggctgaaagaggcgtacagcgcctgtatcaataccgcacagggctcgcctgagaagatagaggcctgccaaagcgtactgaatgtccttaaaaaagaccgcaaacatcagcaatttgctaacgaagaaagcgtgcgggtactggactatcagcagtgcattcaggcgacgcgcacgggtaacgatcaggcggtcaaggctgactgcgacaaggtctggcaggaaattcgcagtcataataacgtgcaataa

SEQ ID NO: 371716 - DNA, 1407 bp, Salmonella enterica
atgcgtacgtttagtggcaaacgtagtacgctggctctggctatcgccggtatcacagcaatgtcggggtggatcgttgttccgcaggcgcaagcctccggctttttcgacgactccacgttaacgggcggcatctattattggcagcgtgaacgcgatcgcaaagatgtgaccgacggcgacaaatataaaactaacctttctcatgcgacctggaacgctaacctggattttcagtctggttacgctgcggatatgttcggtctggatatcgcggcgtttaccgcgattgaaatggcagaaaacggcgacagcggtcatccaaacgaaattgccttctcgaaaaagaataaaggctacgacgaagactattccggcgataagagcggtatcagtctttataaagccgccgcgaaatttaaatatggcccggtctgggcgcgcgccggttatattcagcctaccggtcagacgctgttagcgccgcactggagttttatgccgggtacttatcagggtgcggaagccggcgccagttttgactatggcgatgcgggcgcgttaagtttttcctacatgtggactaacgaatataaagcgccgtggcataccgaaatggataagttttatcaggcggataaaaaaactaatgtggactacctccactccatcggcgcgaagtacgacttcaaaaatgatctggtgctggaagcggcgtttggtcagtccgaaggctatgtcgatcaatatttcgcaaaggccagctataaatttgatttaggcggcaatccgttcaccaccagttaccagttctacggcgcgcgcgacaaagtagacgatcgcagcgtgaatgatatttacgacggtacggcctggctgcaggcgttgaccttcggctacaaagtcgcggaagtggttgacctgcgtctggaaggcacctgggtgaaagcggacggtcagcagggctattttctgcaacgtatgacgccaacctacgcctcttcaaacggtcgtctggatatctggtgggataaccgctccgactttaacgctaacggtgaaaaggcggttttcttcggcgcgatgtatgacctgaaaaactggaatctgccgggctgggctgtgggcgcgtcttacgtttacgcttgggatgctaaaccggcaacctggcaaagtaacccggatgcttactacgacaaaaaccgcactatcgaagagtcctcatacagtctggatgcggtctataccctgcaggaggggcgtgccaaaggcaccatgttcaaactgcacttcaccgaatatgacaaccactccaatattccaagctggggcggtggttacggcaacatcttccaggatgaacgtgacgtgaaatttatcgttattgcgccattcactattttctga

SEQ ID NO: 371717 - DNA, 1221 bp, Salmonella enterica
atggccatgagtgaaccaacccagccgttagccggcgcgcccgcagcggccgctaaagcacgtacttcgtttggtattttgggcgcgatcagtctttcccatctgctgaacgatatgatccagtcgctaatcttagccatttatcccctgttgcaggcggagttttcgctgactttcgtccagataggtttgatcaccctgacgttccagctcgcctcatcgctactgcaaccggtcgtcggctactggacggataagtatcccatgccgtggtcgctgcctgtcggcatgtgttttaccctgagcgggctggtactgctggcaatggcgggaagttttggcggcgtattgctcgctgcggcgctggtgggtaccggctcgtccgtttttcacccggaatcatcccgcgtggcgcgcatggcctccggaggacgtcatggtctggcgcagtctatcttccaggtcggcggtaacttcggcagttcgttggggccgctgctggccgccgtgattatcgcgccctatggcaaagggaatgtcgcctggtttgtgctggccgcgctgctggcgatcgtggtgctggcgcagatcagccgctggtatgcagcccagcaccggatagcgaaaggcaagccaaaagcgataatcgctaacccgctgccgcgcaataaagtcgtgctggcggtcagcgtattattgctactcattttctcgaaatatttctatatggcgagcatcagtagctattacaccttttatctgatgcaaaaattcggattatcaatacaaaacgcgcagctccatctgtttgccttcctgtttgcggtggctgccgggacggttatcggcgggccggtgggcgacaaaatcggcaggaaatatgtgatttggggctctattctcggtgtcgcgccgtttacccttgttttaccctacgccacgctgtactggacggggattttaacggtgattatcggctttattctagcgtcggcgttttccgccattctggtgtatgcccaggagttgctgccaggacgcatcggtatggtttccggcctgtttttcgggtttgccttcgggatgggaggcctgggcgcagcggtgctggggctgattgccgaccataccagtatctatttagtttataaaatctgtgctttcctgccgcttctggggatactgaccatattcttacctgataatcgacataaatcgtga

SEQ ID NO: 371718 - DNA, 126 bp, Salmonella enterica
atggttgtgttttataaaaagatacgatctgaaggcaaaaagagcacggaacgtaaaagtgataagtatgggatggacaaagcaagatggcatcaggatgtacaggcggttaaagcgtacctttaa

SEQ ID NO: 371719 - DNA, 1677 bp, Salmonella enterica
atgcatcacgctaccccgcttatcaccaccattgtcggcggccttgtgctcgcttttattctcggcatgattgccaacaaattgcgtatttctccactggtgggatatctgttagcgggcgttctggcgggaccttttaccccgggttttgttgcggataccaaactggcgccggagctggcggagctcggcgtgattctattgatgttcggcgtcgggctgcatttttcgctgaaggatttgatggcggtaaagtctatcgccattcccggcgctgtcgctcagatagcggtggcgacgctgctgggtatggcgctttccgccgtgctgggatggtcattaatgaccggcatcgtttttgggctctgtctgtctaccgccagtaccgtcgtcctgctgcgcgcgcttgaggagcggcaactccttgatagccagcgcgggcaaatcgccatcggctggctgattgtcgaagatctggtgatggtactgacgctggtcttgctgcccgccgttgccggcatggtggaaaaaggcgatgtcggcatagcctcgctggcagtcgatatggggataaccattggtaaagtggtggcgtttatcgccatcatgatgctggtcggacgccgcctggtgccgtggattatggctcgcagcgccgccaccggctcgcgcgaattgtttaccctttccgtactggcgctggcgttaggcattgcgtttggcgcggtagaactgtttgacgtctcttttgcgctgggcgcgttcttcgctggaatggtgcttaatgagtcggagctgagtcaccgggcggcgcacgatacgttgccgctgcgcgacgcctttgccgtcctgttttttgtttccgtcggcatgttgttcgatccgttagtcttgatccaacagccgctggcggtgttggcgacgcttgccattatcgtctttggtaaatcgatcgctgcgtttttcctggtgcgtatgttcggccactcgccgcgaaccgcgctgaccattgccgccagcctggcgcaaatcggcgagttcgcctttattctcgccggactcggcatggcgctcaacctgctgccgcaagcgggacagaacctggtgctggcaggcgctattttgtcgattatgcttaatcccgtactgtttaccctgctggagaagtatctggcgaaaaccgaaacgctggaagagcaaactctggaagaggctatcgaagaagagaagcaaattccggtggatatctgtaatcatgccctgctggtgggttttggccgcgtaggcagtctgctgggagaaaaattactggcggcggggattccgctggtggttatcgaaacgtcccgtacccgcgtggatgaactgcgcgaacgcgggattcgcgccgtgctgggcaacgccgctaacgaagaaattatgaatctggcgcatctggactgcgcccgctggctattattgaccatccccaacgggtacgaagccggcgagattgtcgcctcagcgcgggaaaaaagtcctgatatcgagataatcgcccgcgcgcactatgatgatgaagtgaaatatattaccgagcggggagccaatcaggtagtgatgggcgagcgagaaattgcccgggcgatgctggaactgcttgaaacgccgcccgcaggtgaagtcgtcgccagttaa

SEQ ID NO: 371720 - DNA, 1350 bp, Salmonella enterica
atgtgctaccatgcagcgctccgttattcatccgtaagcacaatcatgaaatttcccggtaaacgtaaatccaaacactattttcccgtcaatgcgcgtgacccgttgttgcaacaaattcagccagaacaggaaaccaacgcctcctgggtcgtcggtatcgaccagacgttggtggatattgaggcgaaagtggatgacgattttattacacgctatggattaagcgccgggcattctctggtgatagaagacgaggtggcggagaagctgtatcaggaactgacgcgggaaaatctgatcacccatcagtttgctggcggcactataggcaatacgatgcacaattactcggtactggcggatgaccgttcggtgttactgggcgtgatgtgcagcaacattgagattggcagctacgcttatcgctacctgtgtaatacttccagccgtaccgacctgaattatctgcaagcggtagatggcccgattggccgctgtttcacgctgattggcgaatccggcgagcgtaccttcgctatcagccccggccatatgaatcagctacgggcggaaagtattccggaagcggtgatcgctggcgcctccgcgctggtgttgacctcatatctggtgcgctgtaagcctggcgaaccgatgcctgacgcgacgatgaaagcgatcgaatacgcgaaaaagcataacgtgccggttgtcatgacgctgggcaccaaatttgtgatcgccgataatccgcagtggtggcaggcgtttctcaaagagaatgtctcgattctggcaatgaatgaagaagaagcggaagcgctgaccggcgaaaacgacccgctgctggcggcggataaggcgctggactgggtcgacctggtgttatgcaccgccgggccgatagggttatatatggcgggcttcaccgaagaggaagcaaaacgtaaaacccagcatccgctgctaccgggagctattgctgaatttaaccagtatgaatttagccgggcaatgcgccataaagattgtattaatccgctgcgcgtttattcgcatattgcgccgtatatgggcgggccggaaaaaatcatgaacaccaacggcgcgggcgatggcgcgctggcggcgctgctgcacgatattacggcgaacagttaccatcgtagcaacgtaccgaactccagtaagcacaaatttacctggctgacttattcgtcgctggcgcaggtgtgtaaatatgctaaccgtgtcagttatcaggtactgaaccagcattctccgcgtctgacacgcgggctgccggaacgtgaggacagcctggaagagtcgtactgggatcgctaa

SEQ ID NO: 371721 - DNA, 972 bp, Salmonella enterica
atgaagccggaaaataaaattcccgtactcacccgactgtcagacgaaatgaaagccgtcgtaaacttccagcaaccaggccttcccccctggcctgccgatggcgatattgagacccagcgtcagtattatcttcttgagcgccgtttctggaatgccgacgcgccgtccatgaccacccgcacctgcgccgtccctacgccttatggcgatgtaacaacccggctctactcgccgcagccgaccagtcaggccaccttatactatctgcacggcggcggatttatcctcggtaatctggatacgcatgaccggataatgcgtctgctggcgcgttataccggctgcaccgtgatcggtattgattattcgctgtcgccgcaagcgcgttatccgcaggccattgaagaaaccgtcgcggtatgcagctacttctctcaacatgccgatgaatactcgctcaacgtggagaaaatcggtttcgccggggattccgcaggcgccatgctggcgcttgccagcgcgctctggctacgtgataagcacattcgctgcggtaacgttatcgcgattctgttgtggtatgggctgtatgggttgcaggattcggtaagccgccgtctgttcggcggcgcgtgggacggcctgacgcgtgaagatctggacatgtacgaaaaggcctatctgcgtaacgatgaagatcgggaatcgccctggtattgtctgtttaataacgatctcacgcgcgatgtgccgccctgctttattgccagcgcggagtttgatccgctcattgatgacagccgcttgctgcacaagacattacaggcgcaccagcagccctgcgaatacaaaatgtatcccggcacactgcacgccttcctgcactattcgcgaatgatgacaatcgccgacgatgccttgcaggacggcgcacgcttctttatggcgaggatgaagacaccgcgttaa

SEQ ID NO: 371722 - DNA, 963 bp, Salmonella enterica
atgcgtcagacgaaaaccggtatcctgctggctaaccttggcacgccagatgccccaactcccgaagcggtaaagcgctacctgaaacaatttttaagcgacagacgcgtggtggatactcctcgtctgctgtggtggccgctgctgcgtggcgttattttaccgctgcgttcgccgcgcgtcgcgaaactctatcaatctatctggatggatggcggttcgccgctcatggtatatagccgcgaacagcaacaggcgctggccgcgcggttgccagacacgcccgtcgcgctggggatgagctacggttcgccctcgctggaaagcgctgtcgatgaactgttagcaagcgacgttgaccatatcgtcgtgctgccgttgtacccgcaatactcttgctcaacggtgggcgcagtctgggacgaactggggcggatactggcgcgtaaacgtcgtattcccggtatctcatttattcgcgattacgcagatgacagcgcttatatcgatgcgctggcgaaaagcgcgcgtgagtcgttcgccagacacggcgagccggatgtgcttctgctctcctatcacggcattccacaacgttatgcggatgaaggcgatgactacccgcagcgctgtcgcgataccacgcgcgaactggtttccgcattgggactgccgccggaaaaggtaatgatgacgttccagtcgcgctttggccgtgaaccgtggctgacgccgtacaccgatgaaacgctaaaaatgttgggtgaaaaggggactggccatattcaggttatgtgtccgggatttgccgcggattgtctggagacgctggaagagatagcggaacagaaccgcgagattttccttgaagcgggcggtaaaaaatatgcgtacattccggcgctgaacgcgacgccggaacatattgatatgatgctgaaactcacggcgccgtaccgttaa

SEQ ID NO: 371723 - DNA, 645 bp, Salmonella enterica
atgcgtattattctgcttggcgctccgggcgcgggtaaaggaactcaggctcagttcatcatggagaaatatggtattccgcaaatctccactggcgatatgctgcgcgccgcagtgaaatcaggctccgagttgggcaaacaggcgaaagatatcatggacgccggtaaactggtgaccgatgaactggtgattgcgctggttaaagagcgtatcgcccaggaagactgccgtaacggttttctgctggatggtttcccgcgcacgatcccgcaggctgacgcgatgaaagaagcgggtattgtcgtggattacgtgctggaattcgacgtaccggacgaactgatcgttgaccgcattgtgggccgtcgcgtacacgccgcctctggccgcgtttaccacgtaaagtttaatccgccgaaagtggaaggcaaagatgacgtcaccggcgaagatctgacgacccgtaaagacgatcaggaagagaccgttcgcaaacgtctggtggaatatcatcagatgaccgcgccgctgattggctactaccagaaagaagcggaagcgggcaacaccaaatacgctaaagttgacggtacgcaggccgttgccgacgtgcgcgcagcgctggaaaaaatcctcggttaa

SEQ ID NO: 371724 - DNA, 1875 bp, Salmonella enterica
atgaaaggacaagaaacgcgtggttttcagtcagaagttaaacagcttctgcacctgatgatccattctctttattccaataaagaaatcttcctgcgtgaactcatctctaacgcctcagatgcggcggacaagctgcgtttccgcgctctgtcaaacccggacctgtatgaaggagatggcgagctgcgtgtgcgcgtctctttcgataaagataagcgtacgttgaccattgccgataacggcgtggggatgaatcgtgatgaggtgattgaccacttaggcaccattgccaagtccggcaccaaatctttcctcgaatcaatggggtccgatcaggcgaaagatagccagctcatcggtcagtttggcgtaggcttctactccgcgtttattgtggccgataaagtgaccgtacgtacccgtgcagcaggcgacaagccggaaaatggcgtgttctgggaatcggcaggcgaaggcgaatacaccgttgccgatatcaccaaaaatgaccgtggtacggaaatcaccttacacctgcgtgaaggcgaagatgaattcctcgatgactggcgcgtacgctcaattatcagtaaatattccgatcacatcgcattgccggtagagattgaaaaacgggaagaaaaagacggcgaaaccgtgatttcctgggagaaaatcaacaaggcccaggcgttgtggacccgtaacaagtcggaaattaaagacgacgagtacaacgagttttacaagcacatcgcgcatgatttcaccgatccgctgacctggagccacaaccgcgtggaaggtaagcaggagtacaccagcctgctgtatatcccgtcgcaggcgccgtgggatctgtggaaccgcgatcacaaacatggtttgaagctgtacgtacagcgcgtgttcattatggacgatgccgagcagttcatgccgaactatctgcgtttcgtgcgcggcctgattgattctaatgacctgccgttgaacgtctcccgtgaaatcctgcaggacagcacggtaacgcgtaatctgcgcagcgccctaaccaaacgcgttctgcaaatgctggaaaaactggcgaaagacgacgcggaaaaataccaaaccttctggaaacagtttggtctggtgctgaaagaaggcccggcggaagatcacgccaaccaggaagcgatcgctaaactgttgcgctttgcctccacccataccgactcttccgcccagaccgtgtcgctggaagattacgtctcccggatgaaagaagggcaggaaaaaatctactacatcaccgcagacagctatgcggcggcgaaaaacagcccgcacctggaactgctgcgtaagaaaggcatcgaagtgctgctgctctccgatcgcatcgacgagtggatgatgaactacctgaccgagtttgacggtaaagcattccagtcggtcgctaaagccgatgagtccatcgaaaaactggcggatgaagtcgacgaaaacgcgaaagaagcggaaaaggcgcttgagccgttcgtggagcgtgtcaaaaccctgctgggcgatcgcgtgaaagaggtgcgtctgacgcatcgtttaaccgacacgccggcgattgtcaccaccgatgcggatgaaatgagcacccagatggcgaaactgttcgccgcggccggtcagtccgtgccggaagtgaaatacatctttgagctcaacccggatcatgtgctggttaaacgcactgccgataccgaggatgaagcgcagtttaaagagtgggtcgagctgctgctggatcaggcgctgttcgctgaacgcggtacgctggaagatccgaaccagtttatccgccgtatgaaccagttgctggtgtcctga

SEQ ID NO: 371725 - DNA, 606 bp, Salmonella enterica
atgcaaaccagtccgctgttaactcagcttatggaagcgttgcgctgccttccgggcgtcggccctaagtcggcgcagcggatggcgtttaccctgttgcagcgcgatcgcagcggcggaatgcgcctggcgcaggcgctgacccgggcgatgtcggaaatcggccactgcgccgactgccgcacctttaccgagcaggatgtctgtaatatctgttcgaacccgcggcgtcaggaaaacggccagatttgcgtggtggagagtcctgcggatatctacgccattgagcagaccgggcaattttccgggcggtatttcgtgctgatgggccacctgtcgccgctggacggcatcgggccggatgatatcggtctcgatcgtctggaacagcggctggcgtcagaaaaaatcagcgagctgatcctcgcgaccaacccgacggttgaaggagaggctaccgcaaactatattgccgagctgtgcgcggaggccggcgtcgaagccagtcgtatcgcccacggcgtgccggttggcggcgaactggagatggtcgacggtacgacgctgtcccactcgctggcgggacgccataagattattttctga

SEQ ID NO: 371726 - DNA, 330 bp, Salmonella enterica
atgtttggaaaaggcggtctgggcaatctgatgaagcaggcccagcagatgcaggaaaaaatgcagaaaatgcaggaagagattgcgcagctggaagtgaccggcgaatccggcgcgggtctggtgaaggttaccatcaacggcgcgcataactgccgccgcgtggaaattgacccaagcctgctggaagatgacaaagagatgctggaagatctggtcgctgcggccttcaacgatgcggcgcgccgcattgaagagactcaaaaagagaagatggcttccgtctcttccggtatgcaattgccgccaggctttaagatgccattctga

SEQ ID NO: 371727 - DNA, 1929 bp, Salmonella enterica
atgagttatcaggtcttagccagaaaatggcgcccacaaacctttgctgacgtcgtcggccaggaacatgtgctgaccgcactggcgaacggcttgtcgttagggcgcattcatcacgcatatcttttttccggcacgcgcggcgtcggtaaaacctctatcgcccgactgctggcgaaggggctgaactgcgaaaccggcattaccgcgacgccgtgcggcgtttgcgataactgtcgggaaattgagcaagggcgttttgtcgatctcattgagattgacgccgcatcgcgtaccaaagtcgaagacacccgcgacctgctggataatgtccagtacgcgcctgcgcgcggtcgctttaaagtctatctgatcgatgaagtccacatgctgtcgcgccacagctttaatgcgctacttaaaacgcttgaagagccgccagcgcatgtgaaatttttactggcgaccaccgatccgcagaagctgccggtgaccattttgtcgcgctgcctacagtttcatctcaaagcgctggatgttgaacagattcgccatcagcttgagcatattctcaatgaggaacatatcgctcacgaaccccgcgcgttgcagttgttatcgcgtgcggctgacggcagcctgcgcgatgcattaagtctgactgaccaggcgatcgccagcggcgacgggcaggtttcgacgcaggcggtaagcgccatgctcggtacgctggacgacgaccaggctttgtcattagtcgaggcggtggttgacgctaacggcgaacgcgtcatgtcgcttatcaacgaggcggcggcgcgcggtattgaatgggaagcgctgctggtcgaaatgcttagcctgctgcaccgtattgcgatggtgcaactttcgcctgccgcgttaggcagcgatatggcggctatcgagcaacggatgcgcgaacttgcccggacggtgcctcccggcgatcttcagctctattatcagacgttgttgattggtcgcaaagaattgccctgggcgccggaccggcggatgggcgttgaaatgacgttactgcgtgcactggcgtttcacccgcgtatgcccttgccggagcctgaaacgccgcggcagtcttttgcgcccgtggccccaacggcggtaatgacgccgccgcaggtgcagcagtcgtcggcgcccgcgccgcagacatcgccagcgccgctgccggcgtctaccagtcaggtgctggcggcgcgcaatcagctacagcgcgcgcagggagtaaccaaaacaaaaaagagtgaaccggcagccgcatcccgcgcgcggccggtgaataactctgcgctggagcggctggcctcggtttcggagcgcgtacaggcgcgcccggcgccgtctgcgctggaaacggcgccagtaaagaaagaggcttatcgctggaaggccaccacgccggtagtacaaaccaaagaagtggtggctacgccaaaagcgcttaagaaagctctggagcatgaaaaaacgccggagctggcggctaaactggcggcggaagcgattgagcgcgatccgtgggcggcgcaggtaagtcagctttctttgcctaagctggtggagcaggtggcgcttaatgcctggaaggaacagaacggcaacgcggtttgtctgcatctgcgctcgacgcagcggcacctcaattccagcggcgcgcagcaaaagctggcgcaagcgctcagcgatctgacgggaacgacggttgaactgaccatcgttgaagatgataatcccgcggtgcgtacgccgctggaatggcgtcaggccatttatgaagagaaactcgcgcaagcgcgtgagtcaattattgcggataataacattcagacgctgcgtcgattcttcgacgccgagctggatgaagagagtatccgccccatttga

SEQ ID NO: 371728 - DNA, 552 bp, Salmonella enterica
atgaccgcgactgcacagcagcttgagtttctcaaaaacagcatcaaaagcattcaggattacccgaaaccgggcattcttttccgtgatgtcaccagcttactggaagacccgaaagcctacgcgctcagtattgaactgttggttgagcgttataaaaatgcgggtatcaccaaagtggtcggcaccgaagcgcgtggcttcctgtttggcgcgccggttgcgcttgggctgggcgttggttttgttccggtacgtaaaccgcgcaaattaccgcgtgaaactattgccgagacctatgaattagagtacggcaccgatcagctggaaattcatgtcgacgcgattaaacctggcgacaacgtgctggtcgtggacgatctgctggcgactggcggcaccattgaggcgaccgtgaagctgatccgtcgtctgggcgggaaagtcaccgatgcggcgttcatcatcaatttgttcgatctgggcggcgagcagcgtctggaaaagcaggggattacctgttatagcctggtgccgtttccggggcattga

SEQ ID NO: 371729 - DNA, 378 bp, Salmonella enterica
atgcaacgtactattttaatcatcattggctggctggcggtagtattagggacattgggcgtggttttgcctctgttgccgacaacgccgttcattttactggcggcctggtgtttcgcccgctcgtcgcctcgtttccatgcttggttgttataccgctcatggtttggcggttatctgcgccactggcagcgctatcgggccatgccgccgggagcgaaaccgcgagcgatcgcgttgatattgctgacctttggtatttcgctgtggctggtgaatatgatgtgggtgcgggtgctgctgttggttattttggcctgtctgctgatctttatgtggcggataccggtgattgatgaaaagcaacaaaagcgctga

SEQ ID NO: 371730 - DNA, 516 bp, Salmonella enterica
atgctgttacagacgctggaagagaggctggcgacgctacgccaacgctgcgcgccgctggcgcaacatgcgacgttaagcgcgcgctttgaccgacatcttttccgtacccgcagtactctgttgcagggatatctggaagaggctgacgccaatctcgccgcgttgcgtcaggcggtaaaacatgagcaactgccgcaagtcgcctggctggcagaacatctggcttcgcaactggaggcgatatcgcatgaaaccgccgcctggtcgctgcgccagtgggacgccgccgcgccagggcttggccgttggcagcgcagacgaatacagcatcaggagtttgaacgtcgactactggcgatgacacaggagcgcaaaattcgtctggcgcaggcgaccggccttgtcgaacaacaaacgctgcaaaaggaagtcgagatctatgaaggacggctggcgcgttgccgacatgcgctggagaaaatagaaaacgtactggcgcgtttaacccgctaa

SEQ ID NO: 371731 - DNA, 168 bp, Salmonella enterica
atgtcgcttgaaaatgcccctgatgaagtcaaactggccgtggatttaattgtgctgcttgaagagaatcgcttaccggcacgaacggtgctacgcgcgctggaaatagttatgcgagattatgaaaacaagttaaaaagtacggaagacgactcgcaaacagagtaa

SEQ ID NO: 371732 - DNA, 936 bp, Salmonella enterica
atggaacgtctacccaccacgccgcacgatgcggtatttcgacaaatgctgatgcaaaaagaggtcgcccgcgactttctggctatccacttgccagaagcctttcttgcaatctgcgatctggattcactgaagctggagtcagggagttttgttgaagacaatttacgcagccgctattcagatattctctactctctgcatacccaacacggcccagggtatgtttacgcgctcattgaacatcagagcaaatcagaccggctgatggcttttcgcctgatgcggtacgccattgccgccatgcagcgtcatctggatgccggtcatgataccttgccgctggtggtaccaatcctcttttatcacggtccggaaagcccgtggccctatagccttaactggcataatatgtttgtgaaaccggatatggcgaaggccttatacagctgcgaatttgcgctggtcgacctgacgacaatgccggataatcagcttttgcagcatcggcggatagcgatgttagagctcctgcaaaaacatattcgtcaacgcgatttaagcgaactgctcgacccccttatcacgcttttaacgcaggatcatttgacggacacgcagctcagtgtgttgatcaactatatgttgaaagcaggaaacgccgcagaacccggggcgctaattcgtcaactggcgcagggcgcgccgcagtataaggaacaactgatgacaatagcggaatggctggaagaaaaaggccgaacggaagggttgcaaaagggcctgcaaaaaggccttgagcaagggttagcacaaggccgagaggccgaagcgcgcgctattgcccgcaaaatgcttgccaacgggctggaacccgggctcatcgccagcgtcaccggcattacgccggaagagctttctacgctgtcgcattag

SEQ ID NO: 371733 - DNA, 3363 bp, Salmonella enterica
atgactatgttgcagctttataaacgttcacagcattttgtttttattacaattagcgtccttattatcctgctgtcctgtcagtctctggcatttgcccgggggcaaacgaatggcgacctgccgtcaaaagcggatgtgcaaaaccagctggatacgctgaataagcaaaaagatctctccgcccaggataagctcgtccagcaggaccttattgatacgttagctacgctggagaaaatcgagcgggtaaaagaggagaccgtacagctacggcagaaggtggcgcaggcgcctgaaaaaatgcgtcaggcgacggctgcgttgaatgcgctgagcgacgtcgataatgatgatgaaatgcgaaaaacgctgagtgcgctttcgttacgtcagcttgagctgcgcgtggcgcaggtactggatgatttgcaaaattcgcaaaacgatcttgccgcttataacagccagcttgtttcgctacagacccagcctgagcgcgtgcaaaacgccatgtataccgcctcacagcaaatacagcaaatccgtaaccgtctggacggcaataacgtcggcgaagccgcgcttcgccccagccaacaggtgttattacaggcacaacaggcgctgcttaatgcgcagatcgaccagcaacgtaagagtcttgaaggaaataccgttttgcaggacaccctgcaaaaacagcgggattacgtgacggccaacagtaatcgccttgaacatcagcttcaacttttacaggaggcggtcaacagtaaacgacttacgctaacggaaaaaacggcccaggaggccatttcgccggacgaaacggcgcgtatccaggcgaacccgctggtaaaacaggaactggatattaaccatcaactcagccagcgtctgattgtcgcgaccgaaaacggcaatatgttgatgcagcaaaacattaaagtaaaaaactggctcgatcgcgcgctgcagtcggaaagaaatatcaaagaacagattgccgtcttaaaaggcagcctgttgctgtcgcgtattctttatcaacagcagcaaaccctgccctccgccgacgaactcgaagatatgaccaaccgcattgcggatttgcgtctggagcagtttgaaatcaaccagcagcgtgatgccttattccaaagcgatgcctttgtcgacaagctggaggaggggcataccagcgaggtgaatgatgaagttcatgatgcgttgcttcaggtggtggagatgcgccgtgagctattggatcagctaaataaacagttgggtaaccagctgatgatggcgattaacctgcaagttaaccagcagcagttgatgagcgtctcgaaaaatctgaaagccattctgacgcagcagattttttgggtgaacagtaaccgccctatggactgggactggcttaaagcgttcccccaaacgttaaaagagcaattcagcgccatgaaaatcacggtgaactggcaaaaagcctggcccgcggtatttattgcttttttggccgggttgccgctcttgctcatcgccggtttaatccgctggcgtctgaaatggttaaaagcgtatcaacagaagctggccgccgccgtgggagcgttgcgtaacgatagtcagctcaatacgccaaaagctattctgatcgatctgatccgcgcgctgccggtgtgcctgattatcctcgcgcttggactgatcctgctgaccatgcagctaaatatcagcgatctgctctgggcctttagtaaaaagctcgcaatgttctggctggtctttgggctgtgctggaaggtgctggaaaaagagggcgtggcaatacgccatttcggtatgccagcgcagttgaccagccactggcgtcgccagattgtacgcattagcctcgcattgctgccgctgcacttttggtctgtggtggcggagttgtcgccgctgaatctgatggatgacgtgctggggcaggcggttattttcctcaatctgctggtcataacattgctggtgtggccactgtgccgggaaagctggcgcgataaagaatctcacggcattcgactggtgaccgtgacgattctttccattattccggtggcgttaatggtattaacggcgaccggctatttctataccaccctgcgcctggcggggcgctggattgaaaccgtctatctggtcattatctggaacctgctttatcaaacggtgctgcgcgggttaagcgtagcggcgcgccggattgcctggcgacgcgcgctggctcgtcgtcagaacctggtaaaagagggagcggaaggcgcggagccacaggaagaacccgccatcgcgttggagcagattaaccagcaaacattacgtatcacgatgctgctaatgcttgccctgttcggcgttatgttctgggcgatttggtccgatttgatcaccgtattcagctatcttgatagcatcacgctgtggcactacaacggctccgaagctggcgctgcggtggtgaaaagcgtgacgatgggcagcttgctattcgccattattgccgcgatggtggcctgggcgctcatccgcaacttacccggcctgttggaagtgctggtgctttcacgtctgaatatgcgccagggggcttcgtatgcgatcaccacgatccttaactacgtcattatcgctgttggcgcgatgacagtattcggatcgctcggcgtctcgtgggataaactccagtggctggcggcggcgttgtcggtgggtctcggttttgggctacaggagatcttcggtaactttgtctcgggtttaatcatcctcttcgaacgtccggtacgcattggcgatacggtaacgatcggcacctattccggcacggtcagtaagattcgtattcgcgccaccactattaccgattttgatcgtaaagaagtgatcattccgaacaaagcattcgtaacggagcggctgattaactggtccctctccgataccacgacacgtctggtgatccggcttggcgtggcttatggctcggatctggagaaagtgaaaagagtcctgctacaggcggcgatggagcatccgaaggtgatgcacgatccggaacctgccgtattcttcaccacctttggcgccagcactctggatcatgaactgcgtctgtatgtgcgtgaattgcgcgatcgtagccatacggtggatgaactgaaccgcgcgatcgatcgactgtgccgtgaaaatgatatcaatatcgcctttaaccagcttgaggtgcatctgcataacgcgaagggcgacgaagtcactgaagtgaagcgcgatctcaacggcggcgatctggcgcctacggcaagctaa

SEQ ID NO: 371734 - DNA, 654 bp, Salmonella enterica
atggcacgaaaaaccaaacaacaagcgctggagacacgacaacacatcctggatgtggccctgcgtttgttctcgcagcaaggcgtatcagcaacctcgctggcggagattgcgaacgctgctggcgtgacgcgcggcgcaatctattggcatttcaaaaataagtcggatttattcagtgagatctgggagctatcagaatccaatattggtgagcttgagattgagtatcaggcaaaattccccgacgatccactatctgtattaagagaaattttagttcatattcttgaagctactgtaacagaagaacgacgccgcttattgatggagattatattccataaatgtgagtttgtcggagaaatggttgtggttcaacaggcgcaacgtagcctttgtctggaaagttacgatcggattgaacaaacgttaaaacattgtattaatgctaaaatgctgcctgaaaatctgctgactcgtcgtgcggcgatactgatgcgcagctttatttcagggctcatggaaaactggttatttgctccgcaatcgtttgatttaaaaaaagaagctcgcgcctacgtcacgatcctgctggagatgtatcaattgtgtccgacgctgcgcgcgtcgacgttcaacggctccccctga

SEQ ID NO: 371735 - DNA, 1194 bp, Salmonella enterica
atgaacaaaaacagagggttaacgcctctggcggtcgttctgatgctctcaggcagcttagcgctaacaggatgtgacgacaaacaggaccagcaaggcggccagcagatgccagaagttggagttgtcacactaaaaacggaaccactgcaaatcacaactgaacttccgggtcgtaccgttgcttaccgtatcgccgaagttcgcccacaggtaagcggcattatcctgaagcgtaatttcgttgagggaagtgatatcgaagcgggagtctctctctatcagattgatcctgcgacctaccaggcgacttacgacagcgctaagggcgatctggcaaaagcgcaggccgccgcgaatatcgctgaactgacggtgaagcgttatcaaaagctgctgggtacgcagtacatcagtaagcaggaatacgatcaggcgctggctgacgcgcaacaagcgactgccgccgttgtcgcagcaaaagccgccgttgaaaccgcacgtatcaacctggcgtataccaaagtcacctcgccgattagcggtcgtattggtaagtcgtccgtaacggaaggcgcgctggtacagaacggtcaggcgtcggcgctggcgacagtgcagcagctggaccctatttatgtcgatgtgacccagtccagcaatgacttcctgcgcctgaagcaggagctggcaaatggttcgctgaaacaggaaaacggcaaagcgaaggtcgatctggtgaccagcgacggtatcaaattcccgcagtccggtacgcttgagttctccgacgtgaccgttgaccaaaccaccgggtctattactttgcgcgccatcttccctaacccggatcacaccttattgccaggaatgttcgttcgcgcacgtctgcaggaagggacaaaaccgacggcattactggttccacaacagggcgttacccgtactccacgcggcgatgccacggtgctggtggttggcgctgataacaaagtggaaacccgccaaatcgtcgcaagccaggcgatcggcgataagtggctggtgactgacgggttgaaagcgggcgaccgcgtagtcgtcagcgggctgcaaaaagtacgtcctggcgcacaggttaaagtgcaggaaattaccgcggataacaaacagcaagccgcaagcggtgatcaacctgctcagcccaggtcttaa

SEQ ID NO: 371736 - DNA, 3150 bp, Salmonella enterica
atgcctaatttctttatcgatcgccctatatttgcgtgggtgatcgccatcatcatcatgttggcaggggggctcgcgatcctcaaattgccggtagcgcaatatccgacgattgcgccaccagcagtgacgatctccgcaacctaccctggcgctgatgcgaaaacggtacaggataccgtcacgcaggttatcgaacagaatatgaacggtatcgataacctgatgtatatgtcctccaacagtgactccacggggaccgtgcagatcacgctgacctttgaatccggcaccgatgcggatatcgcgcaggttcaggttcagaacaagttgcaactggcaatgcctttacttccccaggaagtacagcaacagggcgtgagcgttgagaagtcctcaagtagcttcctgatggtagtgggcgtcattaacaccgacggcaccatgacccaggaggatatttcggattacgttgccgccaatatgaaagatccgatcagccgtacctctggggtgggcgacgttcagctgtttggttcgcagtatgcgatgcgtatctggatgaatccgacagagctgaccaaataccaactgacgccggtcgacgtgattaacgcgatcaaagcgcagaacgcccaggtcgcggcaggtcagctcggtggtacgccgccggtaaaaggccagcagcttaacgcatcgattattgcccaaacgcgtctgacctcaacggatgagtttggcaaaatcctgctgaaagtgaatcaggatggctcccaggttcgtctgcgggatgtagcgaaaattgagcttggcggcgagaactacgacgtcatcgcgaaatttaacggtcagccagcgtcaggtcttggcatcaaactggctaccggcgccaacgcgctggataccgctaccgctattcgcgccgaactgaaaaaaatggaaccgttcttcccgccagggatgaaaatcgtctacccgtatgacaccacgccgttcgtgaagatctctattcatgaagtggtaaaaacgctggtcgaagcgattatcctcgtgttcctggtgatgtacctgttcctgcagaacttccgcgcgacgttgattccgactattgcggttccggtggtgttgttgggaacctttgccgtgcttgcggcattcggtttctcgataaacacgctgacgatgttcgggatggtgctcgccatcggcttgctggtggatgacgccatcgtggtggtcgagaacgtcgaacgtgttatgacggaagaaggccttccgccgaaggaagcgacgcgcaaatccatgggccagattcagggcgcattggtgggtatcgcgatggtactgtcggcggtatttattccgatggccttctttggcggctcaaccggggcaatttatcgtcagttctctatcaccatcgtatcggcgatggcgctgtcggtgctggtcgcgctgatcctgacgcctgcgctgtgcgcgacgatgctcaaacccgtcgccaaaggcgatcatggcgaagggaaaaaaggctttttcggctggtttaaccgcctgtttgataagagcacgcatcactacaccgatagcgtaggcaatattctgcgcagcaccgggcgttatctgctgctctatctcattatcgtcgtcggtatggcttatctgttcgttcgtctgccaagctctttcttgccggatgaagaccagggcgtattcctgacaatggtccagctccccgccggcgcgacgcaagagcgcacgcaaaaagtgctggatgaggtcacggattactatctgaacaaagagaaagccaacgttgaatcggtattcgccgtcaacggcttcggttttgcagggcgcggtcagaataccggtattgcattcgtgtcgttgaaagactgggccgatcgtccaggcgaaaaaaacaaggttgaagcgattacccagcgggcaaccgcagcgttttcacaaattaaagatgcgatggtcttcgcctttaacctaccggcgattgttgaactgggcaccgcaaccgggtttgacttcgagttgattgaccaggcgggacttggtcatgaaaaactcacccaggcacgtaatcagttgttcggcgaggtggcgaaatatcctgatctgctggtcggcgttcgacctaacggtctggaagatacgccgcagtttaaaatcgatatcgaccaggaaaaagctcaggcgctgggcgtgtctattagcgacattaataccacactgggcgcagcatggggcggcagctatgtaaacgactttatcgatcgcggtcgtgtgaagaaagtttacgtgatgtccgaagcgaaataccgcatgttgccggatgatattaacgactggtacgttcgtggtagcgatggtcagatggtgccgttctccgcattctcctcttcccgctgggaatatggttcgccgcgtctggaacgctataacggtctgccttcgatggaaattctgggtcaggcggcgccaggcaagagtactggtgaagcgatggcgatgatggaggaactggccagcaagctgccgtcaggcattggatatgactggaccgggatgtcctaccaggagcggttgtccggcaaccaggcccctgccctgtatgctatctcgctgatcgtcgtcttcctgtgtctggcggcattgtatgagagctggtctatcccgttctccgtaatgctggttgttccgcttggggttatcggcgcgctgctggctgcgaccttccgcggactgactaacgacgtttacttccaggtgggcctgctcacaaccattgggttgtcggcgaagaacgcgatacttatcgtcgaattcgccaaagacttaatggataaagaagggaaaggtctggtagaagcgacgctggaggccgttcggatgcgtttgcgcccgattctgatgacctcgttagcgttcatgctgggggttatgccgctggttatcagttccggcgcgggttccggcgcgcagaatgcggtaggtactggcgtactgggcgggatggtaacggcaaccgtactggctattttcttcgtaccggtcttcttcgtggtggtacgccgccgctttagccgtaaaagcgaagatattgagcatagtcattcgacagaacatcgctga

SEQ ID NO: 371737 - DNA, 375 bp, Salmonella enterica
atggacgaatactcacccaaaagacatgatatagcacagcttaaatttctttgcgaaaccctgtatcatgactgtcttgcaaaccttgaagaaagcaaccatggctgggttaatgacccgacctcagcagtcaacctgcagctcaatgagctgatagagcatattgcaactttcgcgcttaattataaaattaagtacaatgaagacaataaattgattgcgcagatagatgaatacctggacgacacctttatgttgttcagcagctatggtattaatacgcaggatttgcaaaaatggcgtaaatcgggcaaccgcctgttccgttgtttcgtcaacgccaccagggccaatcctgttagtttgtcttgttaa

SEQ ID NO: 371738 - DNA, 219 bp, Salmonella enterica
atgtctgataaaccattaactaaaactgattatttgatgcgtttacggcgctgtcagacaattgacactctggagcgcgtcattgagaaaaataaatatgaattgtccgacaatgagctggctgtattttactcagctgcggatcaccgtcttgcagaattgacgatgaacaaactctacgacaagatcccctcttcagtatggaaattcattcgttaa

SEQ ID NO: 371739 - DNA, 552 bp, Salmonella enterica
atgagtgacgaaaaacaaaaaatgatcgctggggcactgtattgcccgaccgatgaaactttatgccaggatcgactgcgggcgcgtcaactcatccatcaatacaattatactacgcctgatgaaataaataagcgtcaggcgattttacgcgacctgttgggtcgatgcgaagacgcctatattgaaccttccttccgttgcgactacggctataatatttttcttggtcactccttttacgctaacttcgactgcgtcatgcttgatgtttgccctattcatattggcgataattgtatgctcgcgccaggggtacatatctataccgccacgcacccgctggacgccgtcgaacgcaacagcggcagagaattaggtaaacccgtcactatcggaaataacgtctggataggcggacgagccgtcgttaatcctggcgtaaccatcggcgataacgtcgtcgtcgcttcaggcgctgtggtgacaaaaaacgtaccgccagacgtcgtggtaggcggaaatccggcgcgaatcattaaaaaattgtag

SEQ ID NO: 371740 - DNA, 471 bp, Salmonella enterica
atgacagagatacagcgcctgcttagcgaaactattgatgacttaaacgtccgtgaaaaacgcgataacaggccgcgttttagtatcagttttatccgcaagcatcctgggttatttatcgcgatgtatgcagcctggtttgcgacgctggcggtcatgctgcaatcagaaacgctggtggggtcagtgtggctgttagtggtgttatttatcgcatttaatggcttcttctttttcgacatcgccccgcgttatcactataacgacatcgatgtgctggacctccgggtctgttacaacggcgaatggtacaacacccgctttgttccccccacgctcattgagacgattcttcagtctccacaggtggataatgaacataaagtccagctgcaaaaaatggttgcccgtaagggcgaactttccttctacgatatttttacgctggcccgcgcagaagccagccggtaa

SEQ ID NO: 371741 - DNA, 261 bp, Salmonella enterica
atgaaacctgatattcatcctgtataccgcaccgtcgtatttcacgacaccagcgcaaatgaatatgtgaaagtgggatcaactatcaaaactgaacgtgaaatcgaactggacggcgtgacatatccgtatgtcactattgatgtgtcatcaaaatcgcatcctttttataccggtagacagaaaacgtttgatagcgaaagtagcgccgcacgcttccagaaacgttttggtcattttatcggcgctaaacgggggtaa

SEQ ID NO: 371742 - DNA, 1551 bp, Salmonella enterica
gtgacaacacgacatctggtcagcctggtaacgggagtgcttatcctgtctgtccttttcccgataggattgagcctgtggctggcgcaccgtcaagttgaaaaaaggtttaacgaagagctggatatcttctcgtcccgggtggcgctacgtacagaaagggtcagtgaccaggcaaaagccgcgttaacgcatattgcctcctttaaaggcgagccctgcagcagcgcccatttactcgccatgcgccgcgtgtcttatagctttcggtatgtccaggaagttctgtatcttaaaaattcgattcccgtttgctcctcacttgaaaaagagagccatattcccgctttccctccgcccatgaaaatcactcgcgacggttatcgcgcctggtttacggcgcaaaacgatctgggtataaaacgttatatggcggcactcgggagcgacagctatatcgtgatgatcgacccggcgtcctttatcgatgtgattccgtttggcgcatggccgattgacgtcgctattattggccgggaacgcaatactgtggttgccagcagcggtaaccttgaccccgctattcttccgctcattcaccatgagacgcccctgcggctggaaaaccgaggcattcagtatgctatccacccctttccggaaatgggcattactatcgtaagctgggcaccgaccgctccgctggaaaggagctggtatcgacaggcgtttatctggctaccggcgggcatcgtaacgggtctgctggccgcggcctttattctgcgtattttgcgtcggctacagtcgccccgccaccgtctccaggatgcgatagacaatcgcgaaattaacgtacactatcagcctattgtctccctgagcagcggaaaaattgtcggtgccgaagccttagctcgctggcaacaggcggacggcactttcctttcgccggaaatttttatcgcgctggctgaacaaaccgggctcacggagccgctaacccggctaatcatcgacaccgtttttgaagacatggggagttggttaaagtcccaccccgaacaacatatttcaatcaatcttgaggcatccgatctggcgtcggaaacgttgccgacgctgttaagcacgctgctgaaccgtagccaaatttctccgtcgcaaatcgcgcttgagttaacggaacgcgagttcgccgatccgaaaaccagcgcgccaattgtcgccagataccgtaacgcgggacattcaatttatattgatgactttggcaccggctattccagcctcagctacttacaaaatctggatgtggatgtccttaaaattgataaatcttttgtcgatgcgctggaatataaaaacgtcacgccgcatattattgaaatggcgaaaacgctcaaacttaagatggtcgcagaaggcatcgaaacgaccaggcaagaacagtggctacgccagcatggcgtacattatggtcagggctggttatacagtaagcccctacccgctacggcatttattctttgggcggaacagcggctataa

SEQ ID NO: 371743 - DNA, 312 bp, Salmonella enterica
atggatattcaggacacatttcctcaacgcgtctggcaaatcgtcgcttcgatcccggaagggtttgtcacgacctacggcgatgtcgcccggcttgccggttcccctcgggcagcgcgtcaggtcggcggagttttaaaacgtctgccggaaggcagcactttaccatggcatcgggtggtgaaccgccagggcgcaatatcacttaccgggccggatctacagcggcaacgtcaggcattactggcggaaggcgtagtggtgtcgggaagcggacaaatcgatttacaacgctatcgctgggtgtattaa

SEQ ID NO: 371744 - DNA, 570 bp, Salmonella enterica
atgaaactcgtgcacatcgtaagtggtttagcggttgcgatatctctggcggcctgcgctgataaaagcgctgatatccagacgcctgcgccaaaccctaacatgtcgattacagctaaccagtctactattcagcaacccaatgtttccggtaccgtctggatccgccagaaggtcgctctgccgccagatgcggtgctgaccgtgacgctttcagatgcttcgctggctgatgcgccgtctaaggtgctgtcgcaaaaagcggtacgtaccgaaggtaaacaggcgcctttcagttttgtgttgccgtttaacccatcagatattcaacctaacgcgcgtattctcctgagcgcggccatcaccgttgacaataagctggtatttattaccgatagcgtgaaaccggtgattaacaatggcggcactaaagcggatctgacgctggtaccggtacagcaaacggcggtgcctgtgcaggccagcggtggtgcgacgacgacggttccatcgacttcgccgacccaggtcaatccgtcttctgccgttcctgcgcctacccagtattaa

SEQ ID NO: 371745 - DNA, 861 bp, Salmonella enterica
atgagtcagacactgaataatttgctgacattattgaatctggaaaaaattgaagaaggactctttcggggccaaagtgaagacttagggctgcgccaggtatttggcggtcaggtggtgggccaggcgctctatgccgccaaagaaacggtgccggaagcgcgactggtgcattcattccacagttattttctgcggccaggcgatagccaaaaacccattatctatgacgtagaagtgctgcgcgatgggaatagcttcagcgcccgccgcgttgccgcaattcagaacgggaaacccatcttttacatgaccgcctcattccaggcgccggaaccgggttttgaacatcaaaaaaccatgccgacagcagtcgggccggaaggactaccgtcagaaacggaaatcgcgcaatcgctggcgcatttactgccgccgattctgaaagaaaagtttctctgcgatcgcccgctggaaattcgtcccgtcgaatttcacaatccgttgaaaggtcacgtcgccgcgcctgtgcgtcaggtatggattcgcgccaacggcaccgttccggatgacattcgcgtccatcaatatttactgggatacgcctcggatctgaatttccttcccgtcgcgcttcagcctcacggcatcggttttctggaaaagggcattcagatcgccacgatcgatcactctatgtggttccatcgtccgttcaattttaatgaatggctactttatagcgtggagagcacttccgcctccagcgcccggggctttgttcgcggcgagttttatactcaggatggcgcgctggtcgcttcaaccgtgcaggaaggggtaatgcgcaatcacaattaa

SEQ ID NO: 371746 - DNA, 1287 bp, Salmonella enterica
atgaagatagcgatgataaaaaccacactggcttcactggcgctgctgcctgggctaacgatagccgcgccggcggttgccgataaagcggatagtgcttttatgatgatttgcaccgcgctggtgctgttcatgacgataccgggtatcgcgctgttttacggcggattaattcgcgccaagaacgtgttgtcaatgttaacgcaagtgaccgtcacctttgcgctggtctgtattttatgggtggtgtacggctattcgctggcttttggcgaagggaatcatttcttcggtaataccgatggggcgatgttgaagaatatcgcgttgacggcggtaacggggacgatttatcagtatattcatgtcgcgtttcagggatctttcgcctgtattaccgtcgggctgattgtcggcgcgctggcggagcgtattcgtttttcggcggtgctgatttttgtcgtggtgtggttcacgctctcttatatcccgattgcgcacatggtgtggggcggcggcctgctggctgctcacggcgcgctggattttgccggtggtacggtggtgcatattaacgccgctatcgccgggctggtgggggcttatttaattggcaaacgcgtcggctttgggaaagaagcatttaaaccccataacctgccgatggtctttaccggtactgcgattctgtatatcggctggtttgggtttaacgcgggttctgcgggtagcgcaaacgagatagcagcgctggcctttgtgaacaccgtggtggcgaccgccgccgcgattctggggtggattatcggcgagtggactctacgcggtaagccttccctgctgggggcgtgttccggcgcgattgccggtctggtcggcgtgacgccagcctgtggctatgttggcgttggcggcgcgctggttatcggcgttattgcgggtctggcgggattgtggggagtcaccatgcttaaacgtctgttacgggtagatgatccgtgcgacgtatttggcgttcacggcgtttgcggaatagtcggctgtatcctgaccggcgtttttgccgccagttcgctgggcggcgtcggctttgtcgacggcgttacgatgggacatcaggtgatggtacagctggaaagtattgctattacggtcgtctggtccggcgttgtcgcgtttgttggttacaaactggcggatatccttgttggactgcgtgtaccggaagagcaggagcgcgaggggctggatgtgaacagtcacggcgagaatgcgtataacgcgtga

SEQ ID NO: 371747 - DNA, 339 bp, Salmonella enterica
atgaagctggttaccgtgattatcaaaccgttcaagctggaggacgtgcgggaggcgctttcttccattggcattcagggactgaccgtcaccgaagtgaaagggtttggccgtcagaaaggacacgccgaactgtatcgcggcgcggagtacagcgtgaatttcctgccgaaggtcaaaattgatgtggctatcgccgacgaccaactggaagaggtgatcgatatcatcagtaaagcggcttacaccggaaaaattggcgacggcaaaattttcgtcgcggagctcatgcgcgttattcggattcgtaccggcgaagctgacgaagcagcgctgtaa

SEQ ID NO: 371748 - DNA, 1782 bp, Salmonella enterica
atgcgtagttttggacagctatggccgacgctgaaacggttgctggcgtatggctcgccatggcgaaaaccgctctctgtcgcggtgatgatgctgtggattgcggcggcggcggaggttagcggtccgctgctgatcagctatttcattgataacatggtggcccgccaccatttaccgttgggcaaggtcgcggggctggcggccgcctatgtggggctacagtttctggcggcgggtctccattacgcccagtctttattatttaaccgggcggccgttggcgtggttcagtccttgcgcacggacgtcatggatgccgccttgcgtcagccgctaagcgccttcgacacgcagcctgtcggacaattaatttcacgcgtgaccaacgatacggaagtcatccgcgatctgtacgtcacggtcgtcgcaacggtattacgtagcgcggcgttgatcggcgccatgctggtcgctatgttcagccttgactggcggatggcgctggtggcggttttgatttttccggcggtattgaccgtgatggtcatttatcagcgctacagcacgccgattgtacgccgcgtgcgggcatacctggcggatattaacgacggctttaacgaaatcatcaatgggatgagcgtaatccagcagtttcgccagcaggcgcgcttcggcgaacgcatgggcgaggccagccgctcgcactacatggcgcggatgcagacgctgcgcttggacggctttttattgcgtccgctgcttagcctcttttccgcgctcattttatgcggtttgttgatgcttttcagctttacgtctgccggcacgattgaggtcggggtgctgtatgcgttcattagctatttgtcacgtctgaacgagccgctcattgaactgaccacccagcaatccatgctacagcaggcggttgtggcgggagagcgtgtttttgaactgatggatcgcccgcgccagcgctatggcagcgacgacaggccgttacaaagcggggcgattgatattgatcatctgtcgtttgcttaccgcgacgataatcttgttttacaggacattacgctatcagtaccgtcccgtagctttgtggcgctggtggggcacaccggcagcgggaagagcacgctcgccagcttattaatggggtattaccccctgacacaaggcgaaattcggctggatgggcgagaaatcgcctctcttaatcatcgcgttttacgccagggcgtggcgatggttcaacaggacccggtagtgatggcggatacctttctggctaatgtgacgctggggcgcgatgtctccgaggcgcaggtgtggcaggcgctggaaacggtacaactggcagatctggcgcgcggcctgagcgacgggctgcatacgcatctcggcgagcagggaaatacgctgtccgtcgggcaaaaacagctattggcgctggcgcgcgtgctggttgacgccccgcaaatattaattcttgatgaagcgacggccagcatcgattccggcactgagcaggcgatacagcaggcgctggcggcgattcgcgagcgcaccacgttggtggttattgcccatcggctatcgacaatcgtggaggcggataccattctggttctccatcgcggccaggcggtggagcgcgggacgcatcaacaattgctggcggcgcaagggcgctactggcaaatgtatcaattacagttagttggcgaggagttagccgccagcgtacacgaagaacccggccctgcggcataa

SEQ ID NO: 371749 - DNA, 1773 bp, Salmonella enterica
gtgcgattatttgctcaattaagctggtactttcgccgggaatggcgtcgctatcttggcgcggtggccctgcttatgcttattgcgatgcttcagctgatcccgcccaaagtggtggggattgtcgtggatggcgtaaccgcacagcattttactccaggccgaatagcgatgtggattggcaccattgccctgatcgccgtagtggtctatttgttgcgctatgtctggcgcgtgctgctgtttggcgcttcttatcaattagccgttgaactgcgtgaagattattatcgccagttgagtcgtcagcatcctgaattttatcagcgccatcggacgggcgatcttatcgcgcgtgcgacgaatgatgtggatcgcgtcgtatttgcggcgggcgagggcgttctgacgctggttgactcgctggtaatgggctgcgcggtactgattgtcatgtcgacgcaaattagctggcagctaacgctattagcgctgttgccgatgccgattatggcgctgatgatcaaacgttacggcgatcggctgcatgactatttcaaactggcgcaggccgccttctccagcctgaacgaccgcacgcaggagagtctgaccagcatccgtatgatcaaagcgtttggtctggaggaccgccagtcttcgctgtttgcggcggatgccgaagataccggcaagaaaaatatgcgcgtggcgcgtattgacgcgcgttttgatccaaccatttacatcgccattggcatggcgaacctgctcgcgattagcggcggaagctggatggtggttaacggcagcctgacgctgggcgaactcaccagctttatgatgtatctggggttgatgatttggccgatgctggcgctggcctggatgtttaatatcgtggagcgggggagcgccgcttacagccgcatccgcgccatgctggcggaagcgccggtagttaaggatggcgaagagccggtcccggcggggcgcggcgaactgacggcggccattcgtgagttttgctatccgcaaacgacgcatccggcgctggagaatgtgaactttcgtcttaaaccgggtcagatgctggggatatgcggtccgaccggcgcggggaaaagcacaatattgtcgcttatccagcgccattttgatgtgacgcagggagagatccgtttccatgacgtgccgttgacgcatctgcagctggatagctggcgtagccgactggcggtcgtcagccagacgccgtttttgttctcggactctattgccaataatattgcgctcggacgcccggaggcgactcaggaggagattgaacaggtggcgcgtttagccagcgtacatgaggatattctccgtttgcctcagggctacgacacgcaggtaggtgaacgtggcgtcatgttatcgggagggcaaaaacagcgtatctcgattgccagagcgctactgttaaatgcggaaattctgcttctcgatgatgcgctttctgcagtagatggccgcacggagcatcagattttgcataatttgcgccagtggggcgaagggcgtacggtcatcatcagcgcgcatcgtttatccgcgctgaccgacgccaatgaaattatcgttatgcaacatggtcatgttgttcagcgcggcgatcacgatcaactggcgcagcagattggctggtatcgcgatatgtatcgctatcagcaactggaggccgctctggatgacgcgccggaacgcggcgaggaggcggtgaatgcgtag

SEQ ID NO: 371750 - DNA, 459 bp, Salmonella enterica
atgttagataaaattgaccgtaaactgctttgcttattgcagcaggactgtaccctctctttgcaggcgctggcggatgccgttaatctgacgacaacgccttgctggaagcggcttaaacgcctggaagatgacggtatcctgcttggcagggtcgcgctgctggacccggaaaaactggggctgggattaaccgcttttgtgttgataaaaacgcagcaccacagcagtgaatggtactgtcggttcgtgaccgtcgtctctgagatgccggaagtgcttggcttctggcggatggcgggggaatacgactatctgatgcgagttcaggtggccgacatgaagcggtatgacgacttctataaacgtctggtcaatagcgtcccaggactgtcagacgtcacctccagttttgcgatggaacagattaagtacaccacctctctgcccattgaataa

SEQ ID NO: 371751 - DNA, 1056 bp, Salmonella enterica
atgatgagtagcaattgggttaaaaatgccattaatgaaattaacgctgaccaccagcgctcggcggatacgcatcttattcgtttgcccctgtcggcatttccaggtatccagctttacctgaaagacgaaagcacgcatcccaccggtagcctcaagcatcgtctggcgcgctcgctgttcctttatgggttgtgcaatggctggattaaagaaggcactccgattattgaagcatcatcaggctcaacggcgatttccgaagcctggttcgcgcgtttactgggactgccgttcatcgccgtcatgcccgcctgtaccgcaaaacgtaaaatcgaacagattcaattttacggcggccactgtcattttgtggagagcgcctgcgaaatttatgccgcctccgagcggctggcgcatgaactgaacggtcactatatggaccagtttacctacgcagaacgagctaccgactggcggggcaacaataatattgccgacagtattttccgccagatgcgcaacgaaccccatccggtaccgcgatttatcgtcatgagcgccggaacgggcggaacctctgcgacgattgggcgctatattcgctgccagggctatgatactcagctcatggtggtggatccggaaaattccgtctttttaccttactggcaggatcgcgacgcttcattacgcagcccggtaggcagtaaaattgaaggaattggtcgtccgcgagtagagccttcttttattccggatgtcgtggatgagatgctgcgcgtgccggacgccgccagcgttgccaccgcacactggctggaaacgcagctaggccgtaaagtcggcgcctctaccggcacgaatatgtggggagcgctgcagcttgcggcccggatgcgcgaggctggagaaaccggcgctatcgtgacgttattgtgcgatagcggcgatcgctatctggatacctattaccatccggcctgggttagcgaccatatcggcgatttgacgccgtggtcagcggccatcgcaaaattacttaccggcgactag

SEQ ID NO: 371752 - DNA, 819 bp, Salmonella enterica
atggcccgtctggcagcatttgatatggatggcacgttattaatgcccgatcaccatttgggtagagaaacgatcgccacgctggcgcgtctgcgcgaacgcgatatcaccctgacattcgctacgggtcgtcatgtgctggaaatgcggcatattctggggacgctttcactggatgcttatcttattaccggtaacgggacgcgaattcactcgctggaaggcgacgtgctgcatcgtcaggatctcgatcctcaggttgccgatacggtgatgcaccatgcctgggatacccgagccagtatgcatgtgtttaatgacaacggctggtttacaggccaggagatccccgcgctactccaggcgcacgtctacagcggctttcgttatcaggttatcgatataaaaagtattccggcccatcaggtgacgaagatctgtttttgcggcgatcatgacgatctgatccgtttgcgcattcagctcaatgaggcgctggaagaacgcgcgcacctctgtttctctgccgtcgactgcctggaagtgctaccgctggggtgcaataaaggatcggcgctggcggtattgagcaaccatttagggctttcactggcagattgcatggcgtttggcgacgcgatgaacgatcgggaaatgctgggcagcgtcgggcgggggctcattatgggcaatgccatgccgcagcttatcgccgcgctgccacacctttcggttatcggacattgtggtaatcaagcggtatcacactttttgacgcattggctggacaatccgcatctaccttattcccccgaatga

SEQ ID NO: 371753 - DNA, 1701 bp, Salmonella enterica
atgaggctactgaatcggcttaatcaatatcaacgcctctggcagccttccgccggggaaacgcaacatgtcaccgttagcgaactggccgaacgctgtttttgtagcgagcgccatctgcgaacgctgctgcgtcaggcccagcaggcaggttggctaagatgggaggcgcagtccgggcgcgggaaacgtggacggctccagtttctggtcacgccggaatcgctccgcaccgccatgatggaacaggcgctggaaaaagggcagcagctcaacgtactggaactggcgcagctggcgccgggcgagttacgggcgatgctccagccttttatgggcggccaatggcaaaacgatacgccgacattgcgtattccctactatcgtccgcttgatccgctgcagccgggtttcctgccaggccgcgcggaacagcatctcgcagggcaagttttttccgggttaacgcgcttcgaccgcgacagtcaatatccttgcggggatttggcgcatcactgggaggtttccgccgacggtttacgctgggatttttatattcgctccacgctgcactggcataatggcgatgcggtggataccgcgcagctacacgaacgcctggaaaggctgcttaccctacccgcgctaagcaaattgtttattagcgtcgcacggatcgaagtaacgcatcctcagtgcctgacctttctccttcaccgacctgattactggctggcgcatcgtctggcgagctattgtagcggtctggcgcatcctgacctgccgcttatcggcaccggtccttttcgcctggcgttgttcacgccggaactggtgcgtctggaaagtcatgaccattatcacctcagccatccgctgctgaaagcgattgaattctggatcaccccgcaactgtttgcccaggatctgggcaccagttgccgccatccggtgcagattgccatcggcaaaccggaagagctggcgacgctgagtcaggtaagtagtggtatcagtcttggcttttgttatttaaccctcaaaaagggctcacggctcaacgtacagcaggcgcggcgtctgatacatattatccatcatacttcgctgctgaaaaccttaccggtagatgagaacttgattatgccaagtcaggggctgctacccggctggacaatcccgcaatggcaggacgttgatgaaacgccattgccgaaaaaacttaccctggcgtatcaccttcccgtagagctgcatacgatggcggaacagcttcgacattacctggcgacgctcggctgtgagttaacgttgatttttcataatgccaaaaactgggataactgccctgcgttggcgcaagcggatctgatgatgggcgacaggctgatcggcgaagcgccggaatatacgctggagcagtggctacgttgcgatcagatctggtcacatgtcctggacgcgcctgcgttttcccatctgcaggctacgcttgacgctctgcaaattcagcccaatgaaaaagatcgccgcgccgcgctacaacaagtttttgctaacctgatggatgacgccacacttacgccactatttaattatcactatcgcatcagcgccccaccgggcgttaacggcgttcgactcacccctcgcggctggtttgaatttagcgaagcctggcttccgccgccttcgccgtga

SEQ ID NO: 371754 - DNA, 696 bp, Salmonella enterica
atgaaacgcgccgttgttgtatttagtggaggtcaggactccaccacttgtctggcgcaagcgcggcatcagtatgatgaagtgcattgtgtcacgtttgattatggtcagcgccaccgcgcagagattgatgtcgcgcgggcgctggcgttaaaacttggcgcacgcgcgcataaagtgttggatgtcactttgctgaacgaactggcggtcagcagcctgacgcgggatagcattccggtgccggactatgaaccgaacgctgacggtatccccaatactttcgtaccgggacgcaatattctctttctgacgctggcggcgatttacgcttatcaggttaaagccgaagcggtgatcactggcgtttgcgagaccgatttttccggctatccagactgtcgcgatgagttcgtcaaagcgctgaatcacgcggtgaatctgggcatggcgaaagatatccgtttcgaaacgcccttaatgtggattgataaagctgaaacctgggcgctggccgattattggggccaactggatttggttcgcgaagagacgctgacctgctataacggcattaaaggcgatggctgtggtcattgcgcggcctgtaatctgcgcgctaacggcctgaatcattatctgtcgaataaagcggcggtgatggcggcaatgaagcaaaaaaccgggttaaggtga

SEQ ID NO: 371755 - DNA, 399 bp, Salmonella enterica
atgcaaacacaaatcaaagttcgtggatatcatcttgatgtttatcaacatgttaataatgcccgctatctggagtttctggaagaggcccgttgggatggtctggaaaacagcgacagctttcagtggatgacggcccgcaatattgcctttgtggtggtaaacatcaatataaattaccgtcgcccggcggtattgagcgatctattgaccgtgaccagccaggtacaacagcttaacggtaaaagcggcgtattaagccagacgattacgctggagccagaagggcaggtggtggccgatgcgctcatcacgtttgtttgtattgatttaaaaacgcaaaaagcgctgccgctggaaggcgaattgcgtgaaaagctggaacagatggtgcaataa

SEQ ID NO: 371756 - DNA, 375 bp, Salmonella enterica
atgaaacacggaattaaagcactgcttattacactttctttaacctgcgcgggcatggcccatagcgcactggcggcgacgcctgtcgcaaaaaatgcagcggtggaaacaaaagcggatacgccttcttcatcctccgccaaagcggcattacctgctaaagccagcgatgatgaaggtaccagggtgagcattaataccgcgtctgcggaggatctggcgcgggtgatgaacggcgttgggctgaaaaaagcgcaggctattgtgagctatcgggaggagtatggtccttttaaaacggtggatgatttaaagcaggtgccgggaatgggaagcgcgctggtggagcgtaatctggcagttttaacattgtaa

SEQ ID NO: 371757 - DNA, 1872 bp, Salmonella enterica
atgatggacagcttacgcacggctgcaaacagtctcgtgctcaagattattttcgttatcattatcgtgtcgttcattttgaccggcgttagtggttacctgattggcggaagcaataactacgccgcaaaagtgaatggccaggaaatcagccgggcacagtttgagaatgcgtttaacaacgaacgtaaccgtatgcagcagcagttgggcgacaggtattctgaactggcggccaacgaaggttatatgaaaagcctgcgccagcaggtgctgaatcgtctgatagatgaagcgctgttggatcaatattcccgcgaactgaaactgggcatcagcgatgagcaggtaaaacaggcgattttcgccactcccgcttttcaggtggacggtaagtttgacaacaaccgctataacgcgattgtgaatcagatgggaatgaccgccgatcagtacgctcaggcgctgcgtaaccagcttaccactcagcaactgatcaacggcgtggccggtactgattttatgctgaaaggggaaaccgacgaactggcggcattagtctctcaacagcgcgtggtgcgtgaagccgttattgatgtcaacgcgctggcggcgaagcagcaggtgaccgatcaggaagtgtccagctactacgatcagaataaagtccgctttatgacgccggaacagttccgcgtaagctatatcaagctggatgccgcgacgatgcaggcaccggtcagcgatgcggatattcaggcctattatgaccagcatgtagatcagtttactcagccggagcgtattcgttacagcattattcagaccaaaacggaagatgatgcgaaagcggtactggatgcgctgaacaagggcgaagatttcgccacgctggcgaaagagaaatctaccgatatcatctctgcgcgtaatggcggcgatatgggctggctggaagagtctgccacggtgccggaactgaaaaacgccggattaaaagaaaaaggccagatatctggcgtgattaagtcgtctgtcggttttctggtggcgcgtctggatgatattcagcctgccaaagtgaaaccgttaagcgaggttcgcgacgacattgccgcgaaagtgaaacaggaaaaagcgctggatgcttactatgcgttgcagcagaaagtgagcgatgcggcaagcaacgacaatgagtcgttagcaggcgctgaacaggtcgctggcgtaaaagccgttgaaaccggctggtttagccgtgacaccttaccggaagagctgaacttcaaaccggtagccgatgctatctttaatggcggtctggtaggcgaaaacggtacgccggggccgaattcagacattatcaccgtagatggcgaccgggcttttgttgtgcgcgtgagcgaacataaacctgaagccgtgaagccgttggcagaagtgaaagaacaggtcactgccctggtgaagcataataaagcggaacaacaggcgaagctggatgcggaaaaactgctggtcgagctgaaagcgggcaaaggcgcggaagcgatgaaagcggcggggctgagttttggcgagcctaaaacgttaagtcgtaccagtcaggatccggtgagtcaggcggcctttgcgttaagccttccgacgaaagataagccagtttatggcgtggcgaacgatatgcagggtaacgtcgttctgctggcgtttgacgaggtgaaagcgggcgccatgccggaagcgcagaaaaaagcgatggtgcagggcatcacgcagaacaatgcgcaaattgtctttgaggcgctgatgagcaatctgcgtaaagaggcgaaaatcaaaatcggcgacgctctggaacagcagtaa

SEQ ID NO: 371758 - DNA, 273 bp, Salmonella enterica
gtgaataaatctcaactgatcgaaaaaattgctgcaggggctgatatctctaaggctgcggctggacgtgcgttagatgcgattattgcttctgttaccgaatctctgaaagaaggggatgacgttgcactggtaggctttggtacttttgctgttaaagagcgtgctgcccgtactggtcgcaacccgcaaacaggtaaagagatcaccatcgccgctgccaaagtgccgagtttccgtgcaggtaaagcgctgaaagacgcggtaaactaa

SEQ ID NO: 371759 - DNA, 2355 bp, Salmonella enterica
atgaatcctgagcgttctgaacgcattgaaatccccgtattgcccttgcgcgatgtggtggtttatccgcacatggtcatacccttatttgtagggcgggaaaaatctatccgttgtctggaagcggctatggaccatgataaaaaaatcatgctggtcgcccagaaggaagcatcgacggatgagccgggtgtaaacgatcttttcaccgtcgggaccgtggcctctattttgcagatgctgaaactgcctgacggcaccgtaaaagtgctggtcgaggggttacagcgcgcgcgtatttccgcgctgtctgacaacggcgaacatttctccgcgaaggcggagtaccttgattcgccagccattgatgagcgtgaacaagaagtgctggtgcgtaccgctatcagccagttcgaaggctacatcaagctgaacaaaaaaattccgccggaagtgctgacgtcactcaatagcattgacgaccctgcacgtctggctgacaccatcgccgcgcatatgccgctgaaactggcggataaacagtccgtactggagatgtccgacgttaacgaacgtctggaatatctgatggcgatgatggaatctgaaatcgatctgctgcaggttgagaaacgcattcgcaaccgcgtgaaaaagcagatggagaaatcccagcgcgagtactatctgaacgagcaaatgaaagcgattcagaaagagcttggcgagatggacgacgcgccggacgaaaacgaagcgctgaagcgtaagatcgacgcggcgaaaatgccgaaagaggcgaaagagaaagcggaagcggaactgcagaagctgaaaatgatgtctccgatgtcggcggaagcgaccgtggtgcgcggctacatcgactggatggtgcaggtgccgtggaatgcgcgtagcaaggtcaaaaaagacctgcgtcaggcgcaggaaatcctcgatactgaccattatggtctggagcgcgtgaaagaccgcatccttgagtatctcgcggttcaaagccgtgtaaataaaatcaaggggccgatcctgtgtctggtggggccgccgggggtaggtaaaacctcgttgggccagtccatcgctaaagcaacagggcgtaaatacatccgtatggcgctgggcggcgtgcgtgatgaagcggaaatccgcggtcatcgccggacttacattggctctatgccgggtaaactgatccaaaaaatggccaaagtgggggttaaaaacccactgttcctgctcgatgagatcgacaaaatgtcttctgacatgcgcggcgatccggcttccgcactgctggaagtgctggatccggagcagaacgtggcgttcagcgatcattacctggaagtggattacgatctcagcgatgtgatgttcgtcgccacttccaactccatgaacattccggcgccgctgctggatcgtatggaagtgatccgtctgtccggttataccgaagacgagaagctgaatattgctaaacgtcacctgctgccgaagcagatcgagcgtaacgcgctgaagaaaggcgaactgacggtcgacgatagcgcgattatcggtattatccgctattacacgcgtgaagcgggcgttcgtagtctggagcgtgaaatctccaaactgtgccgcaaagcggttaaacaactgttgctcgataagtcgttaaaacatatcgaaattaacggtgataatctgcacgactacctcggtgtgcagcgctttgactatggccgcgcggatagcgaaaaccgcgtaggtcaggtgacgggcctggcgtggacggaagtgggcggcgatctgttgaccatcgaaaccgcctgcgtcccgggcaaaggcaagttgacctacaccggctcgctcggtgaagtgatgcaggaatccattcaggcggcgctgaccgtggtgcgtgcgcgcgcggaaaaactgggtattaatccggacttttacgaaaaacgcgatatccacgttcacgtgccggaaggcgcaacgccgaaagacggtccaagcgccggtatcgcgatgtgtaccgcgctggtttcctgcctgaccggtaatccggtgcgcgcagatgtggcaatgaccggtgagatcacgctgcgtggtcaggtgttgccgatcggcggcctgaaagaaaaactgttggcggcgcatcgcggcgggattaaaacggtcttaattccgttcgaaaataaacgtgacctggaggaaattccggacaacgtgattgccgatctggatattcatcctgtgaagcgcattgaggaagttctgacgcttgctctgcaaaacgaaccgtctggaatgcaggttgtaaccgcaaaatag

SEQ ID NO: 371760 - DNA, 1272 bp, Salmonella enterica
atgacagataaacgcaaagatggctcgggcaaattgttgtactgctctttttgcggcaaaagccagcatgaagtgcgcaagctgattgccggtccatccgtgtatatctgcgacgaatgcgtcgatttatgtaacgacattattcgcgaagaaattaaagaagttgctccgcaccgtgaacgtagtgcgctgccgacgccgcatgaaattcgtacccacctggacgattacgttatcggccaggagcaggcgaaaaaagtgctggcgctggcggtctataaccactacaagcgtctgcgtaacggcgataccagcaatggcgtcgagttaggtaaaagcaacattctgctgattggaccgaccggttccggtaaaacgctgctggcggaaacgctggcgcgcttgctggatgtgccgttcactatggcggatgcgaccacgctaaccgaagcgggttacgttggtgaagacgtcgagaatatcattcagaaactgttgcagaaatgcgactacgacgtgcaaaaagcgcagcgtgggattgtctacattgatgaaatcgataagatttcgcgtaaatcagacaatccgtccattacccgcgatgtttccggcgaaggcgtacagcaggcgttgctgaaactgatcgaaggcaccgtcgccgcggttccaccgcagggcggtcgcaaacatccgcagcaggagttcttacaggtagatacctctaagattctgtttatctgcggcggcgcgtttgccggtctggataaagtgatcgctaaccgtgttgaaaccggctccggcattggttttggcgcgacggtgaaagcgaagtccgacaaagccagcgaaggcgagctgttgtcgcaggttgaaccggaagatttgatcaaatttggtctgattcctgagtttatcggtcgtctgccagtggtagcgacgctgaatgaactcagcgaagaagcgctgattcaaatcctgaaagagccgaaaaatgcgctgaccaagcagtatcaggcgctgtttaacctggaaggcgtcgatctggaattccgtgacgaagcgctggacgctatcgccaggaaagcaatggcgcgtaaaaccggcgcccgtggcctgcgttctatcgtcgaagcggcgctgctggataccatgtacgatttgccatctatggaagacgtcgaaaaagtggtgatcgacgagtccgttattgccggtcagagtaagccgttgctgatttacggcaaaccggaagcgcaggcttctggcgaataa

SEQ ID NO: 371761 - DNA, 624 bp, Salmonella enterica
atgtcatacagcggagaacgagataatttggcccctcatatggcgctggtgccgatggtcattgaacagacctcacgcggtgagcgctcttttgatatctattctcgtctacttaaggaacgcgtcatatttctgaccggccaggtcgaagaccatatggctaacctgatcgtggcgcagatgctgttcctggaagcggaaaacccggaaaaagatatctatctgtacattaattctcctggcggcgtaattactgcggggatgtccatctatgacaccatgcagtttattaagccagacgtcagcaccatttgtatgggacaggcggcctctatgggggcgtttctgctgactgccggggcgaaaggcaaacgtttctgcttgccgaactctcgcgtcatgatccaccagccgctgggcggctaccagggccaggcgacggatattgaaattcacgcccgcgaaattttgaaagtaaaagggcgcatgaatgaacttatggcgcatcatacgggtcaatctcttgagcagattgaacgtgatactgagcgcgatcgcttcctctccgcgcctgaagcggtagagtacggtttggttgactcaattttgacccatcgtaattga

SEQ ID NO: 371762 - DNA, 1299 bp, Salmonella enterica
atgcaagtttcagttgaaaccactcagggccttggccgccgtgtaacgattacaatcgctgctgacagcatcgagaccgctgtaaaaagcgagctggtcaacgtagcgaaaaaagtacgtattgacggcttccgtaaaggcaaagtaccgatgaatatcgtcgctcagcgttatggcgcttctgttcgccaggacgtgctgggcgatctgatgagccgcaacttcgttgacgcgatcatcaaagaaaaaattaacccggcaggcgcgccgaactatgttccgggcgaatacaaagtgggtgaagacttcacttactccgtcgagtttgaagtctatccggaagttgaactgaccggcctcgagtccatcgaagttgaaaaaccggttgttgaagtcaccgacgctgacgttgatgtgatgctggacaccctgcgtaagcagcaggcgacctggaaagaaaaagacggcgctgctgatgcggaagaccgtgtgaccatcgacttcaccggctctgtagacggcgaagagttcgaaggcggcaaagcgaccgatttcgttctggcgatgggccagggtcgtatgattccgggctttgaagacggcgttaaaggccacaaagctggcgaagagttcactatcgatgtgaccttcccggaagagtaccatgctgaaaacctgaaaggtaaagcggctaagttcgttatcaacctgaagaaagttgaagaacgcgaactgccggaactgaccgaagaattcatcaaacgtttcggcgttgaagatggttccgtagccggtctgcgcgctgaagtacgtaaaaacatggaacgcgagctgaaaggcgcggtgcgtaaccgcgttaagtctcaggcgattgaaggtctggtaaaagctaacgacatcgacgtaccggctgcgctgatcgacagcgaaatcgacgttctgcgtcgtcaggctgcgcagcgttttggtggtaacgagaaacaggctctggagctgccgcgcgaactgttcgaagaacaggctaagcgtcgtgtagttgtcggtctgctgctcggcgaagtcattcgtaccaacgagctgaaagcggacgaagaacgcgttaaaggcctgatcgaagagatggcgtctgcttacgaagatccgaaagaagtaattgagttctacagcaaaaataaagagctgatggacaatatgcgtaacgtcgctctggaagaacaggctgttgaagcggttctggcaaaagcgaaagtgtctgaaaaagccacttccttcaatgagctgatgaaccagcaggcgtaa

SEQ ID NO: 371763 - DNA, 315 bp, Salmonella enterica
atgatacgtgagcaaatagaagaaaaattaaggacagcgttcgaccccgtgtttctcgaagttgtggatgaaagctatcgtcacaatgttcctgcaggatcggaaagccattttaaggtcgtgctggtgagcgatcgctttacaggcgaacgttttcttaatcgtcatcggatgatttacggtacgttaacggcggaactttccacaaccgtacatgcgctggcactgcatacttataccctcaaagagtgggaaggattgcaggatactatcttcgcgtcgcctccttgtcgcggcgcgggaagcatcgcgtag

SEQ ID NO: 371764 - DNA, 633 bp, Salmonella enterica
atgatggcgggaatttttacctatcacgttttaagcgtcattgagagcctgaatatgttaaaaaaacttctctttccgttagtcgctctgtttatgctggcaggatgcgccacaccgccgacgaccattgacgtcgcgccgaagatcaccttgccacagcaggacccgagcctgatgggcgtcaccgttagcattaccggcgcggaccagcgccaggatcaagcgttagcgaaagtcacgcgtaacaaccagctggtaacgttaaccgcctcccgcgatttacgcttcctgttacaagaagtcctggaaaaacagatgacggcgcggggctatatgatcgggcctaacggcgcggttaatctgcagattattgttaaccaactgtatgctgatgtttcccagggcagcgtgcgctacaacatcgcgaccaaagcggatatcgcgattattgcgaccgcggcaaatggcagcaagatgaccaaaaactatcgcgccaactactctattgaaggggcgttccaggcctctaaccagaatattgccgacgcagtgaatagcgttctgaccgataccattgctgatatgtctcaggacaccagtattcacgattttatcaagcaaaacgcccgttaa

SEQ ID NO: 371765 - DNA, 1482 bp, Salmonella enterica
atgcctatgtcaagtcaatatttacgtattttccagcaaccgcgctcagccattctgctgatattgggttttgcctccggtctcccgctggcgctcacttccggtacgctacaggcgtggatgaccgtcgagaatatcgatcttaaaacgattggcttcttctcgctggttggtcaggcctatgtgtttaagtttctctggtccccgctgatggaccgctacacgccgccttttttaggtcgtcgtcgcggttggttactcgccacccaactgttgttactggcggcgattgcggcgatgggctttcttgaacccggcacgcagctacgctggatggcggcgctggcggtggtgattgctttttgctccgcctcgcaggatatcgtgttcgacgcctggaaaaccgatgttttacccgcagaagaacgcggcgctggcgcggcaatcagcgtgcttggctaccggttgggaatgctggtttccggcggactggcgctatggctggccgatcgctggctcggctggcagggcatgtactggctgatggcggcattgctgatcccctgcattatcgccaccttactggcgccggaaccgaccgatactatcccgtccccgaaatcgctggaacaggccgtcgtcgcgccgctacgcgatttctttggccgtaataacgcctggctgattttactgctcattgtgctttataaactgggtgatgccttcgctatgagcctgaccaccacctttttgattcgcggcgtcggctttgacgccggcgaagtcggcgtggtcaataaaacgctgggcctgctggcgacgatcgtcggcgcgttatacggcggcatattaatgcagcgtctttcgctgtttcgcgcgctgctgattttcggcattttgcaaggcgcgtccaacgccggttactggttgctctccattaccgataaaaacatgttcagcatgggcgcggcggtctttttcgaaaatctgtgcggcgggatgggtactgccgcctttgtcgccttattaatgacgctatgtaataagtcgttttccgcaacacagtttgccctactgtcggccctctccgcagtaggccgcgtttatgttggtcctgtagcgggctggttcgttgaagcgcacggctggccgacattctacctcttctcggttgttgccgccgttcccgggctgttactgttgctggtctgtcggcaaacgctggaatatagctggcagaacgagcgtttcattccccgcacgcaataccgtggcgcctacaatttcgcgctttcaatcctgctcgcgggcgtcgctttgctggcggtatgggtactcctgctgaccatgaacgcgttggattacactaacttctcattcctgtccggattgcttgagactgcggtagcggttgccgtgtgcggcattgtctttggcgggttgctggactacctggcactacgaaaaacacgcctgctctaa

SEQ ID NO: 371766 - DNA, 237 bp, Salmonella enterica
atgagactcaggaaatacaataaaagtttgggatggttgtcattaattgcaggcactgcattactcagtggctgtaattctgcgctgctggatcccaaaggacagattggactggagcaacgttcgctgatactgacggcatttggcctgatgttgatcgtcgttattcccgccatcttgatggctgttggtttcgcctggaagtatcgtgcgagtaataaggatgcgaagtactga

SEQ ID NO: 371767 - DNA, 1299 bp, Salmonella enterica
atgaaatttactctcgttgcgacggttctactgacgttttccctttcagcttttgccgttgagtatccggtattgaccatcgcgagccctgatcaggtggggtttgatagccaaaaacttcaccgacttgatggctggattcaaaatcaaattgatgccggatatcccagcatcaatcttctggtgataaaagataatcatattgttctacaaaaagcctggggctatgccaaaaaatatgacggttccacgctgttagcccatcccattcgggcgaccactaacacgatgtatgatctggcttcaaacacaaaaatgtatgccactaatttcgcattgcaaaaactagtgtatgaaggaaaaatagatgtcaatgatttggtatcaaaatatatccccggctttaaggatatgcctggggataaaataaaaggcaaagataaactccgcattattgatattcttcatcacgtcgcgggctttcctgccgacccacaatatcccaataaaaacgtcgccggtaaattattttcacagagtaaaagcactactctggagatgattaaaaagacaccgctggaatatcaacctgggtcgaagcatatctacagcgacgtggattatatgattcttggttttatcattgaatcgataacggcaatgccattagatcgctacgtcgaaaccaccatttataaaccgctcggattaaaacataccgtctttaacccgctgatgaaaggcttcacgccgccgcaaatcgccgcaacggaactacacggcaatacgcgtgacggcgtgattcatttccccaatattcgcaccaatacactatggggccaggtgcatgacgaaaaagcctggtactcaatgggcggcgtttcaggacacgccggactgttttctgacacccatgatatggctgtgttaatgcaagtcatgctcaatgggggcggctacggtaacctgaagctattcgacgacaaaacggttgcgcagtttactcgccactcgccagaagatgctacctttggtctggggtggcgcgttaacggcaacgcctcaatgaccccaacgttcggggtattagccagtccgcaaacgtatggacataccggatggaccggaacgctgacgtctatcgatccggttaatcatatggcgattgttattttaggtaacaggccgcactcgccggtagcaaatcctaaagtgaacccgaatgtttttgtcagtggattattacctgcggcgacgtatggctggattgttgaccagatatatggttccttaaaataa

SEQ ID NO: 371768 - DNA, 576 bp, Salmonella enterica
atgtcgcaaaccattacgcttattaaggataaaattctttctgataattattttactctgcgcaacattacctatgacctgacccgtcgtaatggcgaggttatccgtcacaagcgtgaggtttacgatcgcgggaatggcgcaaccattctgctttacaactcaactaaaaaaaccgtggttctggttcgccagtttcgcgtggcgacatgggtcaatggtaatcaagacggtatgttaattgaaacctgcgctggcctgcttgataacgacgagccggaggtctgtatccgtaaagaggccattgaagagacagggtatgacgttggtgaggtacgcaagatatttgagctgtatatgtcgccaggcggcgtcacggagctgattcatttcttcattgccgaatatcatgatagcgagcgtgccagcatcggcggcggcgtggaggacgaagagattgaggtgcttgaactgccgttttcccgggcgctggaaatggtgcgctcaggcgagattcgggacggtaagaccgtgttattgcttaactatttacagacgtctcatctaatggactga

SEQ ID NO: 371769 - DNA, 1044 bp, Salmonella enterica
atgcgctaccgcgttattcttttttgtctgtttggcctgttgccggtccagctactgtgggctgcgccagcgcaacggactttttccgactggcaggtcacctgcaataaccaaaatttttgcgtagcgcgcaatactggcgaacatcatgggctggtgatgacattaagccgcagcgccggggcgcgtaccgatgcggtactgcgtatcgatcgtggcggtttggcgccgcccgacgctaaagaagccgcaattgcgcctcgcttattgctggatggcaaaccgctttcgttcaacagtccacactggcgcgtgtcgccctggcatctcatgaccggcgatcctgccaccatcaccgcatttttacagacgattcaggatgcgcaggccatcaccttaaaaaacggcgttcagacgctttcgctggcgggattaaaagcggcattactgtttatcgacgcgcaacaaaaacgtgtgggcagcgaaaccgcctggattgaaaaaggaaacgaaccgcctctcagcgtgcccccggcaccggcattaaaggggatcgccgtgattaatccaacgcccgtaccgctgagtgaggaagaacgcgacgatctgctggactacgcagcatggcgggtaaacggcattcgttgttcgcttgacccgctgcgtcgcgagacgcaggtcagcgcgttgacggatgataaagcgttattgattgttaactgcgaagccggcgcctataacactattgatctcgcctgggtagtttcacgcaaaaaaacgctcgtctcgcgcgccgtacgtttgcggctgccgtttaatcgcggcgtcgaaagtaatgacatggagttgatgaacgccttctttgacgagaaaacgcgtgaactggtgacgttggcgaaagggcgggggttaaccgactgcggtatccagacgcgctggcgttatgatggcgatcgttttcgtctggtgcgttatgccgaagaaccgagctgcgatagctggcacgggccggatgcctggcctacgctgtggatcacgcgttga

SEQ ID NO: 371770 - DNA, 231 bp, Salmonella enterica
atgaaaataaataatggccccgtattatgcccccattgtggctgcctgagcgcttattatgaaatagatcggctggcggcgataagagaaaaagtgaataaagaaggtggatcagcggcgtgggattcaacattgcaggcgcataaaaaaaaggccttttgcctgatgtgccataaatccattgatgaggtcgtcatcgggcagtcagatgcgcctgagtctacgaagtaa

SEQ ID NO: 371771 - DNA, 2001 bp, Salmonella enterica
atgtcccgtaaagaccttgccaatgcgattcgtgcgctgagcatggatgccgttcaaaaagccaattccgggcaccccggcgcgccgatggggatggcggatatcgctgaagtgctatggaacgattttcttaaacataaccccaccgatccaacctggtatgaccgtgaccgttttatcctttccaacggtcacgcctccatgctgctctatagtctgctgcatttaaccggttatgacctgccgctggaggagttaaaaaacttccgtcaactgcactctaaaacgccaggtcacccggagattggctatacgcccggcgttgaaaccaccaccggaccgctgggccaggggctggcgaatgccgtcgggctggcgattgccgagcgtacgttaggcgcacagttcaaccggccggaccatgagattgtcgaccactacacctatgtctttatgggcgacggctgtctgatggaggggatctcgcatgaggtgtgttcgctggctggtacgctgggactgggcaaactgatcggcttttacgatcacaacggcatctccattgatggcgaaaccgaaggctggtttaccgacgataccgccaaacgttttgaagcctaccactggcatgtcgtatatgacattgacgggcacgatccggaggcggtgaaaaaagccattctcgaagcccagagcgtaaaagataaaccttcgctaattatctgtcggacggtgataggttttggctcgccgaataaagccgggaaggaggagtcgcacggcgcggcgctgggcgaagaagaggtggcgctgactcgccagaagctgggatggcatcatccggcgtttgagatcccaaaagaaatttaccgcgcgtgggatggccgtgaaaaaggcgagaaagcgcagcagcagtggcaggaaaagtttgctgcttatgagaaggcttatcctgagctggccgcggagtttacccgccggatgagcggcggactgccggaggcatgggaatccgccacgcaaaaatttattaacgacttgcaggctaatccggccaaaatcgccacccgtaaagcatcgcaaaatacgctcaatgcctacggtcccctgttgccggaactgttgggcggatcggcggatctggcgccgagcaacctgactatctggaaaggttcgacctcgttgaaagaggatccggcaggtaattatattcactatggcgtgcgcgaattcggcatgaccgccattgccaacggcatcgcccatcacggcggctttgtaccgtataccgccacgtttctgatgtttgtcgaatatgcgcgtaacgcggcgcgtatggcggccttaatgaaagcccggcagattatggtctatacccacgactccatcggtttaggcgaagatggcccgacgcaccaggccgtggaacaactggcgagcctgcgcttaacgccaaacttcagcacctggcgtccctgcgatcaggttgaggcggcggtcggctggaagctggccattgaacgtcagcacgggccgacggcgttgattctctcgcggcaaaatctggcgcaggtggaacgcacgccggaacaggtgaaagcgattgcccgcggcggttatattctgaaagatagcggcggcaagccggatatcattctgatcgctaccggatcggaaatggaaattaccctccaggcggcggaaaaattgactggcgaggggcataacgttcgcgtggtgtcgttgccttcaacggatattttcgatgcgcaggacgaggcatatcgcgaatctgtgctaccggcgcacgtgaccgcccgcgtcgcggtggaagccggtatagccgactactggtataaatatgttggcctaaaaggcgcaattatcggcatgacgggatacggtgaatccgccccggctgacaaactgttcccgtattttggctttaccgtggaaaatattgtagaaaaagcccgccgggtgctgaacatcaaaggctaa

SEQ ID NO: 371772 - DNA, 951 bp, Salmonella enterica
atgaaccagctagacggcatcaaacaattcactaccgtcgtcgccgatagcggcgacatcgagtccatccgccactaccagccgcaggatgccacgacaaatccctctttactgttaaaagccgccgggcttgagcagtatggtcatttgattgaggatgcgattgcctgggggaaaaaacacggcggtacgcaggaacagcaggttgcggcagccagcgataaactggcggttaattttggcgcggaaatactgaaaagtattcccggtcgcgtctccactgaagtcgacgcgcggttatcgttcgataaagaaaaaagtatcgagaaagcgcgccatctggtggatctctaccagcagcagggtgttgataaatcacgcattctgatcaagctcgccgcgacctgggaaggtatccgcgccgccgggcagctcgaaaaagagggtattaattgcaacctgacgttgttgttctcttttgcccaggcgcgcgcctgcgccgaagcgggcgtctatttgatctctccgttcgtgggccgaatttacgactggtatcaggcgcgtagtccgctggagccgtatgtcgtggaggaagatcccggcgtgaaatcggtacgcaatatctacgattactttaaacagcatcgctatgaaaccatcgtgatgggggcaagtttccgccgtactgagcaaatcctcgcgctaaccggctgcgatcgactgactatctcccctaacctgcttaaagagctgaaagaaaaagaagaaccggtgatccgtaaactggtgccttcctcgcagatgttccaccgtcctacgccaatgacggaagcggagttccgctgggaacataatcaggacgcgatggccgtagagaagctgtcggaaggtatccgtctttttgccattgaccagcgcaaactggaagacctgcttgccgccaaactataa

SEQ ID NO: 371773 - DNA, 2280 bp, Salmonella enterica
atggatgagcagttaaaacaaagcgcccttgatttccacgaatttccggtacccggtaaaattcaggtttctccgactaagccccttgccacccaacgcgatctggcgttggcttactcgccaggcgtggcggcgccctgcctggaaatcgaaaaagatccgctggcagcctacaaatacaccgcgcgcggcaaccttgtcgcggtcatttccaacggtacagcggtgctggggttaggcaacattggcgcgctggccggcaagccggtcatggaaggcaaaggcgttctgtttaaaaaattcgccggcattgatgtgtttgacattgaagtcgatgagcttgacccggacaaatttatcaatgtggtcgcagcgctggagccgacttttggcggcattaacctcgaagacattaaagcgccggaatgtttctatattgaacagaaactgcgcgagcgcatgaacatcccggttttccatgacgatcagcacggaacggcgatcattagtacggccgccattcttaatggtctgcgagtcgtagagaaaaatatttccgacgtacggatggtcgtctccggcgcaggggcggcggcaatcgcttgtatgaacctgctggtcgcgttggggatgcaaaagcacaacatcgtggtgtgcgactctaagggcgttatttacaaaggccgtgagccgaatatggcggagaccaaagcggcctatgcggtagacgacagcggcaagcgcacgctggatgaggtcattgacggcgcggatattttcctcggctgttcaggcccgaaagtgctgactcaggagatggtgaagaaaatggcccgcgcgccaatgattctggcgctggctaacccggaaccggaaattctgccgccgctggcgaaagaagtgcgtccggacgccatcatctgtaccggtcgttccgactatccgaaccaggtgaacaacgtattgtgcttcccgtttatcttccgcggcgcactggacgtcggcgcgacggcgatcaacgaagagatgaaactggcggcggtccgtgcgattgccgagctggcgcacgccgaacagagcgaagtggtggcctcggcctatggcgatcaggacctgagctttgggccggaatacattattccgaaaccgtttgacccgcgtctgattgtcaaaatcgctccggcggtcgcgaaagcggcaatggattccggcgtggcgacgcgcccgattgctgactttgatgcctatatcgataaactgaccgagtttgtctacaaaaccaacctgttcatgaagccgatcttctcgcaggcacgcaaagatccgaagcgcgtagtgctgccggaaggggaagaggcgcgcgtgctgcacgcaacccaggagttgataaccctgggactggcgaagcccatcctgatcggacgtccgagcgtgatcgaaatgcgtatccagaaactggggctacagatcaaagcgggcgttgatttcgagatcgtgaataatgaatccgatccgcgcttcaaagagtactggagcgagtattaccagatcatgaagcgtcgcggggtaactcaggaacaggcgcagcgtgcgatgatcggcaaccatacggccattggcgcgatcatggtgcagcgtggggaagcggatgcgatgatctgcggcaccatcggcgactaccatgagcatttcagcgtcgtgaaagccgtctttggctaccgtgacggcgtgcatacggcaggggcgatgaacgccttactgctgccaagcggcaacacttttatcgccgatacttatgttaacgaagatcccacgccggaacagttggcggagatcgccgtaatggcggcggaaaccgttcgccgctttggtattgagccgaaagtcgcgctgttgtcgcactctaactttggttcctcaaattcgctgtccgccagcaaaatgcgcgaaacccttgagcgggtacgcgaacgagcgcccgatctgatgattgacggtgagatgcacggtgatgcggcgttggtggaaagtattcgtaatgaccggatgccggatagcccgctgaagggagccgccaatattctggtgatgccgaatatggaagccgcccgcattagttacaacttactacgcgtctccagttccgaaggcgtcacggtcggcccggtcctgatgggcgtgtctaaaccggtacatgtattaacgccgatcgcctctgtacgccgtatcgtgaatatggtggcgttagcggtagttgaagcgcaaaccacgccgctttaa

SEQ ID NO: 371774 - DNA, 336 bp, Salmonella enterica
atgaataaagaacgcattattcaggaatttgtgccgggcaaacaggtcactctggcgcatctcattgcgcaccctggtgaagaactggcgaaaaagatcggcgttcccgatgctggcgcgattggcattatgaccttaacgccgggggaaacggcgatgatcgctggcgatttagcgatgaaggctgcggatgtacacatcggttttctcgacagatttagcggcgcgctggtgatttatggcaccgtcggcgcagtagaagaagcgctattacagacggtcagcgggctggggcgattattaaactttaccctgtgtgagttaacaaaaagttaa

SEQ ID NO: 371775 - DNA, 480 bp, Salmonella enterica
atgaaacgtattgcttttgtcggcgcggtcggtgccggaaaaacaacgctttttaacgcgttacggggaaattattccctcgccagaaaaacgcaggccgtggaatttaatgatcatggcgatatcgatacgccgggtgaatattttagccatccccgttggtatcacgccttaattaccacgttgcaggatgtggacacgctgatttatgtccacgcggcaaacgataaagaaagtcgcttacctgccgggttattggatgttggaacccgtaaacgacatatcgccgttatcagcaaaacggacatgccggatgccgacgtcgccgctacgcggcagttgctttgcgagattggattccgggagccgattttcgagctcaacggccacgacccgcaaagcgtgcggcagttggtggattatctggcggctctcagtgaacaggaggaagaggcaggtgaaaaaacttatcacagctaa

SEQ ID NO: 371776 - DNA, 690 bp, Salmonella enterica
gtgaaaaaacttatcacagctaacgatattcgtgcggcccacgcccgcggcgaacaggcgatgtcggtagtgctgcgcgccagcattattaccccggaggctcgcgaagtggcggaactactgggcttcacgattaccgaatgcgacgagtccgttccggcatccacatcggcgcaggcgtgtaaaaacgaaagccagcgcattcgggaagccatcatcgcgcagctcccggaagggcagtttactgaaagcctggtggcgcagttgatggaaaaagtgctgaaggaaaagcagtcgttggaactggggacgatgcagccgagctttacctccgtcacgggtaaaggcggcgtgaaagtcattgacggcagcagcgtgaaatttggccgcttcgacggcgccgaaccgcactgcgtcggcttaaccgatctggttacagagcaggacggcagcagcatggccgccgggtttatgcagtgggacaacgccttttttccgtggacgctgaactacgacgaaatcgacatggtgctggagggcgaactgcacgtacgccatgaaggcgaaaccatgattgccaaagccggagatgtcatgttcatccctaaaggctccagcattgaatttggcacgccaacgtccgtgcgctttctgtacgtcgcctggcctgcgaactggcaatccgtatga

SEQ ID NO: 371777 - DNA, 804 bp, Salmonella enterica
atgaacgatttcatcaccgaaacgtggctcagagcgaatcatacgctcagcgaaggatcggagatccatctgcccgctgatgcacgactgacgccctcggcccgggaactgctggaaagtcgccgcctgcgcattaagtttctggatccgcaaggcaggctgtttgtcgatgatgacgaacagcagccgcagccggtacatggcttaaccagtagcgatacgcacccacaggcctgctgtgaactgtgccgccagccggtggtgaaaaagcccgatacgctgacccatctgacggcggacaaaatggtcgccaaaagcgacccgcgcctcggctttcgcgccgcgctcgacagcgccatcgcgctgaccgtgtggctacaaatcgaactggcggaaccctggcagccgtggcttttcgatatccgctcgcggctgggcaacattatgcgcgccgacgctatagatgaaccgctggcggcgcaggcgatcgtcgggctcaacgaggatgagctgcatcggctttcccaccagccgctgcgctacctcgaccacgatcacctggtgccggaggccagccacggtcgcgatgcggcgctgcttaatctgctgcgaaccaaagtccgcgaaacggaaaccctcgccgcacaagtgtttattacccgtagttttgaggtcttgcgcccggacattttacaggcgctgaaccgtctctccagcacggtttacgtgatgatgattttgagcgtggcgaaacatccgctgacggtcgcccaaattcaacaacggttgggagagaagccatga

SEQ ID NO: 371778 - DNA, 1017 bp, Salmonella enterica
atgatcattgaacgcgcccgcgaactggcggtacgcgcccccgccagagtcgtctttcctgatgcgctggacgaacgcgtgctgaaagcggcgcattacctgcaacagtacggtctggctcgccccgttctggtcgccagcccgtttgcgctgcgtcagtttgccctgagtcatcgtatgccgatggatggcattcaggtcatcgacccacacagcaacctgagtatgcgccagcgttttgcgcaacgctggcttgcccgcgccggagaaaaaatgccgccggacgcagtggaaaagcttagcgacccgctgatgttcgctgccgccatggtgagcgccggtgaggctgatgtgtgtatcgcaggcaacctgtcgtcaacggcgaatgtgctgcgcgcagggctgcgggtgattggcctgcaacctgggtgcaaaacattgtcgtctattttcctgatgctgccgcagtatgccggtccggcattagggttcgccgattgcagcgtagtaccgcagccgacggcggcgcagctggcggatatcgctatcgccagcgccgacacctggcgggccattaccggcgaagagccgcgcgtggcgatgctgtcattttcaagcaacggcagcgcccgtcaccccaatgtcgccaacgtgcagcaggcgacagagctcgttcgcgaacgtgcgccgcaactgcttgtggacggtgaattgcagtttgacgccgctttcgtcccggaggtcgccgcgcaaaaagcgcctgacagcccgctgcaaggccgcgccaacgtgatgattttcccgtcgctggaggcgggcaatattggctacaaaatcgctcagcgtctgggaggctatcgcgctgttgggccgctaattcaggggcttgccgcgccgcttcacgacctctcccgaggctgtagcgtgcaggaaattatcgaactggcgttggtggcagccgtgccgcgccaggctgacgtgagccgcgaacgcagcttacacacactggttgaatga

SEQ ID NO: 371779 - DNA, 291 bp, Salmonella enterica
atggaagcattaggaatgattgaaacccggggcctggttgcgctgattgaggcctccgatgcgatggtaaaagccgcgcgcgtgaagctggtcggcgtgaagcagattggcggtggcctgtgtacggccatggtgcgtggcgacgtggcggcgtgcaaagccgcaaccgatgctggcgccgctgcggcgcagcgcattggcgagctggtctccgtacacgtgattccacgcccgcacggcgatctggaagaagtgttcccgatcagcttcaaaggcgacagcaacatttga

SEQ ID NO: 371780 - DNA, 288 bp, Salmonella enterica
atgaaactggcagtcgtcacaggacaaatcgtatgtaccgtccgccatcagggactggcgcatgacaaattgctgatggtggaaatgatcgatgcccagggcaaccccgacgggcagtgtgccgtcgctatcgacagtatcggggcgggaaccggagagtgggtactgctggtcagcggcagttccgcgcgccaggcgcatcgcagcgaattatcaccggtcgatctgtgcgtcattggcatcgtcgatgaagtggtggctggcgggaaagtggttttccataaatag

SEQ ID NO: 371781 - DNA, 1404 bp, Salmonella enterica
atgaatcaacaggatattgaacaggtggtgaaagcggtgctgctgaaaatgaaagacagcagccagccggccagtactgttcatgagatgggcgtttttgcctccctggatgacgcagtggcggcagcaaaacgggcccagcaggggctgaagagcgtggcgatgcgccagcttgccattcatgccattcgcgaagcgggcgaaaaacacgcccgagaattagcggaacttgccgtcagcgaaaccggcatgggacgcgttgacgataaatttgccaaaaacgtggcgcaggcgcgcggcacgccgggcgtcgagtgtttatctccgcaggtgctgaccggcgataacggcctgacgctgattgaaaatgcgccgtggggcgtggtggcctcggtcacgccgtccaccaatccggcggcgacggtgattaataacgccatcagcctgattgccgcaggcaacagcgtcgtgtttgccccgcatccggcggcgaaaaaggtctctcagcgggcaatcactctcctcaatcaggcggtggtcgccgccggtggcccggaaaatttgctggtcaccgtggcgaacccggatatcgaaaccgcccagcggttgttcaaatatcccggtattggcctgctggtggtgactggcggcgaagcggtggtggacgcggcgcgcaaacatactaataaacgcctgattgccgccggtgccggcaatcccccggtggtggtggatgagaccgccgacctgccgcgcgccgcacaatccatcgtcaaaggcgcatcgtttgataacaacatcatctgcgccgacgaaaaagtgctgattgtggtggatagtgtcgccgacgagctgatgcgtctgatggaaggtcagcacgcggtgaaactgaccgccgctcaggccgaacagctccagccggtgctgctgaagaatatcgatgaacgcggcaaaggtaccgtcagccgtgactgggtcggtcgtgacgcgggcaagattgccgcagccatcggcctgaacgtcccggatcaaacgcgcctgctgtttgtggaaacgccagctaaccatccgtttgccgtcactgaaatgatgatgccggtactgccggtggtgcgggtcgccaacgtcgaagaagccatcgccctggcggttcagcttgaaggcggttgccaccatacggcggcgatgcactcgcgcaatatcgacaacatgaaccagatggcgaacgccatcgacaccagcattttcgtcaaaaacgggccgtgcattgccgggcttggattgggcggagaaggctggaccaccatgactatcactacgccaaccggcgaaggcgtgaccagcgcacgtacctttgtgcggctgcgtcgatgcgtgctggtggatgcgtttcgcattgtataa

SEQ ID NO: 371782 - DNA, 840 bp, Salmonella enterica
atggcgcacgacgaacaactctggctcaccccaagactgcaaaaagcggcggccctgtgtaaccagacgcccgccgccagcgacgcgccgctgtggctgggcgtcgatttgggcacctgcgacgtggtgtcgatggtggtcgacggcaacgcccagccggtggcggtgtgccttgactgggccgacgttgtgcgtgacggcatcgtctgggatttcttcggtgccgtcaccctcgtgcgccgccatctcgacacccttgaacagcagctcggctgccgcttcacccacgcggcgacctcgttcccaccgggtactgacccgcgtatttcgatcaacgtgctggagtctgctgggttagaagtcagccacgtactggatgaaccgacggcggtggcggatctgctggcgcttgataatgcaggcgtggtggatattggcggcggcactaccggcattgccatcgtcaaacagggcaaggtgacttactccgccgatgaagccactggcgggcaccatatctccctgacgctggcgggcaaccgacgtattcccctggaagaggcggaacagtacaagcgcagcaacgcgcaggagatttggccggtagtgaagccggtgtacgaaaagatggcggaaatcgtcgcttgccatattgccgggcagggagtgacagatttatggctggcgggcggttcctgtatgcagccgggcgtggaggcgttatttcgccagcgtttcccggagttacaggtgcatttaccgcagcacagcctgtttatgaccccgctggcgatagccaacagcgggagagcgaaagcggagggactctatgcaagctga

SEQ ID NO: 371783 - DNA, 1188 bp, Salmonella enterica
atgcaagctgaactacagacggcgctgtttcaggcattcgacaccctgaatctgcaacgggtgaaaacgttcagcgtaccgccggtcacgctgtgcggacttggggcgctcggcgcctgcggccaggaagcgcaagcgcgaggcgtaagccatctgtttgtgatggtcgacagcttcctgcatcaggcgggaatgaccgcgccgctggcacgcagcctggcgatgaaaggcgtggcgatgacagtctggccgtgtccgccaggcgagccgtgcatcaccgacgtttgcgcggcggtggcgcaactgcgtgaggcggcgtgcgacggcgtagtggcctttggcggcggttcggtgctggacgcggcgaaagcggtcgccctgctggtgactaaccctgaccagacgctgagcgccatgaccgagcgcagtacattacgcccgcgtctgccgctgattgcggtgccgaccaccgccggaaccggttctgaaaccaccaacgtgacggtgattatcgacgcggtcagcgggcgcaagcaggtgctggcacacgcgtcactaatgccggacgtggcgattcttgatgctgccgtgaccgaaggcgttccgccaaacgtgacggcgatgaccggtatcgatgcgttgacgcatgcgattgaggcctacagcgcgctcagcgccacgccgtttaccgacagcctggcgattggcgcgatagcgatgattggcaaatcgctgccgaaagccgtgggttacggccacgatctggcggcgcgtgaaaatatgttgttggcctcctgtatggcgggaatggccttttccagcgccggtctggggctgtgtcacgcgatggcgcaccagccaggggcggcgctgcatattccgcacggccaggccaacgccatgctgctaccgacggtcatgggctttaaccggatggtttgccgcgaacgcttcagtcaaatcggtcgggcgttaaccaataagaaatcggacgatcgcgatgcgattgcggcggtgagcgagctgattgccgaagtgggccagagcaaacggctggctgacgctggcgccaaacccgaacactacagcgcgtgggcgcaagccgcgctggaggatatttgtctgcgcagtaacccacgcaccgccacacaggcacagattatcgacctgtacgcggctgccgggtaa

SEQ ID NO: 371784 - DNA, 1227 bp, Salmonella enterica
atgggaattaacgaaatcatcatgtacatcatgatgttctttatgctgattgccgccgtggacaggatcctgtcgcagttcggcgggtcggcgcgcttcctcggtaaatttggcaagagtatcgagggggctggcggccagtttgaagagggctttatggcgatgggcgcgctgggactggcgatggtcggtatgaccgcgctggcgccggtgctggcgcatgtactggggccggttattatcccggtatacgaaatgctgggcgcgaacccatccatgttcgcgggtacgctgctggcctgtgatatgggcggattcttcctcgccaaagagctggccggcggtgatgtcgcggcgtggctatactcagggttaatacttgggtcgatgatggggccgaccattgtgttctccattccggtggcgctcggcattatcgaaccgtctgaccgccgctacctggcgcttggcgtactggcgggtatcgtcaccattcccattggctgcattgcggggggattgatcgccatgtactcaggcgtgcagatcaatggtcagccagtggagtttaccttcgcgctgatcctgatgaacatgatcccggtattgattgtcgcggtgctggtagcgctggggctgaagttcatcccggaaaaaatgatcaacggtttccagattttcgccaaatttctggtggcgctgatcaccatcggtctggcggctgcggtgattaaattcctgttgggctgggagttgattccggggctcgacccgatctttatggcgccaggcgacaaacctggcgaagtgatgcgcgccattgaagtgatcggctctatctcctgcgtgctgctcggcgcgtatccgatggtgctgttactgacccgctggtttgaaaaaccgttgatgaatgtcggtaagctgctgaacgtaaataatattgcggcggcaggcatggtggcgaccctggcgaacaatatcccgatgttcggcatgatgaagcagatggatacccgcggcaaagtgattaactgcgcatttgccgtctctgcggcattcgcgctgggcgaccatttaggcttcgccgctgccaacatgaacgccatgatcttcccgatgattgtcggcaagctgatcggcggcgtgacggcgattggcgtggcgatgatgctggtgccgaaagatgacgccgcccaggtgaaaaccgaagcggaggcgcaatcgtga

SEQ ID NO: 371785 - DNA, 1404 bp, Salmonella enterica
gtgaacactcgccagctactgagcgtcggtatcgatatcggcaccaccaccacgcaggtgatcttctcgcgcctggagttggttaaccgtgcggcggtgtcgcaggtgccgcgctacgaattcatcaaacgcgacattagctggcaaagcccggtcttctttacgcccgtggataagcagggcggtctgaaagaggccgaacttaaagcgctgattctggcccagtatcaggccgcaggcatcgcgcctgaatcggtggactcaggggctatcattatcaccggcgaaagcgccaaaacccgcaacgcccgtccggcggtcatgacgctctcgcagtcgctgggcgactttgtggtcgccagcgccgggccgcatctggaatcggtcattgccggttacggcgccggagcgcaaagcttgtctgagcagcggatgtgccgggtgctgaatattgatatcggcggcggcacgtctaactacgcgctgtttgacgcgggaaaagtcagcggcaccgcctgccttaacgtcggtggtcgcctgctggaaaccgatgctcaggggcgcgtggtttatgcccatcagccggggcagatgattatcgatgaggtgttcggttcgggtactgatgctcgcgccttagctgccgcacagttgggacaggtggcgcggcggatggcggatctcatcgtcgaggttatcactggcgcgctctcgccgctggcgcaatcgctgatgcaaaccgggctgctgcccgccgatattacgccagaggtgatcaccctttccggtggggtaggtgaatgctaccgcaaccaacctgccgatccgttctgcttttctgatatcgggccgctgctggcgaccgcgctgcatgagcacccgcgtctgcgcgagatgaacgtgcagtttccggcgcaaaccgtgcgcgccacggtgattggcgcgggggcccatacgctgtcgctttccggcagtactatctggctggaagacgtccaactgccgctgcgcaacctgccggtggcgatcccgcaggatgacgccgatctggtgaacgcctggcggcaggcgcttctccagcttgatctcgacccgcaaaccgacgcttacgtgctggcgcttcccgccacgcttccggtgcgttacgccgcattactcacggtcatcaacgcgctgacggcttttgtcgcgcgttatcccaatccacatcccctgctggtggtggccgagcaggattttggtaaagcgctgggcatgttattgcgcccacagttaccgcaacttccgctggcggtcatcgatgaggtggtcgtgcgggcgggagactatatcgacattggtacgcctctttttggcggatcggttgtgccggtgacggtgaaatcactcgcatttccttcctga

SEQ ID NO: 371786 - DNA, 1362 bp, Salmonella enterica
atgaaactaaagaccacattgttcggcaatgtttatcagtttaaggatgtaaaagaggtactggctaaagccaacgaactgcgttcgggggatgtgctggccggggttgccgcggcaagttcgcaggagcgcgtagcggcaaaacaggtactgtcggaaatgacggtggcggatatccgcaacaatccggtgattgcctatgaagaggactgcgtgacgcgcctgattcaggatgacgtcaacgaaacggcctataaccggattaaaaactggagcatcagcgaactgcgcgaatacgtactgagcgatgaaacctccgtggacgacatcgcgtttacccgcaaagggctgacctccgaagtggtggcggcagtagcgaaaatctgctccaacgctgacctgatctacggcggcaagaaaatgccggtgatcaaaaaagccaataccaccatcggtattccgggcacctttagctgccgtttgcagccgaacgatacccgtgacgatgtacagagtatcgccgcgcaaatctacgaagggctttctttcggcgcaggcgatgcggtgatcggcgttaacccggtgaccgatgacgtggagaacctgacccgcgtgctcgacaccgtttacggcgttatcgataaattcaatattccgacccagggctgcgtgctggcgcatgtcaccacccagattgaagcgattcgccgcggcgcgccgggcggactgattttccagagcatttgcggcagcgagaagggcttaaaagagttcggcgtcgagctggctatgctcgatgaagcgcgggccgtgggggcggagttcaaccgcatcgccggggaaaactgcctgtactttgaaaccggacagggctcggcgctgtcggctggcgcgaactttggtgccgaccaggtgacaatggaagcgcgtaactacgggctggcgcgccactacgatccgttcctggtgaacaccgtggtgggctttatcgggccggaatatctctacaacgacaggcagattatccgcgccggtctcgaagatcactttatgggcaagctgagcggcatctcgatgggctgcgactgctgctataccaaccatgccgacgccgaccagaaccttaacgaaaacctgatgattctgctcgccactgccggctgtaactacatcatggggatgccgctcggcgacgacatcatgctcaactaccagaccaccgctttccacgataccgccaccgtccgtcagttgctgaatttacggccgtcgccggagtttgaacgctggctggaaacgatgggcattatggcaaacggtcgtctgaccaaacgggcgggcgatccgtcactgttcttctga

SEQ ID NO: 371787 - DNA, 897 bp, Salmonella enterica
atggatcaaaaacagattgaagaaattgtacgtagcgtgatggcgtcaatgggacaggacgtaccgcagcccgtcgcgccgtcaacgcaggaaggcgcaaagccgcagtgcgccgcgccgacggtgaccgaaagctgcgcgctggatttaggttccgcagaggcaaaagcctggattggcgtcgagaatccgcatcgtgcggacgtgctgaccgaactgcgtcgcagtactgcggcacgcgtctgtacggggcgtgccgggccgcgtccgcgcacccaggcgctgttgcgcttcctggcggatcactcccgttcgaaagataccgtgctcaaagaagtgccggaagagtgggtaaaagcgcaagggctgctggaagtgcgttcggagatcagcgacaaaaacctgtacctgacgcgcccggatatggggcgtcgtctgagcccggaagccattgacgcgctgaagtcgcagtgcgtgatgaacccggatgtgcaggtagtggtctccgatggcctctctacggatgcgatcaccgccaactatgaagagatcctgccgccgctgcttgctggtctgaagcaggccgggctgaacgtcggcacgccgttctttgtgcgctatggccgtgtgaagattgaagatcagattggcgaaattctcggcgcgaaggtcgtcatcctgctggtgggcgaacgtccggggctggggcagtcggaaagcctctcctgctacgcggtctattccccgcgcgtggcgaccaccgtcgaggccgacagaacctgtatttcaaacattcatcagggggggacgccgccagtagaagccgccgccgtgattgtggatttggccaaacggatgctggagcagaaagcgtccggcatcaacatgacccgttaa

SEQ ID NO: 371788 - DNA, 660 bp, Salmonella enterica
atgcctgcattagatttgattcgaccttcagtgactgccatgcgcgtgattgcctccgtgaatgacggctttgcgcgggaacttaaattaccgccacatatacgtagcctcggactcatcacggcagattctgatgatgtgacctatattgccgctgacgaagcgaccaaacaggcgatggtggaagtagtctatggccgctccctctatgccggggcggctcacgggccgtcgcctaccgctggtgaggtgttgattatgctgggcggaccgaacccggcggaagtgcgcgccggtctggatgcaatggtcgccagcattgaaaacggcgcggcgttccagtgggcgaacgatgcggaaaataccgcattcctggcgcatgtggtttcgcgtaccggctcgtacctctcgtctaccgcaggtatcgcgctgggcgatccgatggcctatctggtggcgccgccgctggaagcgacattcggcattgacgcggcgatgaaatccgctgacgttcaactggtgacttacgtgccgccgccgtcggaaaccaactattcggccgcgttcttaacgggaagccaggccgcgtgtaaagccgcctgcaacgcctttaccgacgccgtgctggatattgcccgtaaccctgtccagcgtgcgtaa

SEQ ID NO: 371789 - DNA, 495 bp, Salmonella enterica
atgatcaatgccctgggattactggaagtggacggaatggtcgccgccgtcgatgcggcggatgccatgctgaaagcggccaacgtgcgtttgctcagtcatcaagtgctcgaccctggcaggctcacgctggtggtggagggcgatctggcggcgtgtcgtgcggcgctggatgccggaagcgccgccgcgcagcgcacaggccgtgtgattagtcgcaaagaaattggtcgtccggaagaggacacccagtggctgattggcgggtttgcgcgtgcgacaacgccgactgagaaagcgccccaggcacccgcaacgcctgagttcgctgaggcgttactggcgctgctggcatcagtacgccagggaatgacggcgggagaggttgccgcgcattttggctggccgctggagcaggccagaaacgtgctggaacaactcttttctgacggagcgttgcgtaaacgcagtagtcgctatcgcatcaaaaattaa

SEQ ID NO: 371790 - DNA, 1053 bp, Salmonella enterica
atgaaaaagacccgtacagcgaatttgcaccatctttatcatgaagcgttacccgaagacgttaaacttacgcccagagtcgaggtggacaatgttcatcagcgacggacgacggatgtctatgaacatgctctgactatcaccgcctggcagcagatctacgatcagttacacccgggtaaatttcatggcgagttcacggaaatcctgcttgatgagattcaggtgttccgtgaatacaccggcctggcgctgcgtcagtcgtgtctggtttggccaaactctttctggtttggtattccggcgacgcgcggcgaacagggatttatcggcgcgcaggggctcggcagcgccgagattgccacccgaccgggaggcaccgagtttgaactgagtacgccggatgattacaccattctgggcgtcgttatctcggaagatgttatttcccgtcaggccacgtttttgcataacccggaaagggtgctgcatatgctacgtaaccagttagcgctggaggtaaaagagcagcataaagcggcgctgtggggctttgtgcagcaggcgctggccacctttagcgagagtcctgaaaccctgcatcaacctgcggtgcgtaaggtcttgagtgataatttgttgctggcgatgggcacgatgctggaagaggcgaagccgattcatagcgccgaaagcatcagccatcagggatatcgtaggctactgtcgcgggcgcgggaatatgtgctggaaaatatgtcggagccgctgacggtgctcgacttatgtaaccagctacacgtaagccgtcgcacgctgcaaaatgcgtttcacgccattttgggcattggccccaatgcgtggctgaaacgtattcgcttaaacgcggtacgccgggaactgattagcccgtggtcgcagagcgccacggtgaaagatgccgcgatgcagtggggattctggcatttggggcaatttgccaccgattatcagcaattatttgccgaaaaaccgtcgttgacgctgcatcaacggatgcggcaatgggcttga

SEQ ID NO: 371791 - DNA, 330 bp, Salmonella enterica
atgcaaacaaatacacggaaagtagtaaccagtgacgccaaatggcatccccatctgggtataagttttattggctgcctgcttgccattacgctagaaatatattttgaagaaagaatattcatccctcatagcggaggggtgagcttcggtctgatcgtgcttctggttatcaatatggtgaccatccctgtggtcatggccctgatagcattactctgctttattattcatattccgcgtaaaagcgttaactgtatcttgctatgcctactggcatgtattttgacgatagccggtttgtttatcgcctatccggttggtcgttga

SEQ ID NO: 371792 - DNA, 900 bp, Salmonella enterica
atgaaacccgatgcacatcacgtaaaacagtttctgctacgcctgcaggatgatatttgccaaaagttatccgctgtggatggcgcaaactttgtcgaagatagctggcgacgcgaagcgggcggcggcggacgcagccgggtattacgcaacggcgggattttcgaacaggcgggcgttaatttctctcacgttcacggcgatgcaatgcccgcgtccgccaccgcgcatcggccagaactcgccgggcgtagctttgaagcgatgggcgtatcgctggtggtgcatccgcacaatccgtatattcccaccagccatgctaacgtgcgcttttttattgccgaaaaaccgggcgccgatccggtatggtggtttggcggcgggctcgatttaacgccctactacggctttgaagaggatgccgttcactggcaccgcaccgcccgcgacctgtgccagccgtttggtgacaatgtgtatccgcgttataaaaagtggtgcgatgactactttttcctcaagcatcgtaacgagcagcgcggtatcggcggcctgttttttgacgatttgaatacgccggatttcgaccactgttttgcttttatgcaggcggtcggtaacggctacaccgaggcgtatttaccgattgtcgaacgacgcaaagcgatggtctggggagagcgggagcgtaattttcaactttatcgccgcggtcgctacgtggagttcaatctggtatgggacagaggcaccctgtttggtctgcaaaccggcgggcgcactgaatctatcctgatgtcgatgccgccgctggtgcgctgggagtacgactggcagccggaagcgggtagcccggaagcggcgctgagcgagtttattcaggtacgcgactggatttaa

SEQ ID NO: 371793 - DNA, 870 bp, Salmonella enterica
atgagcacttttaaactcctaaaaactctcacatcgcgccgccaggtactcaaaacaggtctggcggccctgacgctgtcaggtatgtcgcacgcaatagccaaagaagaaacgctaaaaaccagtaatggtcacagcaaacccaaaaccaaaaaaaccggcagtaaacggctggtgatgctcgaccccggacacggcggcatcgataccggcgcgattggccgcaacggttctcaggaaaaacacgtcgtactggcaattgccaaaaacgtgcgcgctattttgcgaaatcacggaatcgatgcgcgtttaacccggacaggggatacctttattccgctgtacgatcgggtggaaatcgcccataagcacggtgcggatctgtttatgtctattcatgccgatggttttactaacccgaaagcagcgggcgcttccgtttttgcgctttccaaccgcggggccagtagcgccatggcgaagtatctctccgagcgtgaaaaccgcgcggacgaagtggcgggtaaaaaagccactgaccgggatcatctattacaacaagttttgtttgatctggtgcaaaccgatacgattaaaaacagtctgacgctgggttcgcatattctcaagaaaatcaaacctatacataaattacacagccgcactaccgaacaagcggctttcgtggtgctaaaatcaccgtcaattccgtcggtgctggtcgaaacctcgtttattaccaatccggaagaagaacgcctgctgggcacgacggcgtttcgccagaaaatcgctacggcgatcgccaacggcatcatcagttattttcactggtttgataatcagaaagcacacacgaagaaacggtaa

SEQ ID NO: 371794 - DNA, 426 bp, Salmonella enterica
atggaaatacgcgtttttcgccaggaagatttcgaagaggtgattaccctctgggagcgttgcgacctgctgcgtccatggaacgatcctgaaatggatattgaacgcaaggtgaatcacgatgtcagcttgttcctcgttgcggaagttagcggcgaagtcgtcggtacggtaatgggcggttatgacgggcatcgcggctcggcgtattacctgggcgttcacccggagttccgcgggcgcggcattgcgaatgcgttgcttaaccggctggaaaaaaaactcatcgcccgcgggtgtccgaaaatccaaattatggtgcgcgatgataacgacgttgtgctgggcatgtatgaacgtctggggtatgagcattctgacgccctaagtttgggtaaacgcctgattgaagatgaagagtactga

SEQ ID NO: 371795 - DNA, 450 bp, Salmonella enterica
atgaagagtactgagtttcatccagccgattatgatgtacacggacgtttacgcctgccgtttctgttctggtgcgtactgttacttcaggcgcgcgcctgggtactctttgtcattgccggttcatcccgtggacagggtaatactttgttaaactttttttatcccgaccatgacaatttttggctggggctgttgcccggcgttccggcggtagtggcatttttactcagcgggcggcgtgaagcggttcctggtgtgtggcgctggctgcgcggactcctgatccttgctcaactggtgtcgttgtgctggctgccggtgatgtggctgggtggcgacccggtcaacggcgtcgggctggcgctgctgctggcggacatcgtcgcgctgatctggctgttaaccaatcaacgtttgcgtgcctgtttttcccttgagaaagaataa

SEQ ID NO: 371796 - DNA, 576 bp, Salmonella enterica
atgaaatcgctgcgtttgactttactcgcactgccgctggcgctgaccggctgctcaacgctctcctcggtcaactggtctgccgcaaatccatggaactggtttggttcctcgacagaagtcactgagcaaggcgtgggagcgctgaccgccgccacgccgctggaagagccggctattgcagaggcattagatggcgattatcgcctgcgtagcggtatgaaaaccgataacggcaacgtggtgcgctttttcgaagcgatgaagggcgacagcgtcgcgatggtgatcaacggcgagcagggaaccgtgagccgtattgatgtgctggacagcgatatcccaaccgccgcggggggcaaaatcggtacgccgtttagcgacctttacagcaaagcgtttggtcactgcgagccggtttccagcgatagccataccagcgtcgagtgtaaagccgagggaagtcagcatattagctatgttttctccggcgagtggagcggaccggaaggcttaatgcctcctgatgacgtcttaaaaaactgggacgtgcgcaaaattatctggcgtcgttaa

SEQ ID NO: 371797 - DNA, 900 bp, Salmonella enterica
atgtctcaggttcaaagtggcattttgccggaacattgccgtgcggcaatttggattgaagccaatgtaaaaggcgacctggacgccctgcgcgcggccagcagaacatttgccgataaactggcgaccttcgaagtcaaatttccggacgcccatcttggggccgttgtggcgtttggcaacaatacctggcgtgccctgagtggcggcgtcggggcggaagaactgaaagattttattccttatggtaaagggctggcgccggccacgcagtatgacgtgctgatccatatcctttccctgcgccacgatgtgaatttttctgttgctcaggcggcgatggaagccttcggcgactgtatcgacgtgaaagaagaagttcacggcttccgttgggtggaagaacgcgatctgagcggctttgtcgacgggacagagaacccggcaggcgaagagacgcgtcgtgaagtggcggtgatcaaagatggcgtggatgccggcggcagttatgtgttcgtgcagcgttgggaacacaatctcaagcaacttaaccggatgagtattcacgatcaggagatgatgatcgggcgtaccaaagaagccaatgaagagattgacggcgatgcgcgtccggcaacatctcacctgagccgcgtcgatctgaaagaagatggcaaagggctgaagattgtgcgtcagagcctgccatacggcaccgccagcggtactcatggtctctatttctgcgcttactgcgcacgcctgcacaatatcgaacagcagcttctgagtatgttcggcgataccgacggtaaacgcgacgcaatgctgcgcttcaccaaaccggtgactggcggctactattttgcgccgtcgctggatcgcctgttagcgctataa

SEQ ID NO: 371798 - DNA, 792 bp, Salmonella enterica
atgggtaaactcacgggcaagacagcattgattacgggcgcatcgcagggcattggcgaagggatcgctcgcgtattcgcacgccacggcgcgaacttaatcttgctggatatctccgatgagattgaaaaactggcggatgagctgggcgggcgcgggcatcgctgtactgccgttaaggctgacgtcagagattttgcttcggtgcaggcggcggttgcgcgcgccaaagagactgaaggtagaattgatattttggtgaataacgctggcgtgtgccgtctgggcaacttcctcgatatgagtgaagaagatcgcgatttccacattgatattaatattaaaggtgtctggaacgtcaccaaagccgtcctgccggagatgattaaacgtaaagatggccgcattgtgatgatgtcttccgtcacgggagatatggtggcggacccgggtgaaacggcctatgcgctgtcaaaagccgccattgtcggtttaaccaaatcgctggcggtagagtatgcgcagtccggtattcgcgtgaatgccatttgccccggttatgtaagaacgccgatggcggaaagcattgcccgtcagtctaatcctgacgatccggagtcggtattaacggaaatggcaaaagccattccgctacgccgccttgccgatccactggaagtaggggaactggcggcatttctggcttccgatgagtccagctatcttaccggaacgcaaaacgtcattgatggcggcagtaccctgcctgaaagcgtaagcgtaggcgtctga

SEQ ID NO: 371799 - DNA, 1017 bp, Salmonella enterica
atggccgttaatttactgaaaaagagacccctgacgctggcagcaatgctgttactggcagggcaggcgcaggcaacggagctgctgaacagctcatacgatgtctcccgcgagctgtttgccgcccttaacccgccgtttgagcaacaatgggcgaaggataacggcggcgataagctgacgattaagcagtctcatgccgggtcatcaaaacaggcgctggcgattttgcagggactgaaggcagacgtcgtcacctacaatcaggtgaccgacgtacagattctccatgataaaggcaaactgatccctgccgactggcaaagccgtctgccgaacaacagttcgccattctattccacgatgggcttcctggtgcgcaaggggaacccgaaaaatattcacgactggagcgatcttgtacgttccgacgtgaagctgattttccctaacccgaaaacctccggcaacgcccgttacacgtatctggcggcatggggcgcggcggataacgcggacggcggcgataaagccaaaaccgaacagtttatgacccagttcctgaaaaacgtcgaagtgtttgataccggcggccgcggcgctacgactacctttgccgagcgtggtctgggcgatgtgctgattagttttgaatcggaagtgaacaacatccgcaaacaatatgaagcccagggatttgaagtggtgatcccgaaaacgaacattcttgctgaattcccggtcgcctgggtggataaaaacgtgcaggccaacggcacagaaaaagccgccaaagcttacctgaactggctgtatagcccgcaggcgcagaccatcattaccgatttctactaccgcgtgaataacccggaaatcatgggcaagcaagcagataaattcccgcagaccgaactgttccgcgtggaagacaagtttggttcctggccggaagtgatgaaaacgcactttgccagcggcggcgagctggacaaactattggcggcggggcgtaagtaa

SEQ ID NO: 371800 - DNA, 834 bp, Salmonella enterica
atgcttgccgtttcttcccgacgcgtgctgcccggctttacgttaagcctcggcaccagtttgctgtttgtctgcctgatcctactgttgccgttgagcgcgctggtgatgcagctctcacagatgagctgggcgcaatactgggatgtcgtgaccaacccacaggtggtggctgcctataaagtgacgctactggcggcatttgtagcgtcgatttttaacggcgtgtttggcctgctgatggcgtggattttaacccgctaccgttttccagggcgcacgttgctggatgcgctgatggatctgccgtttgcgctgccgacagcggtggcggggttaacgctggcctcgctgttctcagtgaacggtttctacggtcagtttcttgcgcagtttgatatcaaaatgacctatacctggctcggtattgcggtggcgatggcctttaccagcattccatttgtggtgcgcaccgtccagccggtactggaagagttggggccggaatatgaagaagcggcacaaacgctgggggccacccggctgcaaagttttcgcaaagtcgtgctgcctgagctgtcgcctgcgctgattgccggcgtggcgctctcttttacccgtagcctgggcgagtttggcgcggtgatttttatcgccggaaatatcgcctggaaaacagaagtgacctcgctgatgatttttgtgcgtttgcaggagtttgattaccccgccgccagcgccattgcctcggtgatccttgcggcatccttgctgctgctgttctcaattaacactctgcaaagtcgctttggtcgacgtgtggtaggtcattaa

SEQ ID NO: 371801 - DNA, 876 bp, Salmonella enterica
atggcggaagtgactcaattgaagcgatacgacgtcccccgcattaactggggaaaatggtttttgattggcgtcgggatgctggtttcggcgtttatcctgctggtgccgatgatttacatcttcgtgcaggcgttcagcaaagggttaatgccggtactgcaaaatctggccgatccggacatgctgcacgccatctggctgacggtgttgattgccttgatcgcagtgccggtgaatctggtgttcggcattctgctggcgtggctggtgacgcgctttaacttccccggacgtcagctactgctgaccctgctggatattccctttgccgtctcgccggtggtggccggtctggtttatctgctgttttatggttccaacggcccgttgggcggctggctggatgagcataatttacaaatgatgttctcctggccggggatggtactggtcactatttttgtcacttgtccgtttgtggtgcgcgaactggtgccagtaatgctcagccagggcagtcaggaagatgaggcggctattttgctgggcgcatccggctggcaaatgtttcgccgcgtgacgttgccgaatattcgctgggcgctactctacggcgtggtattaaccaacgcccgcgcgattggcgagtttggcgcggtgtcggtggtgtccggctcgattcgcggcgaaacgttatcgctaccgttacagattgaattactggagcaggactacaacaccgtcggctcctttaccgccgccgcattgttgacgctaatggcgattattaccctgtttttgaagagcatgttgcaatggcgtctggagaatcaggaaaaacgcgcgcaacaggaggaaaatcatgagcattga

SEQ ID NO: 371802 - DNA, 1098 bp, Salmonella enterica
atgagcattgagatcgccagaattaagaaatcgtttggtcgtactcaggtactaaatgatatctcgctggatattccttccggccagatggttgccttgttggggccgtcaggttccggcaaaacgacgctgctgcgcattattgccgggctggagcatcagtccagcggccatattcgtttccacggtacggacgttagccgcctgcacgcgcgtgagcgtaaagtcggttttgtgtttcagcactatgcgctgtttcgccatatgacggtgtttgacaacattgcttttggcctgacggtgctgccgcgacgcgaccgtccaactgcggcggcgattaaaacgaaagtgatgcaattactggagatggtgcaactggcgcacctcgcggatcgcttccccgcccagctttccggcggacaaaaacagcgtgtggcgctggcgcgcgcgcttgccgtagaaccgcaaattctactgctggatgaaccctttggcgcgctggatgcccaggtacgtaaagagttacgtcgctggttgcgccagctacatgaagaactgaaattcaccagcgtctttgtcacccacgatcaggaagaagcgacggaagtggcggatcgggtggtggtgatgagtcagggcaatatcgaacaggctgatgcgccggatcgggtgtggcgtgaaccggcaacccgcttcgtactggagtttatgggcgaggtgaaccgcctgacaggcaccgtccgcggcgggcagtttcacgttggcgcgcatcgctggccgctgggttatacgcccgcgtaccaggggccggtcgatctgttcctgcgtccgtgggaggtggatattagccgccgcaccagcctggattctccgctaccagtacaggtcattgaggccagcccgaaaggtcactatacacagctagtggtgcagccgctggggtggtatcacgatccgctgacggtggtgatggcgggtgaggatgttccggttcgcggcgagcgtttgtttgttggactgcaaaaagcgcgtctgtataacggcgaccagcgtattgaaacgcgtgaagaggaacttgctctggcgcaatcggcctga

SEQ ID NO: 371803 - DNA, 912 bp, Salmonella enterica
gtgaatacattagaacaaaccatcggcaatacgccgctggtcaaattacaacgtctggggccggataacggcagtgaaatctgggtcaagctggaaggcaataatccggcaggatcggtgaaagatcgcgcggcgctatcgatgattgtcgaggcggaaaagcgcggggaaattaaaccgggcgatgtcctgattgaagcgaccagcggcaacactggcattgcgctggcgatgatcgccgcgctgaaaggttatcgcatgaagctgttgatgccagacaacatgagccaggagcgtcgggcggcaatgcgggcctatggcgcggaactgattctggtcactaaagagcagggaatggaaggggcgcgcgatttagcgctcgctatgtctgagcgaggcgagggcaaactgctcgatcagtttaataatcctgataatccctacgcccactacacgaccaccggcccggaaatctggcggcaaacgtcaggtcgcatcacccattttgtctccagcatgggcacgaccggcaccattaccggcgtgtcgcgttttctgcgcgagcaggaaaaaccggtcaccatcgttggcctacagccggaagagggcagcagtattccgggcattcgccgctggcctgcggaatatatgccgggcatttttaacgcctcgctggtagatgaggtgctggatattcatcagaatgatgccgaaaacaccatgcgtgaactggccgttcgtgaaggcattttctgcggcgtgagttccggcggcgcggtagcgggcgcgttacgcgtcgcacgagccacgcccggcgcgatagtggtggcgatcatctgcgatcgcggcgaccgttacctttcgaccggcgtgtttggtgaagagcatttcagccagggggcagggatttag

SEQ ID NO: 371804 - DNA, 609 bp, Salmonella enterica
atgaaatttgctttccggacactgatttttgtcggtttgttttacgccattgcccctcttgcctatgcagaaacctcgttggatgagttacagcaacaggcagatcgaggggatatgaatgcgcagtttcaactgggccgtaaatatcatattggcgatggtgtggagcgtgatgtggagaaagccgttttttggtatcaaaaagctgcagctcaagggagcgcaaaagcgacaaataatctgggcgtgttatatgagcatggacatgttgcccccgaggatgagcaccgttcagtagagtggataatggaaaaatcatttgcctattttacggatgccgctaaaaagggtcagtgtaccgcccagcaaaatattggtgcgacttatgcttatcgacacgaatatgttcaggcgtgggcatggctcacggtagcagcgacgcgaggttctaaatggggattgatagacaggggacgttttgagaacagtatgagttccgatgaacgaaaacaggcggagaaactggcgaaggaatacctgcaaaaatacgacacgaaagaagggcggtgtaacgagcagacaattgatttgagtacttataagcgttaa

SEQ ID NO: 371805 - DNA, 366 bp, Salmonella enterica
atgaagaaaattgtctgcgccgtcgttgcgctcctgctgaccctacccgcctgggcgaagctaaacgcccacgaagaagcgcgcattaacgccatgctgaatgcgctggcgcagaaaaaggatctgaccttcgttcgtaacggtgatgcgcataactgcgaggaagccgtatcgcacctgcgcttaaaactgggtaacacgcgcaatcgtatcgacaccgccgaacagtttatcgataaagtcgcgtcgtcgtcgtccatcaccggaaagccctatatcgttaaaattcccggtaaaagcgatgaaaacgcgcagccttatttacatgcgcttattgcggaaacggataaaacggttgcgccgtaa

SEQ ID NO: 371806 - DNA, 720 bp, Salmonella enterica
gtgcgagttcattttgttgtccatgagtcgtttgaatccgctggcgcttatctgaaatgggctgaagatcgcggttataccatttcatggtcgcgcgtctatgccggagaagcgctaccgcccaatgccgatgagttcgatatgctcgtggtatttggcggtccgcagtcgccgcgcaccacccgcgaagagtgcccgtactttgactctcgcgccgaacagcacttaattaatcaggcgattacggcccggcgaatggttatcggcatttgtcttggttcgcagctcattggcgaggcgctgggcgccgcggtgtgccaaagtccggaaaaagagattggccactaccctattacgctcactgaagccggtctgcggcatccgcttatcgcccactttggctcaccgttaaccgtcggccactggcacaacgatatgccaggactcaccgatcaggcgaccgtgctggccgaaagcgaaggctgtccacgtcagatagtgcagtacggtaattttgtctacggtttccagtgccatatggaatttaccgtcgaggcggttgaaggattaatccaacattcgcagcaggagctggccgacgcgcaagggaagcgttttatccgctcggttgccgaaatgcgcgcatggaattaccagcaaatgaatgaaaagctgtggcgttttctggatgaactcacgctggcgcactcacaaaaataa

SEQ ID NO: 371807 - DNA, 1293 bp, Salmonella enterica
atgatcgacggaaaaaccgctaacgaaatttttgacagtatccgtcaacacattatcgccggcacgttacgggcggaggattcgctcccgccggtacgggagctggcaagcgaattaaaggtgaaccgcaataccgtcgcagcggcgtataaacggctgataacggcgggactggcgcaaagtttaggccgcaatgggacggtgattaaaggcagtccgtctcccgtagcgctggaaggcggcgatccgcatacgcctctgcacgacctttccggcggcaatcccgatccgcagcgtctgcctgaccttagccgttattttgcccgtctcagccgcacgccgcatctctacggcgatgcgcccgtttcccctgaactacacgcctgggcggcgcgctggctacgggatgccacccccgtcgcaggcgaaattgatatcaccagcggagctatcgacgccattgaaagactgctttgcgcgcatctgctgccgggcgacagcgtcgcggtggaagatccctgttttttaagcagtatcaatatgctgcgctatgccggttttagcgccagcccggtcagtgtggatagcgaaggaatgcagcctgaaaagctggaacaggcgctaaaccagggcgcgcgggcagtgatcttaacgccgcgcgcgcacaaccctaccggctgtagcctgagcgctcgccgtgccgctgcgctgcaaaatatactggcgcgttaccctcaggtagtggtcattatcgacgatcacttcgccctgctttcttcgtcgccctggcagccggttattgcgcagacaacgcaacactgggcggtgatacgctccgtttccaaaaccctcggccccgatttacgtcttgctattgtcgccagcgacagcgcgacctcggcaaaacttcggctgcggctaaatgccggtagtcagtgggtcagccatctgttacaggatctggtctacgcctgcctgaccgaccctgagtatcagcacaggctggcgcaaacgcggctgttttacgccacccggcaacaaaaactggcccgcgccctacagcaatatggcatcgccatttctcccggcgacggcgtgaatgcctggctcccgctggacacccatagccaggctaccgcgtttacgctggcaaaatccggctggctggtacgtgagggagaagcctttggcgtaagcgcgccgtctcacggtctacgtatcacgctgtcgacattaaatgacagcgagatcaacacgctggcggctgatatccatcaggcgctaaatcgctaa

SEQ ID NO: 371808 - DNA, 867 bp, Salmonella enterica
atgggacaagagagtgatattcagtcagtgctcttcgacgacaaccatcgggcattacagaccgatatcgtcgccgtccagtcacaggtcgtgtacggcagcgtaggcaacagtatcgctgttccggccattaaagcgcagggactacgcgtgacggcggtcccgacggtgctattcagcaatacgccgcactataaaaccttttatggcggcattattcccgccgagtggtttgcaggctaccttacggcgttgaatgagcgcgatgcgctacgtgaattaaaagcgattaccaccggttacatgggcagcgcagaccaaattgtcttgctttcgaagtggctaatggcgatccgggcttcgcatccggaggtgtgtattcttgttgatccggtcattggcgataccgacagtggaatgtatgtgcaggcggaaattccgcaggcttatcgcacgcatttgttgccgcaggcgcaggggctaacgccgaacgtatttgagctggagatgctgagtggtaaaccgtgccgcacgctggaagaggcggtggcggcggcgcaatcgctgctttccgatacgttgaaatgggtggttatcaccagcgcgccgggcgagtctctggagaccataacggttgcggtcgttactgcgcaggtcgtggaggtctttgcccatccgcgggtggcgacggagttaaaagggacgggagatctcttctgcgccgagctggtcagcggtattgtgcaggggaaaaaactgacgaccgcggcaaaagatgcggcgcagcgcgtgctggaggtgatgacctggacacagcagtgtggctgtgatgagttaattctgccgccggcaggggaggcgcgatga

SEQ ID NO: 371809 - DNA, 240 bp, Salmonella enterica
atgaagagttatcggctggtggttcgccagcagggacgtatcgtggggcattttgaaacgagcgggctggacgcgctggaagatatctgcgtggcgcgggcgatgtttggcatcactggcggctatcagtgcgagttgcaagtgtccgattccgaacgcaggatgctggagagtggcccggaggggatgaagatcctgatgcgcgagaagtgctttcgcccggtgacctcgcagttgtaa

SEQ ID NO: 371810 - DNA, 510 bp, Salmonella enterica
atgggtttgttcgataaactaaaatctctggtttctgatgataagaaagacaccggaactattgagattgttgccccgctctctggcgagatcgtcaacatcgaagacgtgccggatgtagtttttgctgaaaaaatcgttggtgatggcatcgctatcaaaccaaccggtaacaaaatggtcgcccctgttgacggtaccatcggcaaaatctttgaaaccaaccatgcgttctctatcgaatccgatagcggcattgagctgttcgttcacttcggtatcgacaccgttgagctgaaaggcgaaggcttcaagcgtattgctgaagaaggtcagcgcgtgaaagttggcgatccggtcatcgagttcgatctgccgttgctggaagaaaaagccaagtctaccctgactccggttgttatctccaacatggatgaaatcaaagaactgatcaaactgtccggtagcgtgaccgtgggtgaaactccggttatccgcattaagaagtaa

SEQ ID NO: 371811 - DNA, 1728 bp, Salmonella enterica
atgatttcaggcattttagcatccccgggtatcgctttcggcaaagcactgctgctgaaagaagacgaaatcgtcattgaccggaaaaaaatttctgccgacaaggttgatcaggaagttgaacgttttctgagcggtcgtgccaaggcatctgcgcaactggaagcgatcaagacaaaagctggtgaaacgttcggtgaagaaaaagaagccatctttgaagggcatattatgctgctcgaagatgaggagctggagcaggaaatcatagccctgattaaagataagcacatgacggctgacgcagccgcacatgaagttatcgaaggtcaggccactgccctggaagaactggatgatgaatacctgaaagagcgcgcggctgacgtacgtgatatcggtaagcgcctgctgcgcaacatcctgggtctggccattatcgatctgagcgcgattcaggaagaagttatcctggttgcctctgacttgacgccgtcagaaaccgcgcagctgaacctgcagaaagtgctgggcttcatcaccgacgcgggcggacgcacgtctcatacctccatcatggcgcgttctctggaactgccagcgatcgtaggtaccggtagcgtcaccgctcaggtgaaaaacggcgactatctgattctggatgccgtaaacaaccaggtttacgtcaacccgaccaacgatgttattgagcaactgcgcgccgtccaggagcaggttgcgaccgagaaagcggaactcgcaaaactgaaagatctgccggcaatcacgctggatggacatcaggttgaagtttgcgccaacatcggtaccgttcgtgacgttgaaggcgctgagcgtaacggcgcggaaggcgttggtctgtatcgtactgaattcctgttcatggatcgcgacgcgctgccgacggaagaagagcagtttgccgcctataaagcggtcgctgaagcgtgcggctcgcaggcggttatcgtccgtaccatggacattggcggcgacaaagagctgccgtacatgaacttcccgaaagaagagaacccgttcctgggctggcgcgccgtgcgtatcgccatggatcgcaaagagatcctgcgtgaccaggttcgcgcgattctgcgtgcctccgctttcggtaaattgcgcattatgttcccgatgatcatctctgttgaagaagttcgcgcgctgcgcaaagagattgaaatctacaaacaggaactgcgtgacgaaggtaaagcatttgacgaaagcattgagattggcgtgatggtggaaacaccggctgcggcgacaattgcgcgtcatttagccaaagaagttgatttctttagtatcggcaccaatgatttaacgcagtacaccctggcagttgaccgtggtaatgatatgatttcacacctttaccagccaatgtcaccgtccgtactgaacttgatcaagcaagttattgatgcttctcatgcagaaggtaaatggactggcatgtgtggtgagcttgcaggcgacgaacgtgctacacttctgttgctggggatgggtctggacgaattctctatgagcgccatttctatcccgcgcattaagaagattatccgtaacacgaacttcgaagatgcgaaggtgttagcagagcaggctcttgctcaaccgacaacggacgagttaatgacgctggttaacaagttcattgaagaaaaaacaatctgctaa

SEQ ID NO: 371812 - DNA, 258 bp, Salmonella enterica
atgttccagcaagaagttaccattaccgctccgaacggtctgcacacccgccctgctgctcagtttgttaaagaagcaaaaggcttcacttctgagattactgtgacttccaacggcaaaagcgccagcgcgaaaagcctgtttaaactgcagactctgggcctgactcaaggcaccgtcgtcaccatctccgcagaaggtgaagatgagcagaaagcggttgaacatctggtcaaactgatggcggaactcgagtaa

SEQ ID NO: 371813 - DNA, 972 bp, Salmonella enterica
atgagtaagatttatgaagataactcgctgactatcggtcatacgccgctggttcgactgaaccgtatcggtaatggacgcattctggcgaaggtggagtcgcgcaacccgagcttcagcgtcaagtgccgtatcggcgccaatatgatttgggatgccgaaaagcgtggcgtactgaaacctggcgtggaactggtggagccgaccagcggcaacaccggtattgcgctggcgtatgtcgccgccgcgcgcggttacaaactcaccctggccatgccggaaaccatgagcattgaacgccgcaagctactcaaagcattaggcgcgaatctggtgctgaccgaaggggcgaaagggatgaaaggcgctattcagaaagccgaagaaattgtcgccagcgatccgcaaaaatatctcctgctccagcagttcagcaaccctgccaacccggaaatccatgaaaaaaccaccggcccggaaatctgggaagacaccgatggtcaggtggatgtgtttatctccggcgtcggcactggcggtacgttaaccggcgtcacgcgttatatcaaagggacgaagggtaaaaccgatcttatcaccgttgcggtagaacccactgactccccggttattgcccaggcgctggctggtgaagagatcaaaccaggcccgcataaaattcagggcatcggcgcaggcttcatcccgggcaacctggatctgaaactgattgataaagtggttggcatcaccaatgaagaagccatttctaccgcgcgccgtctgatggaagaggaaggtattctggcaggaatttcttccggtgccgcggttgctgcagcgcttaagctgcaggaagatgaaagctttaccaataagaatattgtggttatcctaccttcatcaggtgagcgttatctgagcaccgcgttgttcgccgatctctttactgagaaagaactgcaacagtga

SEQ ID NO: 371814 - DNA, 762 bp, Salmonella enterica
atggtttcatcatccacaaccgtaccacgtagcggcgtctattatttctcgcaaggatggaagttagtcaccctaccgggaatccgccgctttgttattttacctttgctggtcaacattgtgctgatgggcggcgcattttggtggctgtttacccagcttgacgcctggataccttcgttgatgagtcatgtgccggactggctgcaatggctgagctatctgctgtggccgattgcggttatctctgttctgctggtctttggctattttttctctaccctcgccaactggatcgccgcgccgtttaacggccttttagccgaacagcttgaggcgcggttaaccggcgccacgccgccagataccggcatactcggcatcatgaaagatgtaccgcgcattatgaaacgtgaatggcaaaagctggcgtggtatctgccgcgcgctattgtgctgctggttctctattttattcctggcattggccaaaccatcgcgccggtgctgtggtttttgttcagcgcctggatgctggcgatccagtattgcgactacccgtttgataaccacaaagtgccgtttaaaacgatgcgcgccgcgttgcgcacgcagaaggtggcgaatatgcaatttggcgcgctcaccagcctctttacgatgattccggtgcttaaccttttcattatgcctgtcgccgtctgtggcgcgacggcaatgtgggttgattgctggcgtgctaagcacgcgttatggaaataa

SEQ ID NO: 371815 - DNA, 987 bp, Salmonella enterica
atgatgcaggatttgcgtctgatattaatcattgttggcgcgatcgccataatcgctttactggtacatggtttctggaccagccgtaaagaacgatcttctatgttccgcgatcgtccactaaaacgcatgaaatcgaaacgcgacgacgactcgtatgacgacgatgtcgaagaagacgaaggcgtgggtgaagttcgtgttcaccgcgtaaatcatgcccccggccagtcgcaggagcatgatgcccctcgtcagtcgccgcaacaccagtaccagccgccttatgcgtctgcgcaaccgcgtccagcggcgccgccgcagccgcaagcgccgatgcaacagccggttcagcaaccggtccaacctgcgccgcagcctcagcaggttcagccatctgcgccgccggtacagccgccgcaacagcagcctgcaccgccgtcgcaagcgccgcagcctgttgcgcagcccgcgccgccgccatcagcgcaaaccttccagcctgcggaacctgtggttgaggcggaaccggtagtggaagaagcgccggttgtggaaaaaccgcagcgtaaagaggcggtcatcattatgaacgtcgcggcccatcatggcagcgagcttaatggtgaagtgttactgaacagtattcagcagtcaggctttaaatttggcgatatgaatattttccatcgtcatttgagcccggacggcagcggcccggccttgttcagtctcgcgaatatggtcaatccgggaacgttcgatcctgaaatgacggacttcactacgcctggcgtcactatctttatgcaggtaccgtcttacggcgatgcgctgcagaatttcaagctgatgctgcaatccgcgcagcatatcgctgatgaggtcggcggcgtcgtgctggatgaccagcgtcggatgatgacgccgcagaaactgcgcgaatatcaggaccgcatccgcgaggtgatggacgctaacgcctga

SEQ ID NO: 371816 - DNA, 2016 bp, Salmonella enterica
atggaaccaatcgaacaacaactgacagaactgcgaaccacgcttcgccatcatgaatatctgtatcatgtgatggatgcgcccgagattcccgacgccgaatatgaccgcctgatgcgggaactgcgagagctggaggcgcaacgtccggaccttatcacgccggattcgcccacgcagcgcgttggcgcggcgccgctgacggcattcaaccagattcgccatgaagtaccgatgctgtcgctcgataacgtatttgatgaagaaagcttcctggcgtttaacaagcgagtgcaggatcgtctaaaaagcacggaaaatgtcatctggtgctgcgagctaaagctggatggtctggcggtcagcattctgtatgaaaacggcgtgctggtgagcgctgcgacgcgtggcgacggcaccaccggtgaagatattacttcaaacgtgcgcacgattcgcgccattccgttaaagctgcacggcgataacattccggcgcgtcttgaagttcgcggagaggtatttttaccgcaggccgggtttgaaaagatcaatgaagacgcgcgccgcactggcggcaaagtgtttgctaatccgcgtaacgcggcggcgggctcgttgcgtcagctcgatccgcgtattacggcgaagcgaccgctaacatttttctgctacggcgtcggtattctggaaggcggcgagttgccggatacgcatctgggacgtttgctgcaatttaaagcgtgggggttaccggtcagcgatcgcgtgacgctgtgcgattctccccaggcggtactggatttttatcgcaacgtcgaaaaagatcgccccacgctcggttttgatatcgacggcgtggtgattaaggtcaactcgctggctttgcaggaacagctgggctttgtggcccgcgcgccgcgctgggcggtggcgtttaaatttcctgctcaggagcagatgacttttgtgcgcgatgttgagtttcaggtcgggcgcaccggggcgattacgccggtggcgcgtctggaaccggttcaggtggctggtgtgctggtcagcaatgccacgttgcataatgccgatgaaattgagcgacttggcttgcgcattggcgataaggtggttatccgtcgggcaggcgatgtgatccctcaggtggtcaacgtggttctgtccgaacgccctgaagagacgcgtccgattgtgtttccaacgcactgtccggtgtgcggatcggacgtagagcgcgttgaaggcgaagccgttacccgttgtaccggcgggctgatttgcggcgcgcagcgtaaagagtcgctgaaacattttgtgtcgcgccgggcgatggatgtagacgggatgggcgataagatcatcgaccaactggtggaaagggagtatgtccatacgccagcggatctgttccgtctgacggcgggtaaactgaccggcctggaccgaatggggccaaagtccgcgcaaaatgttgtaaacgcgctggaaaaagccaaagcgacgacttttgcgcgttttctctatgcgctgggcatccgtgaagtgggtgaagcgacggcggcggggctggcggcttatttcggcacgctggaggcgctgcagaccgctaccattgacgagttgcagaaagtacccgacgtggggattgtggtcgctacgcacgtctttaacttttttgccgaagagagcaatcgtgacgtgattgggcagctactggcggaaggggttcactggcccgcgccggtagtcattaatgtgcaagaggtcgatagcccgtttgccggtaaaaccgtggtactaaccggtagcctgagccagatgtcccgcgatgacgctaaagcgcgtttagcggcgctgggcgcgaaagtggcaggcagcgtatcgaagaaaaccgatctggtgattgccggtgaagcggcgggctccaaactggccaaagcgcaggaactgggtattaccgtgattgatgaagcggaaatgatccgcttactgggtgcctga

SEQ ID NO: 371817 - DNA, 219 bp, Salmonella enterica
atggaaaaagagcagctggttgaaatcgccaacaccgtgatgccctttggcaaatatcagggacgtcgattgatcgaccttccggaagagtatttgctgtggtttgcccgtaaagatcaatttccggcgggtaaactgggggagttgatgcaaatcacgctgctgattaaaaccgaggggctgacgcaactggtacagcccctgaaacgcccgctttaa

SEQ ID NO: 371818 - DNA, 999 bp, Salmonella enterica
atgaaactttttcgtatccttgaccctttcacgctgacacttatcaccgtggtactactggcctcttttttcccggcggaaggcggctttgtgcctgtcgttgaaggcattacgacagcggccatcgctctgctgttttttatgcatggcgcgaagctttcacgtgaagcgatcatcgctggcggcagccactggcggttgcatctgtgggtcatgtgcagcacttttgtgctctttcctgtcctcggcgtactgtttgcctggtgggcgcctgtcaatgtcgaccctatgctctacagtggctttctgtatctgtgcattttgcccgccaccgtgcagtcggcgattgcatttacttcactcgcgggcggtaacgtcgcggccgcggtgtgctcagcgtctgcgtccagtctgctgggcattttcctgtcgccgctgctggtcggtctggtaatgaatattcatggcgcgcagggcagtctggaagaggtgggcaaaattatgctgcaactgctgctgccttttgtgctgggacacctgtctcgcccgtggatcggcaactgggtcgcgcgcaacaaaaagtggatcgcgaaaacagatcagacctctattttgctggtggtctactcggcgttcagcgaagcggtggtcaacggcatctggcacaaagtcggctggggatcgctgctgtttatcgtcgtggtcagtctcatactgttggcgatcgtcatcaccattaacgtctttgtcgcccgtaaatgcggcttcaataaagccgacgaaatcactattgttttctgcggttcgaaaaaaagcctggccaacgggatcccgatggccaatattctgtttccgacgtcagtgctgggtatgatggtattaccgctgatgatcttccaccagatccaactgatggtctgcgcagggctggcgcggcgctacaaacgccagaccgagaagttacaggcgcagcaggaaagccgcgccgcgaaagcttaa

SEQ ID NO: 371819 - DNA, 927 bp, Salmonella enterica
atgaactattcactgcgtcaactgcgtatttttattaccgtcgcccaggccaaaagtttcagtcgggcaggggacaggattggactgagccagtctgcggtcagtcatagcgtaaaagagctggagcggcaaaccggcgtcagactgctggatcgcaccacgcgtgaggtggtgctgaccgaggcggggcaacaactggcgacgcgtctggagcgggtgcttgatgaactgaacagcatactgcgcgatgcaggcagagtagggacacaattaaccggcaccgtgcgcgttgccgcgagccaaaccatttctgcgcatcttattccgcaatgcattgcccaaagtaattcactttatcccgctattgattttgtattgcacgatcgtccgcagcagtgggtgctggagagcatccgccagggtgaagtggattttggcatcgttatcgatcccggcgcagcggtggatttacagtgtgaagccatcttatcagagccttttttactgttgtgtcgccaggatcatccgctggcgcatcaggaatgggtgagctggcaggatcttaaacaggcctcgctggtcttacaggattatgcttccggcagtcgaccgctgattgatgcggcgctggcccattttgctattgaggcggatatcgtgcaggagattggtcacccggccacgctgtttccaatggtggaagcgggaatcggcatcagcgtgctgcccgcgctggcgttaccgctcccgcagggcagccacttgcaggttaaacggctgacgcccgtagttgaaaggcagctcatgctggcgcgacgaaaaaaccgatcgctctccacggcggcgcaggcgttgtgggacgtggtgcgtacccaggccagcgaattaaccgccgcgagggcgaaagatccgctgtatcagctataa

SEQ ID NO: 371820 - DNA, 762 bp, Salmonella enterica
atgaaaaaaattcttactctgacgctttcttctttactcattattcccgcactcacccatgcggaatttaaaggcgggttcgccgatatcggcctccattacctcgactggacatcagacaccacggaaaaaaccagtaaaaaatcccataaagatgattttgggtacctggaactggaaggcggagcgaattttagctggggagaaatgtacgggttcttcgactgggaaaatttttacaatggccgccacgctaaaccaggcagcgaacagcgttacacctttaaaaataccaaccgtatttatctgggcgatacaggattaaacctctatctccatgcctacgggacgtacggttcacctcatcgcgctaatttccatgatgacatgtttctctatggtttaggctataacttcacaggtaacggttactggtttaaacccttctttgccaaacgttataccgatcagacctactacacaggcgataatggttatgtattaggttgggtggccggctatagcttctcgttgggtagtgagaaattcagcgtaacgaactggaatgagtatgagtttgaccgcgatgcgtcctacgctgcgggcaatggcgggaaagatggcattaatggcgcagtagcgctgtggtggaatgcgactcctcacctgaccgcaggagtacaatatcgttacgctgataataagttaggagaatccttcctgcaggatggcattatttattccatcaaatacctgttttaa

SEQ ID NO: 371821 - DNA, 834 bp, Salmonella enterica
atgcctcacgctcttttttctcataatcctgagtattgtattgatattattcatgcacataaaccggcatttaccccgcgagtcgcgtttattttaggctccgggttgggtgctctggcggatcaaatcgaagatgcggtagccatttcttacgagaaattgccgggatttcccgtcagcaccgtacacggccatgctggtgaactggtgctcggccatctggcgggtgttccggtggcctgtatgaaaggtcgcggacatttttatgaagggcgtggaatggcggtgatgaccgatgccattcgcacgttgaaattactgggctgtgaagtgttgttctgcaccaatgcggcaggatctctgcgtccggaagtggggccgggtagcctggttgcgcttagcgatcacattaatacgatgcccggtacgccgatggtggggccaaacgatgatcgttatggcgatcgcttcttctcgctggctaatgcttatgacgcagattatcgcgccatgcttcagtccgttgcggcagaggagggattccccctcactgaaggcgtatttgtttcttatccgggtccgaacttcgaaacggcggcagaaatccgcatgatgcagattattggcggcgatgtggtcggaatgtccgttgtccctgaggtgattagcgcacgtcattgtggcctcaaagttgttgccgtctcagcgatcaccaatctggcggaagggctgggcgatgtaaaactctcccatgcgcaaacgctggcggcggctgaactttcccggcagaactttataaatctgatttgcggctttttacgtaaactggcctaa

SEQ ID NO: 371822 - DNA, 159 bp, Salmonella enterica
atgaaagaaattattctctcctccggtattggatttggtattggcgcattttttactttatgccgtatacctattcccgcaccaaatgttttacccggggtattatctattgtatttatgtatattgggtatcttgtcgttaaatctattttttactag

SEQ ID NO: 371823 - DNA, 885 bp, Salmonella enterica
atggaacgagcccatcgtattgatctaaagctattacgttatttcctcgctgttgcagaagaattgcattttggccgggctgctgcccggttaaatatgtcacaacctcccttgagtatccatatcaaagaacttgaacagcaactgggtacattgctgtttattcgtcattcccgcagcgttgcattaacccatgccgggaaagttttaatggaggagtcacgtcgcttgttagccagtgcaaatcaggcgctggcgcgagtggagcagattggtcgcggtgaagcggggcgcattgaactgggtgtggttggtacggcgctgtggggaagaatgcgtcctgcgatgcgtcactttttgaaagcaaatcccaatgttgaagtactttttcgcgaaaagtctcccggtatgcaaatggcgttgttagagcgtcgggaacttgatgcagggatctggcgtatggctatcgaaccggcagtcggttttaccagcatacgtttgcatgaatctgcattcatggttgcagttccggaagatcacgatctggcatccagagattctgtgccgctgtcggcgttgcgcaatgaatattttgttacgttgccttccgtacattctgattggggatttttacaacgtgtatgccaacaggcgggtttctcgccaatgattattcgggaagtggttgagccgcaaacggtgttggcgatgatcagtatggggatcgggattacgttgatggctgatggctatgcgcaaatgagctggccgggtgtggtgttccgtccgttagaggaacgtattccggcggatttgtatattgtgtatgaccagcagcaggcaacgccagcactggagaaactggtggcggcgttgacggtatga

SEQ ID NO: 371824 - DNA, 1401 bp, Salmonella enterica
atgaaaaaaattaccctctatgcgacaacggttatcaccgttgggctgttatgttatttaggtttgtccgggtatgtatggtattacgacaaacagcgcagtaaaaaaagcgatgtgcaggcctcggttgtgggtgaaaataataaaatactgggttatttcagggagaaaggatgtgattattgtcatacgccttccgctgaattgcctttttattcctcttttccggtggcaaagcagttaatggattacgatatccagctcggttacaagtcgtttaacctggaggcggtacgggccgccctgattgcggatacgccggtgccgcaaagcgaactgaataaaattgaatgggttatgcaacatcagactatgccgccaacccgctatgtcgcgctgcactgggcggggggcgtcagcgataaagagcgtactgacatcctgaactggatagccgatcagcgtgagcgcaactatgccagcgccgataccgaccccgcgcaccggaatgaacccgttcagcctattccgcgcaatattcccgtcgatgcgaaaaaagtcgacttaggtttccgtctttatcatgatgaacgtttatccggcgacagcacaatatcctgtgcgcattgtcacgcgttaaatgcgggcggtgtcgatggcagaaaaacctcaattggcgttggcggcgcggtaggaccaataaatgcgccgacggtattcaactccgtatttaatatcgaacaattttgggatggtcgtgctgcaaccctgcaggagcaagcaggcggaccaccgttaaatcctattgaaatggcctctaaatcctgggatgaaattattagcaagcttgataaagatcctgccctgaaaaaagatttccaggcggtttatccgcaaggatttaccggggaaaatattactgatgcgatcgccgaatttgaaaaaacgttgataacgccggattccgcctttgataaatggctacgtggagatgaaaatgcgctgaccgcgcaacagaaacacggttatcaattatttaaagagaataaatgtgcaacctgtcacggcggtatcattttaggcgggcgctcttttgaaccattgggattaaagcgagactttaattttggcgaaattaccgcagcggatattggtcgtatgaacgtcaccaaagaggttcgcgataaattacggcaaaaagtcccgggcttacgcaacgtcgcgttaacagcgccttatttccatcggggcgacgtaccgacgctggatggcgcggtaaaactgatgctgcgttatcaggttggcaccgatctgccgcaaaacgatattgacgatatcgtcgccttcctggaaagcctgaccggtgtttatacgccatatcaacctgaatatgcgcaatga

SEQ ID NO: 371825 - DNA, 633 bp, Salmonella enterica
atgattaagcagccagcgcttgctcaggaacagtacgcctgcgtatatgcatggctggcgttactctttttccgggaagtggatgatgaagggttaatacaattacagtccgcggaaatcgcggactggctggcgctgttaaagcgtcagccagcgctggcggcgtcggtggcgttactcgaacaaaaaattgccgcgcttagcctgcgtcaggatgcgcagctggagctggcagcggatttttgcggattgttcctgatgacggataaaaaatcggccttgccctacgcctcgcaatacccgcagcaggaacccggcatgattaaacatttattgcttgaagccgggatggaagtcaacgacgattttaaagagccggccgaccacctggcgatttatctggaattactcagccatttacatttttcattgggtgaatcgttccaacaacggagaatgaataaattacgccagaaaacattgtcgtcattactggagtggcttccggaatttacaaataattgccttaagcatgatccctatggtttttatgctgcgttaagtcaattattgttggctatcgttcgttttgatgacggaaaagaggatttatccattgttgcggttgaataa

SEQ ID NO: 371826 - DNA, 2553 bp, Salmonella enterica
atgaaaaataaggacccgttacacgtctctcgtcgacgttttctggcgcagcttggcggtttgacggtggcaggaatgctggggccgtcactgctgacgccccgtagcgcccacgcggcggatgccgttgcgccaggcgccgcgacgaaagagggtatccttaccggctctcactggggggcgattcgcgccacggtggttgacggtcgatttgtggcggcaaaaccgtttgaacaggataaatacccgtccaaaatgatcgccggcctgcccgatcacgtccacaacgcggcgcgtattcgctatccgatggtgcgcgtcgactggatgcgcaaaggtcatcaaagcgacacctcgcagcgcggcgataatcgttttgtgcgcgtctcctgggatgaagcgctggatctgttctatcaggaactggagcgggtgcaaaaaacctacgggccgagcgcgttactgacggcgagcggctggcaatctaccggcatgttccataacgcctccgggatgctggcgcgcgcgattgcgctacatggcaatagcgtcagcacgggaggggactattcgaccggcgcggcgcaggtgattttgccgcgcgtggtgggttcaatggaagtgtacgagcagcaaacgtcatggcctctggttttacagaacagtaaaacgattgtgctatggggttctgatatggtgaaaaaccagcaggcaaactggtggtgcccggatcacgatgtctatcagtactatgaacaattaaaagagaaggttgccagcggcgctatctcggtcatcagcatcgacccggtcgtcacctccacgcacgattatctggggcgcgataaggtcaaacatatcgccattaacccgcagacggatgtcccgttacaactggcgctggcgcataccctgtacagcgagaaactgtacgataaaaatttcctcgataactactgcgtcggttttgaccagttcctcccctatttgctgggcgagaaagatggacagcccaaagatgccgcctgggcggaaaaactgtgcggtattgacgccgacaccatccgcgcgttggcgcggcagatggcgggcgacagaacgcaaatcatcgctggctggtgcgtacaacgtatgcagcatggcgaacagtggtcatggatggtcgtcgtgctggcggcaatgctgggacagattggtttaccgggcggcggctttggttttggctggcactacaacggcgccgggacgcctggccgtaaagggatcattttaagcggcttttccggttcgacgaccgttccgccagtgcacgacagcacggattacaaaggctacagcagcaccattcctattgcgcgttttatggatgccatccttgaaccgggcaaggacattaactggaacggcaaatcggttaaattaccgccgctgaagatgtgcgtgttcgccggaaccaacccgttccaccgacaccaacaaattaaccgcataattgaaggctggcgcaagctggaaacggtcatcgctattgataaccagtggacgtcgacctgccgctttgcggatatcgttttgccggctaccacccaatttgagcgtaacgacctcgatcagttcggcaaccactctaaccgcggcattatcgccatgaaacaggtggtgtcgccgcagtttgaagcgcgtaacgactttgatattttccgcgatctctgccgacgctttaaccgtgaagcggcattcacggaaggtcttgatgaaatgggctggctgaaacgcatctggcaggaagggagccagcagggaaaaggtcgcggtatccacttaccgactttcgaggtgttctggaatcaacaggagtacatcgagtttgatcatccgcagatgtttgtgcgccatcaggctttccgtgaagatccggacctggagccgttgggcacgccaagcggtttgatcgagatttactccaaaacgatcgccgacatgcaatacgacgattgtcagggccatcccatgtggttcgaaaaaatcgaacgctcgcatggcgggccgggatcgcagcgctggccgctgcacttacagtccgtccaccctgatttccgtctgcattcccaactgtgcgagtcggaaacgctgcgtcagcaatatgccgttggcggcaaggagccggtctttattaacccacaggatgccagcgcgcgcgggatccgcaacggtgacatcgtgcgggtattcaatgcacgcgggcaggtactggcgggagcggtagtttccgatcgctatgcgccgggcgtggcgcgaattcatgaaggcgcctggtacgatcctgataaaggcggcgatctcaacgcgttatgtaagtacggcaaccctaacgtattaacgctggatatcggtacatcacagctcgcgcaggcgaccagcgcgcatacgacgctggtggaaattgaaaaatataccggccctatggataacgtcacagcgtttaacggtccggtcgagatggtcgcgcagtgtgaatatgtacccgcatcgcaggggaatccgcatgattaa

SEQ ID NO: 371827 - DNA, 1185 bp, Salmonella enterica
atgcgaaaactctggagagcgctactcaggccaagcgcccgttggtcgatactggcgctggtcattgtcgggattgtgatcggcgttgcgctgatcgtgttacctcacgtcggtatcaaactgaccagtacgacagagttttgcgtcagctgccatagtatgcagccggtgtatcaggaatataaacagtccgtacatttccagaacgcttccggcgtacgcgcggaatgccacgattgccatatcccccctgatattccaggcatggtgaaacgtaagctggaagccagcaacgatctttaccagacatttatcgcccactcgattgataccccggaaaaatttgaagccaaacgcgccgagcttgccgagcgtgaatgggcgcgcatgaaagagaataactccgcgacctgtcgttcctgccataactacgatgcgatggatcacgcgaaacagaacccggaagcggcgcggcaaatgaaaatcgccgcgaaagaaaatcaatcctgcatcgactgccataaagggattgcccaccagctaccggatatgagcagcggttttcgcaaacagtttgatgaactgcgcgccagcgccagtacgcataatgacggcgatacgctctattcgctggatatcaagccgatttacgccgctaaaggcgataaagaaccggcaggttcgctgttacctgcttctgaagtgaaagtccttaaacgggacggtgactggctgcaagtgcaaatcgaaggctggacggagacggacggtcgccagcgcgtgctgacgcagctgcccggtaaacgtatttttgtcgcctcgattcgcggcgatgtgcaacagcatgtgaaaacgctggaagagaccactgtcgcggcgactaatactcagtggagcaaattacaggcaaccgcgtggatgcaaaaaggcgacatggtaaatgacattaaaccgatttgggcctatgccgactccctctataacggcacctgtaatcagtgtcacggcgcgccggacaaagcgcactttgacgctaacggctggatcggcacgctcaacggcatgatcggtttcaccagtctggataagcgtgaagaacgtaccttgttgaaatatctccagatgaatgcgtctgataccaccaacacgccgcacagcgataagggagaacacaatgaaaaataa

SEQ ID NO: 371828 - DNA, 729 bp, Salmonella enterica
atgaacagatatgaacagaaagagaccgcgcgcaggatgtcacatcacattgttattgttgaggatgaacctgttactcaggccagattacaggcctattttgagcaggagggatatcgcgtttcagtgaccgacagcggcgcgggcctgcgcgacatcatggagcatgagcacgtttcgctgatcctgctggatatcaacctccccgacgaaaacgggttgatgctgaccagggcgctacgcgaacgctccacggtgggcattattctggtgacggggcgttgcgaccaaatcgaccgcatcgtcgggctggagatgggcgcggacgactacgtcaccaagccgctggaactgcgcgagctggtagtgcgggtaaaaaatcttttgtggcgtatcgatctggcccgccccacgccgcaaaatgccagtgaaaactgctatatgttttccggctactgcctgaacgtgatgaatcacacgctggagcacaacggtgaagccattaagcttacgcgcgcagagtacgagctgctgctggcctttgtgaccaacccaggcaaagtgctgcatcgcgaacgtctgctgcgaatgctttccgcccgccgcgtagagaccccggatctccgcacgattgatgtcctggttcgccgcttacgccataaaattacgccggaactgctggtcacacagcatggcgaaggctactttttagcctcggaggtgtattga

SEQ ID NO: 371829 - DNA, 1041 bp, Salmonella enterica
atgcgcgcgcttatttcgttcttttttttgataatcatcgtctcgaatgtagaaacggcgtcagccgaaaccggactgctacactggacgcgcgccgatcgggcgattccctggcggcaaacgtcagtcaatgcgagtaaaccctggaaactgtgcgcattataccccagcctgaaagattcttactggttgtccgtcaactacgggatgcaaaaagcggccaaattgtatggcgttgatttaaaagtgctggaagcgaatggctatcggcaactggcgacgcaacaacagcaaatgacgcagtgccgggagtggggcgccgacgctattctgcttggcagcagtaccattcgtttcccggaactggaacggtatgccggtaatgtgccggttattgaagtggcgaacgtgatacgcgacgccagcgtggcaactcacgtcggtctgccgtggtttcagatgggttatctgccgggacgtttcctggtgcagtggagcaaaggaaaaacgcttaacgttttactcttcccggggccggaggaagctggcggcagtcaggagatggtggcgggttttcgtcaggcaattaaaggcagcgccatcaacattgtggatatcgcctggggcgataacgacattgaagtgcagcgaaacttactccaggaaatgctggagcgtcatccggacgccaatgtggtcgccgggtcggcgatagcggcggaggcggcgatgggcgaagggcgaaatttgacgactccgctcacgatcgtctcattttatctgacgcatcaggtttatcgcggtttaaaacgcggccatatcctgatggcgctcagcgatcagatggcctggcagggagaattagcgataacgcagtcgattaaggtcttacaggggcaaccggtgcctgaaaatatcagcccgccggtgcttattttgacgcataacaacgccgacagcgcgcgcgttcgccgttcgctatcgcctccgggatttcggcccgtctatttgtatcaatacacctccgaggctaaaaagtag

SEQ ID NO: 371830 - DNA, 2736 bp, Salmonella enterica
atgtcaacgccttcactgacccgcagattatggctggccttcgccctgatggcggcactcaccctgctcagcaccgtgatcggctggataagcctgcgcgtcattagtcaggtggagcaaaccaatacgcaagcgctgctccccacgatgaatatggccaggcagttaagcgaagccagcgcttacgagctcttctccgcgcaaaatctgaccaatgccgacagtgagggcgtttggctggcgcaggggaagatgctgaaagcgcaaagccttaaaattaaccatcttttgcaggcattaagcgagcaggggtttaatacctcggccatcgcccggcaagaaaaagagattgcgcaaacgcttgggcaacagggaacgctggtcggtgaaattctcacgctgcgcgcacagcaacagcagttaagccgccagattgcggaggcggcggaaagcattgccgcccaggctcacggtcaggccaataatgcagcgacatctgcgggcgccacccaagccggtatttacgatcttatcgaaagcggtaaaggggaccaggctgaacgcgcgcttgaccgattgattgatatcgaccttgagtatgtgaatcagatgaatgagttgcgggtcaatgccctgcggtttaagctgctcattgtgaccttaaaagacgcgcaagggctgagcgatgccgaggacaccgatgaaaaacttaatcagttggttaaaattttatcccgccgccagcagcgtatagaagatcctaccgttcgcgcccaaatcgccgacgcgctggagaaaataaatcagtacaccacactggttaccctgtttcgtaaggaaaacgctatccgcgaccagcttcaaacgcttatggccaataacctctttcagtttacccgcttcagtacggaagtgtcgcagttggtgaacgccatcgaaaaacgaaacgaggctgggttagcgcgtcttacacacgccagtcagcgtgggcaaatagggttagtgatcttaggtatcctggcgctgtgctcattaagttttattctttggcgagtggtttaccgttccgtatcccgcccgctggcgcaacaaacgcaggccttacagcggctactggagggcgatattgactcaccgtttccggaggcggctggcgtcagcgaactggataccatcagccgtctgatggaagcgtttcgcgccaacgtgcgcaaattgaaccgccatcgtgaggatttggcggaacaggtgcgttcgcaaacggcggagcttcatgcgctggtgctggaacaccggcaggcgcgcgccgaagcggaaaaggccaacgaggcgaaatcgacgttccttgccgccatgagccatgaaattcgcacgccgctttacggcattctcggtacggtacaattgctggccgataaaccgctcatggcaaactaccgcgacgacttacaggccattaatgattcaggcgaatcgctactggcgattcttaacgatattcttgattactcggcgattgaagtaggcggcaccaacgtttctattagcgaggagccgtttgaaccgcgacaattgttgaatagcgcgctgcatttaatgcacagccgcgtgcaggtggcgctcatcgccgactttagcgagcaactcccctccacgctacaaggcgatccgcgccggatacgtcaaattgtgattaatcttttaagtaatgcggcgaaatttaccgatcgcggcagcatagtgctgcgcacgttttgcgacgatcagagctggtttattgaggttgaagataccggatgcggtatccctgaagcgaagctgacggctattttcaaaccgtttgtgcaggcgacaggacgccggggcgggacgggcctggggctggctatcagcgccagcctggcagaggcgatgggcgggacgctaaccgtcaccagtacgcttcatgttggcagttgttttcgtttacaactgccggttcgccaccccaaacccgcaagcaaaagtgcgttcaggaaaccgataaatcttaacggattacgcctgttgctgattgaagataatatgctgacgcagcgtattaccgctgaaatgctcacgggtaaaggggtgaaggtctcagtagctgaaagcgcgaatgacgcgctacgctgtttagccgaaggcgagtcctttgatgtggcgctggtggattttgatttaccggattatgacggcttaaccctggcgcagcagttgatgagtcagtatcccgccatgaaacgcattggttttagcgcgcatgtgatagacgataatcttcgtcagcgtaccgccggtcttttctgcgggattattcaaaagcccgttccccgcgaggagctttaccgcatgatagctcactatttacagggcaaatctcacaacgcgcgggcgatgctgaatgaacatcagcttgccggcgatatggcgtctgtcggcccggaaaaactccggcaatggatcgcgttattcaaagacagcgcgctgcctttagtcgaggagatcgaggcggcgcgcgccatgaatgacgacgttaacattaagcggctggcgcataaattaaaaagcggctgcgccagcctggggatgacgcaggcaaccgaagcctgtcgggagctggaattgcaaccgctaagcgatatagatattaaaactatcgtgacgcagggggtgacggcgctcgacgcatggatagccgatcatccttcgccataa

SEQ ID NO: 371831 - DNA, 1293 bp, Salmonella enterica
atggatatttcagttacagcagcacagccggggcgtcgccgctatctgacgctggtgatgatctttattaccgtggtgatttgctacgtcgatcgcgccaaccttgccgtggcttccatgcatattcaaaaagaattcggcattaccaaagcggaaatgggctatgtcttctccgcttttgcctggctctatacgttatgccagatccctggcggctggtttctcgaccgtattgggtcccggctgacctattttatcgctatcttcggctggtcagtcgcgacgctattgcaggggtttgcgacgggactattgtcgcttatcggcctgcgcgctattaccgggattttcgaggcaccagcctttccggcaaataaccggatggtcactagctggtttccggagcatgagcgcgcatccgcagtcgggttctacacctccggacagttcgtcggactggcattccttacgccgctgctgatctggattcaggaaatgctgagctggcactgggtctttatcgtcaccggcggtatcgggattatctggtcattggtctggtttaaggtttatcaaccgccgcgtttgacgaaaagccttagccaggcggagctggagtatattcgcgatggcggcggtctggtggatggcgatgcgccagcgaaaaaagaggcccgccagccgttgacgaaagccgactggaaactggtgttccatcgtaagctggtgggcgtctacctcggtcagttcgccgtaaactctacgctatggttctttctgacctggttccctaattatctgacccaggaaaaaggcattaccgcgctaaaagcgggctttatgacgaccgtaccgttcctggctgccttttttggcgtactactctccggctggctggcggataaactggtgaaaaaaggcttctcgctgggcgtggcgcgcaaaacgccgattatttgcggtttgctcatctccacgtgcattatgggcgctaactacactaacgatccgttgtggattatggcgttgatggcgatagctttcttcggcaacggatttgcgtccattacctggtcgttaatctcttcgcttgcgccgatgcggttgattggccttaccggcggtatgtttaactttatcggcgggttgggcgggattagcgtaccgttagtgattggttatctggcgcaaagctacggttttgctccggcgctggtctatatctccgttgtggccctgctgggcgcgctgtcttacatcctgttagtgggcgatgtgaaacgcgtcggataa

SEQ ID NO: 371832 - DNA, 1149 bp, Salmonella enterica
atgaaaataactcacatcaccacgtaccgtttacctccacgttggatgttcctgaaaatcgaaacggatgaaggcgtggttggctggggagagccggtcattgaaggtcgggcacgtactgtagaggcggcagtacatgagtttgccgactacctgatagggaaagatccggcgcgtatcaacgacctatggcaggtaatgtaccgggccggtttttatcgcggcggcccgattatgatgagcgccatcgccggtattgaccaggcattgtgggatatcaaaggcaaggtgttgaatgcgccggtctggcagctcatgggcggcctagtgcgcgacaaaatcaaggcctatagctgggtgggtggcgatcgtccggcagacgtcattgacggtattgaaaaattgcgcggtattggttttgacaccttcaagctgaacggctgtgaagagatgggcgtgattgataactcccgtgcggtggatgcggcggtcaataccgtggcgcaaatccgcgaagctttcggcagtgaaattgagtttgggctcgacttccacggtcgcgttagcgcgccgatggcgaaggtgctgattaaagaactggaaccctatcgcccgctgtttattgaagagccggtgctggcggaacaggcggaatattatccgcgcctggcagcgcaaacgcatattccgattgccgcaggcgaacgtatgttctcgcgttttgaatttaaacgcgtgctggacgcgggcgggttggcgattctacagccggatttatcccacgcgggcggcattaccgaatgctataaaatcgccggaatggcggaagcatatgatgtggcgctggcgccgcattgcccgctgggtccaatcgccctggctgcctgcctgcatatcgattttgtttcgcgcaacgcggtattccaggagcagagcatgggcattcactataacaagggcgcggagctgctcgactttgtgaaaaacaaagaagacttcagcatggacggcggcttctttaaacccttaaccaaaccgggtcttggcgtagacattgacgaggccagggtgattgaacttagcaaaagcgcgccggactggcgtaatccgttgtggcggcacgctgacggatcggtagccgagtggtga

SEQ ID NO: 371833 - DNA, 618 bp, Salmonella enterica
atgcagtggcaaactaatctccctctcatcgctatcttacgcggtattacgcccgatgatgccctggcgcacgttggcgcggtggtggatgcgggatttgacgctatagaaattccgcttaactccccacagtgggaaaaaagcatttctttcgtggtgaaggcgtatggcggcagggcgcttattggcgctggtaccgtactgaaaccggaacaggtagaccagcttgccgggatgggctgcaagctgatcgtcacgccgaatatccaaccggaggtgatccgccgggcggtgagctatggcatgaccgtgtgtccgggctgcgccacggcaacggaagccttttctgcgctggatgcaggcgcacaggcgttaaaaattttcccgtcgtcggcgtttggtccgggctacatcagcgcgctgaaagcggtacttccgccggatgttccgctatttgccgtcggcggcgtgacgccggaaaacctggcgcaatggattaaagccggctgtgtgggcgcgggattgggtagcgatctctatcgcgccgggcaatccgttgaacgcaccgcgcagcaggctgcggcatttgttaatgcgtatcgagaggcagtgaaatga

SEQ ID NO: 371834 - DNA, 879 bp, Salmonella enterica
atgacagctcgctacatcgcaattgactggggatcgaccaatctgcgcgcctggctttaccagggcgacaaatgcctggagagcaggcaatcagaagcaggcgttacacgcctgaacggtaaatctcctgacgcggtgttagcagaagtcacaacacactggcgcgacagcgccaccccagtggtaatggcgggcatgatcggcagtaacgtaggctggcaaaatgcgccttatctgccggttcccgccctgttctccgctattggcgaacagttaaccgccgttggcgacaacatctggatcattcccggattgtgtgtctcacgcgaggataaccacaacgtgatgcgcggtgaagagacgcaactgcttggcgcccgcgaactttctccttcttctgtctatgtcatgcccggcacgcattgcaaatgggtacagactgatacgcaacaaattcatgattttcgtactgtgatgacaggcgaactccatcacttgttgctgcgtcactcgctggtcggggctggtttgccggaacaggaagtttctggcgacgcctatgccgcggggctggagcgcggtcttaattctcctgccgtcctgccttctctttttgaggttcgcgcctcgcacgtgttgggacaccttgcgcgtgagcaggtcagcgacttcctctccggcctgttgattggcgcggaagtcgccagcatgagcgaatccttcgcggcgcaacaggctatcactctcgtcgctggacccgcgctgatctcacgttaccaacaggcgtttagtgctattgggcgtgatgtttcaaccgtggatggcgatatggcatttcaggctggaataaggagcatcgctcatgcagtggcaaactaa

SEQ ID NO: 371835 - DNA, 690 bp, Salmonella enterica
atgactctcaataaaaccgatcgcatcgttatcacgctgggcaaacagattgtcagcggtaaatacgtacccggttcggcgctgccagcggaagcggatctgtgcgaggagtttgaaacgtcgcgcaacatcattcgcgaagtgtttcgttcgcttatggcgaagcggctaattgaaatgaagcgctatcgcggcgcgtttatcgcaccgcgtaaccagtggaattatctcgataccgacgtgctgcaatgggtgctggaaaatgactacgacccgaggcttatcagcgcgatgagcgaaatacgaaacctggtggagccagcaatagcacgctgggcggcggaacgggcaacatcaagcgatctggctgaaattgagtcggcgctaaacgacatgattgccaacaaccaggaccgggaagcgtttaacgaggcggatattcgctatcacgaagcagtgttgcagtcggtgcataacccggtactgcaacagttaaatgtagcgatcagctcgctacagcgagcggtatttgaacggacctggatgggcgatgcggccaatatgccgaaaacgctccaggaacataaggcgctattcgatgcgatacggcatcaggatggcgatgcggcagagcaggcggcattaaccatgatcgccagctcgacacgaaggttaaaggaaatcacatga

SEQ ID NO: 371836 - DNA, 846 bp, Salmonella enterica
atggctatcaaacttattgctatcgacatggatggcacccttctgctgcccgatcacaccatttctccggcggttaaaaacgcgattgccgctgcgcgtgaaaaaggggtaaatgtggtgctgaccacaggccgtccgtatgcgggtgtgcacagttacctgaaagaacttcacatggaacagcccggcgattattgcatcacctataacggggcgctggtgcagaaagcaggggacggcagtacggttgcgcaaacggcgctcagctatgatgactaccgttacctggaaaaactgtcccgtgaggtgggttctcacttccacgcattagaccgaaatacgctttataccgctaaccgcgatatcagctactacacggtgcatgagtcgtatgtggcgaccattccgctggtattttgtgaagcggagaagatggacccgaacacccagttcctgaaagttatgatgatcgatgagcctgccgttctcgaccgggcgattgcgcgtataccggcagaggtgaaggaaaagtacaccgtgctgaaaagcgcgccgtacttccttgaaatcctcgataaacgggttaataaaggcaccggcgtaaaatcactggccgaggcgctgggtattaagccagaggaggtgatggcgattggcgatcaggaaaacgacattgcgatgatcgaatacgccggtatgggcgtggcaatggacaacgccattccgtcggtcaaagaggtggctaactttgtgactaaatcgaaccttgaagatggtgttgcctgggcgattgaaaaatttgtgctgaaccccgatcactcatccggccatttccccgcccgataa

SEQ ID NO: 371837 - DNA, 1263 bp, Salmonella enterica
atgtcgatggcccttaccgcccccccaaccaggaaaagatttttaatcgttgcctgtctgtttattggaatatttattgcttatctcgatcgcgttaatgtttcggtattagccgcgaatgaacccttcttagcctatatgggtattgaaggtatgccattgcaaatcggcatgatgatgaccgtctttctggccgcttatggtatcgctaacgttgtattatcaccgcttggtgattatctcggccccagaaaagcaatgatgctttgtattctgatctggactatcgctttaatgattggcggagtcgctacatcattcgctctaattattatttgccgtatattactgggcatcggagagggattttattatccactgcaaagcgtatttattaaaaactggttcccgaagcaggaacgcggcagagcaaacgcggcgtggatcgtcggccagtcagtcgctcccgccattgcgatgccttttttcacctggtggataggcacccacggctggcgctccaacttctttttatgcgccgctcttgggttaatcccactctggctactttggcgatatgttgctgataaaccagaacaacataaaagtatcagcgagcaggaactggcttatatcaaagccgggcaggaaacggaaagcgcaggcagcagcgaaagttttatgttgcgggtaaaaccggtgattaccaactacagctattggttgctggtgctgtggtatctgtgtctgcaatgcctgtactgggggatgattacctggctgccgacctatctaaaatcagccagagggttcagttgggcggaaatgggctggctggcgtcgcttccctttgtcctgtcgatatttgccaaagcggccgcaggcgtcttcgtcgataaaataggacgcagcgcccccatattaatggtattaatgtttttcgctggcgtcagtatctatttcggcaccataaccgaacataaatatatgtcagcggtactcctctcctttgctgttgctttctgtacgatgggtacacccgttgcctggacgttattacagggaatgatacccggaaaatctatttccgccgccagcggcgtaatgaacggcgtcgccaatggactctcttcattatcccccgtatttatcggcttatttatttctatcactggaacttataccggcggcttactatgcctggtttttatcagcgctatcgccgtggtatcggcattaatcttaacgattaaaaaatattaa

SEQ ID NO: 371838 - DNA, 1191 bp, Salmonella enterica
atgaaaattaccagcgttgatattattgatgtggcgaacgattttgcgtccgccaccagcaaatggcgtccggtggtggtaaaaattaataccgatgagggcatttccggttttggcgaagtcgggttggcctacggcgtcggtgcctccgcaggcatcggcatggcaaaagatttagccgccattatcatcggcatggacccgatgaataacgaagctatctgggaaaagatgctcaaaaaaaccttctgggggcagggcggcggcggcatcttttccgctgcgatgagcggcatcgatatcgcgctgtgggatatcaaaggcaaagcgtggggcgtgccgctgtataaaatgcttggcggcaaaagccgcgagaaaataagaacctacgccagtcagctacagtttggttggggggacggcagcgataaagatatgctgaccgagccggagcagtatgcacaggcggcactgaccgccgtcagcgaaggctatgacgcaataaaagtggataccgtcgcaatggatcgccacggcaactggaaccagcaaaacctcaacgggcctctcaccgataaaatcctgcgtctgggctacgaccgtatggccgccattcgcgatgcagtcggcccggatgtggatatcatcgccgaaatgcatgcctttacggataccacctcggcgattcagtttggccgcatgatcgaagaactgggcgtcttctactacgaagagccggtcatgccgttgaaccccgcgcagatgaagcaggttgccgataaggtcaatattccactggcggctggcgaacgtatttactggcgctggggataccgtcctttcctggaaaacggcagcctgagcgttattcagcccgatatctgcacctgcggcggcatcaccgaagtgaagaaaatctgcgatatggcgcatgtttacgacaaaacggtgcaaatccacgtttgcggcgggccaatttccacagcagtggcgctgcatatggaaaccgtgatcccgaacttcgtcatccacgaactgcaccggtatgcgctgctggagccgaatacacagacctgtaaatacaactacctgccgaagaacggcatgtacgaagtcccggagcttcccggcatcggccaggaactgaccgaagaaaccatgaaaaaatcaccaaccatcaccgtaaaataa

SEQ ID NO: 371839 - DNA, 897 bp, Salmonella enterica
atgaatttaactatccggcaatttcgcgcgtttctggccgtcgcggatttgcgtagttttaccgccgccagcaaatatctgtgcatcacgcagggagctgttagcggtttaatcaacgaaatggaaagccagatggaggtttcccttttcgaccgcacttcgcgcgtggtgaagctatcgcccgacggcgaaaagtttttacccgccgccatgcgggttgttgaagagtttcaacgggccgaaaattatgcccgcgacctgaaagagatcaaaaaatccctggtgcgggttgttggcgcgccgctgatcgcctgtgcttttctgccgcaaatcatccatgcctttaagcggcagcatccgcatacccacgtacagcttattgataagcccatgtcgcaattacaaaaaagcattatgttgggagaagccgattttggtatcggcccggagcggccgctggaaccggaaatcgacaaacaaacgctgttcacaacggaaatcgccctgtactgccatccggactatcggctgcataaaaaaacggttcgctgggaagagattcaaagcgaagagctgatcgccgttggcaacgaatccattccgatgatctccgcaaccgctggcgtgcgcattaagcccaaaatgacggtggaacatatggcgaccgccatgtcgctggcggcgcagtgtgaaggcgtggtgatcgccggaaccttttcccgccattacgccaaaagctaccaattagcgacctgttcgctcacgcctccgctgcggcgcaatatgaacctttatttccatgcgtggcgcgcacaaacgcccgccactcagcgctttagagattttttattcagctatgtcgatgaacatcatgatgccccggccaaccagcggtag

SEQ ID NO: 371840 - DNA, 2415 bp, Salmonella enterica
atgtcgaattcttatgactcctccagtatcaaagtcctgaaagggctggatgcggtgcgtaagcgcccgggtatgtatatcggcgacacggatgacggcaccggtctgcaccacatggtattcgaggtggtagataacgctatcgacgaagcgctcgcgggacactgtaaagatatcgtcgtgactattcacgccgataattccgtgtccgtaacggatgatggccgtggcattccgaccggtattcacccggaagaaggcgtctcggcggcggaagtgatcatgaccgttctgcacgcgggcggtaaatttgacgataactcctataaagtctctggtggtctgcacggcgtgggcgtctcggtagtcaacgctctgtcgcaaaaactggaactggttatccagcgagatggcaaaattcaccgtcagatctacgagcacggcgtgccgcaggcacccctggccgtcactggcgataccgataaaaccggcacgatggtacgtttctggccgagccacgaaaccttcactaacgtcactgaatttgaatatgagatcctggcgaaacgcctgcgtgaactgtcattcctgaactctggcgtttccatccgcctgcgcgacaagcgcgatggcaaagaagatcatttccactacgaaggcggcatcaaggcgtttgttgaatatctgaacaagaataaaacgccgatccacccgaatatcttctacttctccaccgaaaaagacggtatcggcgtcgaagtagcgctgcagtggaacgatggtttccaggaaaatatctactgctttaccaacaacattccgcagcgtgacggcggtactcaccttgcaggcttccgtgcggcgatgacccgtacgctgaacgcctacatggacaaagaaggctacagcaaaaaagccaaagtcagcgccactggcgacgatgcccgtgaaggtctgattgcggtggtttccgtaaaagtaccggacccgaaattctcctcgcagaccaaagacaagctggtctcttccgaggtgaaatcggcggtggaacagcagatgaacgaactgctgagcgaatacttgctggaaaacccatctgacgcgaaaattgtcgtcggcaaaattatcgacgccgcgcgtgcgcgtgaagcggcgcgtcgcgcccgtgaaatgacccgtcgtaaaggcgcgctggatttagcgggcctgccgggcaaactggcggactgccaggaacgcgacccggcgctgtccgaactgtacctggtggaaggggactccgcgggcggctctgcgaagcaggggcgtaaccgcaagaaccaggcgattctgccgctgaaaggtaaaatcctcaacgtcgagaaagcgcgcttcgacaagatgctctcctctcaggaagtggcgacgctgatcaccgcgctgggctgcggtatcggtcgcgacgagtacaacccggacaagctgcgctatcacagcatcatcatcatgaccgatgcggacgtcgacggctcgcacatccgtacgctgctgttgaccttcttctatcgtcagatgccggaaatcgtcgagcgcggccacgtctacattgcgcagccgccgctgtacaaagtcaagaaaggcaagcaggaacagtacattaaagacgacgaagcgatggatcagtaccagatttccatcgcgcttgacggtgcgactctgcacgcgaacgctcatgcgccagcgctatccggcgaagcgttagaaaaactggtctctgaatataacgccacgcagaaaatgattggtcgtatggagcgtcgcttcccgaaagcgctgctcaaagagctggtgtatcagccaactctgaccgaagccgatctttctgatgagcagactgtaacgcgctgggtgaatgcgctgattaccgagctgaacgagaaagagcagcacggcagtcagtggaagttcgatgttcatactaatacggaacagaatctgttcgagccgatcgttcgcgtgcgtacgcatggcgtggataccgattatccgttggatcacgagtttgtgaccggcgcggaatatcgtcgtatctgcacgctgggcgagaagctgcgcggtctgattgaagaggatgcgtttatcgaacgcggcgagcgtcgccagccggtaaccagcttcgagcaggcgctggagtggctggtgaaagaatcacgtcgcggtctggctatccagcgttataaaggtctgggtgaaatgaacccggatcagctgtgggaaaccaccatggacccggaaagccgccgtatgctgcgtgtgaccgtcaaagatgcgattgctgccgaccagctgttcaccacgctgatgggtgatgccgttgagccgcgtcgtgcctttatcgaagagaacgccctgaaagcagcgaatatcgatatttaa

SEQ ID NO: 371841 - DNA, 1074 bp, Salmonella enterica
atgtcactgacgcgccttttaatcaaagacttccgcaacatagaaaatgcggatctcgctttatcccccggctttaacttcctggttggcgccaacggcagcggcaaaaccagcgtgctggaagctatctatacgcttggccacggtcgggcgtttcgcagtttgcagcctggccgcgtgattcgtcatgagcaggaagcgtttgttctccacgggcgcctgcagggcgaagagcgtgagacgtcgattggcttaaccaaagataagcagggcgacagcaaagtccgtatcgacggtaccgacggtcacaagatcgcggagctggcgcatttaatgccgatgcagttgattacgccggaggggtttactttactcaacggcggccccaaatacagaagagcgttccttgactggggatgctttcacaacgaagccggattcttcaccgcctggagcaacctgaaacgattgctgaaacagcgtaatgctgcgctgcgccaggtgagtcgttatgagcaattgcgcccgtgggataaagagctgattccgctggcggaacaaattagtacctggcgggcggagtacagtagcgctatcgcacaggacatggcggatacctgtcagcagtttttacctgaattttccctgacgttctctttccagcgcggctgggagaaagagacagactatgcggacgtgctggagcgaagctttgagcgtgaccgtatgttgacctacaccgcgcacgggccgcataaagcggactttcgcattcgcgccgacggcgcgccggtggaagataccctgtcgcgcgggcagctaaagttattgatgtgcgccttacgtctggcgcagggcgagttcctcacccgcgaaagcgggcggcgctgcctgtacctgatagatgattttgcctctgaacttgacgatgcgcgtcgcggactgctggccagccgcttaaaagccacgcaatcgcaggtctttgtcagcgcaattagcgctgaacacgttatagacatgtcggatgaaaattcgaagatgtttaccgtggaaaagggtaaaataacggattaa

SEQ ID NO: 371842 - DNA, 1101 bp, Salmonella enterica
atgaaatttaccgttgaacgtgaacatttattaaaaccgcttcagcaggtcagcggcccgctgggcggtcgtcctacgctgccgattctcggtaacctgctcctccaggtagcggacggtacgctttctctgaccggcaccgatcttgaaatggagatggtcgcgcgcgttacgctttctcagccgcatgagccgggcgccactaccgtgccggcgcggaaattctttgatatctgccgcggcctgccggagggcgcggagattgccgttcagttggaaggcgatcggatgctggtgcgttctggccgtagccgcttctcgctgtctacgctgcctgccgccgatttcccgaatcttgacgactggcaaagcgaagttgaatttacgctgccgcaggccacgatgaagcgcctgattgaagcgacccagttttcgatggctcatcaggatgtgcgctactacttaaacggtatgctgtttgaaacggaaggtagcgaactgcgcactgtcgcgaccgacggccaccgcctggcggtgtgctcaatgccgctggaagcgtctttacccagccactcggtgattgtgccgcgtaaaggcgtgattgaactgatgcgtatgctcgacggcggtgaaaacccgctgcgcgtgcagatcggcagtaataatatccgcgcgcacgttggcgactttatcttcacctcgaagctggtggatggtcgcttcccggattaccgtcgcgttctgccgaagaatccggataaacatctggaagcgggctgcgatatcctcaagcaggcgtttgcccgcgcagcaatcctctcgaatgagaaattccgcggcgtgcgtctgtacgtcagtgagaatcagctcaaaatcaccgccaataacccggagcaggaagaagcggaagagattctggacgtgagctacggcgggacggagatggaaatcggctttaacgtcagttacgtgctggacgtgctcaatgcgctgaagtgcgaaaccgtgcgcattatgctgacggattccgtatccagcgtacagattgaggatgcggcgtcacagagtgctgcctacgttgttatgccaatgaggctgtag

SEQ ID NO: 371843 - DNA, 1401 bp, Salmonella enterica
gtgtcactttcgctttggcagcagtgtcttgcccgattgcaggatgagttaccagccacagaattcagtatgtggatacgcccgttgcaggcggaactgagcgataacacgctggctttgtatgcgccaaaccgttttgtgctcgattgggtaagagataagtacctcaacaatatcaatggattactcaacacattctgcggcgcggatgccccacaactgcgttttgaagtgggaacaaagcccgttacgcaaacgctaaaaacgcctgtgcataacgttgtcgcgcctacgcagacaacgacggcgcagccgcagcgcgtagcgcctgcggcccgttcgggctgggataacgtaccagcgccggcggagccgacctaccgctccaacgtcaatgttaaacatacatttgataacttcgtcgaaggtaaatccaaccaactggcgcgcgcggcggcacgtcaggtggcggataatcctggcggcgcttataacccgttattcctctatggcggcaccggtctgggtaaaactcacctgctgcacgcggtgggtaacggcattatggcgcgcaaacccaacgcgaaagtcgtgtatatgcactccgagcgctttgtgcaggacatggtaaaagccctgcaaaataacgccatcgaagagtttaaacgctactaccgctccgttgacgcattgctgatcgacgatattcaattcttcgccaataaagaacgatcccaggaagagtttttccatacctttaacgctctgctggaaggcaatcagcagatcattttgacgtcggatcgctatccgaaagagatcaacggcgttgaggatcgtctcaagtcccgctttggttgggggctgacagtggcgatcgaaccaccagagctggaaacccgcgtggcgatcctgatgaaaaaagcggacgaaaatgatattcgtctgccaggcgaagtagcgttctttatcgccaagcgtctacgctctaacgtacgtgaactggaaggcgcgctgaaccgggtgatcgccaatgccaactttaccggccgggcgattactatcgactttgtgcgcgaagcgctgcgcgatttactggcgttgcaggaaaaactggtcaccatcgacaatattcagaagacggtggccgagtattacaaaatcaaaattgcggatctgctttctaagcgtcgatctcgctcggtagcacgtccgcgccagatggctatggcgctggcaaaagaactcaccaaccacagtctgccggaaatcggcgatgcgtttggcgggcgcgaccacactaccgtacttcatgcctgtcgtaaaattgagcaactgcgtgaagaaagccacgatatcaaagaagatttttcgaatttaatcagaacattgtcgtcgtga

SEQ ID NO: 371844 - DNA, 198 bp, Salmonella enterica
atgctggcgcagacggaagctttcacgcgtcagacgtttaatccggttgcgttcatgcgcacgtcgaacatttttcttggcgacggtaagaccgatacggggatgccccagcgaattcaggcggccgaggatggtgatttgcggcgtgccagcccgttgaggttgctggaagacgaatgtgaaatgagcgggagttaa

SEQ ID NO: 371845 - DNA, 1647 bp, Salmonella enterica
atggattcgcaacgcaatcttttagtcatcgctttgctgttcgtgtctttcatgatctggcaagcctgggagcaggataaaaatccgcaacctcagactcaacagaccacgcagacaacgaccaccgcagcgggtagcgccgccgaccagggcgtaccagccagtggccaggggaaaatgattacggtgaaaaccgatgtgcttgatttgactatcaacacccgtggtggtgatgtcgagcaggccttgctcccggcttacccgaaagaactgggttccaacgaaccgttccagctgctggaaaccaccccgcagtttatctatcaggcgcaaagcggcctgacaggccgcgacggcccggataacccggcgaacggcccgcgtccgctgtacaacgtcgagaaagatgcgtttgtactggccgacggtcagaacgaactgcaggttccgatgacttatactgacgccgcaggcaacacgtttaccaaaacgtttgtctttaagcgtggcgattatgcggttaacgtgaactatagcgtgcagaacgccggcgaaaaaccgctggaagtctccacctttggtcagttaaaacaatccgtcaacctgcctcctcatcgcgacaccggcagcagcaactttgcgctgcatacgttccgcggcgcagcgtactccacgccggatgagaagtatgagaaatacaaattcgacaccattgccgataacgaaaacctcaacgtcagctccaaaggcggttgggtggcaatgttgcagcagtatttcgctaccgcatggattccgcgtaacgacggcaccaacaatttctacaccgccaatctgggtaacggcattgtcgctatcggctataaagcgcagccggtactggtacagccaggccagactggcgcgatgaccagcaccctgtgggtcggcccggaaattcaggataaaatggcggctgttgcaccgcacctggatttgaccgtggactacggctggttgtggttcatctctcagccgctgttcaagttgctgaagtggatccacagctttgtgggcaactggggcttctccattatcatcattacctttatcgttcgcggtatcatgtacccgctgaccaaagcgcagtacacgtcaatggcgaagatgcgtatgctgcagccgaaaattcaggcgatgcgcgaacgtcttggcgatgataaacagcgccaaagccaggagatgatggccctgtacaaagcggagaaggttaacccactgggcggctgcttcccgctgatcatccagatgcctatcttcctggcgttgtactacatgctgatgggttccattgaactgcgtcatgcgccgttcgcgctgtggattcatgacctgtccgcacaggacccgtactacattctgccgatcctgatgggcgtaacgatgttcttcattcagaagatgtcgccgaccaccgtgaccgacccgatgcagcagaagatcatgacctttatgccggtcatctttacggtgttcttcctgtggttcccgtcaggtctggtgctgtactatatcgtcagcaacctggtcaccatcattcagcagcagctgatctaccgtggtctggagaagcgtggcctgcatagccgcgagaagaaaaaatcctga

SEQ ID NO: 371846 - DNA, 1365 bp, Salmonella enterica
atgagccataacgacactatcgtcgcccaggcaaccccaccgggacgcggtggcgtgggtatcctgcgtatttccggtctgaaggcgcgcgacgttgcgcaagaggtgctgggcaagctgccgaagccgcgctatgccgactacctgccgtttaaagatgttgacggcagcgcgctggatcagggtattgcgctgtggttccccggcccgaactccttcaccggtgaagatgtgctggagctacaagggcacggcggtccggtgattctggacctgctgttaaaacgtatcctgacgcttccaggcgtgcgcattgcccgaccgggcgagttctccgagcgagcgttcctcaacgataagctcgatttagcccaggcggaagccattgccgacctgatcgatgccagttccgaacaggcggcgcgttcggcgctaaactcgttacagggggcattttccgcccgcgttaaccaccttgtggaagcacttactcacctgcgaatctacgtcgaagcggctatcgattttccggatgaggagatcgactttctctctgacggcaaaatcgaagcgcagctcaatggtgtcatcgccgatcttgacgccgtgcgcaccgaagcgcgccagggcagcctgctgcgcgaagggatgaaggtagtgattgccggacgcccgaatgccgggaaatccagcctgctgaatgcgctggcaggccgtgaagcggccattgttaccgatatcgccggcaccacgcgcgacgtgttgcgcgagcatattcacatcgacgggatgccgctgcatatcatcgataccgccggactgcgcgacgccagcgacgaagttgagcgtatcggcatcgaacgcgcctggcaggagattgaacaggccgatcgcgtgctgtttatggtggatggcaccacgacggacgccgttgaccctgccgacatctggccggactttatcgcccgtctgcccaaaaatctaccgattaccgtggtacgtaacaaggcggatatcaccggcgaaacgttgggtattagtgaagtaaacggtcactcactggttcgcctctcggcgcgtaccggcgaaggcgtcgacgtgttgcgtaaccacctcaagcagagcatggggtttgataccaatatggaagggggcttcctggcccgccgccgtcacctacaggcgctggcggaagccgctgaacaccttgagcagggcaaagcgcagctattaggcgcatgggcgggggaactgctggcggaagagttgcgcctggcgcagcaaagcttaagcgagattaccggcgagtttacctccgacgacctgctgggacggattttctccagcttctgtatcggcaaataa

SEQ ID NO: 371847 - DNA, 1188 bp, Salmonella enterica
atgaaacgttttctactgtgtagttttgccctggttttactctatcctgccggtattgatatgtatctggtcggtttaccgcgtatagccgccgatctgaacgccagcgaggcgcagttgcatatcgccttctccgtttacctggccggaatggcgacggccatgctgtttgccgggaagatagccgatcagtcaggccgcaaaccggtcgcgatcgtcggcgcgatcgtctttatgatggcctcactgctttgttcacgggcgtcggaaggctcgctatttctgagtgggcgttttcttcagggaataggtgcaggcggctgctatgtggtggcgttcgccattctgcgcgacacgctcgacgagcatcgccgggcgaaagtgctgtcattattgaatgggattacctgtattgtgccggtactcgccccggtggtggggcatttgattatgcttcgtttcccctggcaaagtctgttctatacgatgtccgcgatgggcattattgtgggcctgttatcactgtttatcctgcgcgagacgcgcccggtaaggctggctccacgcgatttatcacgatcgtcgcccgccgccgagtcgctgattaaccgttttttcgttagtcgactggcgatcaccacccttagcgtgtcggtgatcctgacctttgtcaatgcctctccagtgctgctgatggaggtgatgggatttagccgtggcgactatgccattaccatggcgctcaccgcaggcgtcagtatggtcgtctctttttccaccccttttgcgcttgggttatttaagccgcgaaccttaatgctcgtctcacaggggctgtttttgacggctggcgtgacgttaagccttgctcataccaataccgtcacactctttggcctgacgcttatctgcgccggattctcggttggttttggcgtcgcgatgagccaggcgctggggccgttttcgctgcgcgccggagtggccagttccacgctcggtatcgcgcaggtttgcggttcatcactgtggatttggctggcggcaatactcggtatcagcgcgatgaatatgctgatcgggattctgattggttgtagcatagtgagtattctgctgatcttctccgtcacgcccaacaggtccgtagccgagcatgaagaaatcccttaccaatctcgaccttaa

SEQ ID NO: 371848 - DNA, 960 bp, Salmonella enterica
atgaagaaatcccttaccaatctcgaccttaatttgctgttatgcctacagttactcatgcaggagcgcagcgtcactaaagctgcaaaacggatgaacgtaacgccctcggcggtcagcaaatcgctggcgaaactccgggcatggtttgacgatccgctgttcgtcaatacgccgctgggcctggcgccgacgccgctgatggtcagtatggagcaaagtctggcggactggatgcagatggggaatcaactgcttgataaaccgcatcatcaaacgccgcgcggtttaaaatttgagttggcagcagagtcgccgctgatgatgattatgtttaattcactgtcgcagcagatttatcagcgctatccgcaggctaccattaaggttcgcaactgggattatgactcgctggaggcgattacgcgcggggaagtcgatatcggatttaccggacgcgaaagccatccccgctcgcgagaattgctcagtctgttgccgctcgcgattgattttgaggtgttgtttagcgatttgccgtgggtctggctgcgggaagatcatccggcactgcgtgaagcgtgggatctggacacttttctgcgctacccgcatatcagtatttgctgggagcaaagcgatacctgggcgctggatgatgtcctgcaagaaatgggacgcaaacgccatatcgcgttgagcctgccggggttcgagcagtcactctttatggccgcccagccggatcacaccctgatagcaaccgcgccgcgctattgccagcactacaatcagctccaccagctaccgttagtggcgcgccccctgccttttgatgcgcaacagcgggaaaagctgatggtgccgtttaccctattatggcacaaacgtaatagtcataatcccaagattgtgtggctacgacaggctatcaacacgctctgccgtcgccttatctga

SEQ ID NO: 371849 - DNA, 756 bp, Salmonella enterica
atggcgactcactttgccagagggatacttacggagggacagttggtttcaattcgtctctcttcgtcttgccatattgaagccagaaacctgcctgctcaccgacgaacgcgttttctcgcctccagaggccttcttgccgaactgatgtttatgctgtacggaattagcgagctgccggaaatcattattcaggcgaaaggtaaacccgcgtttcgtgacaaaaatctgccaggcttttctatctcctacgccggaaatatggttggcgtggcgttgaccaccgaaggagagtgcgggctggatatggaattacagcgcacctcccgcggctttcaccatccgcattcgctcgaacgccaccctttctcccgtaatgaaaacttatgggtagccaatcaaaacgatcccaacgaagcgcgagcgcaactcattacattgcgccagagcgtgttaaaactcaccggcgatgtcatgaatgacgatccgcgggagctgcaacttttacccgttgccggacgcctgaagtgcgcgcatgtcacgcagcttgaagccgtatgcgatgcggaagatgtactggtatggtccgtaaccgttacgccagcgatagaaaaattaaaagtgtgggagttcgatggcaaactgggctggaaaagcctgcccgatatccagacgcgcgccaatgagccaaccggtcgtctgatgcgattcgcccaactccccgccgccaaatcgtatacgcttaatcgttcataa

SEQ ID NO: 371850 - DNA, 567 bp, Salmonella enterica
atgtctgaaacgctgaatgtggttacactgctgggaagtttacgcaaaggttcctttaacgggatggtggcgcgtacgctgcctaaagtcgcgccggcaggaatgacggtatcgccgctgccttcgatcggggatattccgctgtatgacgccgatatccagcaggacgagggatttccagccagcgtagaggcgctggcggagcagattcgcaacgccgacggcgtcgtcattgtgacgccggaatataactattccgttcccggcggcctgaagaatgccatcgactggctatcccgtctgcctgagcagccgctggcgggtaagcccgttcttatccagaccagttcaatgggggcgattggcggcgcgcgctgccagtatcatctgcgccagattctggtgttccttgatgcgatggtgatgaataaaccggaatttatgggcggcgtgattcagaataaagtcgatccgcaaactggagaagtggtggatcagggaacgttagatcatttgaccggtcagttgaccgcatttggcgagtatattcagcgcgttaaagcgtaa

SEQ ID NO: 371851 - DNA, 1338 bp, Salmonella enterica
atgagtcaacaacacaccacccaggcttctggtcagggtatgctggaacgcgtgtttaaactgcgcgaacatggcacgacggcacgaaccgaagtgatcgccggttttaccactttcctgacgatggtttatatcgtttttgttaacccgcaaattctgggcgtagctggcatggacaccagcgccgtctttgtgaccacctgtctgattgcggcctttggcagtattctgatgggcctgttcgctaacttgccggtggcgctggcgcccgcgatggggctgaatgcgttctttgccttcgtggttgtgcaggcaatgggactgccgtggcaggtaggcatgggcgccattttctggggcgctgttggtcttttattgctgactatcttccgcgtgcgttactggatgatcgccaacattccggtcagcctgcgcgtgggcatcaccagcggcatcggcctgtttatcggcatgatggggctgaaaaacgccggcgtgatcgtcgctaacccggaaacgctggtcagcatcggcaacctgacctcgcacagcgtgctgctgggggttctcggattctttattattgcgattctcgcttcgcgcaacattcatgcggcggtgctggtgtccatcatcgtcacgacgctgcttggctggatgatgggtgatgtacactacaacggcattgtctccgcgccgccaagcgtcaccagcgtggtagggcatgtcgatttggcaggctcgttcaatcttggcctggcgggggttattttctccttcatgctggttaacctgttcgactcctccggtaccctgatcggcgtgaccgataaagcgggcctggcggatgcgaaaggtaagttcccgcgcatgaagcaggcgctgtttgttgatagtatctcttctgtcactggcgcatttgtcggaacgtcttctgtgaccgcttatattgaatcgtcttccggcgtttcggtgggcggtcgcaccggtttaacggcggtggtggtcggtattttgttcctgctggttatcttcctgtcgccgctggcgggcatggtgccgccttacgcggcggcgggcgcgttgatttacgtcggcgtgctgatgacctccagcctggcgcgggtaaactggcaggatttaaccgaatcggtcccggcgtttattacggcggtaatgatgccgtttagcttctcgatcaccgaaggtatcgcgctgggctttatctcttactgcgtgatgaaaatcggtaccggtcgcctgcgcgaccttagcccgtgcgtagtgattgtcgcgctgttattcgtgctgaagattgtgtttattgacgcacactga

SEQ ID NO: 371852 - DNA, 666 bp, Salmonella enterica
atgtcccaaatcgaagcggtgttttttgactgtgacggcacgctggtcgacagtgaagtaatttgctcgcgcgcctatgtcactatgttccggcagttcggcattacgcttaagctcacggaagtattcagacgctttaaaggcgtaaagctctacgaaattatcgataccatcagtaaagagcatggcgttgcgctggcaaaggcggagctggagccggtgtaccgcgcggaagtggcgcgtctgttcgataccgaactggaagcgatcgcgggcgcaaataccctgctggagagcattaagacgcctatgtgcgtggtatccaacggaccggtcagtaagatgcagcattcgctgggtaaactgggcatgttgcattattttcccgatttgctgtttagcggttacgatattcaacgctggaagcccgatccggcgctgatgctccacgcggcgaacgccatgaaggtcaatgttgagaagtgtattctggtggatgattccagcgcaggcgcgcagtcaggaattgcggcgggaatggaagtgttttatttctgcgccgatccgcataacaagccgatcgatcaccctaacgtgacgacttttaccgatttggcgcagttgccgggattgtggaaagcgcgcgggtgggagattacgcgttaa

SEQ ID NO: 371853 - DNA, 726 bp, Salmonella enterica
atggacagtctgaaccttaataaacatatttccggccagttcaacgccgaactggaaagtatccgcactcaggtaatgaccatgggcggcatggtggagcagcagctttctgacgctatcaccgccatgcacaaccaggacagcgagctggcgaagcgcgtggtagaaggcgaccatcaggttaatatgatggaagtcgccatcgatgaagcctgcgtgcgtattatcgccaagcgccagccgacggcgagcgatctgcgtctggtgatggcgattatcaaaaccatcgccgaactggagcgcattggcgacgtggcggataaaatctgccgtaccgcgctggagaaattctcccagcagcaccagccgctgttggtgagtctggagtcactgggccgccacaccgtacagatgctgcacgacgtgctggatgcgttcgcgcgcatggatctcgatgaagcggtgcgtatctatcgtgaagataagaaagttgaccaggaatatgaaggcatcgtgcgtcagctgatgacctacatgatggaagactcgcgcaccattcccagcgtgctgaccgcgttattctgcgctcgttctatcgagcgtatcggcgaccgctgccagaatatctgcgaatacatcttctacttcgtgaaggggcaggatttccgtcacgtcggcggcgatgagctggataaactgttggcggggaaagatccgaaagagtaa

SEQ ID NO: 371854 - DNA, 774 bp, Salmonella enterica
atgagtatggttgaaactgccccgagtaagattcaggttcgtgatttgaacttctactacggcaaattccatgccctgaagaacattaatctggatatcgcgaagaatcaggtaacggcatttatcgggccatccggctgtggtaaatcaacgctactgcgtaccttcaataaaatgtattcgctttatccggagcagcgcgcggaaggtgaaattctgctggatggcgacaatattctcaccaacacccaggatatcgcgctgctgcgcgcaaaagtggggatggtattccagaagccgacgccgttcccgatgtccatctatgacaatatcgcctttggcgtgcgtctgtttgagaagctgtctcgcgccgatatggacgagcgcgtgcagtgggcgttgaccaaagccgcattatggaacgaaaccaaagataaattgcaccagagcgggtactctctctccggtggtcagcagcagcgtctgtgcattgcgcgcggtatcgccattcgcccggaagtgttgctgttggatgagccatgttcagctctggacccgatctctaccgggcgtattgaagagctgatcaccgagctgaaacaggattacaccgtggtgatcgtgacccacaacatgcagcaggcggcacgttgctccgatcatacggcgtttatgtacctgggcgagttgattgagttcagcaacacggacgatctgttcaccaagcccgcgaagaaacaaacagaagactatatcaccggtcgttacggttaa

SEQ ID NO: 371855 - DNA, 891 bp, Salmonella enterica
atggctacgcttgatatgcagaacaccgcgcagctcgcggaatcccgtcgcaagatgcaggcgcgtcgccgcatgaagaaccgtatcgcactaacgctctcaatggcgacgatggcatttggcctgttctggctgatctggattttgatgtccaccatcacgcgcggcattgatggtatgtcgctggcgctgtttaccgaaatgacgccgccgccgaacacggcgggcggcgggctggcgaacgccctggcggggagtggattgttgattctctgggctaccgtattgggtacgccgctggggattatggccgggatctatctggcggagtatggccgtaaatcctggctggcggaaatcattcgctttattaacgacattctgctttccgcgccgtcaattgttgtggggctgtttgtttacaccatcgtggtggcgcagatgcagcacttctccggctgggcaggggtgattgcgctggcgctgttgcaggtaccgatcgttatccgtaccactgaaaacatgctcaaattggtgccggatagcctgcgtgaagccgcttatgcgctgggtacgccgaagtggaagatgatttccgcgattacgctgaaagcctctatctccggcattatgaccggtatcctgctggctattgcgcgtattgccggcgaaacggcgccattgttgtttaccgcgctctccaaccagttctggagcaccgacatgatgcagccgatcgccaacctgccggtgaccatttttaaattcgcgatgagcccgtttgccgaatggcaacaattagcctgggcgggcgtgctgattattaccctgtgcgtactgctgctgaatattctggcgcgtgttgttttcgcgaagaaaaaacacggttaa

SEQ ID NO: 371856 - DNA, 960 bp, Salmonella enterica
atggctgcaaccaagcctgcttttaacccgccgggtaaaaaaggcgacatgattttcagcgcgctggtaaaactggctgcgctgattgtgctattgatgttgggcggtattatcgtctcattgatcatctcctcctggccaagtattcagaaatttggtttctcatttctttggactaaggaatgggacgcgccaaacgatatctacggcgctctggtgcccatttatggcacgctggtgacctcctttatcgcactgctgatcgccgttccggtcagtttcggcattgccctgtttttaaccgagctggcgccaggctggctaaagcgtccgctcggcatcgccattgaactgctggcggcaattcccagtatcgtgtacggcatgtgggggctgtttatcttcgcgccgctgtttgcgacgtacttccaggagccggtcggcaatattctttccaacattccgtttgtcggcgcgctgttctccggcccggcctttggtatcggcattctggcggcgggcgtcatcctcgccatcatgatcatcccctacattgcggcggttatgcgcgacgtcttcgagcaaacaccggtaatgatgaaagagtccgcttacggtatcggctgtactacctgggaagttatctggcgcatcgtgctaccgttcaccaaaaatggcgtgatcggcggcattatgctggggctgggccgtgctctgggtgaaacgatggcggtcacttttatcatcggcaacacttaccagctcgacagcgcgtcgctgtatatgccgggcaacagcatcacttccgcgctggcgaacgaattcgctgaggcggaatcgggcctgcacgtggcagcgttgatggagctggggctgatcctgtttgtgatcacctttatcgtcctggcggcgtctaagttcatgattatgcgtctggcgaagaacgagggagcacgttaa

SEQ ID NO: 371857 - DNA, 1041 bp, Salmonella enterica
atgaaagttatgcgtaccactgtcgcaactgttgtcgccgcgaccttatcgatgagcgcgttctctgcctttgcagcagcaagcctgacaggtgccggtgcaacgtttcctgcgccggtgtatgccaaatgggcggatacctaccagaaagaaaccggtaacaaagtcaattaccaggggataggctcttccggcggcgtgaaacaaatcaccgcgaataccgttgattttggcgcttccgatgcgccgctgtctgacgaaaaactgaatcaggaaggcctgttccagtttccgacggtgatcggcggcgtggtgctggcggtgaatattccaggcctcaaatccggtgaactggtgctggatggtaaaacgctgggtgacatctacctcggtaaaatcaagaagtgggatgatgaagccatcaccaaactgaacccaggcgtgaagctgccctcacagaatatcgctgtggtgcgtcgcgctgacggttccggtacctccttcgtgttcaccagttacctggcgaaagtcaacgacgagtggaaatcgaaagtgggcgcgggttctaccgtgaactggccaaccggtctgggcggtaaaggtaacgacggcatcgcagcatttgtacagcgtctgccaggcgctattggctacgttgaatacgcttacgccaagcagaacaacctggcctacaccaaattggtttctgccgacggcaaaccggtaagcccgacggaagagagcttctctaatgcggcgaaaggcgcagactggagcaaaaccttcgcgcaggatctgaccaaccagaaaggtgacgatgtgtggccaatcacttccaccacgtttatcctggtccacaaagcgcagaagaaacctgagcagggtgctgaagtgttgaagttcttcgactgggcctacaaaaatggcgctaagcaggcgaatgatctggactacgccagcctgccggataacgttgttgagcaggttcgtgctgcatggaagaccagtataaaagacagcaacggtaaggcgctgtattaa

SEQ ID NO: 371858 - DNA, 1374 bp, Salmonella enterica
atgactaaaaaaattgttgctgtgacggcctgtccgacgggcgtcgcccatacctttatggcggcagaagcgttggaaattgaagcccgcaagcgtggtgactggatcaaggttgaaacccgcggttccgtcggggcgaagaacacgctgaccgcggaagagatagcgcaagcggatgtggtgattatcgcggcggatattgagctggatctgtcaggctttgttggcaaaagactctatcgcaccagtaccggcgcggcgctaaaaaagagtgcgcaggaaatggataatgctttcaatagcgccgaggtctatcaggggagtgccgggcgctcttcttcagctggtaaaacagagctacccggcgtttataagcatttaatgaccggcgtatcccatatgcttcctttggtggtggcgggaggattgtgtatcgcgctctcttttgtcttcggtatccaggccttcaatgagccgggcacgctggcggctgcgttatttcaaatcggtggtaaggcggcctttgcgctgatggtgccggtactggctgggtttattgccttctcaattgccgatcgtccgggtctggccccggggcttattggcgggatgttggccagcctgtgcggtgctggtttcctgggagggattgtggccggttttctggccggttacagcgtacggtttctggcgcaaaatattaagctaccagcgtcaatggaagcgcttaagcctgtgctggttctgccgctactgtctacgctgattaccggcctaatcatgatttacgtggtgggtggcccggtgtctgcggtgatggaagggctgacgacgttcctggggaatatgacctctacgaatgctatcttgctgggaatgttgctgggcgcaatgcaaggttttgaccttggtgggccggtgaataaagctgcgtataccttcggcgtcggtttactggcttctcattcctatatgccgatggcggccattatggcggcagggatggtaccggcattagggatgggcgtcgcaacctgggcggccagagcgaaattcactgcttctgagcatgaagcgggtaacgcatcctttatcctggggctgtgctttatctctgaaggggcgattcccttcgctgcgcgtgacccgatgcgcgtcatcccttccacgatggtcggtggcgcaatcgccgggggactgtccatgtatttcggttgtacactgatggcgccacacggtggtctctttgtcctggcgatcccgcatgcggtagaacatgtgatgcaatatctgctctcgattgccctgggcacgattgtttgcggcctgatgtacgcgctgttgaaaccgtctgcggttgcgcaaacagtttaa

SEQ ID NO: 371859 - DNA, 819 bp, Salmonella enterica
atgacaaagcgcattaataaagacacgcaggtctgcatgtccctggcggcacgcccaagtaacttcggtacacgctttcacaactatctgtacgaagcgctggatctcaattatctctacaaagctttctcgccgaccgatcttacgcaggccattagcggcgtgcgcgggctggggatacgtgggtgcgcgatctctatgccgtttaaagaagcctgcattccgctggtggatgaactggatgcttctgctcaggccattcactcagttaataccattgtgaataccaatggccatctgaaggcgtacaacaccgattacattgcaatagctcgcttgctggcgagttacaaggtctctcccgacctggtgtttgctttgcgtggcagcggtggtatggcaaaggcggtggcctgcgcgctgaaggatgcggggtttacccgtggttatattgtcgcgattgatgaagcgtcaggtaaacaactggccgaactctatggctatgaatggcgcccggataccgacggtattgaagccgatttgttaattaacgccacgcctatcggaatggctggcggtaatgatgccgacaaactctcttattccgaacaggaagtggataaggcgagcgttatctttgatgtggtggcgctaccgcccgtcacgccgctgatccgctacgcccgtgaacgcggtaaaaccgtgattaccggttccgaagtgtttgctattcaggccgtggaacaatttgtcctttataccgggattcgcccggacgacgcgctgttccagaaagccgcggcctggtcacgtctgtaa

SEQ ID NO: 371860 - DNA, 1791 bp, Salmonella enterica
ttgctcattcccgttcgggaaatttcaccttttatgacaacccggcacactgaacaaaaatacttaaagctactccagcactatggcgacaagcctgttagcgtgacattacaggagctggcggatgtgttgttctgcacccgacggcatatgcgtaatctgttgcttcagatgcaggaggcaaagtggctcatctggcaatcacaggccggacgtgggcatcgcgcccggcttcacctgcgctataaaccagaacagctgttaagcgaaaaggcggagcagttactggagtctggtcatattgatcaggccattcagctgctgggtaaaaataagcaccaggtggcgcaactgctgcgttcaaagctgggctatagcgtgcgggcagactatcagcggctgtgcatcccctattatcggacaatgccgtcgctgtgccccggcataccgttgcgtcgctctgagcagcatctggtcaggcagatttttagcggcctgacgcgcataaatgaggaaaaaggtgaagtcgaagccgatcttgcccaccactggcggcagattgatccactgcgctggcgtttttatctgcgccccgccgtcctctggcatgatggtcaggagctgacgatcgacgcggttatcgcttcactgacccgcagcgctaagctgccgttgttctcgcacttgcagaccattcaggccaccgggccgctgagccttgaaattacgctggcgcacccggataaccgactgccgctgctgctcagtcatattgatgccatgatcctaccgcctgaccatacacaacgcgctgatttcccggcacatcccgtgggaactggcccttatgaggtggtggaaaacaatggctttcatctgcaaatgaaggcctttgaccactatttcggtctgcgcgggctgctggatgaagtggaggtctttatctggccgaatttaacggagacagataacctggcggaatcgctgtcggataacgacacggcagcctggctcagttccagcctgagcgatgaggattacgtttccggacggcttagccaggtatcaggcaaaccttctgacaacctgcgcgagatgtttcttgagcgtggaggctattttttattatgcgacagtcgctctccgcactggcataccgccgaacatcgccgctggctgcgggaaacactcagcccttacgccttactccagcatctgagtgaggcaattcgccccttctgggtaccgggcggcagcctactgtcctcctggtttcatactattgaggcgggcccagcctgttcaccttttatctcgtcgtcgccctacgcaaaactgcgtctggcctatcacgatcagcaccctgaatttccgatgctcctggatatcatgcaagagatcatgcgccagcagggcattttacttgagggcgtggagctgaattatgatgactgggcgaatggcaaagccaatgtggatctctggctggggacggtcaatttccccattcccgaagagtggaacgtcggtacatggctgctgggctcccctttactgcgccacgccatcagcggtggggatgatgcgctgctggcccaatgggaaacccagtggcatgccgaaaccatcagcgcggaacaactggtcagggaaaccacccgttcaggctggctacagccgctttttcaccactggatgcgactcaaaggccccgaccgggccagggggatccacctgaataacctgggatggtttgatttccgatccacctggattgagccagggccttaa

SEQ ID NO: 371861 - DNA, 240 bp, Salmonella enterica; identical to SEQ ID NO: 36218

SEQ ID NO: 371862 - DNA, 327 bp, Salmonella enterica; identical to SEQ ID NO: 16555

SEQ ID NO: 371863 - DNA, 537 bp, Salmonella enterica; identical to SEQ ID NO: 16554

SEQ ID NO: 371864 - DNA, 843 bp, Salmonella enterica
atgaaagaaaaggtagttgttgataaagcgatttcactctataccgaatcattcggcgacccggcccatgaacccattatcctgatcatgggggcaatgtcgtctgcggtgtggtggcctgatgagttttgctcccaactagccaaaatgggtcgctatgtgatccggtacgaccaccgtgataccgggaaatcaacaagctatgagccaggtcaagctccatattccgttgaagaattagcagatgatgtggttcgcgtcattgatggttatggtctggaagctgctcatttagtcggcatgtctttggggggatttctttcccagcttgtagctctcaagtatccgaaacgtgtgaagagcttgacgctgattgcttcagaacggcttgcagatgcagatcctgatatgcccgcttttgatcctgccatcattgagtatcaccaacgggcggaatcgctggattggtctgatagagatgctgtcgtcgcgtatcaggtcggagcgtggcgaatcaactcaggtactgcgcatgcttttgacgctgagaagatacaaaatatcgctgagttaaattttgatcgcactccgaatatcctgacaacattcaaccacactactttaggtggtggcgagagatggctcgggagattaaatgagatagctgtaccaactttgatcattcacggcacggaggatcctgtacttccttatgtgcatgggttggcactgaaagaagcgattcgtggttcaaaaatgctgacactcgaaggcacgggacatgagttgcatcatgaagactggccgaggattatccaggcgattaaggggcaaacgtcatag

SEQ ID NO: 371865 - DNA, 525 bp, Salmonella enterica; identical to SEQ ID NO: 16553

SEQ ID NO: 371866 - DNA, 789 bp, Salmonella enterica; identical to SEQ ID NO: 235392

SEQ ID NO: 371867 - DNA, 498 bp, Salmonella enterica; identical to SEQ ID NO: 16552

SEQ ID NO: 371868 - DNA, 372 bp, Salmonella enterica; identical to SEQ ID NO: 16551

SEQ ID NO: 371869 - DNA, 378 bp, Salmonella enterica; identical to SEQ ID NO: 16550

SEQ ID NO: 371870 - DNA, 126 bp, Salmonella enterica; identical to SEQ ID NO: 16549

SEQ ID NO: 371871 - DNA, 504 bp, Salmonella enterica
gtgggtgggaagcaggatgcaaccaattacaactctatttttgctaatcgatttgctgcttttgatgagctactttcaattctaaaaactaaatttgcatgtcgggtgctttttgaagaaaccttggttttgccaaaagttgggcgtagccgattacatctgtgtaaagatggctcaccaagagtgattaaagccgttggggtgcaacgtaatggcagtgaatttgtattgctagaggtggatgcatcggatggggtgaaaatgctttctaccaaagtgttgagtggcgttgatagcgaaacatggcggaatgattttgaaaagatacggcgtggagtggtgaagagctcattgaattggccaaatagtttgtttgatcaattatatggacaagacgggcatagaggggtgaatcatccaaaggggttgggggagctgcaagtatcgagagaggatatggaagggtgggctgagagagtggttagagagcaatttacgcattaa

SEQ ID NO: 371872 - DNA, 1275 bp, Salmonella enterica
atgtcacttactgataccaaagtaaaaaataccagaccatcggaaaaggccgtcaagctcactgacgggtttggcctctatctgctggtgcatcctaacggttcaaaatactggcagttaggctatcgctttgatggcaaacagaaggtgttttccattggggtttaccctgcggtttcacttgccgatgccagacaacgccgggacgaggccaaaaggctgctgactcaggggattgacccgaacgctaaaaaacaggctgatgaaaaagtccttcaggagaagcgggataaaacccgctcgttccgtgtcgtcgccaaaagctggtttgccaccaaaacaaaatggtcagaagattacgccgatactgtctggaagcgccttgaaacctatgtcttcccggatataggcgacagaaacgtttcagaactggatacgggtgatctgcttgtcccggtcaaaaaagcggaaacactcggctaccttgaaattgccatgcggattaagcaatacatcaccgcgatcctacgtcatgccgtccagcaaaagcttatgcgtcataatccggcctatgatatggaaggcgctgtccagaaaccagagacggaacaccgccctgcactggagctggaagagatcccgctactgcttgaacgtattgatgcctacaaaggtcgtggactgactacgctagcgattaaactcaatctgctgatcttcattcgttccagcgaacttcgtttcgcccggtggtcggaaatcgacttcaaaagtaagttatgggtgatccccgaacagcgggaagcgattgaaaacgtcaagcactcgactcgtggggctaaaatgaaacgtcagcacttcgttcccctttgcaggcaggctctcaagatactgaaagagatccgccagcttacctatgaagaaggtaacgaagcagaattaattttcactggctgttatgattcattcaaacccatgagtgaaaacactattaacaaggcgctacgtaagatgggctatgacaccacacaggacatctgcggtcatggtttccgcacactggcgtgtagtgccttaattgagtctggtctatggtcagaagatgctgtagagcttcaaatgagccataaggaaagtaacagcgttcgcgcagcctatacccataaggccaagcatcttgaccaacgccgcctgatgctccagtggtgggctgattttcttgatgagaatcggtatgagatggtcaggccgtttgagtttgctcagaaacaataa

SEQ ID NO: 371873 - DNA, 798 bp, Salmonella enterica
atgattaagtggccctggaaagcacaagaaataacccagaacgaagactggccgtgggatgatgcgctggctatacctcttctggtaaacctcaccgcgcaagaacaggctcggcttattgcgctagccgaacgttttttgcagcagaaaagactggtagcgctacagggatttgagctcgactcgttaaaaagtgcacgtattgcgttaattttttgcttaccgatcctggagctcggtattgagtggcttgatggttttcatgaagtgctcatttatcccgcgccctttgtggtagatgatgaatgggaagatgacataggtctggtgcatagccagcgtgtcgtacagtcggggcaaagctggcaacaagggcccatcattctgaactggctggatatccaggactcgttcgatgcttcgggtttcaacctcattattcatgaagtcgcgcacaaactggatatgcgtaatggcgatcgcgccagcggcatccctttcatcccgttacgcgatgtggctggctgggaacacgatctccacgcggcaatgaataatattcaggatgaaatcgatcttgttggcgaaagcgctgccagtatagatgcctatgccgccaccgaccctgcagaatgttttgccgtgttgtcagagtattttttcagcgcgccagaactgtttgctccacgtttcccggcactatggcagcgtttttgccagttctatcgccaggatccttctcagcgcttacgggtaagcgctgccgaaggcgactacggcgaggaatccgaacattaa

SEQ ID NO: 371874 - DNA, 855 bp, Salmonella enterica
gtggcttacgaaaaaaaagttgagggtagaaaaaacagaattacattcacacaattatggcgaaaatttcttgccagtgccgattatgctgatctggccccaagaacgcagaaagattatctggcacatgagaaatatatacttgccgtatttggtgatgccgaagctaaagcaataaagccagaacatatccggcgttatatggatgcccgtgggcaaaaaagccgtgtccaggcgaatcatgaacacagctctatgtcgcgcgtatttcgttggagttatcaacgtggttatgttcctggtaatccttgcgttggtgtggataagtttcctaagcctcaacgcgatcgatatattaccgatgaagagtacagagcgatatataataacgcaacgccagccgtcagggctgcaatggaaatagcttatttatgtgctgccagagtttctgatgtattgaaaatgaactggaatcaaatactggagaaaggaatttttattcagcaaggaaaaaccggagttaaacaaattaaatcctggacagatcgcttacgtgatgccgttgaaatatgtcgtgaatggggagaggaaggccctgttatcaggactatgtatggcgagcgttattcttataaaggatttaacgaggcgtggagaaaggcgcgaaaggctgcgggggatgatctgggacgtcctcttgactgcactttccacgatctaaaggcaaaggggatttcagactatgagggaacggcaaaagacaagcagaagtacagtggccacaaaaccgaatcccaggttcttgtttacgatcgcaaggtgaaaatgagcccaaccctggacaggaagcgttga

SEQ ID NO: 371875 - DNA, 228 bp, Salmonella enterica
atgagcgatcgcttcctgactgaggaggaactggaagatgctacaggagcaagccagaagtcactccagaaagaagtattaacgctgaacggtatttattttatagaacgccgggacggttcaatcagaacaacctggtatcatataaatcacccagtttcgcgccttcttccaccagcagggtatcagcctgtaccaggcatgaattttgacgctatagagagttaa

SEQ ID NO: 371876 - DNA, 570 bp, Salmonella enterica
atgaacaacttaatggtcgaccttgaaacgatgggtaaaaaacctaacgcgcctgttgtctccatcggtgctgtgttcttcgatccgcaaagtggtgaaattggacctgagttctataccgccgttagccttgaaagcgcaatggaacaaggtgccgttcctgatggcgataccattctatggtggttaagacaaagcccggaagcgcgagcggctatttgcgctgatgcagtatctgttacgaccgcgcttattgagttcaatgactttatcacctgtcacgccgacgatttgaaatacctgaaggtatggggtaacggtgccaatttcgataacgttatcctgcgtggcgctttcgaacgtgccagcctcccctgcctgtggaattaccggaacgatcatgacgtccgcacgatggttactttgggtcgtgcaatcggcttcgatcccaaacgtgacatgccgttcgaaggcgatatgcacaacgcgctggctgatgccaggcatcaggcgaaatacgtttcagctatctggcagaaactgatcccgcccaccagcaacaatatctga

SEQ ID NO: 371877 - DNA, 864 bp, Salmonella enterica
atgaccactattaccaaagaatggctacagcaaactatcgctgaatttgaaaacactcgcgacgatattccgtttggcctgagcgatgacgacgccaaagttcttattgtgctgaagcgtgcgctggcatcgctggaagctgagccagccggatatcacgtaatcaaagagtgcggaaaggttggctgtagtgttgcaacgcttgaggaagccgagaaaacgcgagatttctggaataaaaagtggactatcagaccgtatttttacaccgcccagccagtacaggaaactggcgtttacaatgatgtgctaaatatcatcagcctgttggaaaacaacgaatgggctgagcactgcacgagtacagttttaggttcacttctggaatcagaaataacgcgtctggttggcaaagaacagtcagcgccggtagtcactttctatcgcgatggcgttgaagccgccgccaaatggatagatcagcagcgtgaggcatacgacagcgagcatggatggtctgatcctgataccggagcgttcgagttcggcaatgatgcccaacgcggatattcatccaccctggaagaattggccgaaggcattcgcgctctgcatccaaatgctggcaactctccggtaattccggatggttggataagctgtagtgagcggatgccagaagacgagcaagaagtaattgttcataacaagttgggataccgttatgtttcatattttgatgagcattctggactattttttgacatgcgaggcggcaatcagatgaactgtattgagcacatctttgttacacactggatgccagtgccagcagcaccaaaaccggagataaataacgaatga

SEQ ID NO: 371878 - DNA, 294 bp, Salmonella enterica
atgtggagaggattaaatcgcggcggcagccagatgattctaactgcctacgaatacgatccggaaaccgaaaaatctcagtctgtttaccttctacggcatcacagcaaggttaagaagaccacgcttgaacagaagctgacagttaagaacgacgccttcggacggtttaagcctttcgttgaacttgaagattttccggaagggcttagcgaacgcgaagcaatgctgaaattagctgactggctgcaccgacttagtgtggctatcgaagataactggagtacaccatga

SEQ ID NO: 371879 - DNA, 177 bp, Salmonella enterica
atgtgtaacttccacgaacgcaaagttcgtcgaactgaatattaccaacgtttcgtttttggctggaagctgcgtccctgcacggcgtgtaacggcagtggttattacgaccacaacggtagtccgaaatgctcgtcctgcaatggcacaggcaaagagcggtacaaaccaaattag

SEQ ID NO: 371880 - DNA, 360 bp, Salmonella enterica
atgagcaacatcgacaaactcaatgaccatgaactggttgatctgaaaaacgctatcgaaagagagcttaaacgacgcgctgatgggccaaaagtcaccacgtattatgtcgtctcctgcataactgatgctcagcattttactgatttggactgcgctttacgttgcttaaaaagtgtcaccgaaaaccttatggagtgggtaacggaatccccagaaaaccgggattacgtcaatcaatgcacaggcattgttggggcaaaactccaggtgaaggagatgaatctcgatcacttcaacatgcgcgtagcagaaaaatatttcgacgatatttgttatccacaggagacagcccaatga

SEQ ID NO: 371881 - DNA, 516 bp, Salmonella enterica
atgagcaaccgaattcgcaatgctcaggtattcgacgcgcgcaccggtgagtacccggttgatatgtacattcgctggatcattggtggtgaacttgattttgatgccaattatcagcgcgggtatgtctgggggcatgaagagcagcaggcattcttaaacgcagttatttctggttttcctatcggctcagtggcgctggcaaaggcacctgactggtgttcgcgtgaacttccttacatagaagttgttgacggcaagcagcgtctcacaaccctgaaaaaactcatcaccaatgagattccaatcatcttggctgatggtccgctttactggcgagatatgactcgtgcggagcaattggcatttgggcgtcgtccactcccagcagttgtgctggatgaggtgacgtacaaggatcgcctggcttatttcatggcggtgaactttacaggtgttccgcaaagcgaagagcacaagcgacacgtaatgcaactaatggaggctgcccaatga

SEQ ID NO: 371882 - DNA, 231 bp, Salmonella enterica
atgaaactggaaatgtacaccctggacggatcggtgattgttgatagcaatctggtaacacagttctatccagactacaaaagcggcggcgagttaacagtcatcgagactatttcagccaccggagaaactttcaccgtgagggttaaacactcgtttcttcaggtaacaagtgcgctggctacggcgtggagcgttgatgaaaagaaagctgaaggagcagctcaatga

SEQ ID NO: 371883 - DNA, 540 bp, Salmonella enterica
atgagttttattcaaacactttcaggtaaacaatttgattatctcagcgcaactattgacgacattgatattgaagatatcgccgtggcgctttccaatatttgccgcttctccggacatcttcctgaattttatagcgtggcgcagcattccgtactgtgcagccagcttgtatcaccggagtttgcctttgaagccctgatgcacgacgcagccgaagcgtattgccaggatatccctgccccattaaaagcgttactgcctgattatcgcgagattgagaaacgtaccgatcaactgatccgctttaagtttggcttgccactggaagaagccagcgtagtgaagtatgcagatctgaccatgctggcaactgaacgccgtgatctggatattgatgacagtattccctgggtaatactggaaggtatccccccgacagatttattcgaaatctacccacttcgccccggtcaggctttcggcctgtttatggcccgctttaatgaactgatggagctacgccaatgtgctgcataa

SEQ ID NO: 371884 - DNA, 918 bp, Salmonella enterica
atgcataacccattttttaaaaatatgctgatatatcgcttcagccgcgactttaacatcgacatagactctcttgataagaaacttgagctgtttcgcttctcaccatgcggaagccaggatatggcaaaaagcggatggttttcaccattagtccagtattcagatgtgctatatcatgcagtcaataaccagttacttttggttattcgtcgtgaagaaaaaatcatacctaaacaaacgatcgccgatgagattaataagaaggtttccacgcttgagcgagagcaaggccgccgtcttaagaaaactgagaaagactctattcgtgatgaggttcttcattccctgttacccagggcgtttactaaaaacagtctggttcgtatttggataaacactgcagccgggtttatcgttgttgatacatccagcatcaagcgcgcagaagattctctcgccctgcttcgtaaaaccctaggttccttgccagtcgtgccgctgacgatggaaaaccctatcgagctcacgctaactgagtgggttcgtagcgaagcggctccttccgggttctccatcggcgatgaagcggtccttaaagctattctcgaagatggtggcacaggccggtttaaaaagcaggatcttgcctgcgatgaaattcttacccatatcgaagctgggaaggtagttacccagatttcaatggaatggcagcagcgtatcagtttcaccctttcttgtgacggtatattgaaacgcataaaatttgcagatcagttaatcagccagaacgacgatatcgacagcgaagatgtcgtgcagcgatttgatgctgacattacgctgatgacaggcgaactcagtaatcttatttctgatttaacggctgccctcggcggcgaagccaagcgataa

SEQ ID NO: 371885 - DNA, 252 bp, Salmonella enterica
atgtctcagaaggatgatattcctgtctttcccgtaaccggctggcaggctggaccgcttcctggttacgacgctctggtagtgaaattccagtttctctcatcaccgatgcaaccaattgagtctgctcaggaaacgcaatttttagtacttactcctgagatggctgagagcctggcttcagacttgcaaaggcatattcaggatttgcgaaattccgacgttcacagcccacaagaaggcaagcactaa

SEQ ID NO: 371886 - DNA, 186 bp, Salmonella enterica
atgaataactactacacatgctccttctgcggggtcagtgagctggatgcaaaaaagctcatcgctaaaggaagtaaggacgagccagctatctgttccgagtgcgttgtttcatgcgtaaacattcttatcaactacgcagccgtgataaagccagtaaaactgaacgtcacgaagggggaatga

SEQ ID NO: 371887 - DNA, 696 bp, Salmonella enterica
atgaatataggaaaccgtgtcagacaacttcgccgcgcgaagaacatgaaaattgctgagctagcagaagcgatcggcgtggatgccgcaaacatctctcgtctggagactggcaagcaaaagcaatttaccgaacaaacactttctaggctggctgactgcttaagtgttgatatagcagaactctttacctcagacccaaaaggtaatactgtatgtaaacacagtgatatgaggaaggattcagctaacgtgaaggatttgttccgtatcgagatactggatgtcagtgcaagcgccggtaatggactcattcagggcggtgatgttatcgatgtaatccatgctatcgaatataacaaggacaaagcactagctatgttcggcgggcgtcctgccgctgagcttaaagtgattaacgtgcgtggtgacagcatggcaccaacaattgaacccggagatcttatttttgtcgatataagcatcaaccagttcgatggtgatggcatctatgtctttggctttgatgataaaatatacgtaaaaaggctacagatgatccccgataaattactggtgatatctgataacactaactacagggaatggagtattaccaaagacaacgagtgcaggttcggtgtttttggcaaggttctgataagccagacgcagtcactcaaacgacacaattaa

SEQ ID NO: 371888 - DNA, 225 bp, Salmonella enterica
atgcaatcaccattgagaaaattgcggaaatcgcatggttatacgttacagcacgtcgctaaaggggttcaggttgatcctgcaacattaagccgggttgaaagatgcgagcaggctccttcaacagagcttgctgagcgcctggctcaattttacgccggagaaattagcgagatgcaaattttgtatccaaacagatatcagcttagtgattcggcgatttga

SEQ ID NO: 371889 - DNA, 555 bp, Salmonella enterica
gtgggacatgaacctgaatggaaagttgaaaagcagccccgctggctggtggctgcgattaaaaagacgatttccagtctgcatggcggttatgaagaagctgcggaatggctggatgtcaccaaagatgctctgtttaaccgcctgcgtactggtggtgatcagatcttcccgattgggtgggcgctggtactgcaacgtgccggaggaacctatcacctggcacattcagtagccagggcatcaggtggcgtttttgttccgctggcagatatggaagaagtggataacgcagatattaatcatcgcctgctggaagcgattgagcagatcaccagttattcccagcaaatcagggtggctatcgaagatggcgttattgagccacatgaaaaagccgtgattgatgaggagttgtatcaggcgatcgcaaagctgcaacagcattcgacactggtatacagagttttttgcgtgccagaaaagggtgacgcccgcgagtgtgcagctccgggcgccgtggcgtcaaattttatggagaaaaccaacgcatga

SEQ ID NO: 371890 - DNA, 1158 bp, Salmonella enterica
atgaacagtttaacggtaaataaccgtttgtcgcaacaaccggggatgtatgagtaccggccgttgcgtcatgaatgcagattatcaaatagcctggtcgtgcgtaaccacagggaacacagcctgaccgtgggggatgaatcgtgcaggaacttaaccgctggtttcgggatggaaggggactttatgtccatgtcattcgctgggaaccagaaactgagcgcgttatctatctgcgcaagggctatccgcatgagtgttttagccctttgtggaaattcaggcgtgattttgttgagtgtgaagcgccaggaacacattgattctgcaattccgggacgttacactgttcaggcacctcataaagcgggtgccgggcgtggaaacccggaattcaatatagagcacaaccgcgctcatgcggttttttcttgtcatgagcattgttacgcccaaattatggtggggcgtgcagggccagtttcggctgggccgggttctatgttgaccggtatttccacccctgtacgtctcaccacctataaggtcgtggaaagccttggtggtgagttcattgaattcaacatagaggctgccactatggctactgtcccaaccctcgctcaacctgaaattagaattattaacggccaagccgttacttcctccctggctgttgccgactacttcatcaagcgtcacgctgatgttatccgtaaaatagaatctctcgaatgttccactctatttcgtaaacgcaattttgcgtttacatcgatttcaataaatcagcccaacggcggtactcgcaaactcccatgctatcaaatcacacgcgatggttttgcgtttttggcaatgggtttcactggtaaacgtgctgctcagtttaaagaggcatacatcgatgcctttaaccagatggagaaacagctttcaactccatcggtgctgagcgatgcagcacataatgccagcgttctttattcctacatttcatccattcatcaggtttggttacagcagctttatcccatgctggaaaaagcggaatctccgctggctgtaagcctgcacgatcgcatcaatgacgctgcggcgcttgcgagccttatcaatatgacactgaaccgttcagaggtaagggggcgcaaatga

SEQ ID NO: 371891 - DNA, 225 bp, Salmonella enterica
atgatccggaatatttttaaacggttcaccagccaacgttttcattgccctcgtccaggacagtggtacagcacaccagaagggtacgttctgcgtattagcctggtcgatcgcgaatgtcagaaggttgtctgtgagcctcttgggcgtaattaccgcgtcaacatgccgcttattgcctttcgttccggcaaaaacatgaagcatctcggaggtgctgcatga

SEQ ID NO: 371892 - DNA, 975 bp, Salmonella enterica
atgagttcccttattcaattactcgatcgccccatcgcctacaaccctgcttttgcaaaactgaaagccgggaaggtaaaagctggcccggttgcggcagtattcctgtcccagcttgtttactggcataaccggatggatggcggctggatgtacaaaacacaggctgatattgccagtgaaacggcgctaacccgcgacgaacaggaaacagcacgtaaacgtctggtagcacttggtgtactggaagaagcccgtcgcggtgtacctgccaccatgcactaccgcatcaacaccgcacggcttgaagcgctgttgctggaaacggcgaagccagtgaaaaagggcgctcaggagaaaaccagattgcgggacttccagaatgtggaaaccccgcaatctggattggtgcaaccccgcaaaccagattgcggtgatgccgcaaacaagaatgtggaaaccccgcaaacaagtacggggcaacccaacgaacaagcatgtggcgatcccacaatctttcctacaggagattacacagagactactcaggagattacacaggagagtaaaacccctttttgtccggttgctgagcaacccgaccccgaagtgacgctcaccgatcaggcgattgaggttttaacccacctgaaccaggtaagtggctcccggtatcagaagtcaaaaacctccctggaaaacatccgtgcccgactgcgtgaggggtacagcgttgctgatctgcaactggttatcgacctgaagcatgagcactggcacgagaacgacgagcagtaccagtacatgcgcccggaaacgctgttcggtccgaagaaattcgagagctatctgcaaagcgctacccgctgggatcagaaggggcggcctaaacgcgctgactggggtgcgaagaagcgcgatgtgatggcttttggtccggttgatacaacgattccggagggattcagaggatga

SEQ ID NO: 371893 - DNA, 474 bp, Salmonella enterica
atgagtctgttagcaaaagtgcaggcgtttatcgagcttaatccggggctgacatcaaatgagattgccgatgcttttcctgaatacgcacgctttgatgtgcagcgttcagcgagcaagttgtatcggtgtaagcgtgttaaccgccgcctggatggagatgtatttcgctattacgcgggtaaagacgaggcagtgattttgacgttacgacagaaaaggtcaggtcatacaggttcgggtgatccgatggtgattgcaaagctggtaagccgcgctgaagaactggaatccagagggttatttaatcgtgcatcgatagtgtggctggaggcatttagcgaaagccagtttatctacgaacgcgaggaatttttacgccgccgtcagaagtgtctgaaccgcatcaaaaagagaatcagacccgtagagcaggtttatctggcagggcgatttgtggggaacgtggaatga

SEQ ID NO: 371894 - DNA, 882 bp, Salmonella enterica
atgaccagtgaatccgtttgtattgaaagcagtgatgtaacgatatctgttgatgaatccgcttcgcgcacctggcgtcgcccgttcctgaaatgggcaggcggtaaatattccatgttacccgatctttaccaggtcattccggcaggtatgcgcctgattgaaccgtttgtcggcggtggttcggtgtttctcaactcagacaaacacgcctgcttcctgctggccgatgtgaataccgaccttatcaatctgtatcagatgctggctgttgtacctggtgcggtgataagacatgctagggtaatgtttgaccgtctcaatgacgctgaaagctatatggcgctacgggaagagttcaatgctcaggtgatggacgctccggaacgcgccgccgctttccttttccttaatcgtcactgcttcaatggcctgatccggtacaaccgcaacaaccagtttaacgttggctggggcaaatacccgtcgccttatttcccggaagaagaaatcagggcatttaccgaaatggcgcacaactgcgtattcatggcggcaggatttcgccggacgctggcacttgcgggagagggtgacgttgtgtactgcgatccaccctacgaaccgatgcccggcaaggatggttttactcactacgccgctggtggctttacctgggatgatcatatcgcgctggcggaatgttgtgttgctgctcatcagcgaggtgccagagtcgtgatcggcaattccacatctccgcgtgttatcgacctgtactcgcagcacggctttgaaatccgctatatcagcgcccgccgctcaatatcaagtaagggcagtacccgcgagaaagcgaaagatctcgtggcgattctgtag

SEQ ID NO: 371895 - DNA, 390 bp, Salmonella enterica
atgaaactgacattgccatttccacccagcgttaacacctactggcgggctccgaataagggaccgcttaaaggtcgtcacatggtcagcgccagcggccggaagtatcagagcgaggcgtgcgcggcagtgattgagcagttacgccgtctgccaaaaccttcaacagccccggcagcggtggaaatcaccctgtatccgccagacaagcggatcagggatctggacaactacaacaaggcgctgtttgacgccctgacccacgcgggtgtgtgggaagacgacagccaggtgaaaagaatgctggtggagtggggaccagttttcccgaaggggaaggtagaaatcacgatcacgaaatttgaaacaggggcgggtgcagctgcctga

SEQ ID NO: 371896 - DNA, 861 bp, Salmonella enterica
atgaataatttaatggtcattgatggtatcgaagttcgccgcgacgttcatgggcgctattgtcttaacgatttgcaccgggctgcgggtggagagcagaaataccgtccgaagtactggcttgataataagcaaacccgtgagctgattgagcaacttttcaccgagggcggaattccaccctcggaacaaaatcaatctgttagcttttttcagggcggtagtgatacccgaagtttggcacgtgctccagtaaatactgttcgcggtggtgctgaacaaggtacatacgtatgcaaagaactggtatttgcttatgcaatgtggatcagtccgtctttccatctcaaggtgatccgcacgttcgatcggattaccagtgcgccacaaatatcttctggtatggctgccgataagatgcaggcgggggtgattctgctgggttttatgcgcaaagagttaaacctgtccaattcatcggtactgggcgcgtgccagaaactccaggaggcagtgggactacctaacctggcgccacaatatgccattgatgctccggctggcgcgccggatggttcaagccgcccgacgcttgcactgagcgcgctgttaaaacagcatggtatccggatgacggctaatcaggcgtatcagcagttagcaaagctgggtgttgttgaacatcgtgagcgttacagtcgctccgcgattaacggcattaaaaaattttggtcgctgacggcgaaaggctgcatgttcggcaaaaacatcaccagcccggcaaaccctcgcgagacgcagccgcatttcttcgaatccaaattccctgagctgctgaagctgctcgataccgttcattga

SEQ ID NO: 371897 - DNA, 990 bp, Salmonella enterica
gtgagagcgttactgacccctgaaattgctcctcgtatgggcgttgtattgttcaggccgggatcggaactgatgcccctgtttatgcaggggcgtgttctgcttgaaccagagccggaacaatattcatctttcgcctgcggcgcggtcccggcggtatcacagccgctggcggatgatcctgctgttcgtgatgtgttccgtaatgagtcggttatctatcgtgctggtggtctcgatagtctggaaagctggctactccgggggaatggctgtcagtggccgcattcagtctggcacagcgaacagatgacaaccatgcgccacgcaccgggggcaatccgactgtgctggcactgcgataacctgctgcgcgaacagtttacggaacggctggaatcaatagctgtggagaacacgacaaaatgggttttatcggttgtttgtcgtgatctgggttttgacgatatgcacgcagtcacgctcccggaactgtgctggtggatggtacgcaatgacctggcagaagtcttaccggagagcgctgcgagaaaagcattaaggatgccgaaggcaattgtccagtcagctacccgtgaaagtgaaattgtcccctcggtgccggccaccagcattgtacaggataaggcgaaaaaggtactggcactcagggttgatccggaatcgccggaaagcttcatgttacgtccgaaacgccgtcgatggatcaatgaaagatatacccgctgggttaaatcccagccgtgcgcgtgctgcgggaagcaggcggatgatccgcaccacctgacaggccacggtcagggagggatgggaacaaaggcgcatgacctctttgtgctgccgttgtgcagaacgcatcacaatgagttacatgcggacaccgtggcattcgaagagaaatacggctctcaactggagttgatatttcgttttatcgatcgcgcgctggcgatcggcgtgctggcgtaa

SEQ ID NO: 371898 - DNA, 753 bp, Salmonella enterica
atgaaccttgaagccttaccaaaatattactcaccaaaatctccaaaattgagcgatgacgctccggcgacaacctccgaatctttgacgattacggatgtaatggcggcgcaggggatggtgcaatcgaaagcaccactggggtttgctttattcctggcaaaagttggtattcagaatcctgacttcgcgattgaagggctgattcattacgcggtggcactggataacccgacactgaataaattgagtgaagaaactcggttacagattgttccttacctcgtgaattttgcatttgctgattattccagatctgctgcaagcaaggctcgctgtgagcattgtgctggtacgggatttcatcatgtattacgtgaagtggtgaaacactccagaaatggtgaacccgtcatcaaagaggagtgggagaaggaactatgtcagcattgtcatggtaagggagaagtcagcacggtgtgcagagggtgtaagggtaaaggtattgtcttggatgaaaaaagaactcggtttcatggcgcgcctgtttataagatttgtgggcgttgcaatggaaaccggtttagtcgtttaccaaccacactggcgcggcaccatgtccagaaactggtaccggatctgacggattatcagtggtacaaaggatatgcagacgtcattgataaactggttacaaaatgctggcaggaagaagcatatgcagaagcgcaattaagaaaggtgacaagatga

SEQ ID NO: 371899 - DNA, 1074 bp, Salmonella enterica
atggataagattctcccaacgatgggctttgtatgtctatcgttgataagtctcaagaacccgcctccgagtgggttttttatttgtgatcactttattttttgtcttgctaagttattgtatggacaagaactaaaattaagtggtgacattgtgctctctaataacgaacgttgggtttccttttttgactttgcttttacgcctacacacgcagcggcgccgagtattcccattgaagacatactcaagaaattgaaggtactggtgagctcagggagtgctgtaaagttatacaatcataggtctagagcgcttaggatttcggagatgaaatattctattggggatagccaggcgactctacttatccagctttgtgataaaaatggttctgaccctgtttttggtgagttaacaacaggcaaccttagagtagaacctaagcttgccggtgaaggtatcgcagtttcttgtcacattgtaatatccacagatgttgtcaaaaacactgccgatcaccacaaaactctcgttgaatctgtccccggtatcagtaagtcagttcttgagccatttttaaatgctatgctcagagaagccttcgctggatgtgagtttaaaaatcctgcaactaaaggtatgtgccagcaccgcccaaagctggaaatctattctcatggttcacaaacgctgatggatgcattaaaaggtgcaaagattcataacgttaaacttgtgagtacaagaaggaaaggtggattggaccaaacggcgtacactgagctctcagaaaggtccgtaaagtataaaatcattagacagccgccattgaaagataaagaaaggttgttagagattttaagaaagaaagggcagcagtctggatataccaaggtttcaattagttactcaaaagatggcaagcaagccagtttggatcttgaccgtaacgaagatgctgccacaaaactgttcactaaaagtgagagggtaatattaggtaacctcatcaaccaatgtgaaagcacagtacatctgcagcttgaaacaaaaatgatagggttgctctaa

SEQ ID NO: 371900 - DNA, 573 bp, Salmonella enterica
atgaaacttttttcaccgctgagttatctccgcatcaagcatgaggaaaaggactggtatgattacaaaataccagctgcagtgtctctaatcgtcactattgtttattattttcacgctagcaaaatttctttaatcgagactaacggactcctgcttcaggttaatgggttacttcaagtcttgattggtttttatatcgcagcactggctgcggtttctactttttctagctcttcgatcgacgaagtaatggcgggcgtacctccgactctagtagagaaattccgagggcagaagcttactgtagaactgacgcgcaggcgctttgtttgttacctttttggttatctagctcttgtgagctttatgttattttgcttagggatgatttctattctgattgggaagcctttccatttgtggctgctcacattctgttctcctgatgcaatcttgtggcttaaaacggtatttgttggcgtttatatattcatcttaatgaatatcataacaacaactttgctgggactttacttccttgcagttcggttccaccaatcatcgctgtaa

SEQ ID NO: 371901 - DNA, 390 bp, Salmonella enterica
atgtccgaacctgtatccagtgcgacagtgttggctggtggattaatgggggccagtgtattcggtctggcaaccggaactgattatggtgtggtattcggcgcttttgccggcgcggtgttttatgtcgccacggcaaccaacatcggacgcatcaggctggtcgcttattttattacatcatttattgtgggagtgcttggtgccgggctgataggtactaagcttgcggcaataacgcattatgaaaaaccactggatgcacttggcgcagtgattatttctgcaatgtgtataaagtttctcacttttctcaacagtcaggatctgaacaccctgttcagtattctctctcgtatcaggggagggggatcagatggtagcaaatga

SEQ ID NO: 371902 - DNA, 282 bp, Salmonella enterica
atggtagcaaatgacccttctgcagctctgaatgccgtaatttgtggggtgatagtcatcgttctgatgttttaccgacgcggtgatgcgacacaccgccccctgatttcgttactggcctatgtcatggtgctggtatatgccagcgtccctttccggtttgtttttggtttatatgaatcatcccactggctggtggtgatggtgaatatccttatctgcgccgctgtgctgtgggctcgcggtaatgtggcgcgtctggtcgatgcactgaggcactga

SEQ ID NO: 371903 - DNA, 618 bp, Salmonella enterica
atgaatcaacaacaatttcagcaggcggctggtattagcgccgggctttctgcacgctggtttccgcacattgatgcggcaatgaaagagtttggtattacagcagttaatgatcaggccatgtttattgcacaaacgggacatgaatcagcaggatttactgttctgaaggaaagcttcaattattcggtggaggcgctgaaaaagacgtttggtaaacgcctgacgccgtatcagtgtgaaatgctggggcgtattgatggtcgccaggttgcccaccagccgcaaatagccaatctggtttacggtggccgcatgggtaacaaagacgccggagatggctggaagtatcgcgggcgtggtctgcttcaaatcaccggccgcgagaactacgtcaaatgcggagctgcgctgaagcttgatctgatcagcacaccagagttgctggcacaggagaagcatgcagcccgttctgctgcatggtttttcacattacgtggttgcctgatgtattcaggtgatgttgtccgtgtaacgcagatcatcaacggtggccagaatggactggctgacagaaatagtcgttataacaaagcgcgggcggcgttgctggtatga

SEQ ID NO: 371904 - DNA, 255 bp, Salmonella enterica
atgcacaagcacaagccgctaaatctgctgccactgctgctggcctgtctgccactgttagccagctgcgtaccgaagcaacaaagcttgccgcccgcctggacgccgcaaagcacacctcagatcttgccgctgccgtcagaagcaaaacagccggagccgacgccgcagtgctcgccgacatgctcggacgccttgcagaagaagctcgatattatgctgagcgatctgacgaaagctaccgcgcaggaatga

SEQ ID NO: 371905 - DNA, 351 bp, Salmonella enterica
atgccaccaagaacacctaaatcctgtcgtgttcgcggctgtcgcagtacaacaacagatccatccggatattgtgaaagtcacagaagcgagggctggaaacaatacaagccaggacaatcccgtcatcaacgcggttatggttcgaagtgggacgttatccgtgagcgcatactgaagcgtgataaaggtttatgccagttatgtctgcgtgccggtgtggtgcgtgaggcgaaaactgttgaccacattatccctaaagcgcatggcggaactgatgccgacagtaatctgcagagtctgtgctggccctgccataaggcgaagacggctcgtgaacggctgaaataa

SEQ ID NO: 371906 - DNA, 438 bp, Salmonella enterica
atgggtgctgttgtgagatcttccggtggtggccgtaagcgcaatttgccttcgggccagaaaagcaagctgaccaggatcgcaccgccggaagagttaatgagtgatatcgcgatccgcatctggaaaacgcagagcaaaattttaattgagcggggcgtttttgatcttgaagacgcgccgctactcctggcgtactgcaatgcgtttcacttgatgattgaggccgaaaaagtcatcgcggaagaaggcctgaccgtatcaagtgaaatgggtggtgagaaaaaacaccctgcagtcaatgtccgtaatgactccgtttcgcagctcgcccgtctgggttcacttctcgggttagacccgctcagccgcataagaatgaccagcggaaaaaatgatccggacgatgaagggaatgaatttgatgagtttgactga

SEQ ID NO: 371907 - DNA, 1731 bp, Salmonella enterica
atggctacatatccgaacgtcaatgcggcgaaccagtatgcgcgggacgtcgtgaacgggaagatactggcctgccggttaaccatgcttgcctgtcagcgacatcttgacgacctggaacgtgccaaagatccgcattggccttaccgcttcgataaaaataaagcagaacgtttccttcgcttttcccagaaaatgccgcacacctccggagagtgggctcgccggaagttgcggatagaatttgaaccctggcaaaaatttgcgctgggcgtgccgtttggctgggtgcgcaaggataccggttttcgccgcttcactgagatttacatcgaggtaccgcgtaaaaatgggaaatcggcgattgcggccgccgtcggtaactatatgttctgtgcagatggcgagtacgcagcggaagtttactgtggtgccacaacggaaaaacaagcctggaaagtttttgcgcctgcactggcgatggtgaaaaagctgccggcgttgcgtcagaagttctgtatcaaaccctgggcaaagaaaatgactcgcccggatggttccctgttcgcgccaattatcggtgaccctggagatggcgactcaccatcatgtgcgatcatcgatgagtaccacgagcatgatactgacgcgctatacaccacaatgactaccgggatgggggcgagggagcagcccatcacgctgatcatcaccacggcaggctttgatattgcctcgccttgctatgaaaaacgtactcaggtggtcgagatactggagcgcatccgggagggtggtgaaaacgaggcaattttcgggatcatctataccctggatgatgacgatgactggacacagccggaagctctgatcaaagccaacccgaattacaacatttcggtgaaagagggattcctcaaggctaaacagttgctggcgatgtccacgccaggccagaccaataaaatactcaccaagcatttcaacaaatgggtgagttctaaagcagcttactacaacctgcagaagtggatgaccgcagcagacaaaacgctcagactgtccgattttgcaggtgaggagtgttatcccggcatcgacctggcatcaaaacttgaccttaatgcagtggtgccggtattccgccgtgaaatagacggcctgagtcattattactgcgtttcgcctatgttctgggtaccggaagacaccgtctacgccacggacccggcgttgaaaactattgcagaccgttaccagtcttttgttaatcagggcgtgctggttccgtcagacggtgcagaagtggattaccgccttatcctggaagcgatcctgaaattacgggaaacggtgaagatagccgcgagtccgattgacccctacggtgcaacaggcttatctcatatgctgcaggatgaagggcttgaacctgtcaccattacccagaactacacgaacatgagcgacccgatgcgtgagattgaggctgcgatcgctgctggccgattccatcatgacggtaatcccttgatgacctggtgtatttcgaacgtggttggcaagtacctgcctggtagcgacgatgttgttcgcccggtgaaagaaggcgcaggcaacaaaattgatggtgcagttggcctgatgatgggggttggccgcgcaatgctgaacgagccgaaagactttctttctaacctcgatcctgatgaggaactgttattcctgtga

SEQ ID NO: 371908 - DNA, 159 bp, Salmonella enterica
gtgaaatcactaattatcgatgtggccggggtggcaggcttcggcgcgctggtgggaggtatttacctcaaatttggcgcggcggttgctcttatggctggtggtagtggcctgctgctgtgggcactgctggcggccaggagaataaaaacatgctga

SEQ ID NO: 371909 - DNA, 1218 bp, Salmonella enterica
atgctgattgatgccattttcagaagcaactcgctggaaaacccagctgttccggtcaccgttgaagcggtcgaaaacgacgggatctttaatggtgatgtgattgttaacccccggacggcaatgaaactggcggcggtgtatgcatgtatctacgttatttcatccaacgttgcgcagatgcccctgcacgtcatgcggcgaaccgggaagaaggttgaaactgcccgcgaccatcctgccttttacctggttcatgacgaacccaattcctggcagaccagctataaatggcgcgagctcaaacaacgtcacattctgggctggggtaacggatataccagagttctccgtcaccgccgaaccggtgaagtcactggccttgaagcctgtatgccgtgggaaacaacgctgctgaacaccggcgggcgctatacctacggcgtgtataacgaagaaggttcctttgccattaatcctgatgacatgatccacgtcagggcgttgggtaacgatcagaaaatggggctcagtccggttcttcagcacgccgaaaccatcggtatgggtatgagcgggcagaaatacacggaaagttttttcagcggtaacgccagaccagcgggcatagtttcagtaaaaggagaattgaatgacggctcctggaaaaggctgaaagagatgtggcaaaaagccacggcgatgctgcgcagccaggaaaacaggacaatgttgctcccggctgaactggattataaagcgctgacggtttccccagtcgatgcccagctcatcgacatgatgaagctcaaccgttccatgattgccgggattttcaacgtgccggcacacatgatcaacgacctcgaaaaagccaccttctccaatatttccgaacaggcgattcagtttgttcgctacacaatgatgccgtgggtgacgaactgggagcaggagcttaaccgtcggttgttcacccgcgccgaacgggaagccgggtattacgtgcgctttaacctggcgggtttattgcgcggtactgccaaagagcgcgcggagttctatcacttcgctatcaccgatggctggatgagccgcaacgaagcacgcgcgtttgaggatatgaatccgaaagacggccttgatgaaatgctggtcagcgttaacgcctcccggccagccaaatccacaacccaggagaacactcaagatgagtga

SEQ ID NO: 371910 - DNA, 603 bp, Salmonella enterica
atgagtgaacgtgaaattcgctgttacagcggcgaggtgcgcgcagaaacgcacgacagcgagcccagccggatcatcgggtatggttcggtctttgacagccgttctgaactgattttcggttcgtttcgcgaaatcatccggcccggtgcgtttgatgaagtgctgaatgacgatgtacgggcgttattcaaccatgaccccaattttatcctgggtcgcagaagtgcgggcacgctggcactgacggttgatgagcggggtctgcgttatgacatcaccgcgccagaaactcagacaatccgtgatctggtgctggcaccaatgcagcgcggggatatcaaccagtcctcttttgcatttcgcgtcgcccgcgacggagaggaatggtaccaggacgaggatggtgtggtgattcgtgagattacccgtttttcccgtctgctggatgtcagccctgtgacatatccggcgtatcaggaggcagattccgccgtccgctctatgaaagcctggcaggaggcgcgcgatagtagcgcactgcagaaagccattaaccaacgaatggcgcgtgagcgcgtcctgacccttcttaacgcgtaa

SEQ ID NO: 371911 - DNA, 1230 bp, Salmonella enterica
atgaaattgcatgaactgaaacaaaaacgtaacaccatcgcgaccgacatgcgcgcgctgaacgaaaaaatcggcgataacccatggacggatgagcagcgtaccgaatggaacaaggcaaaatctgaactggaagcactcgacgagcgcatcgcccgcgaagaagagctgcgccgccaggaccagacctacgttgatgaaaacgaggaagagcagcgcaataatcaggatcctgataaagacccgcagcaggacgaaaaacgcggccagatttttgataaatggatgcgtcacggcgccagcgaactgagttccgaagagcgcaaagccttacgcgaactgcgtgcgcagggtgtggcgccggatgaaaagggcggctataccgtgcctgataccttcctggcgaaagtggtcgaacagatgaaatcctacggtggtattgccagcgtggcgcagatcctcgctacatccgatgggcgcactatggaatgggccactgctgatggtaccgctgaagtgggtgtgctgctgggtgaaaacgaagaagcgggtgaagaagataccgaattcggtatggatagtctgggcgcgctgaaaatgacatccaaaattatccgcgtatccaacgagctgctacaggacagtgcgatcgacatggaagcctatctcgcccgccgtattgcggagcgcattggccgcggtgaagcgcgttaccttattcaggggaccggcaccggtacgccaaaacagcctaagggtctgaaagcatccgtaaccggcactacgcagacggccgctgccggagctgttaaatggcaagagattctggcgctgaaacacagtattgatccggcgtaccgccgcgggccgaagttccgcctggcgttcaatgacaatacgctgaaactcatcagcgagatggaagacggtcagggccgtccactctggctgcctgatatcgtcggcgtggcgccagcatcagtgctgaatgttccgtacgttattgatcaggagatcgatgatattggcgcgggcaaaaaattcatgttctgtggcgacttcgaccgcttcattatccgccgtgttcgctacatgatcctgaagcgcctggtggagcgttacgcggaattcgaccagaccggcttcctggcgttccatcgctttgactgtattctcgaagatacctctgcgattaaagcgctggtgggcaaaggctcggcaagcagctaa

SEQ ID NO: 371912 - DNA, 324 bp, Salmonella enterica
atgttgctttctcctgaggagatcaagttgcagctcaggctggatgaggattacgccgatgaagataaatttcttgagctgttggggcgggcggttcaggccaggacagaaaattttctgaaccggagactttatacggcggaggcgggggtgccagccgacgatccggaggggcttattctctcggatgacatcaggatggggatgctgcttctggtgacgcacttctacgagaatcgttctaccgtcaccgaagtggagaaagtcgaactgccgatgagctttaactggctcgtcggtccatacaggtacatcccgctatga

SEQ ID NO: 371913 - DNA, 405 bp, Salmonella enterica
atgaaactcaggcaggcgcaggccagcgccacataccttttgcccgacccaggcgaacttgaccagcgcattgttatccggcggcgtgtcgatgttccggctgatgactttggcgtaacgccgacgtacccggagcagatccgggcgtgggccaaaaaagcgcaacccggcgcggcagcttatcagggggctgtgcagatagaaaacagggtgacgcactatttcaccatccgttttcgccgcggtatcaccgccgatcatgaagtgctccacgacgatatttcttatcgggttaaacgggtccgtgatctgaacagtaaacgccgctttctgttgctcgagtgcgaagagctgggtaccgataacgggagtgactatgccgcagaaagcatatttacacgttga

SEQ ID NO: 371914 - DNA, 513 bp, Salmonella enterica
atgccgcagaaagcatatttacacgttgattttgaacagccggaaacgcttgtttttaaccgggcgcgtatgcgccgggcgtttgtcagtatcgggcaggtacatatgcgcgatgcccgccgcctggtcatgaagcgggggcgttccggacccggcgataatccttcatacagaacgggaaaactggcacgctccatcgggtattacgttccgcgggcatccagtcgccgtcctggattgatggtgaaaattgcccctaatcagaagaacggggaagggaaccgcccgatctcaggcgcattttaccctgcctttctgttctacggtgttcgccgtggggcgaagcgtaagaaaggccatcatcgaggcgcatcaggcggcagcggctggcgtgtggcaccacgtaacaactacatgactgaggttctggataaacgccgcagctggacacgttatgtgctctcccgcgaattgcgaaaatcactccgtcctcagcgaaggaagaaaaaatga

SEQ ID NO: 371915 - DNA, 561 bp, Salmonella enterica
atgaaattaaccccgattattgcggcacttcgcagccgttgccctcggtttgaaaaccgtgtgggtggcgcagcgcagtttaaagcgataccggaggccggaaagctcaggctaccagccgcgtatgttgtgccagccgaagacgtcacgggtgagcagaaatcgcagaccgactactggcaggatttgacggagggtttttccgtcatcgtggtactcagcaacgaacgggatgaaaaagggcagtgggcttcttacgacgcagttcacgacgtcaggcaggaaatctggaaggcgctgctggggtgggaaccggacccgcaggcgcatgaaattcagtatgcgggtgggatgcttctcgatctgaaccgccacgaactgtattaccagttcgacttcacggtgaagtatgaaattaccgaaacagacacccgccagcaggatgatctggacggcctgcccgaccttaaaacgctcagtattgatgttgattttatcgaacccggtaccgggccagatggcgacatcgagcaccacaccgaaattacatttcaggaataa

SEQ ID NO: 371916 - DNA, 165 bp, Salmonella enterica
atgtttgtgaaacccgcaaaagggcgatcggttcccgatccggcccgtggcgaccttttacctgaaggaggtcgaaatgttgatgagaataactactggctgcgccgcgaggccgctggtgatgtccggcgcacgaataaaaaggtgaaaacaaatggcgattag

SEQ ID NO: 371917 - DNA, 1497 bp, Salmonella enterica
atggcgattagttttaattccatcccgtcagatacgcgggttccgctgttttatgccgagatggataactcggcggcaaataccgcccgggacagcggggcatcactgctgattggtcacgccagcaatgatgcgtcaattgccgtcaacagtcttgttctggtgtcatcggttgattatgcccgtcagatttgcggtgcaggaagccagctggcccgtatggtcggggcgtaccgtaagaccgatccatttggcgaactgtatgtcattgccgtacctgaatccacaggcgcggcagcaaccgtcgctttgacggtaactggcgaagcgacggaaaccggaacggtgaatgtctataccggccgaacccgcgttcaggctcccgtgaccagcggtgatgacgctgcggcggtggctgtgagcattaaggatgcggtcaatgcaaaccctgatcttccctttacggcaacatcagaagcgggggtggtgacactgactgcgcgccacaaggggttatatggaaatgaaattccggtcactctcaattattacggctttggcggtggggaggtgttaccggcaggtgtgaatattacggttgccagcggcgtgaagggggctggtgcgccagctcttaacgacgcggtggcagcgatgggagatgagccgttcgattatatcggccttccgtttaacgacacggcatcggtgaacacgatggcaactgaaatgaatgattccagcggtcgctggagttatatccggcagttgtatggtcacgtttatacggcgaagacggggacgctgtcggagcttgtggccgcgggtgaccagtttaacctgcagcacatcaccctggcgggctatgagaaagacacccagacgcctgctgatgaactggctgcaagccgtactgcccgtgctgcggtttttatccgtaacgatccggcgcgcccgacccagaccggggaactggtggacatgctgccggcaccgaaaggcaaacgcttcacgacgactgaacagcagacgttactttcccacggtgtggcaacggcgtatgtggaaagcggcgtgctgcgtattcagcgggatatcacgacgtacaggaaaaatgcgtatggtgtggcggataacagctaccttgacagcgagacgctgcataccagtgcttatgtgttgcgccgtctgaaatctgttattaccagtaaatacgggcgccataaacttgctaatgatggtacgcgtttcgggcctggtcaggccattgtcacgcctgccgttatccgtggtgagctgggatcaacatatcgccagctggagcgggaaggcatcgtggaaaacttcgatctgttccagcaacatctgatagttgagcgtaacgcgaacgattcgaaccgccttgatgtgctgtttccgcctgattatgtcaatcagttacgtgtgtttgcggtgcttaaccagttccgtctgcagtacagcgaggaggctgcataa

SEQ ID NO: 371918 - DNA, 357 bp, Salmonella enterica
atgggaaaaattgcgggaacaacatatttcaaaatcgacggacagcaactgtcggtaaccggagggattgaagtccccatgaacaccaaagttcgtgacgacgtgattggcctggatggttccgttgactacaaggaaaccagccgggcaccgtatacgaaggtgaccgccaaagtgccgaaaaacttcccggtcgataaaattacgtcttctgatgtcatgaccatcacatcagagctggcaaatggtcaggtgtatgttctctcaaacgcctggctgcacggcgaagccaaccataacccggaagagggcaccgtggatcttgagttccacggtgaggagggattttaccagtga

SEQ ID NO: 371919 - DNA, 327 bp, Salmonella enterica
gtgataaaagaacttgtgctcaaaaagccgattatggcgcataacgaaaagcttcatgtgctggagctgcgcgaaccgtcctacgatgaaatcgaagccattggttttccgttcaccgtttccggtgatggcggcgtccggctggacagttcggttgctctgaaatatatccctgtgctggcaggtattccacgctcctcggcagcgcaactggcaaaactggatattttcaaagcctgtatgttgatcctcaatttttttacccggtcggagacggaggaggactcagaaagcgggtctacaacaccgcatacttctggcgaataa

SEQ ID NO: 371920 - DNA, 1929 bp, Salmonella enterica
atggctgacagtttccagttaaaggccattatcactgccgttgaccagttatcgggtccgctgaaagggatgcagcgggaactgaagggatttcagaaagaaatggccgggctggcgatcggtgctgccgctgccgggaccgctgttcttggggcgctggcgctgcccgtgaatgctgcgatcggctttgagtcaaaaatggctgacatccggaaggtggttgacggcctggatgataaaaaagcattcgcgcagatgagtgacgatatcctgacgctgtccacacagttaccgatggcggcggagggaattgcagagatcgtggcggcgggcgggcaggcaggcattgcccgcggcgatttgatgcagtttgcgaacgacgcagtgaaaatgggtgtggcgtttgataccactgccgaagagtccggtcagatgatggcgcagtggcggacagcgttcagactgacgcaggaagacgtggttgtcctggccgataaaatcaactatctggggaataccggcccggcaaatgcgaagaaaatttctgatatcgtgacgcggattggtccgctgggcggtgttgccggagtggcatccggcgaaattgccgcgatgggcgccaccattgccgggatgggggttgaatcagaaattgcctccaccggcatcaaaaacttcatgctgtcgttaaccgcaggtaattcggcaaccaaagcccagaaacaggctatggctttcctgaagctgaatccccggaaactcgctgaggatatgcaaaaggattcgcgcggggccatgctgaaggtgctggactcgctcgcgaaagtgccaaaagctaaacaggccgccgtcatgaatgcgctgtttggcaaggagtcacttagcgcgattgccccgctgctgaccaacctggatttgttacgcaccaattttgatcgtgtggctgatgcccaggaatatggcggctcgatgcagaaggaatacgcatcccgcgcgtccacaacagaaaaccagctggttctgctgaaaaacagcgtcaatgcgatttcggtaacgctgggcgataccttcctgcccgccattaacgaagctgcagaagcggtcatgccttacctggagcagctccggacattcgttcgcgcgaatcctgaactggttcagtctgcggcgaagttcggcgcggcgctgctggctgttggcgtatccattggcagcctgtcccgggctgtcaaaatcctgaacagtgtcattaacctctctccggcgaaagtcgccattgcggcgctggtggccggcgctatgctgatcattgagaactgggacgatgttgctccggtgattaaggcggtatggcaggaggtcgataacgttgcgcaggagatgggcggatgggagacggtgattgaaggggttggtctggttatggctggttcttttaccgtcaggaccattggtgccctgcagcagtccgtcctgctggccggacggctttccggtctgctgggtaaaattggccggatgggggccatgacgctgacaattggcgtggcggtgtcactctttaaagagcttaaggatctggagcagggggcaaaggatgcgggtatggatgctggcgcattcgctgtacagaagctgcaaacgaaggagcgtgaacgcgggtataacggttttattcccagactcaaagagcttcttggtatggacaccccgattccgcaggggcgttatcaaccttatgtgccactgacccggcgttctggcgtactcgggcgagctgtcccgccatcaacgcagcgcagcgaactcaaagtgacatttgagaatgcaccacaaggtatgcgtgtgactgatataccgaaatccggtaatccattgatgaacatcagccatgatgtgggttactcaccctttcgtacatcacgataa

SEQ ID NO: 371921 - DNA, 1341 bp, Salmonella enterica
atggcttttttctcctcaactggctggcgcgggcgcctgcgtgatgcatcatttcgtggagtgcctttctccgttgaagatgatgaaagcacgtttggacgccgcgtacaggtacatgaatatccgaacagggataagccctggacggaggatttaggtcgcgccacgcgccgcctgacgataaatgcttatcttgtcggtgatgattacgcagacaggcgggatcgtcttattggtgccattgaaaccgcaggccctggtacgctggtccatccgcagtatggcgaaatgcagggcagcattgacggacaggtcaggatcactcacagcagtacagaagggcgcatgtgtcgtgtctcctttcagtttgtggaaagtggtgaactttcttttcctgtggcgggaatggcaacggcgaagcgcctggaaacatcaggcgggcttttcgacgatgcgattgacagtatgttttccacattctcgttgtcaggtatttctgattttatccagaacgatgtcattgccgatgctgcctccatgctgggcgatgttgccgatgctttcaggatggttgactccggcgtgtctgccgcaatgcggctgttacagggggatttgtctgtcattctgatgccaccgggcgccgcaagtgatttcgttaacgcactgcaaaaagcctggcgctcaggtgacaggctcagaggcagtacatcggatctggtcacgatgataaaaacgatgtcaggtatcacccttgatcccggtctttccccccgtggcacctggcccactgactccggatctgctgcgaaacagaaaatgcaacgcaatatgatcgcagccgccatcaggacaacagccatcagcacagccgtccacgccgtgacaacactgaagcagccgcgtgatgtacctgatgtccggggcgtaaatcagcctgcaggaacaggccgtgactcagacattatcactgtcatgcacccggcgctggatggtgtacagacagtcagtaatggcagctttccaccgaattatgaagatctgaaagctatccggaccgcgctcaatgctgcgattgaccaggagcagttgcgtatccgggatgatgtgcttttccagcaaatttccgttatgcggacggatctcaatcgcgatatttctgcacgactggcacaggttgaacgtactgcattgcgaacgcctgatgatgttctgcctgcactggtactggctgcagcctggtatgacgacgccgggcgggaatctgatatcctcactcgtaatcccgttccccatccgggatttatcccggttgagccgctgagggttccggtacgatga

SEQ ID NO: 371922 - DNA, 1059 bp, Salmonella enterica
atgaataatacggtttttttacgcgtcaacgggcgtgactggggaggatggacgtcagtacggataagtgcgggcattgaccgtattgcccgggactttaatgtctcgatcacccggcagtggcctggtggagaagacgtaccgccagtaaaaaatggtgacgctgtagaggtactcattggcgatgatttagttattaccggctgggttgaggcgttaccgctacgttatgatgcgcagaccattatgacgggcattgtcgggcgcagcaaaacggcagatcttatcgactgttctgcatcgcctgcacagcataacgggaaaaatttattcctgatcgccagcgcacttgcccggccattcggtgtggacgttgttgatgcaggcgcgccggcagccgccgttattgaggctcagccggaacatggtgaaacggttgtggactgtctgaacaggctgcttggacaggctcaggcgctggcatatgacgacgaacggggacggctggttctcggcaggccgggcagtatgaaagcagccacggcactggtacttggcgaaaatattctttcctgtgataccgagcgtagtgttcgtgagcgtttctccagttatctggttacggggcagcgtcctggtacggatgacgatttcggcgaggcaaccattgctgctatccggcagagtactggtgatgcaggcgtcacgcggtatcgtccccacaccattcagcagtcaggaactgccacaactgacagctgcaaatcccgctgtgaatttgaagcccgtcagcgtgcggcgaaaacgctggaaaccacctataccgtacagggatggagacaggggaatggcgaattgtggaaaccgaatcaggccgtggtggtgtatgacccgctgaacggttttgacaatgaaacgctggtgatcgccgaagtgacgtacagccaggacaataacggcaccctgaccgaaatccgggtggggcctgcggatgcctatcttcctgaaccattcaggccgaaagcgaagaaaaaagtcagtgaggaggcagatttctga

SEQ ID NO: 371923 - DNA, 534 bp, Salmonella enterica
atggctaaccatcctcttcagaacatgataacgcgcgcagtcattaccgcgattgataccgtcagaaaatgccagactgccggactgaaacttattgccggtgaaaaaaaagagaatgtggagcatcttgaaccttacggtttcacctctgcagcacagaatggcgcagaagcggtggtattgtttcccggcggtggccgttcgcacggagtggctgtggttgtggctgaccgccgcttcagactgaaagggctggcgcgcggggaagtcgcgctatatgacgatcaggggcagtcggtcacattaacccgagccggaatagtggtaaatggcggcggaaagccagttattttcacgaatgccactaaagcacgttttgaaatgccgatcgaatccactggcgatatcagggacaactgtgacagcagtggaaaaacgatggctgaaatgcgcacgacctataacggtcatacccataaagaaaatggcgatggcggcggtataaccgataagcctggccaacccatgagctga

SEQ ID NO: 371924 - DNA, 414 bp, Salmonella enterica
atgatcctttatgttaatggaatccgtaaggatgccacggcttcgctcgactttctgacgcgggcagtggtgatttctctttttacctggcgccgggcggagcgggatgacaggaccccacagccatacggctggtggggggacacctggcctgctgttcagaatgaccgcatcggttcccgcctctacctgctgaaacgccgcaaactcaccaataaaacgccgcaggatgcccgcgaatacatgcagcaggcgctggcgtggatgacagacgatggcgtggcggcacgtattgatgtgacatctgaacgcacaggaacagataccctggcagctggcgtgacgatatatcagcgggacggggtaattcacaatattacattcgatgatatatggagcaaacttaatggctga

SEQ ID NO: 371925 - DNA, 1080 bp, Salmonella enterica
atggctgacagtcaatttgcacgtcctgaacttcctcagttgattgctaccattcgcagcgatttactgacccgttttcagcaggatgttgtgttacgtcgcatggatgccgaggtttacagccgggtacaggctgctgccgtacatacgctgtatggttatatcgattatctggcccggaatatgctgcctgatatgtgtgatgaggactggctttaccgtcacgcgaggattaagcgttgtcccaggaaaaatgccgtatctgcgaagggatttgcacgctgggatggtattgccggaacgccggagatccccgcgggtacacagattcagcgggatgatcaggttacattcacgaccctgcagacggtgaaagcttccggcggcctgttacgtgtgccggttattgctgatgtggcgggaactgccggtaatactgacgatggtacggcgttacgccttggcacgccgattactggtattccttctacaggttacgctgacactctgaccgggggggctgatacagaggagcctgaaacgtggcgcgcgcgcgtcatggaacgctattactggataccacaggggggcgctgatcctgattacgtcatctgggcaaaggaaatcgcgggaataacccgtgcgtggacattccgccattataaggggaccggcaccgttggtgtgatggtggctaccagtaacccggtgaatccggctcctggcgacgatctcgttaaggctgtacgtgaccatattttgccgctggcacctgttgctggcggcggactctttgttttcgctgccactgaaaaaagcattccggtaacagtcgcactggccaaagataccccggaaattcgtactgccattattgcggagctaaatgcgctgatgctgcgtgatggcgcgccgtccggaaaaatttatgtttcgcgaatcagcgaggcgataagtctggcgaccggggaagtggcacatcagctgcgtgtgccggcggcagatgtggtgctgggaaaaactgaacttcctgtcctggggaatataacctgggccacctataccggggagaacggataa

SEQ ID NO: 371926 - DNA, 588 bp, Salmonella enterica
atggcattacaggacgaatatacgcagttactttatcaccttctgccggaagggcctgcctgggacggagaaaacccactgattgaagggctggcgccgtcgctgaaccgggtacatcagagagcggatgaactgatggctgaaattgatccggccagaaccacagaactgatagaccgttatgaacagctgtatggcctgcctgattcctgtgcaccggaaggcgttcagacattacagcagcgccagcaacggctggatgcaaaggcaaatgttgctggcggtataaacgagaggttttatcgggaacagcttgatgcgttggggtataccgctgccaccattgagcagtttcagaatctcgacagcacacccgatcctgaatggggggaattctggcgttactactggcgtgtgaatattccggctgatgcgaacatcagctggcagacctgtacaagcacctgcgactctgcgatcagaacgtggggcgatactgttgctgaatgtgtgattgataagctttgtccgtcacatacggttgttgtttttgcttatccggaaggaaaagagaatgcacagaattga

SEQ ID NO: 371927 - DNA, 1563 bp, Salmonella enterica
atgcacagaattgatacgcccaccgcgcaaaaagataaatttggtcagggaaaaaacggatttacgaatggtgatcccgccacgggccgccgcgcaacggatctcaacagtgatatgtgggatgcagtccaggaagaggtctgtactgttattgaagccgccggcataccactcagtaaaggcgaacatacgcagcttcacgccgccattggcaggctgatcgatgaacaggttaaaacccgtcttgaaaaaaatcagaatggcgcggacatcccgaataagccgctgtttctccagaacgtcggtttaggagaaacgataaatctcgctgcaggggccctgcaaaaatcgcagaacggcggcgatattcctgacaaaaaacaatttgcgagaaccatcggtgcggtaacgtcaaccaccattacacttggcgaatcaggctggttcaaaatcgccacggttgtaatgccgcaggctacatcaactgcggtgattaaactgtacggtggggcggggtttaacgctggttcacctgaacaggcggcaatcagcgaactggtattgcgtgccggtaatggttcacctgttggaataaccgccacattatggaggcgttcaccttctgctgctaacgaggtcgcatgggttaatacatcaggcgacacctacgatatttatattaatatcggccagtatgcgtactggttaattgcgcaatatgattacaccggtaatgcaaatgtcacgctgcacagtacgcctgaatattcatcagttcagccgggaaactcaaccagcggtcagacatatacactgtttaatagtctgatgaaacccacagccggtgacgttgaggcactgtcagttaatggagggaggctaaacggtccgttaggcattggtactgataatgcgctgggtggtaattcgattgtattcggagataacgatacagggtttaagtggcacagtgacggcgttctggggatttatgccaataatgctctggttggttatatcgacaattccgggctgcacatgtcagtagatgttctcactaatggtgccgtacgcgcaggcaacgcaaaaaaactgtcactgacgagcaataataattcgacaatgacagccacgtttaatttatggggcgacgcaaacaggccaacagttattgaactggacgacgatcagggatggcatctgtacagccagcgaaatcctgacggttcgattgtctttacggtcaatggagatatcaccgctaacacgcttcgtgcaagcggggctatctatcagaataacggcgacatctttggttcgctatggggaaatggctggttaagtacctggattaataataatctcgtcttagatgttcagttaggggctggcacatcagtgactacctggaacaatgcaggttcctggcctaacactcccggatatgtagttacctccgtctggaaagattatcagggcgaaaatattgatggtattaattatgcgcctttgcaaaaacgagtcgggagtcagtggtataccgtacaagggggaacggtataa

SEQ ID NO: 371928 - DNA, 570 bp, Salmonella enterica
atgaaaaaatatcagaatatcaaaaatttcagacttattgacgcgcccgtaaacagggataaaactcaggctgaaataaatataggtgcatattttctggagtcggacgatggacaggactggtatgagtgtcagtcattattttctgatgatactgcaaaaataatgtacgaccatgagggggttatctggggtgttgttaataagccagtcccgcaacgaggaaacacatattctgtatcaatgttgtggccggttaatatgtctgttgcggaaatagacgctgctgactgccctgatgattgccgtggtgatggtacgtggttatatcaggacggtaaagtcgttcaacggggttattctccggaagagctgcgtaaaaaggcggaggctgaaaaagttcgccgccttgctgaggctgaatcagccatcgcaccactggcacgggcagtaaaactaaaaattgccacagatgaagagattaaacggctggaagcatgggaactttatagcgtaatggtaaacagggtggatacatctgcgcctgactggccggatataccacgctaa

SEQ ID NO: 371929 - DNA, 150 bp, Salmonella enterica
atgagtgattttcaccacggcacgcaggtcatccaatttaatggaggtacgcgcgtcacatccacgatatcgatcgaaatcgtcagtatggtctttacgtttagctttgccgaaacattgctcgcgtttatatcatacgtttgcaaataa

SEQ ID NO: 371930 - DNA, 1008 bp, Salmonella enterica
atgttttctcgagtcagaggttttctttcatgccagaactattctcatactgcaactccagctattactctgccttcatcaggtagtgcaaactttgccggagttgaatatcctttattgccattagatcagcacacccccctactttttcaatggtttgaacgaaacccaagcaggtttggggaaaaccagatcccaattattaatactcaacaaaacccctatctcaataatattatcaacgccgctataatagaaaaagagagaactatcggggttttagttgatgggaattttagtgctggacaaaagaaagcattagcaaagctggaaaaacaatatgaaaatataaaggttatctataattccgacctggattatagcatgtatgacaagaaactatcagatatttatttagaaaacatcgctaaaattgaagctcaaccagcaaatgtcagagatgaatatctgcttggtgagataaaaaagagtttaaatgaagttttaaagaacaatccagaggagtcccttgtttcgtcccatgataaacgcttgggacatgtacggtttgatttttacagaaatctttttttattaaaaggaagtaatgcttttctggaggcgggcaaacatggctgccatcacctgcaacctggaggtggctgcatatatcttgatgctgatatgttacttacaggtaaactcggcactttgtatttacctgatggtattgctgttcatgtaagtcgtaaaggtaatagcatgagtcttgaaaatgggattatcgccgttaaccgcagcgagcatccggcattgaaaaaaggacttgaaattatgcacagtaaaccttatggcgatccatacattgatggtgtctgcggtgggctaaggcattattttaattgttctatacggcacaattatgaagagttttgtaattttatagaatttaagcatgaacatatttttatggataccagcagtttgactatcagctcctggagataa

SEQ ID NO: 371931 - DNA, 819 bp, Salmonella enterica
atgcaattaccagaacaggatgagttttctgatttttttgctgccaatgatgatgaacaagcctctttaaggcgtaagttttttttggagaaacataaagaaccgtgtctgtctgagtctgcattagaggactaccaggcgctgtttatgagtatctacggaattaatattgactggaaagaggggacttttagcctgcttgaggcactttcagataatcagggagggaagcctgtcacggtcaaattcgattatgacagtgagattgaaacagcaacgataaatttggttgatacgcagtatgtgtttcatcactacccaatgggaagtgatggttttgatacagaactggtgcgcattgagcatatattggctaatagtggatatagtttgcgggtatatcagaacagcacttttagtgatacattatcgttcttactcattccgtcagatgagtggaaacgtgttgaacagcattatagcccagagcatatttctgaatacttcgttccgtatggaaaacaacttgttattcctgaggttactgctccagtcgtaaattatgtgccatccgttaaacaagaagcatcaaatgtcccagcgttgtttaatgctcggggtatccgtatttgttttttaagtataatgctaatcgcatttgcaatttatattttgtggaatatcctgacaaaaatagagcctttatcatcaggccaacctgctggctgtgaaaatctacaaaatttatactcaaaattacgtccagaagtagccgagccattaaaagaaaaaatgcgtaagagtttgggctgtaaatga

SEQ ID NO: 371932 - DNA, 1311 bp, Salmonella enterica
atgactcttattaattttgttgccgcaaatcaaaaatactacgcttttaatttgttgtcagtgtttatcatggtgttctggtcagttcagtacctcctgcagcatctccttgtccagactcaggtcagccaccagcttcttcagccgctgattctcatcctccagttgccgcagacgccgcagttccgtcacgcccggcccggcaaattttttcttccagttaatgggatggactacttcctcccgctgcggttaactgtacgaaatgtgctcaccaggagaatcaccatgaatatcgtatttctgggtattgatctggctaaaaatgtttttcagctctgcgggttaaaccaggccggcaaaccggtttatacgaaacgcactggccgaaaagaattgctccagacgctggcaaatattcctgcatgtctgattgggatcgaagcgtccaccggggcattttactggcagcgtgagtttgagaaactggggcacaaagtaaaggtcatcagtcctcagtatgtaagaccctttgtccgcgggcaaaaaaatgatggtaatgatgcacaggccatcgcagtggctctgatgcaaccgacaatgcagttcgtgccgccaaaaagccccgaacagcaggatatccaggctttacaccgggcaaggcagcgtattgtcaatcaccgcactgctacagtctgtcaaataagggggctgttacttgaccgggggatccccattggcagtgctgtctccagagctcgccgtgctattcctcttatccttgaagatgcagaaaacggtctaagttcccgtatgcgcagaacaattgccgaactctatgatctctttaacgatctcgggcgtcggatccatttttttgataaggaaattgaaacagtattcaggcaatcagaagcctgtccgcgtatcgccaaagttaaaggcattggtcctaaaacggccacggccgttgttgctgctattggcaaaggaactgaatttaagaatggtcgccactttgctgcatggctgggtctggttccacgccagcattcgagtggcgacaggcaggtgctgatgaatatgacgaaaaaaggcgacaagcatctgcggacactttttattcatggtgcccgcgctgtcgtcagggttgccacgaataacaatgatggtcatatgaatcagtgggttaaccagttaaaggaacggcgcggatttaataaaacgaccgtggcggtcgctaacaaaaacgcgagaataatctggtcgatgctgagaaatgataccgggtatcaggtagtgtgtaattaa

SEQ ID NO: 371933 - DNA, 150 bp, Salmonella enterica
atgaaaaagacccgttataccgaagaacagattgcatttgccctgaaacaggctgaaaccggcacccgcgtcggggaagtctgcagaaagatgggaatttctgaggccacattttacatctatggactacctccgttttgcaagtactga

SEQ ID NO: 371934 - DNA, 618 bp, Salmonella enterica
atgactaaaaaaatcctgactacgccaattaaagatgaagatttagcggatattaaggctggcgatattatttatctcaatggtcatattgttacctgccgtgacgtagcccatcgccgtttaattgaaggtggtcgcgagcttccggtagatgttcgcggcggcgctattttacacgctggccccattgtccgcccaattaaaggcgaagacgataagtttgaaatggtctccgttggaccaaccaccagcatgcgtatggagaaattcgaaaaagaatttattgcgcagaccggcgtgaaattaattgtgggtaaaggcggtatgggtaaaggtaccgaagagggctgtgctgaacacaaagcgctgcactgcgtattccctgccggttgtgcggttgtagccgccgtgtgcgtggaagaaattgaagatgcccaatggcgcgatctggggatgccggaaactctgtggctctgtcgggttaaagagtttggcccgctgattgtttctattgatacccatgggaataatctgtttgaacagaacaaaattatttttaatcagcgtaaagagatcgtcgctgatgaaatatgccagaacgtaagtttcatcaaataa

SEQ ID NO: 371935 - DNA, 900 bp, Salmonella enterica
atgagcaaaagtgaacagatatcccatatgaccgacgttatggccaagtttgtgggatataccggcaaagttttgcctgatgatgtcactgcaaaactggaagatttgcataagaaagagaccagtaaactggccgacgtcatctttactaccatgattgagaaccagcgtctggcgaaagagctggatcgaccttcctgccaggacaccggtgtcattcagtttctggtggagtgcgggacgaactttccgctgattggcgagctggaagcgttgttgcgtgaggcggtgatcaaagcaactgtcgattctccgctgcgccacaacagcgtagaaacttttgatgaatacaacaccggtaaaaacgtgggtaaaggtacgccgacggtcttctgggagatcgttcccaattccgatcagtgcagcatttatacctatatggcgggcggcggttgttccctgccggggaaagcgatggtgctgatgccgggtgcaggctatgaaggtgtgacccgctttgtactggatgtgatgaccagctacggcctcaacgcgtgtccgccgctgctggttggcgtgggcgtagcgacctctgttgaaacggcggcactgctatcgaaaaaagcgctgatgcgtccgatcggttcgcataacgagaatgagcgtgcagcctcgctggaaaaaatgctggaagaaggcattaacaaaattggcctggggccgcaggggatgtccggtaatacctccgttatgggcgtgaacattgaaaacaccgcgcgtcatccttctaccatcggcgtggcggtaaacgtcggctgctggtcgcaccgtaaagggcatatcgttttcgataaagatttgaattacaccattacgtctcacagcggagtgaatttctga

SEQ ID NO: 371936 - DNA, 1269 bp, Salmonella enterica
atggaacccattacccttaccttatgtttattggtgttcgctatcgtcatgtttgtatgggaaaaagtgccacttgccgtcacttccatgattgtctgcgtggccttagtgatcaccggcgttctgaatatcaaacaggcctttgctggctttatcgacactaacgttatcctctttgtcgcgatgttcatcgtgggcggtgcgttgttcgagaccggtatggcaaacaaagtgggcggcgtcatcacgcgcttcgcgaaaacagaaaaacagctgatcttcaccattatggtggtggtgggtttgatgtctggcgtcctctctaacaccggtaccgctgcggttttgattccggtggtgatcggcgtggcggcaaaatcgggcttctcgcgttctcgtctactgatgccgctggttttcgccgctgcgttgggcggtaacctgtcgttaattggcgcgccgggaaatcttatcgcgcagtctgcgctacagaatattggcggcggctttggcttttttgaatacgcaaaaatcggtctcccgatgctcatctgcggcattctctacttcctgactattggctatcgctttctgccgaataatgcgaccggcggtgaggtggggagcgtcggggagcaacgtgactacagccatgttccacagtggaaacaacggctctcactggtggtgttgatcgcaacgatcctcggcatgatctttgagaagaagatcggtgtcagcctggccgtgaccggttgtattggcgctcttgtgctggtagttaccggcgtactcacggaaaaacaggcctataaagccattgattcacagactatttttatctttggcggcaccctggcgctggcaaaagcgctggaaatgaccggggcaggcaagctggttgcggactatgtaatcggcatgctggggcaaaactcttcaccgttcatgttgctgatcgccgttttcgccttatccgttgtgatgaccaactttatgtccaataccgcaacgacagcgctattggtgccggtgagtttgtccattgccgcaggtatgggggccgacccgcgtgcggttctgatggcgacggtcattggcggttcctgcgcctacgcaacccctatcggtatgcctgccaacatgatggtgctctccgcgggtggctataaatttgtcgactacgctaaggccggtatccccctgattatcgtttcaaccattgtcagcttgatcctgctgccaatccttttcccttttcatccgtaa

SEQ ID NO: 371937 - DNA, 666 bp, Salmonella enterica
gtgcagaagcctaagttagggaagattaagcttctttcagcgaaagaacaggtcgcggcagtgctgcgtaaagcgattctttcgagggagttagtagaagggcaggagattacgttagaaggcattgccagaatggtcggcgtgtccagtatgccagtgcgcgaggcgtttcagattctggcggcggatgggctgataaaagtgcgccctaataaaggggcggtggtgttgggcatcaatgaacaaacgatccgtgaacactatgaaattcgcgcgctgttagaaagtgaggcggtggctaaagcttctcgtcctggcaccgatatctcgcggatagcccaggtgcattatgccgctgaaaaggctctcgcggaaaataactcggcggaatactccgacctgaatcaggcatttcatatggaaatatggaatgttgctggcaacgaaaaaatgaaaatgttgctctgtaatatgtggaacggcctgtcgatgggccataaggtcaccgaagaagagtatgccgtgatttccattcaggaacataaaagtattctgcaagctcttgaacttcatgatgaaacattggcacgccagcgcatgcgcgaacacattattcgctcaatggagaatatgctgacccgctatgttggtgacccttctgcctga

SEQ ID NO: 371938 - DNA, 630 bp, Salmonella enterica
gtgaaaaagatccaaagaacgcaaacccgcgatcacattacgcaaatgcttcgctatgaaattctttccggcaatataaaagcgggagaagaactcgcgcaggaaagtattgcggagcagcttggtctttcacgaatgccggttcgagaagcgctacagtcactcgaacaggaaggttttttaatccgactgcccaacaggcacatgcaggtcgcgcatcttgaggccgatcgcgtgagtcatatttttcgcgtaattgccgcgatggccgccgaaatgttttcgctgatacccagcgaagtaggcgatgccctcctgatacgtgcgcaagcgctggctgtcgcagaagacaaatcctgcgaactggagtgtcatgcgatgctgatttcttatgtgaataaccgctatctggaaaaggtgtatcagcagttcctggacggttatgtctcttatgttattttgcatctgaaaaaagataatcaggagtcggcgcagcttttcgctgaactggctgacgtcatacgccaggggcggcgtgatgagattgggcaagttatgcagcgttatttcctctctttagcagaaataatgcgtcaacatatgaaggattgggaaagtgcagaagcctaa

SEQ ID NO: 371939 - DNA, 939 bp, Salmonella enterica
atgaaagtcgcagtcctcggcgctgctggtggtatcggtcaggcgctggcattacttttaaaaaaccaactgccttcaggttcagaactctccctgtacgacatcgctccagtgactcccggtgtggccgttgatttgagccacatccccaccgctgtaaaaatcaaaggtttctccggtgaagacgcaaccccggcgcttgaaggcgctgacgtagtactgatttctgcgggtgtggcgcgtaagccgggtatggaccgttccgacctgtttaacgttaacgctggcatcgtgaaaaacctggtgcagcagatcgctaaaacctgcccgaaagcgtgcgtgggcattatcaccaacccggtgaacaccaccgttgcgattgcggcggaagtgctgaaaaaagcaggcgtatacgacaaaaacaaactgtttggcgttaccacgctggatatcatccgctctaatacctttgtcgcagagctgaaaggtaagctgccaacggaagttgaagttccggtgattggcggacactccggcgtgacgattctgccgctgctgtcgcagattccaggcgtaagttttaccgaacaagaagcggccgagctgactaaacgtattcagaacgccggtactgaagtcgtcgaggcgaaagccggcggcggatcggcaaccctctctatgggccaggctgccgcgcgtttcggtctttctctggttcgcgctctgcagggcgaaaaaggcgtggtggaatgcgcctatgtggaaggcgacggtcagtatgcccgtttcttctctcagccgctgctgctgggtaaaaacggtgtagaagagcgtaaatccatcggcacactgagcgctttcgagcaacattcgctggacgctatgctggatacgctgaaaaaagatattcagttgggtgaagattttattaataaataa

SEQ ID NO: 371940 - DNA, 471 bp, Salmonella enterica
atgcgaagctcggctaaacaagaagaactagtaagagcgtttaaagcgctcctcaaagaagaaaaattcagctcacagggcgaaatcgtcctcgcgttgcaggatcagggctttgaaaatatcaatcagtccaaggtctcgcgcatgttgactaagttcggcgcagtgcgtacacgtaacgcaaaaatggaaatggtgtactgtcttccggctgaactgggcgtcccaacaacatccagtccgttgaaaaatctggtgctggatatcgactataacgacgctgtcgtggtgattcataccagccccggcgcggcacaactcatcgcgcgcctgctggattcactggggaaagcagaaggtattctcggcacgattgccggcgacgatactatcttcactacgcctgccagcggcttttccgtaagagatctgtacgaagccattctggaactttttgaacaagagctttag

SEQ ID NO: 371941 - DNA, 264 bp, Salmonella enterica
atgaaaatcaaaaccactgttgcaacattaagtgttctgtccgttctctcttttggcgctttcgccgcagaacctatcagcgcagagcaagcgcaaaatcgtgaagcaatcggatcggtttcagtcagcgctatcggctcatcgcctatggatatgaacgccatgctgagcaaaaaagcggatgaacaaggcgctacggcctaccacattaccgaagcgcgtagcggtagcaactggcacgccactgccgaactgtacaaataa

SEQ ID NO: 371942 - DNA, 267 bp, Salmonella enterica
atgaaaacgaaatacattatcgcatcactcggcctggccactctgctctctttcggcgcaaatgccgcagtacatcaggttaacgcggaacaggcgcagaatctgcaaccgatgggcaccatttccgtctcgcagattggcagtacgccaatggatatgcgccaggagattgtcgctaaagccgaaaaagcaggcgctaatagctatcgcatcatcgaattaaaagaaggtgataactggcacgccaccgccgagttgtataagtaa

SEQ ID NO: 371943 - DNA, 273 bp, Salmonella enterica
atgaatgtctatacttttgattttaatgatattaaaaaccaaagcgatttttatcgcgagtttacgcagacgtttggtcttgccagtgagaaagtaagcgatcttgatacattatgggatgcggtaatgagcgatatcttacctctaccgctagagattgagttcgttcacctgcctgataaactgcgcaggcgctacggggcgctgattttactctttgatgaagcggaagaagagctggaggggcggctacggtttaatgtccggcattga

SEQ ID NO: 371944 - DNA, 1968 bp, Salmonella enterica
atgggcattttctccattgccaaccagcacattcgttttgcggtaaagctggcgtgcgccattgtgctggcattatttatcggcttccattttcaactggagacgccgcgttgggcggtgctgaccgccgcgatcgtggcggcaggcccggcatttgccgccggcggggaaccctattccggcgctatccgttatcgcggaatgttgcgtattatcgggacgtttattggctgtatcgccgcgcttatcattattatctctatgatccgcgcgccgttattgatgattctggtgtgctgtgtctgggccggtttttgtacctggatctcctctttagtacggatcgaaaactcttatgcgtggggactgtcaggttatactgcgctgatcattgtgattaccattcagacggagccgctgcttacgccgcaatttgcgcttgagcgctgtagcgaaatcgtcatcggcattggctgcgctattttagcggatctgcttttctcgccgcgatcgataaagcaggaggttgatcgcgaactggacagtttactggtagcgcaatatcagctaatgcaactttgtattaagcatggcgacagcgaagaagtcgacaacgcctggggcgatctggtgcgacgcacggcggcgctggagggaatgcgaagtaatctgaatatggaatcttcgcgctgggtacgcgctaaccgccgcctgaaagcgttgaatacgctttcgctcacgctgattacgcaatcctgtgaaacttatcttattcaaaacacgcggccggaactgattaccgatacattccgggaactgttcgagacgccggttgaaacggtacaggacgttcacaggcagttaaaacggatgcggcgtgtcattgtctggaccggcgagcgcgaaacgcccgtcacgctttatagctgggtaggcgcagcgacgcgctatctgctgcttaaacgcggcgtgatcagcaacaccaaaatcagcgcgacggaagaagagatcctgcaaggcgagcccgtagttaaagtggaatccgctgaacgtcaccatgcgatggtgaacttctggcgcaccacgctttcctgcatactggggacattattctggctatggaccggctggacatcgggtaatggcgcgatggtgatgattgccgtggtgacctcgctggcgatgcgtttacccaatccgcgcatggtctgcattgattttatttatggcactctggcggcgttgccgctgggattgctctatttcctggtgattattcccaatacgcagcaaagtatgctgttgttatgtttgagcctggcggtattggggttctttatcggcattgaggtccagaaacggcgtctggggtcgatgggggcgctggccagtacgattaacattattgtgttggataatccgatgacgttccatttcagccagttcctcgacagcgcgttggggcaaattgtcggctgtatgctggcgtttatcgtcatcctgctggtgcgtgataaatccaaagatcgaaccggtcgcgtgctgcttaatcagtttgtttccgctgcggtctcggcaatgacgaccaacgtggtacgtcgtaaagaaaaccgtctgcctgcgttatatcagcaactctttttgctgatgaataaattccctggcgatttgccgaagtttcgcctggcgctaacgatgatcattgctcatcaacgtctgcgcgacgcgccgataccggttaatgaggatctgtcagtgttccaccgtcagcttcgtcgtaccgcagaccatgttatttccgccggaagcgatgataaacggcgacgctactttggtcagttgctggatgagctggatatctatcaggagaaattacgtatctgggaggcgccgacgcaggtgacggaaccggttaaacgcctgacgggcatgttacataaataccagaacgcgcttaccgatagctaa

SEQ ID NO: 371945 - DNA, 933 bp, Salmonella enterica
gtgaaaacactaacaagaaaactctcccgtacggccattaccctcgtactggttattctggcctttatcgccattttccgcgcctgggtgtattacaccgaatctccctggacgcgcgacgcgcgttttagcgccgatgtcgtcgctattgccccggatgtcgcgggcctgattacccatgtaaacgtgcatgataaccaactggtgaaaaaggatcaggtcctgtttaccatcgatcagccacgctatcaaaaagcgctggcggaagcggaagctgatgtagcctattatcaggtactggcgcaggaaaaacgccaggaagccggtcgccgtaatcgcctcggcgtacaggcgatgtcccgggaagagatcgatcaggcgaacaacgtcttgcagacggtactgcatcaactggctaaagcccaggcgacgcgcgatctggctaaactcgatctggaacgcaccgtcattcgcgcgcctgccgacggctgggtgactaaccttaatgtttatgccggtgaatttattacccgcggttccacagccgtcgccctggtgaaaaagaactctttttacgtgcaggcctatatggaagagaccaagctggaaggcgtgcgtccgggatatcgtgccgaaatcacgccgcttggcagcaaccgggtattaaaaggtaccgtcgatagcgtggcggcaggggtaacgaatgccagcagtaccagcgatgcgaaagggatggcgacgatagactctaacctcgaatgggtgcgtctggcccagcgtgtcccggtgcgtatccgactcgacgagcagcaggggaatttgtggcctgccggtacgacggcaaccgtcgtgatcaccggtaagcaggatcgtgacgcaagccaggactccttcttccgtaaactggcgcaccggctgcgcgaattcggttaa

SEQ ID NO: 371946 - DNA, 204 bp, Salmonella enterica
atgagtctgtttcccgttatcgtggtgtttggtctttccttcccaccgatatttttcgaattgcttttgtcactggctattttttggctggtgcgtcggatgcttgtgccgacgggtatctatgattttgtctggcatccggctttgttcaataccgcgctgtattgttgtctgttttatttaatatcgcgcctgttcgtttga

SEQ ID NO: 371947 - DNA, 930 bp, Salmonella enterica
atggaacgattaaaacgaatgtcggtattcgccaaagttgtcgagtttggctcttttaccgccgcagccagacagctgcaaatgagcgtatcgtccatcagccagactgtggcgaaactggaagatgagcttcaggttaaattgctcaaccgcagcacacgcagcattgggctcaccgaggctggaaaaatctattatcagggctgtcgtcgtatgctgcatgaagtgcaggatgttcatgagcagctttacgcttttaataacacgcccatcggtacattgcgtatcggctgttcttcaaccatggcgcaaaatgtgctggccgggcttaccgcaaaattattaaaagagtatcccggtctggcggtcaatcttgtgacaggaattccggctccggatttaattgccgacggactggacgtggtgatccgcgtgggcgcgctgcaagactccagcctgttttcccgtcgactcggcgcgatgccgatggttgtgtgcgccgccaagccctacctcgctcagtacggcgtcccggaaaaacccgccgatctcagtagccattcctggctggaatatagcgtgcgcccggataatgagtttgaacttatcgcgccggaaggaatttctacccgactgattccacaggggcggttcgtcactaacgatccgatgacgctggtacgctggctgaccgccggaaccggaatcgcctatgtgccgctgatgtgggtgatcgatgagatcaatcgtggcgatctggagatcctgctgcctcgctatcagtccgatccccgtccggtgtacgcgctgtacaccgaaaaagataagctgccgcttaaagtgcaggtagtgattaacgcgttaactgactattttgtcgatgtcgcacacctgtttcaggggatgcacgggcggggaaaagaaaaataa

SEQ ID NO: 371948 - DNA, 1446 bp, Salmonella enterica
atgagtctgaacctggtaagtgaacaattgctagcggcgaatggcctgaaccatcaggatctgttcgctattttgggccaactggccgaacgccgtcttgattatggcgacctctattttcagtcgagctatcacgaatcctgggttttagaagaccgcatcattaaagatggttcatataatatcgaccagggcgttggcgttcgcgccattagcggcgaaaaaaccggttttgcttatgctgaccagataagcctcctggcgctggagcagagtgcgcaggcagcgcgaaccattgtacgcgagaacggcgaaggcaaggtaaaaacgctcgccgccgtagcgcatcagccgctctacaccacccttgatccgctgcaaagtatgagccgcgaagagaagctggatatcctcagacgcgttgacaaagtggcgcgagaagccgataaacgcgtgcaggaagttaacgccagcctgaccggcgtatatgaattaatcctcgtggcggcgaccgacgggacgctggcggcggatgtccgtccactggtgcggttgtccgttagcgtgcaggtggaagaagacggtaaacgcgagcgcggcgccagcggcggcggcggtcgctttggttatgagtattttcttgccgatctcgacggcgaggttcgcgccgacgcgtgggcgaaagaagcggtacgcatggcgctggttaatctctccgcggtcgctgcgccagcggggacgttaccggtggttctgggcgccgggtggccgggcgtattgctgcacgaagcggtcggtcacgggctggaaggtgattttaaccgtcgtgggacatctgtgtttagcggtcagatcggcgagcaggttgcctccgcgctttgcaccgtagtggacgacggcacaatgatgaaccgtcgcggctccgttgctatcgatgatgaaggtacgccaggccagtacaacgtattgattgaaaatggcgtgctgaaaggatacatgcaggacaagctgaacgctcgcctgatgggcgctgcgccgaccggtaacgggcgtcgcgaatcttacgcgcatctgccgatgccgcgtatgacgaatacctatatgttggcggggcagtcaacgccgcaggaaattatcgaatccgttgagtacggcatctatgcgcctaactttggcggtggtcaggtggatatcacctccggcaagtttgtgttctctacctcggaagcgtatctgattgaaaatggcaaagtcacgacgccggtgaagggcgcgacgttgattggatcaggcattgaaacgatgcaacagatctccatggtcggcaacgaccttaagctggataacggggtgggggtctgcggtaaagagggccaaagcctgccggtaggcgtaggccagccgacgctgaaagtcgataacctgacggttggcggcaccgcataa

SEQ ID NO: 371949 - DNA, 3801 bp, Salmonella enterica
gtgaggcgattgccggggattttattgctcactggagccgcgctcatcgtcattgcagcgctgctggttagcgggctgcgcctggcgttgcctcatcttgacgcctggcgtccagctatcctgaataaaattgagtccgtgaccggcgtgccggtggccgccagccaactctccgcaagctggcaaaattttggccctacgctggaagcgcataatattcatgccgccctgaaagatggcggcgagctgtcgataaaacgcgttacgctggcgctggacgtctggcaaagcctgttgcatatgcgctggcagtttcgcgacctgaccttctggcaactcaatttccgcaccaacacgcctcttcaaagcagcgacggcaaaggcatcgaaaccagccgtttaagcgatcttttcctgcgtcagttcgatcatttcgatctgcgcgatagccaaatcagttttctgacgctttccggacaacgcgcggagctggcgatcccacagcttacctggctaaacggcaaagagcggcaccgcgccgaaggcgaggtcagcctctccagcctgaccgggcagcacggcgtgatgcaggtgcggatggatttacgcgatgacgacggtttgctgaataacggcagagtctggttacaggccgacgatattgacgtcaagccgtggctgggcaaatggatgcaggataatgtggcgctccagacggcgcgtttcagtctggaaggctggatgacgctcagtaaaggcgaaatcgccggaggagacgtctggctgaaacagggcggcgcaagctggctgggcgataacacgacgcacacgctgtctgtcgataacctgacggcgcagattagccgcgagcagccgggctggcagttttatattccggacacacggattacgcttgatggtaaaccctggccgagcggagccttaaccgtggcctggctcccgcagcaggacgtcggcggcgagaatcacacacgtagcgatgagctacgcattcgcgccagtaatcttgaactggcggggctggaagcattacgtccgctggcggctaaactgtcgcctgtgctgggcgaaatatggcaggctacgcagccgagcggaaagatcgccacactggcgctggatattccgctacaggcgaccgaaaaaacgcgttttcaggcatcgtgggaaaatcttgcctggaaacagtggaagctgttgcccggcgcggaacatttttccggtacgctggcgggaagcgtagaagacgggcagatgaaggttgcgatgcagcaagctaaaatgccctatgaaaccgtttttcgcgcgccgctggaaattgaaaacggcgtcgcgacgcttagctggttgaagaatgagaacggctttcagcttgatggccgcgacattgacgtcaaagcaaaggcggtacatgcgcgcggcgggttccgctatctgcaaccgacgggcgacgaaccgtggctgggtattctggccggaatcagtaccgatgatggatctcaggcgtggcgctattttccggaaaacctgatgggcaaagcgctggtcgattaccttagcggcgcgattcagggcggcgaggcggataacgccacgttggtttacggtggtaacccgcacctctttccctataagcataacgaaggtcagtttgaagtgctggtgccgctacgcaatgcgacgtttgcctttcaacccgactggccggcgctaaaaaatctcaacattgaactggatttcctgaacgacggtctgtggatgcgttcggatagcgtcgatttgggcggggtgaaggccagcaaactcgcggcgacgattccggattattccaaagagaaactgctcattgatgccgatattaacgggccgggaaaagccgttgggccttattttgacgagacgccgctaaaagactcgcttggctcgacgctggcggagctccagttagatggcgatgtgaatgctcgcttacatcttgatattccgctggacggagaacaggttaccgccgagggcgatgtctcgttgcgtaataacagtctgtttattaagccgctaaacagcacgctcaaaaatctgaacggtaaattcagctttgtgaatggcgcgctaaaaagcgggccgctgacggcaaactggtttaatcagccgcttaacctggatttcagtacgacggaaggggcaaaagcctatcaggtcgccgtcaacctgaacggtaactggcaaccaacgcgtatgggcgtcttaccgccgcaactgaatgacgccctgagcggcagcgtgacgtggaatggtaaagtcggcatcgatcttccgtatcacgctgacaccacttatcacatcgagctgaacggcgatctgagaaatgtgagcagtcacttaccttctccgctaaataaacccgcaggcgaagccattccggtgaacattcaggctgacggcaacctgaaaagttttgcgctaacggggagcgcagggagtaaaaatcactttaacagccgctggttattaaatcagaagctgacgttggatcgggctatctggacgacggacagccggacgattccgccattacctgctcaacaaggcgttgaactcaatctgccggcgctggatggcgcacaatggctggcgttattccagaaaggcgcggcggataacgtgagcagttcagccgagtttcctcaacgcgtcacgttgcgtactcccgcgctatcgctgggtggccagcagtggaacaatttgagcgtcgtttcagccccctcgctgaacggaacaaaaattgaagcgcagggccgtgaggtgaacgccacgctgctcatgcgcaaccatgcgccgtggctggcgaatattaagtacctgtactacaaccctggcgtcgcaaaaacgcacgcctcgtcaccaacgccgacatcgccgttggcttcggcgaacacgattagcttccgcggctggccggacttacagcttcgctgcgaagagtgctggctgtgggggcaaaaatatgggcgtattgatggcgatttcgccatcaaaggcaatacgctgactctggcgaatggcctgatcgataccggattcgcccgtttgaaagcgaacggcgagtgggtgaatgcgccgggtaatgaacgaacctcgctgaaaggtagtctgcatggtagtaacctcgacacggctgccgggttcttcggtatctcgacgccaatccagaacgcgtcttttaacgtagattacgatctgcactggcgaaacccgccctggcaacctgaggaagccacgctcaacgggattttacgtacgcgtctgggtaaaggcgagtttactgatctcagtagcggtcatgccggacagttactgcggctgctcagttttgatgcgttgctgcgtaagctgcggtttgacttcagagatacctttagcgagggcttctatttcgactctattcatagtaccgcgtggattaaagatggcgtcctgcatactgacgatacgctggtggatgggctggaagcggatattgcaatgaaaggttctgttgatctggtgcgtcgtcgtcttgatatggaggccgttgtcgcgccggaaatttccgccacagtgggcgtcgccgccgcgtttgccgttaacccgattgtcggcgcggcggtatttgccgccagtaaagtgttggggccgctatggagcaaggtctccattttgcgatatcgcattaccggtccggtcgatgcgccgcagatcaacgaagttctgcgccaaccgataaaagaaagccagcaatga

SEQ ID NO: 371950 - DNA, 1470 bp, Salmonella enterica
atgacggctgaattgttggtaaacgtaacgccatcggaaacgcgcgtggcgtacattgatggcggtattcttcaggaaatccatattgagcgcgaagcgcgacgcggaatcgtaggcaatatctacaaaggtcgtgtaagtcgtgtacttccaggtatgcaggcggcttttgtagatattgggctggataaagccgcatttcttcacgcttccgacattatgccgcataccgaatgcgtggcgggcgacgagcaaaaacagtttaccgtgcgcgatatctccgaactggtgcgtcagggacaggatctgatggtgcaggtagtgaaagatccgctcggcacgaaaggcgcgcgtttgaccacggacatcacgttgccctcccgttaccttgtttttatgcccggcgcgtcacacgttggcgtttcccagcgtatcgaaagcgaaagtgaacgcgagcgcctgaaaaaggtggtggcggaatactgcgacgaacagggcgggtttattatccgcaccgcggcggaaggcgtgtgtgaagaggatctcgcgtctgacgccgcctatctcaagcgcgtctggacgaaagtcatggagcgcaaaaagcgtccgcaaacgcgctaccagatgtatggcgaactggcgctggcgcagcgcgtgctgcgcgatttcgccgatgcgcagttggaccgaattcgcgtcgactcacgtctgacctatgagtcgctgctggagtttaccgcagaatacatcccggaaatgaccagtaagctggagcattacagtggccatcagccgatcttcgatctttatgacgtggaaaatgagatccagcgcgcgctggagcgtaaggttgaactcaagtctggcggttatctgattatcgaccaaaccgaagcgatgacgacggtagatatcaataccggcgcgtttgtcggacaccgtaatctcgacgacaccatttttaataccaatattgaagcgactcaggccattgcccgccagctacgcctgcgtaatctgggcggcattatcattatcgattttatcgacatgaataatgaagatcatcgccgccgggtgctgcattcgctggaacaggcgttaagtaaggatcgcgtgaaaaccagtattaacggtttttcgccgctggggctggtggaaatgacccgtaaacggacccgtgaaagcgtggaacatgtgctttgtaacgagtgtccaacctgtcatggccgcgggacggtaaaaacggtggaaaccgtctgttatgagatcatgcgtgaaattgtacgtgttcatcacgcttatgactccgatcgcttcctggtttatgcttctcctgcggtggcggaagcgctgaaaggcgaagaatcacacgcgctggcggaagtcgaaatctttgtcggcaaacaggttaaagttcaggtcgaaccgctttataaccaggagcagtttgacgtcgtaatgatgtaa

SEQ ID NO: 371951 - DNA, 594 bp, Salmonella enterica
atgacaactctgtatcttgcttccggttccccgcgtcgccaggaattattgactcaacttggattttcattcgagcaggtcgtgcctggtattgaagagcaacggcgtgctcaggaaagcgcgcagcagtatgttgttcggctggcacgcgaaaaggcgcaggctggcgtggcgctggttccccgtgatctgccggtgttgggcgcggatacgatagtcgtgttaaacggcgaggtgctggaaaagccgtgcgacgccgctcatgccgcagaaatgctgcgtttgctttccggaaatacgcatcaggtgatgactgctgttgcgcttgcggactcgcagcagacgctggattgtgtggtggtaacggaggtgactttccgcacgctttctgcgcaggatattactggctatgtcgccagcggcgagcctttagataaagcaggtgcatacggtattcaggggcggggtggctgttttgtcaggaagataaatggcagctatcacgccgtggtcggcttaccgctggttgaaacgtatgagttgttgagtcattttaacgcactgcgtgataaaagggataaacatgacggctga

SEQ ID NO: 371952 - DNA, 492 bp, Salmonella enterica
atggtggcgagctatcgtagccaggggcgctgggttatctggctctcgtttcttattgcgctgttgctgcaaatcatgccctggccggacgacatcattgttttccggccaaactgggttttgctcatcttactgtactggattctggccctgccgcaccgcgtaaatgtggggacgggatttgtgatgggtgccatacttgatctcatcagcggttccacacttggcgtgcgcgctctgtcgatgagtattgtcgcctatctggtcgctctgaaattccagctcttccgtaacctggcgctctggcagcaggcgctggtggtaatgttgctttcactggccgtggacattattgttttctgggccgagtttttagtgatcaacgtctctttcagaccggaagtgttctggagtagtgtagtcaatggcgtgctgtggccctggctctttttgctgatgcgtaaagtacgccagcagtttgctgtgcaataa

SEQ ID NO: 371953 - DNA, 1053 bp, Salmonella enterica
atgaagccaatttttagccgtggcccgtcgctacagattcgccttattctggcggtgctggtggcgctcggcgttatcattgccgacagccgcctggggacgttcagtcaaatccgaacgtacatggacactgccgtcagtcctttctattttatttcaaacggccctcgtgaactgctcgacagcgtgtcgcaaacgctggcttctcgcgaccagcttgagctggaaaatcgggcgctgcgccaggaattactgctaaaaaacagcgacctgctgatgctggggcagtacaaacaggagaacgcgcggttgcgcgagctgctggggtcgccgctgcgtcaggacgagcagaaaatggtgactcaggttatttcaacggttaacgatccttacagcgatcaggtcgttatcgataaaggcagcgttaatggcgtatatgaaggtcaaccggtcattagcgacaaaggcgtcgtagggcaggttgtcgccgtggcgaaactgaccagtcgcgtactgctgatttgcgatgcgactcatgcgctgccgattcaggtactgcgcaatgacatccgcgtgattgccgccggtaacggctgcactgacgatcttcagcttgaacatctgcccgccaataccgatattcgcgttggcgatgtgctggtaacgtccggacttggtgggcgtttcccggaagggtatccggtggcggtggtctcctccgtcaagctggacactcagcgcgcctataccgtcattcaggcacgtccaaccgcgggtttgcagcgtttacgctatctgctgctgttgtggggagccgatcgtaacggcgccaatccgatgacgccggaagaggttcaccgcgtcgccaatgagcgcctgatgcagatgatgccgcaggtgttgccttctccggatgcgatggggccgccggcgccagtgccggacccggcgacggggattactcagccatctgcgggccagacggcgccggtatcaacgcaaccatcgccttcgggcgcgaccacgccgcctgcgcgtgcgccgggagggtaa

SEQ ID NO: 371954 - DNA, 1044 bp, Salmonella enterica
atgttgaaaaaatttcgtggcatgttttccaatgacctgtccattgacctgggtaccgcgaataccctcatttatgtaaaaggacaaggcatcgtattgaatgagccttccgttgtggccattcgtcaggatcgtgccggttcgccgaaaagcgtggctgcagtcggtcatgatgcgaagcagatgctgggccgtacgccgggcaatatcgctgcgatccgtccgatgaaagacggcgttatcgctgacttcttcgtgactgaaaaaatgctccagcactttattaaacaagtgcacagcaacagctttatgcgcccaagcccgcgcgtactggtatgcgtgccggtcggcgcgacgcaggtagaacgccgcgcaattcgtgaatccgctcagggcgcaggcgcccgtgaagtctttttgatcgaagagccgatggcggccgcgatcggcgcaggtctgccagtttctgaagcaaccggttcaatggttgtggatatcggtggtggtaccactgaagttgccgttatctccctgaacggcgtggtttactcttcttctgtccgtattggtggtgatcgcttcgacgaagccatcattaattacgttcgtcgtaactacggttctctgatcggtgaagccaccgcagaacgtattaaacacgaaatcggttccgcttatccgggcgacgaagtccgcgagatcgaagtgcgtggccgtaacctggcggaaggcgttccacgcggctttaccctgaactcaaacgagattctggaagcgttgcaggaaccgttgaccggtatcgtcagcgcggtaatggtggcgctggaacagtgtccgccggagctggcgtcagacatctccgagcgcggtatggtgctcaccggcggcggcgcgctgttgcgtaaccttgaccgtctgttaatggaagagacgggcattcctgtcgtggttgctgaagatccgctgacctgtgtggcgcgcggcggcggcaaggcgctggaaatgatcgatatgcacggcggcgacctgttcagcgaagagtag

SEQ ID NO: 371955 - DNA, 1941 bp, Salmonella enterica
atgcgattaacgacgaaattctcagcttttatcacgctgctcacggggttaacgatcttcgtgactctgataggttgctcgctaagcttttataacgccgtacagtataagtatgtcagccgtgtgcaggcgacggcgacagccattgatacgcacctggtgacccatgatattgtctcgctgacgccgcaaatcgacgaactcatgatcgcttccgatattgtgcgtgtcgatctgttgcagggggagcgcagcgtctacagccattctcgtgccagaggttatcggccagccggcaccagcgacatgtatcgcgagctggtcgtaccgctgataaaacatccaggaatgtcgctacgtctggcttatcaggacccgatgggtaactattttcactcactgatcaccacggcgccgctaacgctggcgatcggttttatcgttctgattttgtttttatcggtgcgctggctgcagcggcagctttccgggcaggagcttctggaaattcgctcaacgcgtattctgaacggcgaacgcggggcgaatgtccgcggttctgtttacgaatggccagcgcgcaccagtagcgcgcttgatgtattgctttccgaaattcagtttgctcacgaacagcgtagccgcctggacaccctcattcgctcctacgccgcgcaagacaccaaaaccggactcggtaaccgtctgttctttgataaccaactggcgacgctgctggaagatcaggaaaaagtgggagtgcatggcgtggtgatgatgatccgcttgccagacttcaatcttctgcgcgacagcctgggaggcaatcaggcggaagagcagatgtttatgcttatcaatctgctatcgacatttattatgcgttacccaggctcgctgctggcgcgttatcaccgcagcgactttgccgtgctgctaccgcatcgaacgctgaaagaagcggaaagtattgccggacaacttttaaaagctgtcgatgcgctaccggctaacaaaatgcttgatcgtgacgatatggtacatatcggcatttgcgcctggcgcagcggacagtccaccgagcaggtgatagaacatgctgaagccgcggcgcggaacgccgccctgcaggggggaaatagctgggctatctacgacgacacgctgccggaaaaagggcgcggcaatgtgcgctggcgcacattgattgagcagatgctgaaccggggcggaccgcgactttatcaaaaaccggcggtcacgcgagaaggtcgcgtacatcatcgggaattgatgtgtcgcatctatgacggtaaagaagaggtgagctcggcggagtatatgccgatggtgttgcaatttggtttatcggaagagtatgacagattacaaattagccgcctgattacgttgctgggctactggccggatgaaaatctggcaatgcagttgacggtcgagtcgctgattcgtccgcgttttcagcgctggttgcgcgatacgttaatgcagtgtgaaaaatcacagcgaaatcgcataattattgaacttgcggaggcagatgtttgtcaacacatctgtcggttacaacccatccttcgcttagtcaatgcgcttggcgttcgggtggcggtgacacaggcgggtttgacgctggttagcacgagctggattaaagcgctcaatgtggaattactcaagctgcatccgagtctggtcagaaacattgagaagcgaacggaaaaccagcttctggttcaaagtctggtagaggcctgcgcgggtacgcctacgcaggtttacgcgacgggcgtccgttcgcgcggcgagtggcagacgctgacaaaacgcggcgtggctggcgggcagggtgatttttttgcctcctcccaactacttgacacaaacgtgaaaaaatattcgcaaagatactcggtttaa

SEQ ID NO: 371956 - DNA, 975 bp, Salmonella enterica
atgcaggcgttgatcttagaacagcaggacggtaaaaccctcgcatccgtgcaacatctcgaagagagtcaactgccggcaggtgatgtgacggtggatgtccactggtccagcctgaattataaagatgctctggctatcaccggaaaagggaaaattatccgtcattttccgatgattcctggtattgatttcgccggcaccgttcacgcaagcgaagatcctcgctttcatgcaggccaggaagtactactgactggctggggcgtgggcgaaaaccactggggcggcctggccgaacgcgcacgcgttaaaggcgactggctggtcgcgctgcctgcgggactgagcagccgtaacgccatgatcatcggcaccgccggttttaccgccatgctgtgcgtcatggcgcttgaagatgcaggtattcgcccgcaagacggtgaggttgtcgtcaccggtgccagcggcggcgtgggcagcactgccgttgcattactgcataagctgggctatcaggttgcagcagtatcaggacgtgaaagcacctacggctatcttaagagcctgggagctaaccgtattctcagccgcgatgagtttgctgaatctcgcccgttggaaaaacagctatgggccggtgcaattgataccgttggcgataaagtgctggcgaaagtgctggcacagatgaactatggcggttgcgtggccgcctgcggcctggcgggcggcttcgcgctgccgaccaccgttatgccattcattctgcgtaatgtgcgtttgcaaggggtggactcggtgatgaccccaccggcacgtcgcgcagaagcctgggcgcgtttggttaaggatctgccggaatcgttctatgctcaggccgccacagagattacgctggcggatgcgccgaagttcgccgatgccatcatcaataatcaggttcagggccgtacgctggtgaagataaaataa

SEQ ID NO: 371957 - DNA, 1005 bp, Salmonella enterica
atgaaaaagatacgtccattaacagaagccgatgtgactgcggaatcggctttttttatgcagcgccgacaggtgctaaaagcattaggcatcagcgcggccgccttatccttaccctcaacggcgcaggccgatctcttcagttggtttaaaggcaacgatcgtccgaaagcgcctgccggtaaaccgcttgagtttagtcagcctgccgcctggcgaagcgatttagcgttaacgccggaagataaggtgacgggctacaacaatttctatgagtttggccttgataaagccgacccggcggccaatgccggaagtctgaaaaccgaaccgtggacgttgaaaatcagcggggaagtcgcgaagccatttacgctggattatgacgatttaacacatcgtttcccattagaagagcgtatctatcgaatgcgctgcgtcgaagcgtggtccatggtcgtgccgtggattggtttccctttatataagctactcgcgcaggcacagcccaccagccacgctaaatatgtggcattcgaaacgctatacgcgccggatgatatgccaggacagaaagatcgttttattggcggcggactgaaatacccttatgtcgaagggctacgtctggacgaagccatgcatccgctgactctgatgaccgttggcgtctatggtaaggcgttacccccgcaaaacggcgcgcccattcgactcatcgttccatggaagtatggttttaaaggtattaaatctattgtcagcattaaactcacccgcgaacgtccgctaaccacctggaatttgtcggctcccaacgaatatggtttttacgccaatgtgaacccgcatgtggatcatccacgctggtctcaggctaccgaacgctttattggttcaggcggtatcctcgatgtgcaaaggcagccgacgctgctgtttaacggctatgccaatgaagtcgcttcgctgtatcgcggtctcaatttgcgggagaatttttaa

SEQ ID NO: 371958 - DNA, 600 bp, Salmonella enterica
gtgcgtctgacagcaaaacagataacctggctaaaagtttgtctgcatcttgccggttttttgccgcttctgtggctcttttgggcgataaatcacggtggactcagcgcagacccggtaaaggatatccaacactttaccggcagaaccgcgctcaaatttttgctcgccaccttgctggtttcaccgctggcgcgctacgctaaacagccattattgatacgcacacgccgcctgttggggttatggtgtttcgtttgggctacgctgcatttaaccagctatgccttactggaactggggatacataacctggcgttgttaggaagcgagttgatttcacgcccttatttgacgcttgggatcattagctggctggtgttattggcgctgacgttgacctcaacgcaatttgcgcagcgtaaattgggcaaacgctggcaaacactgcataacgtcgtctatcttgtcgcgatcctggctcccatacattacctgtggtcggtaaagattttatcaccgcaaccggtcatctacgcggcattagcgttagcccttttagcgttgcgttaccggaggtttcgccagtggtggcgctag

SEQ ID NO: 371959 - DNA, 471 bp, Salmonella enterica
atggatattcgtaagattaaaaaactgatcgagctggttgaagaatcaggtatctccgaactggaaatttctgaaggcgaagaatctgttcgcatcagccgcacaacggcaaacgccggttttccggtgatgcagcaggcttatgcggcgccgatgatgcagcaacccgctctgtctaacgctgtcgcgccagcggctactccagcaatggaagcgcctgccgcagcggaaatcagtggtcacatcgtacgctccccaatggttggtactttctaccgcaccccaagcccggacgcgaaagcgttcatcgaagtgggccagaaagtgaacgtgggcgataccctgtgcatcgttgaagccatgaaaatgatgaaccagatcgaagctgacaaagcaggtactgtgaaagcgattctggtcgaaagtggtcaaccggtagaatttgacgagccactggtcgtcatcgagtaa
